United States Patent Application Publication US 2008/0034453 A1 - sequence listing, part 33

SEQ ID NO: 262088 - DNA, 333 bp, Glycine max
attgaagttgaagtcttgcccttctctcttcaactccaaacacaagacatcatcatgcatggctgcctccgtctccactgtcggagctgtcaacagagctcttttgaacctgaatgggtctggacctggggtttcagctcccagttcatccttctttgggagcagcttgaagaaggttattggctcaagggtccccaacacaaagatttcctctggaagcttcaagattgttgctgtagaagagaagaaagagattgaagagacccagcataccgacaaggacagatggaagggtcttgcctatgatatctcagacgaccaacaggacatcac

SEQ ID NO: 262089 - DNA, 406 bp, Glycine max
ccaagacttcactttgggacctgcttgagtccactctgacatatcagcacaggacatatgctgaagccgttaagaaagtcattgcaaaacccgttgcaagttaagctttttacagtgatggtgatgtgctacctttgagaagggtgttcttgtcttgcccaagtgttctgccatattatactggttgattttatataaaatcgtaaattttcctcctattggtttcgttagcctgtaggcaatatagcccccacatggagaagtaggaatttatacaagggcaatctgtgctctatgtaattttaatgtagagaccatgcgctgctaaacatgttgagacactttatatattacctagggaagacttttttctgtgtttttaaggatctctcgattcattgctttg

SEQ ID NO: 262090 - DNA, 411 bp, Glycine max
tgcagatccaccaaccgttatggctgccttcagcggtgatgaaacggcaccgtttttcggcgttccttggcgccgcagctgccctcgtcttctcctgtatgggagctgcctatggcacagcgaagagtggcgtgggcgtggcttccatgggtgtaatgagacctgagctggtgatgaagtcgattgttcctgttgtcatggctggagttttgggcatttatggccttattattgctgttattatcagtaccggtattaatccaaaggccaaatcctattacctctttgatggttatgcacatctctcttctggtcttgcctgtggcttggctggcctttctgctggcatggctattggtattgttggtgatgccggtgttagagccaatgcacaacaaccaaaactttttg

SEQ ID NO: 262091 - DNA, 455 bp, Glycine max
gtaccgtgtccggaattgacggatgcatccactctttctgtgtcttcagtttggtataaccttagccgaggtcacgaggagcactagctagcgtcacaatcatccaaatggctaggggattgaagaagcatctcaagaggctcaatgctcctaagcattggatgcttgacaaactgggtggtgcatttgcgcccaaaccctcatctggaccacacaaatctagggagtgccttcccctcatactcatcctacgaaaccggctaaagtatgctctgacttaccgtgaagtcatcgctattctgatgcagagacatgttcttgttgatggaaaagtcaggactgacaagacttaccctgctggtttcatggatgttgtttcaatcccaaaaaccaatgagaacttccgcctgctctatgacactaaaggccgattccgtctccattctgtcaaggat

SEQ ID NO: 262092 - DNA, 369 bp, Glycine max
tccactcgttcggtgtatttacctacctataccttcaagatgcagatcttagtcaagacccttaggggcaagaccatcacccttgaggtggaaagctctgacaccatcaacaacgtcaaggccaagatccaggacatggaaggaatccccccggaccagcaacgtctcattttcgccggaaagcaacttgaggacagtcgtacccttgctgactacaacattcataaggagagtactcttcactctcgtctccgactgcgaagtggcatgcagatcttcgctaagacactcaccggcaagaccataaccctagagggtgaaagcttcgactccatcgataacgtcaaggccaagattcaggacaaggaa

SEQ ID NO: 262093 - DNA, 435 bp, Glycine max
tcctgcgacaccagacagtgacagacagttcaatggtggtagcacagggaaaggaagaaggagtgttagcctcagttcactcaaccgtgttcaaagaatcagaaagccttgatggaaagtgtgttaagattgagggctatgatttcaaccgcggcgtcaattatccgttgctactcagctccatggtcacaactgggtttcaagcttccaacctcggtgatgccatccaagtcgttaatcaaatgctagattggaggctagttgatgaacccgtagctgaagattgcagtgaccaagagagggatttggagtaccgaaaatctgtgacgtgtaaagtgtttctgggtttcacttctaatcttatttcttctggtgttagagatactgcgaggtttcttcttcagcatcgcatggttgatgtagttgttacaacta

SEQ ID NO: 262094 - DNA, 332 bp, Glycine max
ctctttttgtttcttcagtttggtataaccttagccgatgtcactaggagcactagctaagttcacaggttccaaatggctcggggattgaagaagcatctcaagaggctcaatgctcctaagcattggatgcttgacaaactggttggcgcatttgcgcccaaaccctcatctggaccacacaaatctaaggagtgcctacccctcatactcatcctacgaaaccggcttaagtatgctatgacttaccgtgaaatcatcgattttctgatccatatacatgttcttgttgatggaaaaatcaagactgacaagacttaccctgcttgttt

SEQ ID NO: 262095 - DNA, 407 bp, Glycine max
cttaattaacaatcaaatgtttaaggaagaatttctatgacgattcgcaaccccatgcgaggaatccgtctcctccactccttctccgtcgtcttcctctactggttctacgttttctcatgaactaactccctctcaatcccctaccctaattcctccaatttccccattttttttctaattaatcagatttgcaaaatcctaatttctctatcctaacaaaaaccccaaattcaaacaaatccaatggcttcgattccgcgtccggcgagttcgggatcttcggagggaggaggagatccggctgcgatggacgagagaaagaggaagcggatggagtcgaaccgcgagtccgcacggcgatcgcggatgaagaagcagaagctgctcgaagacctatccgacgt

SEQ ID NO: 262096 - DNA, 392 bp, Glycine max
ttgacggatgcatccaggcgtaatcaatcacattctgtgagttggacacatgggccaagattccttctctagggtgagggacttggcatgctgaacctggcgttttagctgaagctctcaccacagccattcagggtggatacaggcatattgactgtgctagtgcgtataataatcaagcagagattggttctgctcttaagaagctttttgatgatggtgtggtgaaacgtgaggacttatggatcactttcaaactctggtgttcagatcatgcaccagaagatgtgccaaaagcattggataaaacattacaggaattgcgacttgactatcttgacctcgatctgatccactggccagtccgtatgaaaagtggtacatttggactc

SEQ ID NO: 262097 - DNA, 427 bp, Glycine max
  unsure (1)..(427): unsure at all n locations
cccactcgtcctacaagattgttttaccttgcttgacaaagatatgaccccaagacacatcacacaggccaaagctctcgttacgctgctggatcacgctctgaaaccgtgtgcgcgccatgaaacgctcgaagcgccgagtcatgattaggccgaactcgaacgtcataataaaattcctcttggtgatgcagaagcatgggtacattggtgagttcgagtatgttgatgaccacagggctgggaaaatcgtggttgaattgaatggcaggctgaataagtgtggngttataagccctcgctttgatgtcggtgtcaaagagattgaaggttggactgcaagactgcttccctcaagacagtttggttatattgtcttgacaacctctgctggtatcatggatcatgaagaggctttgagaaagaa

SEQ ID NO: 262098 - DNA, 406 bp, Glycine max
acgcgcgattatacaaattttacgtatacacaaatgctacattgtagcgcaatgtattgatacgcgtacacccagtatgttaagatgagagcgggtccaagacgcgtatggtaggaaaggggttgtgtgatttttgaagaatcgcgtttgggagtagtcggagatggagctttcgactccgaattcttcctcgaagcacttgtccatcacgccgggttctagggttttgagaagccctctctccgacgaacagatctggaagcgcctccgtgacgcttgcttcgacgaggaatcgattaagcacaaagacaaagctgcgcttattgcttacatcgccaagctcgaagctgagatatatgatcaccagcaccacatgggccttctcatattggagaaaaaggatttg

SEQ ID NO: 262099 - DNA, 434 bp, Glycine max
cttttatgaaattgatctgaacttcttttccattcttaattcatcttcaatcagcatggagaagatcacttcctctcaatttcttctcttcctttcactccttgctttatggttcacatcgattgcttttggagctgataccactcacccagaagaagtgcaagctctgaaagatatgggcaagacgcttggtaagaaggaatgggacactgacatagatccatgctcaggacaacctccctggttcacatctaaggagaacaacaatgtcacttgcaattgcactatccccggtgaaaacttctgccatgttgtaataatattgctgaaatcacaaaatcttcgaggcatgctcccacgcgaactgataaggttaccttaccttgaagaaattgacctcacacaaaactaccttaacggtactatacctaccc

SEQ ID NO: 262100 - DNA, 424 bp, Glycine max
  unsure (1)..(424): unsure at all n locations
caaaatgggtggatcagtgagggacgtgaagtcgaagggcgaggtcgacgaggtggtggcgagtggctctccggttatcctccacttctgggcgtcgtggtgcgaagctttcaagcacatggaccaactcttctctcacctttccactgatttccccaacgcccgcttcttaagggtcgaggccgaagagcaacccgagatttctgaggcttactccgtctccgctgatcctttctttgccttctgcaaggatgggaagacctttgatacattggaaggagctgatccgtcaagcttagccaataaggttgctaaagtagcaagctcaattaaccctggagaatctgcatctnctggcagtcttgggatggctgcaagggcttctgttcttgaaacggtgaaagaattagcaaaggacaatgat

SEQ ID NO: 262101 - DNA, 313 bp, Glycine max
tctctctctagcttggacgagtgaattagattcatcatcaagatgtcgtctctgatagcggaagatgtgaagagcagatcagaggtgtaccacggggacgaaatgtgccaagtgaagtccaaggagcttctcaaggaaatcgccctccccaacggccttcttcccctcaaggacatggaggagtgcggctacgacagacaaaccggcttcgtctggctcaaacaaaagaagagttacacccacaagttcgacaagatcggaaagcttgtcttctacgcgcccgatgtaactgctcatgtccaacaaggtaaaa

SEQ ID NO: 262102 - DNA, 413 bp, Glycine max
gaattctctaaaagagatctttttctgctctttgaagaaagaagggtctttgcttgattttggagatgtctctgctctcagatctcatcaaccttaacctctccgataccaccgagaaggtgatcgcagagtacatatggatcggtggatcaggaatggacctgaagagcaaagcaaggactctcccaggaccagttagcgacccttcagagcttcccaagtggaactatgatggttccagcacaggtcaagctcctggtgaagacagtgaagtgattttatacccacaagccattttcagggatccattcagaaggggtaacaatatcttggttatctgtgatgcctacactcctgctggagaacctattcccactaacaagaggcacgctgctgccaaggttttcagccat

SEQ ID NO: 262103 - DNA, 273 bp, Glycine max
gaaatggcgatggcaatggcgcttcgcaggctttcatcttcaattgacaagcctctgcgcgctctcttcaatgccggttccctctactacaagtcgtctttgcctgatgaagctgtttacgacaaggagcgacccggagttacatggccgaagcagttgaatgctccacttgaagtcgtggatcctgagattgctgatattattgagcttgagaaagctaggcaatggaaggtgctagaattgataccgtcagagaatttcacctctgtgtct

SEQ ID NO: 262104 - DNA, 357 bp, Glycine max
acatggcgtaggtcgagttccaagatcagacgcctggtgtgatggtactcaatctccgatggacacacgcactcgaagcatgtgggtgatgcgcataggctctggctgcactctgctgtgcaaaggcacatgttgttagagaaagaatactaaaatgagtcgcggaagaagaaaacgagctcgctaagggaagagtgcaagcagtaatcttagacatgagcaaccgtgatgaatggtgatacttctgggattctaatactggaggaactgcacatgaggtagctgtcgcgtggcatacaattggctatggtgaaccctaggtagctagtgattcacaagcttcaagtggcacatttt

SEQ ID NO: 262105 - DNA, 302 bp, Glycine max
cccacgcgttcggatggttaggactctgtatgctgataaagacaacactcataccgttgtagagaatgatgctgcttgccatgttgcttaatttagttcttgcttcctttgtcttcttgagttttatcagagacggtagtgcagggatcactatctctttcattcagtcagagttgcctgcagttgacattcctcttgatcatgaaacattttcagttccaaagggttataatgcaccttaacaagtgcacattacgcaaggtgactatgatggaaaagcagtaatcatctcatgggtgacc

SEQ ID NO: 262106 - DNA, 166 bp, Glycine max
gtctgattgatgatgccgaagaacaagggtatagggaggtcagaacagtaagagtggtaagaacgaggctgacgactagaagcgatagctgttgttcaaggagcgacgggcaggactacgcgcatgtgctccggatgcttatgaacggtctgtacgaggcgatgtg

SEQ ID NO: 262107 - DNA, 420 bp, Glycine max
  unsure (1)..(420): unsure at all n locations
ggtgaatcgaggtggttctaggatcatcaaatcagtgtctgcagctcttggtacgaggttttacgccaaggttgcaacagggactgacatagtctctgccgcacccaatgtttctctccagaaagctcgtacctgggacgagggcctggcttccaagttctccaccactcctctcaaagacatcttcaaggacaagaaagttgtcatctttgggctcccgggtgcatacacgggagtttgttcaaacaaacacgttcctncttacaaggagaatattgataagtttaaggctaaggggatagattctgttatttgtgtggctattaatgatccctacactatgaatgcgtgggctgagaagcttcaagccaaagatgctattgagttttatggggactttgatgggagctttcacaaaag

SEQ ID NO: 262108 - DNA, 325 bp, Glycine max
acggctagaggtttggtcgacgcgcttgtcgacaacagcgcgctcgagctcctcgtgcagaagctgcaccgcttgaacgattccgatcccgacaagaacgccgccgtgtacggttccctcgccacggtggagaatatgatcgaggtgaagcccgcggtggcggagctggtttgcgagaagacgaagttgctgaagtggcttctcgggaagataaaagtgagggagtttgacagtattaagcagtatgcttccgagattttggcgattttgctgcagagttgtactgtgaatcagaagactctgggacagatgaatggggttgatg

SEQ ID NO: 262109 - DNA, 432 bp, Glycine max
  unsure (1)..(432): unsure at all n locations
aattaattcccagggagttaatatctatattcaatgacaaagagctggaattattgatcagtggacttcctgatattgatttggatgacttgagagcaaatacagaatattctggatatagtggtgcctcaccagttatccaatggttttgggaggctgttcaaggtttcagcaaagaagacaaagctagattgctgcagtttgtgactggcacatccaaggtgcctttggagggttttagcgctcttcaaggaatttcaggtgcccagaggtttcagatacataaggcatatgggagttctgatcacttaccttctgctcatacttgtttcaatcaattagatttgccagagtatccatctaaacaacatttggaagagaggttactgcttgccattcatgaagcanatgaaggattcggatttggttgac

SEQ ID NO: 262110 - DNA, 413 bp, Glycine max
  unsure (1)..(413): unsure at all n locations
ctttgggtggatacatttcttccaatagaaagcagattgaagctgcttcagccgaagccactattgaagctacggcccaaggcattgcctcagtgctttgcgctcatggtccagaggtagagtggagaatttgtaccatttgggaagctgcttatgggttgattccattaaattcctcagctgttgatcttccagaaattgttgttgcaacaccacttcaacctcccatactctcatggaatttgtacatacccctactcaaggttctggaatatcttcctcgtggtagtccgtctgaagcatgtctcatgaaaatatntgttgctacagtggaagctattcttcagaggacatttccagctgagtccactagtgatcacaagaatanaaacaggatactattgtgtggggtc

SEQ ID NO: 262111 - DNA, 320 bp, Glycine max
cgaaggactttaggttgggatttgggaattagggttattcgcgtggcgaagatgattgaggtggttttgaacgatcgattggggaagaaggtgcgcgtgaagtgcaacgacgatgataccatcggcgacctgaagaagcttgtggcggctcatactggcacaagagccaccaggatctcgatccaaaagtggtacaccatctacaaggatcacatcactttaaaggataacgagatccatgacggcatgggttctcgaactctactacaactaaacacaacaaggtgtggtttatgcgtaatatactatgtgctggaaat

SEQ ID NO: 262112 - DNA, 386 bp, Glycine max
gctatacttgttccttttgaaggttagaagtgctacaatacaaacaatggcagctactcaggaagatgtgaagcttttgggtattgtgggaagcccatttgtgtgcaaggtccagattgcccttaagttgaagggagttgaatacaaatttttggaagaaaatttgggcaacaagagtgatttgcttctcaaatacaaccctgttcacaagaaggttccagtgtttgttcacaatgagcagcccataccaaagtcttttgggattgttgaatacattgataagacatggaagaccaaccctattttactttctgatccttaccaaagagctttggttcgtttttggtccaaattcattgatgataagggaactcaacatttcaaaa

SEQ ID NO: 262113 - DNA, 429 bp, Glycine max
gctcctctcacattctccttcttcttcatccttatctcttacatttcttcatcatcaggtggaaacatctcccacttctcttctttgagtttgtatttgaatttcgtcttaccaacatgaactctagttgtaattagaaaataacacttatgaaactgcatgtaaattttgttgcttcatctcattttgcatttgaaagttgtcaactttctgacgggctttgcagaagcgggatcaatcggaataaactatggaagaattgcgaacgacctacctacaccggcgaaagtggtggagcttcttaagagtcaggggctgaaccgtgtgaagctctacgacaccgacgccaccgtcttaaccgcgtttgccaactcaggaatgaaggtggtggttgccatgccaaacgagcttctcgccaacgccggcgcg

SEQ ID NO: 262114 - DNA, 425 bp, Glycine max
ctcgccgccggcggatcctccgtcttcagaccagacgaccccgtcggaggcgaagcgcgtggtgaaccgctgctccggctgcaggaggaaggtcggactcaccggatttcggtgccgatgcggcgagctcttctgcgccgagcaccggtactccgaccgccacgactgcagctacgactacaaagccgccggaagagaagccatcgcgagggagaatccggtgattagagccgcgaagatcgtcaaagtctgaaaaaaaacaaaaaagaaggaaaaaacccgaacggaacggaatctcaaaacgacgtcgttgacggttgacctttcgcgcgatcgggttcaggtcacgggtttcgctttttttcttttcagatttatatatagagagaagaaaaaaaaaggtgcagataacagggttgagagag

SEQ ID NO: 262115 - DNA, 430 bp, Glycine max
cactctcatcagattcgggtcgggttagcgttatcggataacttcgcccatagattctgtgtttacggggcgaaaatgacagtattcttagccacgaggctcgtgttgcggagatccccgccgcttctctggcggcgcagcttttctcgggcggcggtagaggccgaaaaggacactgttgccgtgccgtcgcttccgttgttcgattactctccgcctccgtatgcggggcccaccgctgacgagattctggcaaagcgcagggagtatctgagtccttccatcttgcacttctacaagaatcccgtgaacatagtggagggtaagaagcagtacctgtttgacgagaaggggagaaggtacgtggatgcgtttggagggattgctacggtgtgctgcgggcactgtcaccctgatgtggtccaagcca

SEQ ID NO: 262116 - DNA, 295 bp, Glycine max
ctttcaagatgcagatcttcgtcaagacccttaccggaaagaccatcacccttgatgtgggaagctcttacaccatcgacaacgttaaggccaagatccatgacatggaaggaattcccccagatcagcaacgttttatatttgccagaaagcctctcgaggactgtcgtactctctcctactacaacatccagaaggagtcaacccttcaccttgtacttcgtattccgagctgcatgcagatcattatcaagactctcactggcaaaaccataacactagaagtcgaaagctc

SEQ ID NO: 262117 - DNA, 394 bp, Glycine max
tgtttccttgatgatagattggagatattacgtttgtacccagctgcaccacggaatgtgccacacgagtcctaagaagatgcaccggggggtggatatcatgtccaaactggcacgcctcttgtggactaattttcaaaactttaacgagacccttcattataccctaatccattagaattttggccagagagattcttgacaacccacaaggatgtagacattaaaggtcaacattttgaattaattccatttggggcaggtagaagaatgtgccctggaacttttttcggtcttcaagtaatgcaactaacgcttgctactctattgcatgggtttgacatttgaactagtgattgggaacatgtccatatgcctgaacaaattggactta

SEQ ID NO: 262118 - DNA, 438 bp, Glycine max
gcttgagagaaaaaatattccatttccagaattagtagcactagtgctctcttttgtttcgaaaaaaatggttcaacaggaagtgcgtaaaggtccttggacagaacatgaagacttcaaattggtgtcctttgttggattgtttggaaaccgtagatgggactttatagcttaggtatcacgtttgaaggtggctggagaaagttaaatatgcattagactaaaaaaatcaaatgcttatttgggcatcatgctacaaaaaaatatagattatggaagaagaagcctttaaccacctcattttgctgtacgtttgaatcgaacaggttagagttgcagattaaggtgggttaattacctacatgctggctctaagcgtgtaaagatgaccccttaggaagaacgccttgtattggaacttcacttaaaatgggggaa

SEQ ID NO: 262119 - DNA, 421 bp, Glycine max
ctcacgcgttcgtcgacacgttcggtctgaagcaaccatggcaatggcagcgcaagcctagctcttaaccacacccgtgtgcggtctcaaagccagcgaccagtcctacgtgccatggaagcaaaactccagcctctgcttctacagcccgaagcccctcaagtgctgcacaacaatcagagcagcagccgccgacgagaccacagaggcaccagcaaaagtagaggctgcaccgctcgtggtcaccccaccagaactttgacccaaacaccccttgcgcgatctttgggggcagcaccggcgggcttctgcgcaaggcacacgttgaggagctttatgtcattacgttggactcacccagagaacagatctttgaaatgcccactggcggcaccgctatcatgagggagggtcctaacct

SEQ ID NO: 262120 - DNA, 400 bp, Glycine max
ggaaaaatatatagcttctacatcatggcatcgggcacttcaaattccggactatgctgtgtccttggatgataaagaccacctctttgccaaggttgtgagccagaaagatagtagcttaacacatatagtgtggaatccaggatctgaatttgcattctgtgattgttcttggtcaatgcaaggtaacctttgcaagcatgttgtcaaagtaaacatgatttgtgaaaatcttaaaggttatcaaccatccatgtctttccggtcttttcaagaggttttgatggatctatggaaaaagccagtggatgattcttttgcgttggatctgtcattggcttggacccatcagatgctagatcaaattcaaaaacaagttgaactgaataattctactgat

SEQ ID NO: 262121 - DNA, 411 bp, Glycine max
ggcatggaatgctctttatgactcgctcttggaacgttgctgttgattcttgattgttgtctatctcaactttacgtctgaagtgtcttttgagcaaggtgatgggtctggaaaagaatcctcttgtgtttttcgatgtctcaattgatggggaccctgtggaaagaattgttattcagctttttgccagtatagttcctaggacagcagagaattttcgggcactctgtacaggtgagaagggcattggagaattgacggggaaacctttgcattataaaggaacaagctttcatcgtataattagaggttttatggctcaaggtggtgatttttcaaggggtaatggcacaggtggagaaagtatatatggagggaaatttgtagatgaaaatttcaaactaacacatg

SEQ ID NO: 262122 - DNA, 365 bp, Glycine max
cccacgcgtccggttccgttgctgccatagttttagtatcatcactttatcatactcatgggaaactgtttcagaaagacagcagctgatgacaacaagattcacaagaatgagtataagactcccaccaccaataatccacgcccttctcccccagagagattggtgaaggaaacagtggaagaaagaggtgagcgtccacaaaacaacagcgttccaaagcttataaagtacacgttggatgagttgagaagtgcgaccagaaacttcagaccagacacggtcctaggcgagggtggttttggacgtgttttcaaagggtggattgataagaacaccttcaagccctcaagagttggtgttgg

SEQ ID NO: 262123 - DNA, 366 bp, Glycine max
atcaattcaaataccagaggtaccactctctacttcatcgtaattcagatctcaatgaccacactctcatctttgacgtagaaggtgcgttgttgaaatcctcttcagtgttcccatttttcatgctcgttgcgtttgaagcatgagggttattaagagctattgttctgcttttagtgtacccttttgtttgtttagttggagatgaaatggggttgaagatgatggttatgatatgcttctttgggatcaaagaagagagtttcaaagtgggaagaacccgtttgccgaagtttttgttggaagatgttgggtcaaaaatgtattaagtggttaaaagaagttgccaaaaagtgggggttaacc

SEQ ID NO: 262124 - DNA, 427 bp, Glycine max
cacctatgcatatctgaagcctttgtttccatgaaagggaagggttatcagtgccgtagagatgctcacggagggttccttgatccatgaaatcgtaaaccagtatcatctcgttgttctcgtagcaataaccgatgagggaaacaagatggagatggcgaagttgagacagcatttcgatctcgttcaagaactcgttcagaccttgttgagaaccgggtttgagccttttgattgcgacacatgttgaaccgtcgtcgatgtagcctttgtacacgttgccaaagcctcccaatccaaccacaaagagttcgtcgaagttgttggtggcggctctgatttctgcgattgagaacttacggcagaggttggttggtagcgatgatgagccaccgtctcgagaagttccaccttttttattggaacc

SEQ ID NO: 262125 - DNA, 357 bp, Glycine max
aagccccataacattctactagatgaaaacttcaccccaaaggtctctgactttggattggcaaaattatatccaatagataatagcattgtcccaaggacagcagcatgaggaacaattggatatatggctccagaattgttttataataatattgggggaatatcccataaggctgatgtttatagctatggaatgttgttgatggagatggcaagcaagaggaaaaatctaaatccccatgcagagcgttcaagtcaacttttctttcccttacggatttataatcatattggagatgaggaaagatatagaaatggaagatgtcacagatgatggaaaagaaaatgattatag

SEQ ID NO: 262126 - DNA, 389 bp, Glycine max
gaaaaaccaaagaagattgaccatggcttcttcattgaggatctcaaggctcctctctcgttcttttctttctgctttcactactactcctttgttttctagaggcggtagtggtgctcttggtgcagggctcagtaaattcagcactgctgctgccattgaagaaccaattaaaccaccacttaaagttgaacacacccagctcttaattgatggaaaatttgctgatgctgctactggcgaaacttttccaacgttggaccccaggacaggagatgtgatttctcatgttgctgaaggtgaccatgaagatgttgatcgagcagttgcaactgctcacaaagccttctaccgcggaccttggccatagatgacagcctatgtaagac

SEQ ID NO: 262127 - DNA, 443 bp, Glycine max
ataagcacaagagtagctgggacttatggatatatggctccagaatatgcaatgcatggggatttgacagacaaagctgatgtctatagttttggagttgttgccttggaaattgtatctggaaagagcaataccatccaccgatccaagcaagaagcattgcatcttctagattgggcacatttattgaaagagaagggtaacctaatggagctagttgatagaaggttaggttcagatttcaatgaaaatgaggtaatgatgatgatcaaagtggcgctcctatgcaccaataccacttcaaaccttaggcccaccatgtcatcggtgcttagtatgctagaaggaaaaactatgattccagaatttgtttcagatccatctgagataatggatgaaatgaagttagaggcaatgcgacaacattactttcaaaaagaaaa

SEQ ID NO: 262128 - DNA, 204 bp, Glycine max
cccacgcgtccggtttttcaacaaatcagttcaggaaacgtcacttcaggtttgaaaaatgttactaatgatatgaagactaagaatcgcaccgatagaactgagttgttggggctattgaaaaagaaacttctgcaagttcacgtgtgttttctaaagctggacctctcaaatttgaacttcaaatgggccgcaaatgggtta

SEQ ID NO: 262129 - DNA, 415 bp, Glycine max
gtgatacttgctattaacgatttcttggccctgatattttctttaatcctgatatatagggcatgtgactttaccacccctttgtcagttgtaataaacaagtgcattcagtctgcgccaattgacacatggagatcattatacaataatgtactgtagtctggaggttcaaccatgttcaaggatattcacaggaagttgcaacgttatctaaaaaaaatagagaatgctcgtgtccttttatctgaagcgcgcttgaatggtgagataaaatctcagccagcatatgtcaatgtactcatcaatccaatccagagatattcagtttggcttggaagatcagtacttgcgtcaacacctgatttttttactgcttgtcatacaaaggcagaatattaagagtatggagcaagca

SEQ ID NO: 262130 - DNA, 425 bp, Glycine max
cttcgtacaccgtggtggatcatacttatgatgctgttgtcgttggtgctggtggcgcgggattgagagctgctattggactttcagaacatgggttcaatactgcttgtattaccaagctcttcccaactcgttcacacactgttgcagctcatggcggtataaatgctgctttgggaaatatgactgaagatgactggaggtggcacatgtatgacactgtcaagggaagtgattggctaggagaccaggatgccatccaatatatgtgtagggaagcacctaaagcagtcattgagctagagaattacggattaccattttcccgaacagaggatggaaaaatatatcaacgtgcatttggtggtcaaagcttaaactatggaaaaggtggtcaagcttaccgctgtgcatgtgctgctgat

SEQ ID NO: 262131 - DNA, 381 bp, Glycine max
cccacgcgtccgaactagtctaagcagaaatggcctcttcagtgatggcatctgtggccctcaaacctgcccctttcactgttgagaagtcctcagttagaggccttacctccctctcaaggaactcctcttcattcagagttgtggccagtggtggcaagaagatcaagactgacaagccttatggaattaatggtggcatggctttgagggaaggagttgatgcatctggcaggaaaggaaagggaaagggcgtttaccagtttgtagacaaatacggtgctaatgtcgatggttacagtcctatctacgacaccaaggactggtctccaaccggtgatgtctacgcctgcgggtacgactggcttggctatctgggct

SEQ ID NO: 262132 - DNA, 370 bp, Glycine max
caacaatgccagtactatctgttgtgatcccccgacttaagacaaaccagctaaagtggagctttagtggagcttttgaggcaagacaatcacttattgtgagaggtctctttcctatgcttgcagatcctcgacatcctgctgaatcaacaagtgcaacaaatgagtctattcttaaagttgcccttgatcatggaaaagcattgggagttattaagtcacatgaccgggtagttgtttgccagaaacttggtgatgcatctgtggttaagattattgagcttgaagattaaactattaaagcgcattcaaccaactacagttttagtgttatttaattaattttacaactttgcctagttatttaaag

SEQ ID NO: 262133 - DNA, 238 bp, Glycine max
gtttcttcttggatcttaccctcttgtttgctaatattctcattcttctgtctctgcttcgtctccttctgaactaagagatggggttgtctttcaccaagctttttagccggctctttgctaagaaagagatgcgtattctcatggtacgtcttgatgctgctggtaagactaccatcttgtacaagctcaagctgggagaaattgtcacaaccattcccacaattggattcaatgt

SEQ ID NO: 262134 - DNA, 435 bp, Glycine max
gtctaaagcaaccacttgattacacacttgtatcgaacagtgcatctatggagattgacgaagatggtcccatctatggttggctaccaacagcacctcaaggttataaagctgtatgctatgttgtcaccacaacacccactaagccttcacttgacaaaatcaggtgtgctaggttagacctcactgaccaatgtgaggcaaattcattcatttggggttcagacaacttcaattattatgattgtagaccaagcaatagaggaactcatgcacctggtgttagagtaggcacctttgttgcacataatgggagtcctaaccctgcatctattgtttggttgagaaacaccgacgctttaccaaaatacatgcctaatctaccacaaatcaaggcaattctgcaagtttactctccagacatgtccttggcac

SEQ ID NO: 262135 - DNA, 338 bp, Glycine max
cccacgcgtccgcccacgcgtccgcctgaatggggaagcacaggccctactgatgctggacagtataacaactggccagaagacactcaatttttccgcaaagaaggtggaggctgggatggtccatatggtgagtttttcctcacctggtactctcagatgctgttggaccacggtgacaggattctctcatcagccacgtcaatctttgacaacactggagtgaagatctcagtgaaggttgctggcattcactggcactatggctcaaggtctcacgccccagaactgacagctaggtattacaacacccgggtttcgtgatggctacattccca

SEQ ID NO: 262136 - DNA, 452 bp, Glycine max
  unsure (1)..(452): unsure at all n locations
ctgaaaacaatcccgcttggattttcgtgactccctcgaacgcaatacctaataatacaatgtacctcgatctgaagacaatctcgttccccctcaccacgcaaaaccccgtcgttcccttcattgcgccaaccgtggttctcagcaacaccgccagccgctctagaggtgatgaaaaggattgctgaagaggtgatgtcacagaaccatgagaaggcatctgttcaacgaaaaaaaagggaaaagtacagttgaagagatcgaaatataatgaaaaagttactggttgaccgtggtgcaattagatttgtcttggcgggtgcaaacataatgtgtcccggtcttacatctnctgggggtgtttaggatgaagatgtaagggcaaaatgccctgtggccatcatggctaaaggaaaacagcattctcttgctattggctttacaaaaatgtc

SEQ ID NO: 262137 - DNA, 263 bp, Glycine max
cacaaagtcacaatggacctcctatatctcttctgcaccggagccctgctcgcccgccgcccgtactggttcgaaggcggtataggccccatccaaccaaaaggccaaccccccaaccatcttttcggcgggttcattttcggccagaaaagtcaagaccacttccaacaagaccggtccttctttcggcgcccaaaagagatccagaccgccgacaaaattcccgactttttcgacaccttctacaaactagtcacagacat

SEQ ID NO: 262138 - DNA, 237 bp, Glycine max
cttgcggctagggttatagcgcagcttcttatatgtttaaggaagatgggtaaggaaaaggttcacatcagtattgcggtcattaggacatgtcgaagatgggatatccactaccactggtcacctgatttacaagcttggaggcattggacaagcgtgtaattgaaaggtttgagaaggaacctgctcagatgaacaagaggcctttcaaggatgcctgggtcctgaacaaactta

SEQ ID NO: 262139 - DNA, 393 bp, Glycine max
cccacgcgtacgtccacgcgatcgtccacgcgtccgcaagtatgttggggagctatggcgcgggaagcagtctgatgttgtgagagtcttgcatcgggtgaggtgctgggagtaccgccagcaaccttctattgtccgtttgacaaggtctactcgcccagacaaggctcgccgcttgggtttcaaggctaagcagggttatgtgatttaccgtgttcgtgtacgaaggggtggccggaagagaccagttccaaaaggtatttgttatggtaatcccatgaaccaaagtgttactcaactgaaatttcagcgcaacaagaagtctgttgccgaagagccagctggaatgaagttgggtggccttaaggttctcaattcatactgggtgaatga

SEQ ID NO: 262140 - DNA, 406 bp, Glycine max
cccacgcgtccgtgaagattccgcaacagagagtagaaaagatggcgcggttgatcacagtggtgtggtgcgcggtggcggtgctactgtgcgccgcggcgggcgcgtcgtgggtggaggaggcggcgaacccgatacgaatggtggcgggggtggaggcggaagtggttcgggtgatagggcagtgccggcgcgcgctgaagtttgctaggttcatgagcaggttcgggaagagttaccgaagcgaggaagagatgatggagaggtacgagatattcttggaaaatctatggtgattcggtcccacaacaagaacccgttgccctacactctctctgttaatcattttgctgattggacttgggaggagttcaaaagacacagactaggctgctgccaaaattgg

SEQ ID NO: 262141 - DNA, 364 bp, Glycine max
aaaaaaaaaaatttttgtataaatttttatttttaaaaaataaaaaaagttaaaattattattggttaaatttttatttttttatgttttttatcttttctatttatagtatctaagtttatttccctttccttgcaattactaactttttttttagggtaacctaatttaatttcacttacttcccttttaaaacgttttgattgtcaataccttgccttacccaaattaaatccctttccatcactttttcttttgcttacctgtttttattttattttatgtccctttcctattttcctttccatacatttccctaatttgaatttttactggaccttccctttttccttaatttaaaccc

SEQ ID NO: 262142 - DNA, 316 bp, Glycine max
taacacacacaaacagagagctatgtacgatcaaattaattaagatgggggaagtgaggaacagacaagtggttctgagggactatggaagtggttttcctaaggaatccgacatgaacatagttgaaggaaccacaatattgaagcttccacaaggttccaatgatgtgcttctaaaaaatctctacctttcctgtgacccttacatgagaatgctcatgaccaaagtggaaggccttgacgtgtttggcacctatacacctggctcttcatttacagtgtatggagtgttcaaagttctagaatctggacaccc

SEQ ID NO: 262143 - DNA, 445 bp, Glycine max
ggcttctgcagaagtagagttccgatgctttgttggtgggcttgcttgggccaccgaccacgatgctctcgagaaagccttctctcaatttggcgaaatcgtcgaatcgaaggtcatcaacgatcgtgaaactggaagatccagagggtttggatttgtgaccttcgccacagagcaggcgatgagagacgcaattgaaggaatgaacggccagaacctcgacggtcgtaatataaccgtgaacgaggctcaatcccgtggaaaaggtggcggcggcggcagctgcggctacggaagaggtggtggtggttacggtggcggcggaggttacagccgcggtggaagaagatatggtggcggaggaggccgccgtgaaggtggttataaccgcaacggtggtggaagaggatatagtggcagtggcggcggatatggaggtggtgga

SEQ ID NO: 262144 - DNA, 440 bp, Glycine max
gaaaaagaagcccttgctgcagaaggggggtggacagttgttgtgcaccataagggtagaaagaaaactactgattctgagagtggaattgcagtgggctctgttgctcaagctgctgtagagaataaaatgaccaaaaagaaacataaagaagttggtcaagatttctatcgctttcaaagaagagaagcacagagaaatgaaatcatgacactgcagagcaaatttgaggaggataaaaaacgtctgcagcagatgagagctgccaggaaatttagaccttattagacaatgtttttggcgtacaaggttcacagtaatttttttggtggatttggcgtacaaggtacttatgtagtcttgaacttgagttatgccattgctcttaaattcaaaacgaaagttcatttatcattccaattttgtcgaaagtatttgta

SEQ ID NO: 262145 - DNA, 404 bp, Glycine max
tctctctctctctctctctctgttgcaaaattcgttcccctatctttctgcgtttcgagttgttgctaaagagtgatggactcaccgcccagtaatcaccacgccgtcgacggagacgccaacgacctcgttagacccttttcccaccgcgacgacgacggcaaaccccaacccctcaccggcgacggcgccagtcccggaaagatattcatagggggtttagcgagagaaacgacgattgcgcaatttcatcaagcactttggtaaatacggtgagataacggattccggtatcatgaaggaccggaagaccgggcagcctcgcggtttcggcttcataacttacgccgatccctctgtggttgatacagtgattgaagacactcacattatcaatggcaagc

SEQ ID NO: 262146 - DNA, 362 bp, Glycine max
cccacgcgtccggccaatccgggtaagtcccatgggtcgtatttgtagagagaaagagtggtacttcttttcaccacgggaccggtaatacccaaacggttcgaggccgaaccgggcggctggcaccggttactggaaggcaaccggggcggataagcccattggtcagcccaaaccggttgggattaaaaagctttggtgttttacgcagggaaagctcctaaaggggacaaaagcaattggatcatgcacgagtatcgtctcgcagacgtagatcggtccgttcgctaaaagaacaccctaagggtggatgattgggtgctttgccgtatttacaacaagaaaggcacgatcgagaaact

SEQ ID NO: 262147 - DNA, 440 bp, Glycine max
cccacgcgtccgcccacgcgtccgggaccaaacagcatccgcggcagcgacggtaaccctgcaacaacaacacttccgctgcgaaaaatgtctctggtggcgaacgaggatttccagcacattctgcgtgtgctgaacaccaacgtggatgggaagcagaagataatgttcgcaatgacctccatcaagggtattggaaggagattcgccaacatcgcttgcaagaaggctgatgttgacatgaacaaaagggctggtgagttgactgctgctgagttggatagtgtgatgactgtggtggcgaaccctaggcagttcaagatcccagactggtttttgaacagaaagaaagattacaaggatggcaaatactctcaagttgtgtctaatgctcttgatatgaagctcaaggatgatcttgagagactcaagaaaatcag

SEQ ID NO: 262148 - DNA, 410 bp, Glycine max
agctttggctacagccctcgcaaatgctccatcataacagcagaggactatgctcggtgaagctttatacccacttgtggatcatctggaacatgatactgctgcaaaggttacaggcatgcttctggagatggaccagcctgaagttttacatctgattgagtcaccagatgctctgaaggcaaaagttgctgaagccatggatgtgttgagaaatgttgctcaacagcaaaccaacccagctgatcaactagcctcactctctctcaatgacaatcttgtgtcttagattccgttagtcatttgacaagaatctgtacaccagttatttctatcccgtacgctacccaccagtttatttgcaggtgtcttagatgttttgttttagtcagagtactaaaggagtttat

SEQ ID NO: 262149 - DNA, 222 bp, Glycine max
gacgaacagaccagaactgttgtcagtgggtttgtgaaatttataccactcgatgaaatgcggaaccgaaaggtcggtgttctttatatcctaaagtcagttttgatgatgggcattaaatctcaagcaatggttcttgctgcttccgatggtgatcacaccaaggctgagttggctgagcctcccagttctgctcatccatggtaatggattacattccct

SEQ ID NO: 262150 - DNA, 380 bp, Glycine max
  unsure (1)..(380): unsure at all n locations
cttctacattttcagcttcctcaagggcatttcgctcttcactctaattgtcttgattggcactggctggtccttcctcaaacccttccttcaggataaggaaaagaaggttctcatcattgtcatcccccttcaagtcattgccaacattgctcaggtcgttattgacgagagtgggccctttggccatgactgggttacctggaagcagatcttcctccttgttgatgtcgtctgttgttgcgctgtgctcttccccattgtctggtccatcaagaacctccgtgaggccgctaggaccgacggcaaagctgctgttaatttgatgaagcttactctcttccggcactactatgtcngtcgtatctggtacatntact

SEQ ID NO: 262151 - DNA, 412 bp, Glycine max
ggacaatgctgctgtgccgggtctagaacatttgtacacgaacgtgtgtacgatgaatttattgagaaagcaaaggcacgcgctttgaagcgtgctgttggtgatccattcaaggggggaatagagcaaggtcctcagattgattcagaacaatttcagaaaatactgaagtatattagatccggtgttgaaagtggagctactcttgaaaccggaggagatagatttggcaactcgggcttctatattcagcctactgtcttctcaaatgttaaggatgacatgctgattgcgaaggaagagatctttggcccaatgcaaagcatattaaaattcacggaccttgatgatgtgattcaaagagcacattacacacactatggccttgcagcatgggtgatcacaaaaaaca

SEQ ID NO: 262152 - DNA, 429 bp, Glycine max
attgtttgttgttgtaactcgttcttcttattttgaggttctgtgtttgtgtttgttttttggctcacctgaaaatgtcttgctgcggtggtaactggagttgcggaagctcctgcaagtgcggcaacggctgcggaggctgcaagatgtacccagacttgagctacactgagtcaaccaccaccgagaccttggtcatgggagtggcacctgttaaggctcaatttgagggtgctgaaatgggtgtgcccgctgagaacgatggctgcaaatgtggaccaaactggtactgcaacccctgcacttgcaagtgaggtgttgggagagcaagcttcaagcagagatagcccttaattaggaataatgataaactattaatgtgtagctaaaaacttatgtattatgtctgtgaagggattcgtgcactct

SEQ ID NO: 262153 - DNA, 446 bp, Glycine max
ctgaacgcggttccgtgttcggttagtgcggcggcgcacgagcactcgagttcgacgacgtggtgttcggggaagaagaagaggaagctgacgcagtttctggaggggttgatgagggaagtgatagagaagcaagagacgctgcataggaagttcgtggaagtgttggacaagtgtgaaaaagatcgaatggcgagggaggaagcgtggaagaaggaggaactcgaaaggatcaagaaagaacgcgagcttctggctcaggaaagatcaaatgctgctgccaaagacgaagctgttcttgcttttcttagaaagtttgcagaagcagaagacacggtgcagttactcgagaaaattcaggttcaaaacgacaaacagaaaaacatgaaacaaaatggcggttattgtaatgctaatggaggtggtggtgtcgcagttgtcactga

SEQ ID NO: 262154 - DNA, 437 bp, Glycine max
gggtgaggtagaaccctgccacggtggtgactgcgcgatgggtgcctacaagtatgtttcagagctatggctcaggaagcagtcgtatggcatgcgcttcttgcagcgggtgaggtgctgggagtataggcagcaaccttccattgttcgcttgacaaggtcgacccgccctgacaaggctcgtcgcttgggcttcaaggctaagcagggctatgtgatataccgtgttcgtgttaggaggggtggccgaaagaggccagttcccaaaggtaatggttatgggaagcccacaaaccagggtgttacccaactgaaatttcagcgtaacaagaagtcagttgctgaggagcgagctggacggaagctgggtggacttagggtcctcaattcttactgggtgaatgaggactctacttataaatactttgaggtgattc

SEQ ID NO: 262155 - DNA, 397 bp, Glycine max
cggacgcgtgggggttgttatgcgccgtaagtaatttgtttgttggattggaattgagaaggcagcaacgtggtgaaatgggtgatagataagaacaaggcgagggtgctggctcctccttggaattggaagctcctattccagagacccaaaaagaaatcccaatttcagatggcatcgcattcaacaatcagagcgcgattttccaagccatcgaggttgtggaacgagactcgttggccatcgctcagagtttcacttctctcttagatttctctagattggccctcttcgaatccacatccacctctctccatcacatgcagtgcttcaccgatgccaccggtcgccttcaggaatctgtgcttgatgcagctaccaatgggaatcgctatat

SEQ ID NO: 262156 - DNA, 427 bp, Glycine max
cccacgcgtccgaaggagatcaagaagaaaataccgacacagagatctagtcctagctagaggcaaacatgggcgatctcacgttcaagaacacatcgccatggcaaggaacttgcttcttgtgctttttgcagtagccaccctcctccatggctcagcagcccaaaccagacacatggtcggtgatgccacgggctggatcatccctgctggcggcgctgccacctacaccgcctgggcttccaacaaaaccttcaccgtaaacgacactctcgtgttcaacttcgccaccggccaacacaacgtggccaaggtaacgaaatcggctttcgacgcgtgcaacggcgggagcgccgttttcaccctgacctccggtccagcgaccgtgaccctgaacgaaacaagggagcaatactacattttgctc

SEQ ID NO: 262157 - DNA, 451 bp, Glycine max
atgatcgtgatgttactgtgctgaatgattttaagtatagaagcattgatggtgaccttgttggtgttgttggagattcatgggtgttggaaaccaatcctattcctgtgacatggaattctaacaaaggtgtggagaaagagtcttatggcgagattgtcacggcgcttgttaaggatgttcaagcgctgaattcttcagcaataggaacaaattcatcttatttctatgggaagcaggttggaagggctgcgaggttggcgttgatagcggaagaagtgtcttaccctaaagtgattccaaaggttaagaaatttctgaaggagactattgagccctggttggatggaactttcatagggaatgcttttctctatgaaagaaaatggcgtggacttgtttctaaacatgggtgtcagattcaactgctgattttgggtttgggatttac

SEQ ID NO: 262158 - DNA, 448 bp, Glycine max
cccacgcgtccgacttggcataccatcttacttttactttgttttcacaacatagccatgggcatctccagcaacgcttgtccttgtgattccatcatcttcgatttggacgacaccttgtacccgtcaagcaccggtattgacaagtgcgtcaagaaaaacatccaactctttctcatccagaaatgcggattctcagaatccgaagccttcaccctccgagttgatctcttcaaaacctacggaagcacccttgccggtttaagagcactatgccatgatatcaccgcagaggagtaccatggtttcgtgcacggaaggctaccttacgactccatcaaccctgatcatcacttacggaaccttctctgcaccatcaaacagagaaaaattgtttatactaattcgtgcaggattcacgcgatgaggtcgttggatagacttggga

SEQ ID NO: 262159 - DNA, 368 bp, Glycine max
cctagttcaagggtgccggtgccaacatcctgcgtgccgatgccggcgctggtgtgcttgcgggttgtgacacgttgcaggttcttgtgttcggcatgaagtacggctctggtggggcttaagttctaatgctgagtcagtactattatttgtttttagatggcgatgaaaaacaccattgagttccaagagtcttagactaattgctgccgcaaattttgttcaataaatttactagatgggatattgtcccaaaaaccgtttttaaatttcatcatgatggaaattttacatttgagaatatgatttatttgagtggcaccggaaagctttcacttggaatttccaatttatgaattcaaaattta

SEQ ID NO: 262160 - DNA, 313 bp, Glycine max
actctcgtataaccgcttgataatcgcatagatgtcttcttacttcgaatccacaatacggcggattgatgaaaccatcgtggggttctgtgcatacacagtaacctagataggaactcttcgtatagtatcagtatatcattggatgtgctaattgctcttgcctattattctataaccacgctgctgatgaattttaagcatatggctgctcgctttccatatagatggatgcttattcagtttgttgctatgattgctctgtctagagcaactcatttcataaacctgagtacattctagatacactcta

SEQ ID NO: 262161 - DNA, 307 bp, Glycine max
aagaacggtcgttagtctatgttcttcatgtttggcttctttgttcaggctattgtcactggcaagggtcctattcagaatgtttatgatcacgttgctgatcctgttgccaacaatgcttgggcttatgccactaactttgtccctggacaatgaggatgcctacatgcaatgcaatcttctgctcccttttgcagttcccttgtgtttaactccattttcactaatgtaactacacctgtgtatcagaaaaatctgtattagagctgttaatttgttatatattagaaatttgggttcccagaaa

SEQ ID NO: 262162 - DNA, 366 bp, Glycine max
gctaaatccctagtaagccgtcatggtgaagtactcaagggagcctgacactccaaccaaggcttgcatggctagaggcgccgaccttacggttcattttaagaacactatggaaactggctttgcaatcatgaagttgcccttggataaagctaaaacgtacttggatgatattcttgcgcacaagccagccattcatttcagacgtttctgtcatggtgttggaaggacagactaaagcaaagaatatacactctaatggccaaggaaggtgtcctgataagtcagcaaaattcatacttgatttgctcagaaatgctgatagcaatgctgaagtgaaatgttcgaatgttgattctctttaca

SEQ ID NO: 262163 - DNA, 453 bp, Glycine max
cccacgcgtccgcatgaaagaaagaaagaaaaagctttgcagagatgtcaggtggtggatgcagcagcatagtgtggttcagaagagatctgaggatagaagacaatccagcactgacagcaggagtgagagctggtgctgttgttgcagttttcatatgggcacctgaagaagaaggacaatactaccctggcagggtctctagatggtggctcaagaacagtttggctcaccttgattcctctctcaggaatcttggcactcctctcatcactaagcgatccactgatactctttcttctctatttgaggttgttaagtccactggagccactcaactcttttttaatcatttatatgatcctctgtcacttgtcagggatcaccgagcaaaggaggttctgactgcttagggcataacagtacgttccttcaacgcggacttattatatt

SEQ ID NO: 262164 - DNA, 356 bp, Glycine max
gcagcatgcgcccaccggttattctcaaaactaccacctctctattggattcttcttcttctgcaccaccctgcgatcgcagactcaacactctcgctagacacttccttccgcaaatggcttctcacgacagcatctacgcttctgcaacctccgcttctgattccgtctttaatcacctcgttcgtgctcccgaagatcctatcctcggcgtaactgtcgctcataacaaagatccaagtccagataagctcaacttgggacgtggtgcttaccgaactgatgaaggaaaacctgttgatatgaatgtagtgaggctagttgaacagcacctcataaatgacgtggtacgcaac

SEQ ID NO: 262165 - DNA, 368 bp, Glycine max
gcagcatgcgcccaccgggtatactcaaacctaccacctgtctttcggattcttcttctccgtcacgaccccatgaccgcaggctcaacactctcgctagacactcccttccgcaaatggctactcacgacagcatctccacttctccaacctccgcttctgattccgtcttcaatcacctcgatcgtgctcccgaagatcctatcctcgacgtaactgtcgcttataacatagatccaagtccagttaagctcaacttgtgagtcggtgcttaccgaactgatgaaggaaaacctactgttttgaatgtaatgaggccagttgaacagcaactcataaatgacgtgacacgcatcaaggaatatatt

SEQ ID NO: 262166 - DNA, 392 bp, Glycine max
agaaaactagacctggtgctgcccaggaagctgttaaagctagagccatgagagttcttaggcaaaaacgaatgtgatgaaggccagcagtacatgcgtgtacaatcagacgttcaatctcgatcaagttcaatttgctgctgagggcattaaagatgctcaacaaactatgacagctttgaagtctgccaacaaggagttgaagggaatgatgaaaactgtgaagatccaagacattgataacttgcaagatgagatgatggacctcatggatgtaagtaatgaaatccgagagactttgggtagaagctataatgtgcctgatgacattgatgaggatgaccttatgggtgaacttgatgcattggaattagacatgggaaatgagactg

SEQ ID NO: 262167 - DNA, 346 bp, Glycine max
ctttttctcaaccaaaaggggttcaattctagctagttctattacatcgtccgcgaccatgaacatggcgatcgtgcttctgtgcatggttttcgcagtttcatcagctttagacatgtcaataatatcacatgacaacgctcatgcggatagggccacgaggcgcaccgacgacgaggtgatgtcaatgttcgaggagtggctggtgaaaccacgacaggtgtacaacgcgctcggtgagaaagagaagaggtttcaaattcttcaagaacaatttgcgcttgatcaatgaacgaaactctctgaaccgaaccctacaagttgggactcaacgtgttcgctgatc

SEQ ID NO: 262168 - DNA, 402 bp, Glycine max
gaaagaaagaaagaaaaaggtagagaaggagagagagagagagagaaagaaaactgaaaaaggaaaaaaaaagataaggctaattaactacatttttggtttggtttttcttcatctcgcaggagacacgaagagacaagttacatcacatggttaaaacttgtttaaagagttttgtgtttgtgtgtgtgaaagtagtttaaggttgtgggggtggttgaagtttttagctttagctttgcagagatgtcaggtggtggatgcagcagcatagtgtggttcagtagagatctgaggatagaagacaatccagcactgacagcaggagtgagagctggtgctgttgttgcagttttcatatgggcacctgaagaagaaggacaatactaccctggcagggtc

SEQ ID NO: 262169 - DNA, 467 bp, Glycine max
  unsure (1)..(467): unsure at all n locations
cttgagccagtgctagatcagaacttgtacaacatggggatgaagatgacctcaacaacgtttgcatctgccactgttaatgtcctcccggccattacttttgtaatggcactcattttcaggctagagaaggtgaacttgagaaaatttcacagtgtagccaaagtcattggaacccttataacagtttcaggagctatggttatgactctgtacaaaggccctgccttccaaatcataaagggtggaggagccatcagcaaccatagcaactctagcagtactagtaccaccgaaccctctgaccagcactggatagttggaactgtttatctcatatcaagttgtgctagttgggctggcttcttcattntgcaatcattcactttgaagaagtacccggcagagctctcactgacaagcttgggatttgtgtgatgggtattattgaggggtcaatcgcattc

SEQ ID NO: 262170 - DNA, 434 bp, Glycine max
cttgagccagtgctagatcagaacttgtacaacatggggatgaagatgacctcaacaacgggggcatctgccactgttaatgtcctcccggccattacttttgtaatggcactcattttcaggctagagaaggtgaacttgagaaaatttcacagtgtagccaaagtcattggaacccttataacagtttcaggagctatggttatgactctgtacaaaggccctgccttccaaatcataaagggtggaggagccatcagcaaccatagcaactctagcagtactagtaccaccgaaccctctgaccagcactggatagttggaactgcttatctcatatcaagttgtgctagttgggctggcttcttcattttgcaatcattcacttttgaagaaataacccggcaggagctcttactgaccagctttggatt

SEQ ID NO: 262171 - DNA, 389 bp, Glycine max
cccacgcgtgcggttctactaggattcccaaggttcaacagttgttgcacgacttgttcaacggaaaggaactttgcaagagtattaacccagatgaagctgctgcttatggtgctgcaatgcacgctgcgattctcagtgacgagggtcatgagaaagtgcaggagcttctttcgttggatgttactgctctatacactggtttggagactgcaagaggagtcatgactgtgttgattcccagaaacacaaccattgccaccaagaaggagcacgtgttctgaacctactctgacaaccagaccggtgtgtagattcatgtctatgaaagtgaacgaacgaggactcgtgacaacaatttgcttggcaaattagagttatctggaatt

SEQ ID NO: 262172 - DNA, 445 bp, Glycine max
  unsure (1)..(445): unsure at all n locations
tatttgctgatattcaaataaggagacagctaatttccagtgccaagttgttgatggagtggactcggggacaaaacattgtattttctagtgctgctcctacggtgaatgagcttagagggccctgtgatgttgcaaacttgttgtcattgtttgggctttccaaggagcgagctaatgcggctatttctaaaaactgtaggattcttttagctaattctttaaggaaaaagcgattttacaaagagacaataagagtagaagttttatcatcagatgcagcatctcattctaaggaagaccggtatcaagagttactaaagtgggaccctatctccagtggtgaaggtgatatcctgttggatgatatgcanaaatcttctctagtctnctgtaaagcatcaaaacctgcanaagccattgacttttgctccgtggtcaaaag

SEQ ID NO: 262173 - DNA, 442 bp, Glycine max
ccttgctcttagccctcctcctcttcgccgccgtggccaccgccgcgatggcggtggccgcgtccgacgccgacgacatcctgatccgtcaggtggtgccagatgttggcgaagccgaagaggaggacaacctgctgaacgccgagcaccacttcgcgagcttcaaggccaagttcgccaagacctacgccaccaaggaggagcacgatcatcgcttcggcgtcttcaagtccaacctccgcagagccaggctgcacgccaagctcgacccctccgccgtccacggcgtcaccaaattctccgatctaactccggccgagttccgccgccagttcctcggcctcaagccgctccgcttcccggcgcacgcccagaaggcgcccatcctccccaccaaggatctccccaaggatttcgattggcgagacaaaggagccgtcac

SEQ ID NO: 262174 - DNA, 452 bp, Glycine max
  unsure (1)..(452): unsure at all n locations
ggaaaactttggacaaaaaatggagtgctacacaaggccaaacaggagtgacatccacctgggagcagaggaagaagccaccatagaagcaaagaccagagagtactttgatggagtcgcaccacaacgccacacaaagcctcaacgaagtgactattcagctcaatatgtcgatgctttctccaatgcccatcactcttctttaactataccagaattaacacaattccaactcctccagaatgatccccaagagaagaaattggtgtacaatggaagtcaagtaccggaagaatttgtggaaacagagtattaccaagatctcaacagcgtggacaaacaccaccatacgactggaacaggatttatcaaagtagagaaaaatggaaatgactntcacatagaaccagataatgacactggttgccatcactcttgcaagggcaatccag

SEQ ID NO: 262175 - DNA, 421 bp, Glycine max
cggacgcgtgggttcccacatttctctattttctagtatttggcacatagtgcattgtttgggccattattaatcaaccaaggaaaaacaccaccttttggcttcttctgctgttccaactgtgcattttgtgtgctgtttctttcacaaacaagcagcaacagcagccagaatgagaatggggaacctcttctggcttggcattgttgcagcacttgttttcagcttctgggttgattccttttctgcctatgaatatcaccacttcaatgaaaccgagttctctttgttggagtctcaagaacaggtacattcatccctccttgggagaacttctctcatggttggactcacagttattcaaagtgctgctggcaaaggagcagtttgcttggatggaacattgcctgcttatcatttg

SEQ ID NO: 262176 - DNA, 347 bp, Glycine max
cccacgcgtccgattcgcaccgcaaacagtgagccatggccgtctgaaagaacaagcgcatctgcaaggggaagaagggtggcaagaagaaggcagctgatccctttgccaagaagattggtatgacattaaggctccttctgtttttcaagtgaaaaatgttggcaaaaccctcgtctctcgtactcagggtaccaagattgcttctgaaggactcaagcatagagtgtttgaggtctccttggctgatcttcaaggggatgaggatcatgcattcaagaagattaggttgagagctgaagatgtgcaagggaagaatgttctgacaaatttctggggaatggatt

SEQ ID NO: 262177 - DNA, 388 bp, Glycine max
cggcgtagacccacgcaatcgccaactactccgaagccgctcacgttatccacacaacaacactccttaaaccctaaccaaccatggcttcttccaccttgaccgcaatgtccgcttgcaagctttcctcctccgccgccatctcctccttccccacccaccgccgcaccaacgccgtccttctgtccagacgcagccgcgccgccagggtctccgccatggccaaggagttgcacttcaacaaagacggcaccgcaattaggaagctccagagcggtgtgaacaagctcgcggatctggttggggtcacgcttggtcccaagggaaggaatgttgttctcgaaagcaagtacggctcgcccaaaatcgttaacgacggtgtcaccgt

SEQ ID NO: 262178 - DNA, 453 bp, Glycine max
  unsure (1)..(453): unsure at all n locations
cccacgcgtccgcccacgcgtccgcccacgcgtccgcgaggttttgaggaagagtccgcagtgggaggagatggcggtgctgattacttacgatgagcatggtgggttttatgatcatgtggcgacgccggtagaaggggtgcctaaccccgatgggatcgttgggccccacccttattactttcggtttgataggttgggggtgagggtgcccacgtttattatctcgccttggatcgacaagggtactgtgattcatgaagcagaggggccaacaccatattctcaatatgaacattcctctatccctgccacagtaaagaagcttttcaatttaaaatccaatttcttgacaaagagagatgcatgggctggtacctttgaaaagtacttttacattcgagatactcctcgtgatgattgtccagaaactcttncagacatcaagatgct

SEQ ID NO: 262179 - DNA, 449 bp, Glycine max
ctcttacatgactgctatagccttcctgtttatccttctaatcagttatacaggcacaacggatgcacaatccggggtgtgttatggaagacttggcaacaacttaccaacccctcaagaagttgtggccctctacaatcaagccaacattcgcaggatgcgaatctacggtccaagcccagaagtcctcgaagcactaagaggttccaacattgagcttttgctagacattccaaatgacaacctcagaaacctagcatctagccaagacaatgcaaacaaatgggtgcaagacaacatcaaaaactatgccaacaatgtcagattcagatacgtttcagtgggaaatgaagtgaaacccgaacactcatttgcacaatttctagtgcctgcattggaaaacattcagagggccatttctaatgctggccttggaaaccaagtaaaag

SEQ ID NO: 262180 - DNA, 446 bp, Glycine max
ggcaaaacgattggagaattattatcccgttcttttccgtggagtcaatggaacagttgctgatgaattcatcattgacctgagaggctttaagaatactgctggaattgagcctgaagatgttgcaaagcgcctcatggactacggttttcatgcaccaacaatgtcatggcctgtgcctggcacactcatgattgagccaactgagagtgaaagcaaggctgaactagacaggttctgtgatgctcttatttccattagacaagaaattgctgagattgagaaaggaaatgctgacattaacaacaatgtacttaagagcgcccctcatccaccatcactgctcatggctgatgcatggacaaaaccatactccagggaatatgcagccttcccagctccttggctccgtgcttcaaagttctggcctaccacaggacgtgttg

SEQ ID NO: 262181 - DNA, 441 bp, Glycine max
cactttcactggaatcacaatcctgaaacaaaaacatcttagcatttaacatactactagacaacatgaccaccacattggaaagaggtttctcggaagagcaagaagctctggtggtgaagtcatggaatgtcatgaagaagaattctggagagttgggtctcaagtttttcttgaaaatatttgagattgctccatcagctcagaaattgttctcattcttgagagattcaacggttcctttggagcaaaatcccaagctcaagccccatgccgtgtctgtctttgtaatgacctgtgattcagcagttcagctgcggaaggccgggaaagtcactgtcagagaatcaaacttgaaaaaattaggtgctacccattttagaaccggcgtagcaaacgagcatttcgaggtgacaaagtttgcacttttggagaccataa

SEQ ID NO: 262182 - DNA, 332 bp, Glycine max
aagaattttgtcaatcttattggatactgtgaagaagaggatcctttcaccagagtgttgggtgttgaatatgccccaaacggaacactatttgagcatttacacataaaagaggctgagcacttggattggggaacaagacttagagttgcaacgggtatggcttattgcctgcaacatatgcaccagttggaccctcctatgacccttatcaagctgaattcttcagccgtttacctcaccaatgactacgctgccaagctttcagatttaagtttctccaatgacataacctcagctgaggcaagagccattgacatgccaatagcaac

SEQ ID NO: 262183 - DNA, 408 bp, Glycine max
atttcatcaaatttgatgcggggaatgctgctatggccactggtttaaggaacagaggccgtgtcggtgtcatcaagaacagagagaaacacaagggaagtcttgagaccatacatgtccaggatgcaactggtcacgaatttgcaactcgtatgggtaatgtcttcatcattggcacagggacaaaaccttgggcgtctcttgccaaaagcaagggtatcaagttgtctatcattgaagaggctagacagaggcttgctgcacaaaatgaaacagttgcctaaatgattatgctggtaaaatctagctactgtatctcttcggctgtctgagcataggatgatcggtgaaatgactgagcataggtttgtatcaaactttatagtacaattttgagctgctgatttc

SEQ ID NO: 262184 - DNA, 453 bp, Glycine max
cccacgcgtccgcaaccatatctattcttacaagttacatccattgagaaacatgaaggtctgccccttagcattttcaatcctttttttgtccttcaccatagaactcttcattggcattgcttcagcagcacaagaaccagtgcttgacacctcaggccagaagctgagaacaggtgtcaagtactacattctaccagtcttcagaggcagaggtggaggcctaacagtttcaagcagtggcaacaacacatgccccctctttgtggtgcaagagaagcttgaagtctcaaagggcaccccagttaccttcacaccctacaatgccgaaagtggtgtcattctaacctcaaccgatctcaacatcaagtcctatgtgaaaagcaccacttgtgataaacctccagtgtggaagctcctcaaggtgctaactggggtgtggtttttgagcac

SEQ ID NO: 262185 - DNA, 464 bp, Glycine max
aacaacaatggacctccgtgaatcgataagcaaccaaaccgacgtggccctgagcatctcagagctcctgttgtcgagagaagctcgggacaagaacctcgtgtattcgccgctgtcgttgcacgttgttctgagcatcatcgccgctggctccaagggccccacactcgatcagcttctctccttcctccgatccaaatccaccgatcatctcaactccttcgcctctcagctcttcgccgtcgtgctctccgacgcctctcccgccggcgggcctcgcctctacttcgccgacggcgtgtgggttgagcaatccctctcgcttctcccttccttcaaacaacttgtcagtgctgattacaaggccactttggcttcagttgatttccagaccaagccttgctgctgaccacaaaatatggaaaacattcaagtgtcatctttgtagtcattaccaatttaaa

SEQ ID NO: 262186 - DNA, 445 bp, Glycine max
cccacgcgtccgcttttattgaatttgcagatttgaatcaagccattgcaatgatatcgtacgatgcctcatcatcagagcctgctcaagtacgtgggaaaactgtatacctacaatattcaaataggcaagaaatagtgaataacaaaactactgcagatgttcccgggaatgtattgttggtaacgattgagggtgcagatgcacgtcttgtcagcattgatgtcttgcacttggttttttcagcctttggatttgtgcataagattactactttcgagaagacagcaggatttcaggcactggtgcaattctcagatgcagagactgccacctctgcgaaggatgctttggatggaagaagcatacctaggtatctgctgcctgagcatgtgggaccatgtacccttaggatcacttattccggacattcagatttaagtgt

SEQ ID NO: 262187 - DNA, 278 bp, Glycine max
caactccatcatgaaatgtgatgttgatattagaaaggatctgcgtggaaacattgtgcttagtggagggtctactatgtctccgggaattgctgatcgtatgagcaaggaaattggtgctcttgcacccagcagcatgaaaatcaaggtggtcgcaacctctgagagaaaggacagtgtctggattggtggctctatcgtgacatcacttagcacctgtgaacagatgtggatctctatgggcgaatatcatgaatctgggccagctatcggtcatc

SEQ ID NO: 262188 - DNA, 394 bp, Glycine max
cccacgcgtccgggaagataagataggtaccagctatcacataggttatttaatccgttatatgccacctgatatataggcatattagctagttaggtaggtatagtagtttaagttaattcaaccatggaagacagggatcactgttgttccaacaattcaacgatgatcacaacaacaaagaaaagaacgggtagaagaagtccaacatcggataagctcaagaatcaacaccgcgagaagcagtcgatgaaaccttaccgtggaataaggatgcggaagtgggggaagtgggtggcggagatcagagaacccaacaaaaggtcgaggatatggttgggttcttacacgacacccgtggccgtcgcacgtgcctacgacaccgctgtctttt

SEQ ID NO: 262189 - DNA, 442 bp, Glycine max
ctaatccctcactcttgttcttcagtctcctcctattatccgccaccgtagccgccgccgaacggatcgacgatgaagacgaccttctgatccgtcaagtggtgccggatgcggaggaccaccacctgctcaacgcggagcaccacttctccgccttcaagacaaagttcggcaagacctacgccacgcaggaggagcacgaccaccgcttccgtatcttcaagaacaacttgctccgcgccaagtcacaccagaaattggatccctccgccgtccacggcgtcaccaggttctccgatctcactccggcggagtttcgccgccagttcctcggcctgaagccgctccgccttccctctgacgctcagaaggctccgatcctaccgaccaacgacctccctaccgatttcgattggcgcgaacatggagccgttactggagt

SEQ ID NO: 262190 - DNA, 412 bp, Glycine max
cccacgcgtccgcccacgcgtccgctcactcgtgacctaacaaatttggtgcttctttttctgggcagcctcttcgatcccgctggtgctcacttcgatcccgttggcgctctcttcgattcagtttagcaggttgtgctgaggcttaattgacccttgaagcatatttcggagttttatcagagaacaaatgggatatattggggctcatggtgttgcagctctgcacagatataaatatagtggagtagatcattcctacgtggccaaatatgtactacaacccttttggagtcgctttgttaattttttccccctatggatgccttcatacatgataactcttatgggatttatggtcttactagtgtctgcattgcttggttatatatactccccacaattggacaca

SEQ ID NO: 262191 - DNA, 453 bp, Glycine max
tgtgcctgaagtttcattctttcaacaacagcaagttcagaaatcattggagcgtattctgtgcacatgggcaattcgacatcctgcaagtggatatgttcaggggataaatgatcttgttacgccatttttagttgttttcctatcagaatacttggaagggggcatagataattggtcaatgtctgatttatcttcagatgaaatctctaatgtagaggctgactgctattggtgcttgtcaaagttgcttgacagtatgcaagaccattatacatttgctcaaccaggaattcaaaggcttgtttttaagttgaaggaattggtcaggaggattgacggtaacttttttctcaggcctgttgtttttcttcaagtatatctataattgcatgaatttaaagaccccacttttgaatatggatttggatatgcattaattttaccgaacct

SEQ ID NO: 262192 - DNA, 452 bp, Glycine max
  unsure (1)..(452): unsure at all n locations
agcaattcgaattcccaatccaaaaccctaataccttcaaagaacctagtagtgaatcagtgatggcacctaaggcagagaagaagccagcggagaagaagccggtggaggagaagaagtcgacggtgggagacaaggctccggcggagaagaagccgaaggccggaaagaagcttccgaaggagggaggagccggcggagaaggggggaagaagaaaaagaggaacaagaagagcgtggagacatacaagatatacatattcaaggttctgaagcaggtccaccctgacattggtatctcaagcaaggccatgggaatcatgaatagcttcatcaacgacatcttcgagaagcttgctcaggaatcttccagacttgcccgctacaacaagaagcccaccatcacttcaagggagatccagaccgcggtcaggcttgtgctgnccgtgaac

SEQ ID NO: 262193 - DNA, 441 bp, Glycine max
cagggatgctttcccctgcatgtttgatggaagtcggacgcctccgccagttttagatcattccaatagaacaagtttaacttcattggatggagattatgcaacaaagccagttcctgtaacttcacgagcagaaaggagcccaagagataacacaagaatgatcacatctttaccagtatctccctgttcaagtccattgcgacagtacgagccagcgcacaagagctgtttcctttctcctcctcacccaacttacactttgatggggcagaatacactcccctcatatccagtgagatcaaatgccacgttcactcttgacccttttcaggaaacttctttttacaaagcccacacgcccggtggatccccaagaagactcatttgagttgccgattgtaaatacctctaaaatcttttggtttcctcggcatgcct

SEQ ID NO: 262194 - DNA, 402 bp, Glycine max
agaaatggaagcaaaaatcgcaaaggcattggatagggttgcgcgcaatctgaagcgcaagcgagcgacccgatatgctgcacatttaagtggagcttctcaaccaatgttagggcattggtcatctcttacgtcacaaacaagcagggctgtcaaacgcatgagattgggtggatatagaaacaggctgacaaatgctggtcctcatattggacggtccttaactaggcgttttttgaattataaaaagagtgggagactggagcgtttgatgttctatgagaattgggaatggttggactttacaaaggatgtagttgacttggttaaaaaggatctttgaatttaaaaggcagcttgtgagatagaatcaaaaggggatcatcttttgtttgatatttt

SEQ ID NO: 262195 - DNA, 276 bp, Glycine max
tgggcttggagatggactacttttggaagccccggacaaggattttgaatttattagaaacacttctttcaatttgttgcaaggctgcagaatgagaaatacaaagacagagtatgtctcatgtccatcctgtggcagaacattgtttgatcttcaagaagtaagtgcacaaattcgggagaagacatcacacctccctggtgtttcgattgcaatcatgggatgcattgtaaatggaccaggggagatggctgatgcagactttgggtatgtggg

SEQ ID NO: 262196 - DNA, 384 bp, Glycine max
cccacgcgtccgccggcgccatatcgcgtatctttctctgttctattcctacgatggagttttggggtgccgaggttaaggttggtgagtctgttaaggtagatccagccgaattcgaggcatgcatacacctttctcaggctgctcttggtgaggcaaagaaagacaaatcaaatgaaccagttgttctctacttgaaagttggtcaacagaaatttgtcttgggaaccctttccagggagaaaattcctcaaatacctctggaattggttttggaaaaggagtttgagctttcccacaactcaaagaatgccagtgttcatttctgtggatacaaagcattttatgatgctggcgatgatagcgaggaagatgaatttactg

SEQ ID NO: 262197 - DNA, 446 bp, Glycine max
aaaaagcgtaacgagcgagagaggaaggaagagaagagagatagggagagcgagcgtgagaggaatatcttcgatttaggggtttcaatatcgtattcatcaaggcggcgagtgtgagatttttagagagagagaggtgagaacgctgagtgctctgctgagagattccattgccccaacagaaggaagaggacgagaaggcggatatatatatatatatatttttctttctgcttatttatcctcagagtggtggatagggattattccctctgcagcgttccgttcctttacactgtgatttgttgacgtttctgatggagcatcgaaagcttgtggttttggggattccgtgggatgccgatactgagggattaagggaatatatgagcaagttttgtgagctggaagattgcattgtcatgaaagagcggtcaactggacgg

SEQ ID NO: 262198 - DNA, 360 bp, Glycine max
gtctgtctccgatggcttcctcataccgtgaccgcacgtcggagttccggttattattggagactctgaagaagatcggaagtccggtgcaacccgagaatgctccttcgacctctcatggcgagtcgtattcgagatccgaattcaaccgaaaggcctcgcgtatcgggttggggatccacgagacctcgcagaagatcgcgaggctcacgcagctggcgaggaaatcgtccatgttcaacgatcccgcagtggagattcaggagctgactgttctgatcaagaacgagatcactgcgctcaactcggctttctttgatttgaaaccgttcataacactgatatggctgacggcggtta

SEQ ID NO: 262199 - DNA, 436 bp, Glycine max
cccacgcgtccggtttcttttcgtgaaacaaaagaaaacaaaagtttaggttttgtgatgtcgggcatggagaggcttcagaggatgttcgcgggtgcaggtggagcgctgggccatcccccaccggattcccccaccctcgattcctccgagcaggtctacatctcctccctcgcccttctcaaaatgctcaaacacggaagagctggggtacccatggaagtgatgggtctgatgttgggggagttcgtggatgagtacaccgttcgcgttgtggatgtgtttgcgatgcctcagagtgggaccggtgttagcgttgaagctgttgatcatgtttttcagactaatatgcttgatatgttgaagcaaactggaaggccggaaatggttgtggggtggtatcactcgcattctggatttgggtgttggctttctg

SEQ ID NO: 262200 - DNA, 397 bp, Glycine max
gccatttgggagttaggttctgcacgctctgcttccagcgagtgttctttcttcgtttcaacagcttaatttgcacacgctgcttcttcagcttgagaaatggcacaagaaacctttctattcacatctgaatctgtaaacgagggtcaccccgacaagctgtgcgaccagatctctgatgcagtgctcgatgcgtgccttgaacaggaccctgacagcaaggttgcctgtgagacatgcaccaagaccaacatggtcatggtctttggagagatcacaaccaaggccaacgtagactatgagaagattgtccgtgacacatgccgcgaaattggattcatctctgatgatgttggtcttgaagctgacaaatgccaggtgttggtcaacatttagc

SEQ ID NO: 262201 - DNA, 413 bp, Glycine max
ctcgacaacttggtgctcaccgacgccgatggccagggggtactttacatgaacagggagcagctcgaggagctgagggtgaagccgctctcggcctcgtcggcgtcgaagaggactctcgttccggcgcttaacatgaggctgtggtacgcgccgcacttggaattaccaactggggttgtgttgaagggtgccactcttgttgctattaggcccagcgagctatcccccaatactgcgaagaaggaggcgtcggatttgtcgtcggtttcgacggcgtttgaggagccgtataggacggctgctacaatgcttgtcaagaggaggacttattgccttgagatgaactcattctgatgcgtttgtgaggtatatacaaattgaaccctcattgtttgaatgtatgccatttt

SEQ ID NO: 262202 - DNA, 426 bp, Glycine max
  unsure (1)..(426): unsure at all n locations
gaccacgcgtnctgcgttgtgggccccgccgagcagacaggcaaacacgccaccgatctttccggcggctccaggtcccccgagaaagtcgaagacaactacaaacaggactggtccttcttacgccgcccaaaggagatcgagaccgccgacaaagtccccgacttcgtcgacaccttctacaatctagtcacagacatctacgagtgggggtggggccagtccttccacttntccccctacatccccggcaagtcccaccgcgacgccactcgcctccacgaggagatggccgtcgatctcatcgaggccaagcccggcaacagaatcctggatgtgggctgtggcgtgtgcagtcccatgcgggccataacggcccactcgcgggccaacgtagtcggcatcaccatcaacgagtaccaggtc

SEQ ID NO: 262203 - DNA, 441 bp, Glycine max
cacaccatcacttccttcccgctttccacgaaccttcttcttcttctctctgtcacattttgaatctcttattttcatgcctcacaatcattcacctcttcttcacgctctctgcttccttactcctcttccggagtaggctgtgagattttgaggttcatgaagaagctatttactgtcctgtgacggttgcgcgacactgatttgttgaattctaccttgcttttgaactaggctacaatcatgaattttcagcaagacaaatttgttagatttcgggattggagttcagacaggggctccgagaccaactctcctgcaattcacgtgacacgctcgggaagagttaagaatacactaaattcagtttccgagaagtttcaaaggggtttggaatctagttcggaggggataaagagatttagaaaatcattcaagtct

SEQ ID NO: 262204 - DNA, 444 bp, Glycine max
aaacgccgcactctcttttcttcctcagaaacacatcctaatggcagagcgcggaggtggcgatcgtggcggcgaccgtggcggtttcggacgtggattcggcgggcgaggacgcggaggtgacaggggccgaggccggcgccgaggcccccgccgcgaggaagaggagaagtgggtcccagtgaccaaactgggccgcctggtgaaggagggaagaatccgaagccttgaacagatctacctccactcgctcccgatcaaggagcaccagatcatcgacacgctcgtgggtcccaccctcaaggacgaggtgatgaagatcacgccggtccagaagcagacccgggccgggcagaggacccggttcaaggccttcgtcgtcgtcggagacaacaacggccacgtcgggctgggcgtgaagtgcagcaaggaagtggcgacagc

SEQ ID NO: 262205 - DNA, 440 bp, Glycine max
cccacgcgtccgcgctattctcttccatttccatttctcaattgtctttctgtattccattatcgatgttgcaattttcattcaaaattacactctcattaactaattttagaacatgtatgcaagttgttttcagctctttctgtgttgtatgctatggcatcttaattggttcgattgaataatctgttaggtctaccctagcaaaacaaaccttatactttcttatttccttggtgctttttgtagctttcagataggtttctgtgtgttaatcgaatagacctgaattatttattgtatcacaggttgtgatggcagcagcaccagcagctaccttcgctattggaaccaccggttccctcggccaaagaggaagctcgcttcctcaatcaaagtcctttgggttgaaattcaactctctgaatcatttgaagagc

SEQ ID NO: 262206 - DNA, 442 bp, Glycine max
gtaattttgacgtgattctgttcgcctacaattaacttgaaatttgtgattaattacccttggtgtgtctttttttttgatttgtcacctttctctctcttcaggttaaggactgaatcatgtgcatctggctccaaggcatgtcgtgagaaattgcgaagggataaacttaatgagaggtttctggaattgagttcgatcttggagcctggtagacaccccaaaacagacaaagttgcattattaagcgatgcggctcgagtggtaatccaattgagaaatgaagccgagaggctgaaggaaatgaatgatgaattacacgcaaaagttaaagaattgaagggtgagaagaatgagctctctgatgagaacaataagctgaacgaagagaacgaaaagttggagaagcatgtgaaactgacaaatatacaacccagctttc

SEQ ID NO: 262207 - DNA, 455 bp, Glycine max
cgacgcagaaggttcatccaatctccgaatcctttaatcgcattgcaaccatgtcgaggagaaaggtcagagagccaaaggaggaaaacgtgactcttggcccagctgttagagatggcgaacatgtctttggcgtcgctcgcatatttgcctcctttaatgataccttcattcatgtcactgatctgtctgggagggaaacgcttgtccgcatcactggtggaatgaaggttaaggctgacagagatgaatcatctccttatgctgctatgcttgcagctcaagatgttgctgccagatgcaaggaacttggcattactgctcttcatatcaagctccgtgccacgggtgggaacaagacaaaaactccgggtcctggtgctcaatcagctcttcgtgcccttgctcgttcaggaatgaaaattggtcgtatagaggatgtgactcccattcct

SEQ ID NO: 262208 - DNA, 462 bp, Glycine max
  unsure (1)..(462): unsure at all n locations
cccacgcgtccgcccacgcgtccgcgacaacgtatcacaagctcccaatatagcaagcaggggacatgatttcttccgtgtcctttccagcgtctcttcccgccgttaacttctccggcaacgccatggcttcgccgtcgtgccgcgtcaaatcccggccaatagtcgccttcgccaccgccactgccaccgctgaagctcgctcttcctggacggagcaaccgagaccttcctatctgaactcctcttgctcttcgctttacgatatcctcggcatccccgctggcgcctctaaccaagaaatcaaggccgcgtaccggcgactagccagagtctgccaccccgacgtggcggccatcgaccggaaaaattcgtccgctgacgaattcatgaagatccacgccgcgtactctactctntctgatcccgacaagcgcgctaactacgatcggagcctattcc

SEQ ID NO: 262209 - DNA, 438 bp, Glycine max
cccacgcgtccgcccacgcgtacgcgcggattgggaaaggcagggctggttaaatggattcggtttggaactttaattgccaatgtatcagctgcttgtattatggctgcactttccagcgtgaagaatgcagtgaacaccagggattgtgatactgttgtagcaggaatacaatttggtctaatggggtgtttgagtacggtctctacattcgctgcagagtttaatgcgatgagagaaagcagtcgtcctatgagagcttatgcatatgctgccattacagttcttgtgtcattcgctttaggaatcttgatatactgtattcccgcttggacaaaggggtttgacattgacacatagcaattgagtaaggcaatcatgttttggttgaaacattgcagcttcacgacaacctccctcctgattttaaagataacg

SEQ ID NO: 262210 - DNA, 443 bp, Glycine max
ctctcacacacaccactttatatacgcacacgagagtcggaagcactactctcttcgccgcttgctctctctctctcgctctttcagctttgactttggtggaaactaaagactagtcaaaatggtgaagttcacagctgaagagctgcgtcgcattatggactataagcataatatccgtaatatgtctgtcattgctcatgttgatcacggaaaatcaaccctgactgattctcttgtggctgctgctggtattattgctcaagaagttgcaggtgatgtccgtatgactgatacccgtgcagatgaagctgagcgtggtattacaatcaagtctacgggtatctcactctactatgaaatgactgatgaagctctcaagagttttaagggagagcgcaatgggaatgagtatcttattaatctcattgactcccctgggc

SEQ ID NO: 262211 - DNA, 395 bp, Glycine max
  unsure (1)..(395): unsure at all n locations
atattttatctttattccactgaatagaacatgagcatataaattgataccctttatattatgtatctttatattatctataaagggtaaagatatccgatgtgaatctatttgtttagttttctatcggtatgtatataggtgaataatccaacatgcctttttgtgaagtaaaaaaactaccctcgatccatgcctcaaaagggttgataataagtaaaaaaaatcaatgaattcatgataaaacccttctgcgtttttttattataaatttttttgtcaataaaaggatcaaggggttgggggatcaaatggtaaagttcttttgttggtaaattggaggattagaaacatgactattgctttccaattaactgnttttgcattaattgcta

SEQ ID NO: 262212 - DNA, 431 bp, Glycine max
tagaggcacgcgttcgaagagctgagaagacatccgaaagggagaatgaattgaaacaacaattagagcagagcatgaaagaagctgctgatagggatcaaggcgcaaacttgtatgtaaaaaatttagatgatagcattggtgatgaaaaacttaaggagctgttctccccttttaggtaccattacctcttgcaaggttatgagagacccaaatggcttaagtcgtggatcgggttttgttgcattctcgactcccgaggaggcatctagagcactcctggagatgaatggcaaaatggtggtaagcaaacctctgtatgtgactctagcccaaaggaaagaagataggagagctagactgcaggctcagtttgctcacatgcgacctgttggaatgccaccatctgttggtcctcgtgtgccaatgta

SEQ ID NO: 262213 - DNA, 444 bp, Glycine max
ggaaaaatggcagcctctgccggcggccagataactctctcgtcaaccgtgcagttacatggagtggcctgtagtaggaattggaagctagtgaagttctgtaatggggaagtcatgggacgtaagcttgtgttaaaaagtgcttatggtggcagcactaaggatgttaggcaccaccaacaacaacaacatatatgcatgtctctcacagctgacgtttctactgaatccaagttgagagacctagatatggaaagaaggaacccaaggacagtgttggcagttatactaggtggaggagctggaacccgtctcttccctctcactaagcgacgagccaaacctgctgttcctattggaggtgcatacaggctcattgatgtaccaatgagtaactgcatcaacagtggtatcaacaaggtgtacatcctcactcagtttaac

SEQ ID NO: 262214 - DNA, 432 bp, Glycine max
  unsure (1)..(432): unsure at all n locations
nctngcttcacggtatgttgatataaagctttgccaaaatgagaggcataaatgtgatgggagaagtggatgtccctgggcatgcanaatcatggggtgctggatatcctgatctttggccatcaccttactgtagggagccactagatgtttcaaagaactttacttttgatgtcatttctggtattttgacagatatgagaaagattttcccatttgagctatttcacttgggtggtgatgaagttaatacagattgctggagtagtacttctcatgtaaaggaatggcttcagagtcacaacatgaccactagagatgcctatcaatattttgtactgaaggcccaagagatggctgtttcgaaaaattggagtccagtgaactgggaggaaaccttcaatacgtctccatcaaagctccatccaaaca

SEQ ID NO: 262215 - DNA, 433 bp, Glycine max
  unsure (1)..(433): unsure at all n locations
gatgatttcgaggcagggttcagagaattcgaggatgactcggaaatcgaggatgtcgatgatgaggacgatgaagaggaggaggagttgaagaagaagaagccctttgggttctctcgctccaacaacaaggctgcttctaagcctctctctcgtggagcaacaactgtgaaatctgtggaatcaaaggggcaagctgagaagtgtgccaagagaaagaggaagaaccagtatcgcggaatccgccagcgtccatggggaaagtgggctgctgagattcgcgacccaagaaagggggttcgtgtttggcttggaactttcagcactgctgaagaagctgcaagagcttacgatgctgaagcanggaggatccgtggcaagaaagccaagtgaattccctgatgagccttcangcgctgctttctcaaacgtc

SEQ ID NO: 262216 - DNA, 380 bp, Glycine max
cccacgcatgcggctacatggtcagaatacatgggtagtgatgccaactacgttctcaaaggggatccagccattgatcgagctcatgccacatacatcttatgtggctactgaactgcatttggagctacttgtaaggaagccaaggttgaaagtggatccactgatgctgttgttggtcttgtggctgatgaatataggtctgtaatagaatccaaaatgctagaagcaggtaagatcattgtaatggacacaaacgagaacacgatagcaaatggagaagcttttggaataactgacattataaatccgggtgattctaataaatctgctgcagaatcggtcaccgaactaagtggtgaaatgggtgccgactattc

SEQ ID NO: 262217 - DNA, 328 bp, Glycine max
ggagaggagaggagaaggcgatgcaacccacatccggcggcggtttgctggcaaggttccgtgcagctccggcgagctggttagaatcagttctgttgaaggaagaggaagaagaagaagaccccttaagcttcactcaactgctttccactatcgatgatgctccctctcattctcaacaccaactctatggtgccgctctctcaaacaaggataaaacacctgaaatcttcatgttagaagattccgttccttgcagagtgagggctaagcgtggctgtgctactcatcccaggagtattgctgaaagggttcgcaggactcgtat

SEQ ID NO: 262218 - DNA, 436 bp, Glycine max
  unsure (1)..(436): unsure at all n locations
cttcttatcagcaactgcaccagtgaggaacgcttccaaaagctctccagatacaggaataagaagacaaagaggaattttgggaggaaaatcaagtatgcttgcaggaaggcacttgctgacagtcagccaagaatccgtggaagatttgcaaggactgaagaatctgatgtcaagagggaatgaatgacttaaaactgatttagtaggaagaaaatagagttgagtagctatatctgatcaagctatatggaaaaactcagcagtaatatgtgattagaacttatgtggngagtctctgtttgtttgagcagatatttgctgaataaaccaggcctcaaacttcttaagctagttcatctcttatctattggattaacgtctctatagacggaaataaccttccagatatgtaaatagttttgttgaataatgg

SEQ ID NO: 262219 - DNA, 416 bp, Glycine max
cgattgcacaaacattatttcagttccttcagattgcaagcaattggtggatggcttgggctaaccctcaaacagaaggagacctgcccaaagtaactccctcagttcttcttcttgtttatatggcccttgcttttggcagctcatggtttatatttgtaagggctgttctggtggctacatttggtcttgcagctgcccagaagctatttttgaaaatgcttagaagtgttttccatgcaccaatgtctttctttgactctacaccagctggaaggatcttgaatcgggtatcaattgatcaaagtgttgtggatcttgacattccttttagacttggtggatttgcttcaactacaatacagcttattggtattgttggtgtaatgacagaagttacatggcaagttttgctc

SEQ ID NO: 262220 - DNA, 394 bp, Glycine max
ggaaatatttgaggaaccctgttgtggtcaccattggcactgctggaaaggcaactgatttgatcagccagcatgtgatcatgatgaaggaggccgagaagttttccaagcttcataggttgcttgatgagcttaacgacaagactgcgattgtgtttgttaacaccaagaagaatgcggatcatgttgccaagaatttggataaggatgggtatcgcgtgactactttgcacggagggaagtcgcaggagcagagggagatcagtcttgaagggtttaggaccaagagatataatgttcttgttgctactgatgttgctggacgtgggattgacatacctgatgtggctcatgtcatcaactatgatatgcctgggaatattgaaatgtacac

SEQ ID NO: 262221 - DNA, 413 bp, Glycine max
gaaaaaaccgacacaaagatctagtcctagctagaatcaaacaggggcgatctcaccttcaagaacacatcgccatggcaaggaacttgcttcttgtgctttttgcagtagccaccctcctccatggctcagcagcccaaaccagacacatggtcggtgatgccacgggctggatcatccctgctggcggcgctgccacctacaccgcctgggcttccaacaaaaccttcaccgtaaacgacactctcgtgttcaacttcgccaccggccaacacaacgtggccaaggtaacgaaatcggctttcgacgcgtgcaacggcgggagcgccgttttcaccctgacctccggtccagcgaccgtgaccctgaacgaaacaggggagcaatactacatttgctcccgttgatcacac

SEQ ID NO: 262222 - DNA, 399 bp, Glycine max
aagcttcgaaccaaatcttattgagaaaatgtctggtcgtggaaagggtggaaagggttggggaaagggaggtgccaagaggcacaggaaggttcttcgtgacaacatccagggcatcacgaaacctgcgattcgtaggttagcgagaagaggtggcgtgaagaggatcagtggtttgatctacgaggaaaccacaggagttctgaagatattcttggagaacgtgattcgcgatgctgtgacctacactgagcacgctaggaggaagaccgttactgctatggatgttgtttatgctcttaagaggcaaggaaggaccctctatggttttggagggctaaaaagtttaagggttattggattctattgcagcgaaaaaatacctgttcttttaatccg

SEQ ID NO: 262223 - DNA, 410 bp, Glycine max
cccacgcgtccgatggaaagctgctgaaaaccaaagacagaaatactagaaaggacatacaaagggaacttaggactctatccaaagaagaacgtaaaaggcagcagcttgctgtaacagatgtacttaaaagtgcagatgtaatattaactactttgattggggctttctctaaaaaactagacagcacttcatttgatttggtgattattgatgaagctgctcaagcacttgagatagcatgctggatacctatactgaagggttcaagatgtatacttgcaggggaccatcttcaacttcctccaaccattcaaagtgttgaagccgagaagaaaggcttaggaagaacgctctttgaacgacttgcagaaatgtatggagatgaaatcacatcaatgcttacaatc

SEQ ID NO: 262224 - DNA, 422 bp, Glycine max
aaatttttgacagatgccaaattggctataagtgaaacatatcaacagactgatgctaattttctggattctgaaaaggacaccttcagggatgatggatctacagcttcgacagcagttttggttgataaccatctttatgtagcaaatgttggagattctaggactataatatcaaaagctggtaaagcaaatgctctctctgaggatcataaaccaaatagaagtgatgagcggaagagaatcgagaatgctggtggtgttgtcatgtgggcaggtacttggagggttggaggggtgctagcaatgtctcgtgcctttggtaaccgtatgctgaaacagtttgtagtagcagaacctgagatccatgaccaggagatagatgaacaaattgaactgattattcttgcaagtgatggact

SEQ ID NO: 262225 - DNA, 401 bp, Glycine max
accacgcgtccggaatagaacatgagcatataaatggataccctttatattatctatctttatattatctataaagggtaaagatatccgatgtgaatctattcgtttagttctctatcggtatgtatataggtgaataatccaacatgcctttttgtgaagtaaaaaaactaccctcgatccatgcctgaaaagggttgataataagtaaaaaaaatcaatgaattcatgataaaacccttctgcgtttttttattataaatttttttgtcaataaagggatcaaggggttgggggatcaaatggtaaagttcttctgttggtaaattggaggattagaaacatgactattgctttccaattagctgttttcgcattaatagctatttaatttattttat

SEQ ID NO: 262226 - DNA, 385 bp, Glycine max
ccctatctctcaccaacttccgctacttcctactccaaccactttcttttttcccgcagtcatgggcaaggtcaagatcggaatcaacggatttggaagaattggccgtttggtggccagggtggctctgcagagagacgatgttgaactcgttgccgttaacgatcctttcattaccaccgattacatgacatacatgtttaaatacgacagtgttcacgggcactggaagcatcacgatgtcaccgttaaggatgagaagacccttctcttcggtgacaagccagtcactgtttttggacacaggaaccctgaagagatcccatggaagtcgactggagctgacatcattgttgagtccaccgggagtttcaccgattaggat

SEQ ID NO: 262227 - DNA, 422 bp, Glycine max
gcaaggcatgtttgatggtgtgcttgacaatacaggtcggggagtcgctgatgaagaagagtatgaggctgctgatggtgattggggtgaggagcttgacatagttgatgcagatggcttacaaaatggagatgttgctgcgattttggaggatggagaggtggctgaagaaaatgatgaagagggtggatgggagatggaggatttaggcctgggcccagaagctgacactcccaaagcttctatcagtacccaatcttcagtttttgtgaccccaacacctggcatgccggtaagtcatatatggattcagaaatcatctcttgcagctgatcatgcagctgctggaaattttgatactgcaatgaggttactgaaccggcaacttgggataatgaattttgcccccctgaaatccatgt

SEQ ID NO: 262228 - DNA, 413 bp, Glycine max
ctttcatatcaaatagttgactctttgatttggcttggaattcgagacatgattaatgatcttaggaagaaaaagttgaagctacgaccagtcacatatttaagtggctcacaaggctctgaaactgatgttccacatgcatatatatggagtcctcatcttgttcctaaaccaaaagattggggaccaaaaattgatgtagtagggttttgctttcttgatcttgcgttaaactatgaacctccagagtcccttgtaaaatggcttgaagaaggagacaaacctatttacattggatttggtagcctgcctgttcaagaaccaaataagatgacacaaataattgtagatgctttggagatcactggacagaagggcatcatcaataaaggatggggaggtcttgggaattt

SEQ ID NO: 262229 - DNA, 387 bp, Glycine max
gatggtttccatggcattcggtgtcagcactgcgacttttccgaatctaaacaggtgtcgtggagtggcatatgcaagtttgagcaacaaatcaagtactacatctttgggagtgcgagttacagagggagaggggaatttgccgaagcttgttctcacttccccggccggtagtgaggctgagatatacctgtttggaggttgcattacttcttggaaagttcccagtggtaaggaccttctctttgttcgccctgactctgttttcaatgggaacaaacccataagtggaggtgttccgcattgtttttcacagtttggtcctggtccaatttaacagcacgggtttgcacggaatatggattggactgttgtcgattctgaaaa

SEQ ID NO: 262230 - DNA, 380 bp, Glycine max
aaatttttgacagatgccaaattgtctatgagtgaaacatatcaacagactgatgctgattctctggattctgaagaggacaccttcagggatgattgatctacagcttcaacagcagttttgggtgataaccatctttatgtagcaaatgttggaaattctaggactatattatcaaatgctggtaaaacaaatgctctctctgaagatcatataccaaatataagtgatgagcggtagagaatcgagaatgctggtggtgttatcatgtgggcaggtacttggatggtttgacgggtgctagcaatgtctcggtccttttttaaccgtatgctgaacctagtttgtatagcagaacctgtgatccaggaccagtatat

SEQ ID NO: 262231 - DNA, 271 bp, Glycine max
ttttaatataaggattgatagtttatagtatatgatgtgattcaaaaaaaaaaaggattgccttatgtagcaggcgaagacaaatggtagattatacaatgtgcatggaagggcttatatacttcatataacgtagataaatgagaccttattgaaatgatgattatcaacacacataaagaaacttataatatgagttctagttaccacattgtaatgtttatagaatgagatgagaattccattattatgatgatctattttgttactt

SEQ ID NO: 262232 - DNA, 420 bp, Glycine max
ggccaaatcaatcaaattctttgagttgaacacaggggccaagattccttctcttgggttagggacttggcaagctgaacctggtgttgtagctgaagctctcaccacagccattcaggttggatacaggcatattgactgtgctagtgcgtataagaatcaagcagagattggttctgctcttaagaagctttttgatgatggtgtggtgaagcgtgaggacttatggatcacttccaaactctggtgttcagatcatgcaccagaagatgtgccaaaagcattggataaaacattacaggaattgcaacttgactatcttgacctctatctgatccactggccagtccgcatgaaaagtggaacatttggactcaataaagaatatcttgagcaaccagacatttccaatacatggag

SEQ ID NO: 262233 - DNA, 385 bp, Glycine max
aaagcattgaattcaaaaacttaagttcattccttgtgttttgctttcttcctcaaaaccaaacatgtcgaacacatgcggcaactgcgactgcgctgacaagactagctgcaccaagggaaacagctatggtgttattgtagagactgagaagagttacatcgagactgttgtcatggatgttccagcagctgagcatgatgggaagtgcaagtgtggcactaactgcacttgcacggactgcacctgtggccattaaggaatatgtatgaaaatgtaattgccatgtgtttggcaatacaaatatccaaataatgtaatcttcgtatgaataaatgtgtgggctgttatcctacttcaagtctgtgtagtcatgcagtctgaa

SEQ ID NO: 262234 - DNA, 399 bp, Glycine max
gctggtttcaaaccagatgatcccacgtacaccatggttattgattgcttttgtaagaagggtgatgttaagatggggttcaagttactcaaggagatgcaaagcgatggacatgtaccgggagttgtcacgtataatgcactaatgaatggactgtgcaagcaaggtcagatgaaaaatgctaaaatgctgttagatgcaatgcttaatgtgggggtggctccaaatgatattacatataacattttactagacggtcatagcaagcatggaagctctgttgatgttgacatatttaattctgagaaaggacttgttacagattatgcttcatatacagcacttgttaatgaatcaagtaaaacttcaaaagatcacctaaagagatgattgctactg

SEQ ID NO: 262235 - DNA, 329 bp, Glycine max
cccacgcgtccgggaaaactaaaagagaaaaatggattgtagtaacgagttggatatgcaagaaccgagcattgagacggataagcttagttacgaaatcttctccattctcgaaagcaagtttctcttcggctacgacgatccaaagctctggttccccaagcaaatacctcccaagccggaatctcagactccggcagctaccgccgccgtggactgcgtctccgcagtcaagaaccagcgcggcaagatatgcattctcgccatcgacggcggcggcatgcgcgggattctcgccggaaaagccctcgcctacctggaagccgcgc

SEQ ID NO: 262236 - DNA, 402 bp, Glycine max
gtaaaatgtaaacctttttgcagtgacagtgtgcgacagagattcctttcaacactagagcagttaggtttagaaccactacgtgttgatcttctgccccttattcttcttaaccatgatcatatgcaagcctattctctgatggacatcagtttggatacatttccatatgctggaacaacaacaacatgtgaatctttatacatgggagttccatgtgtcactatggctggatcagtacatgcacacaacgttggtgttagtcttcttagcaaagttggactggagcatttgattgccagaaatgaagatgaatatgttgaattggctcagcagttggcctctgacatttccgcactacaaaatttgagaatgagtctgcgaaatctcatgtacaagtcc

SEQ ID NO: 262237 - DNA, 421 bp, Glycine max
caagggagagacagaagacattgggaaactattggagaggactatgatgcacaaatatggtgtggagaacatcaatgagcacttcatgagcttcaatacaatttgtgatgctactcaggagagacaagatgctatgtataaattggtggaggaagatttggatctaatgttagtagttggtggatggaactccagcaatacttcacacctgcaagagatagcggaggaacgtggaatcccttcttattggattgacagtgagcaaagaattggtccaggaaacaaaatagcatacaagttgaaccatggagagctggtggagaaagaaaactggctgccagagggtccaataacaattggtgtaacatctggtgcatccacaccagacaaggttgttgaagaatcactcatcagggttttt

SEQ ID NO: 262238 - DNA, 415 bp, Glycine max
cacgaatatcttgttgtttggagcgatccgagaaaaactctgtaaacatgttggtttaccaggacctccttacaggtgatgagcttctctctgactccttccgttacaaggaaattgagaatggaatgctgtgggaagttgaggggaagtgggttgttaaaggagcagttgatgtagacattggtgcaaacccttctgctgagggtggaggagaagatgagggagttgatgatgcagctgttaaggttgttgacattgttgacacattcagacttcaggagcaacccgcattcgataagaagcagtttgttaccttcatgaagaggtttatcaagaatttgactcccaagctcgatgcagagcaacaggagttgtttaagaagcacatcgagggagcaactaaatacctgctctc

SEQ ID NO: 262239 - DNA, 400 bp, Glycine max
gaataatattagggttttcgataagagtcctgtgatgttgtcgccggtgaatttggtgaaacacaacagtggtttcgttgggacccccaaaacccctcgcctcgacgattcgctgtcggaatcgaagcttgagtctctccccatggatttgttggttaaaattctgtgccacctgcaccatgaccaactgagggctgtcttccatgtttctcaaaaaattagaaaagctgttataattgcaaggcagtttcacttcaattatactactccagatcgctctcggcaggagatgttaagtacaatgactcctcgtcctactgagcattggccttttttgtgcaagggtgatgggaagggagttaggattccaagcccacacacacctaaagcacctagacat

SEQ ID NO: 262240 - DNA, 322 bp, Glycine max
ctttctcttcttctgctgctcgatcgatcgatcgatctcgtcactctcttagctaccatggcgactgagaatcctttcaatagcattttgacgacgctcgaaaagcccggtggtgctggcgagtttggaaagtactttagcttgcctgctctcaacgatcgtagaatcgatagacttccttactctgtgaggatacttttggaatctgcaatccggaactgtgatgagtttcaagttaagagtaacgacgttgaaaaaattattgattgggagaatacctctccgaagctggtggagattccattcaagccagctagagtgc

SEQ ID NO: 262241 - DNA, 371 bp, Glycine max
cccacgcgttcgcccacgcgtccgatttctccatttccattttctctctcacttgggaagaatcgtaagctatgggaaagtcttacccaactgtgagtgctgattaccagaaggccgttgataaggcgaataataagctcataggcttcatcgctgagaagagatgcgctcctctaatgctccgtttggcatggcactctgctggaacctttgacatgggcacgaataccggtggacccttcggaaccatcaagcacccttccgaactggctcacagtgctaacaacggtcttgacatctctgttaagctttttgagccactcaatgcggaattccctattttgatctactccgatttctaccatttggct

SEQ ID NO: 262242 - DNA, 421 bp, Glycine max
gttcagtttcacgaccgatcctacaatggcgacagtcacgttttccttttccgctaaaaccctaactctaccttatgaccccaaaaccccaatctccaactttaccccggtaacgaatcttcgcctccctccttctatcgtgacccgaacccgcaattgtaaccggattcgggcggcgctggatggggatttctcggcgaaaaggagcagcagcagcaacaacaacgaccagagggagacgataatgttacctggttgtgactacaaccattggctgattgtgatggagtttccaaaggaccctgcacccacccgtgaacagatgattgacacgtacctcgacactcttgccactgtcttgggaagcatggaggaagctaaaaagaacatgtatgcctttagcaccaccacttacactgga

SEQ ID NO: 262243 - DNA, 316 bp, Glycine max
ctttgggaagcttttcaagtcctcagcacccgtggagctcactgaagctgagacagaatatgctgttaatgtcattaaacacatttttgataggcatgttgtgttccagtacaactgcacaaacacgataccagagcaattgttggaacatgttattgtgactgtggatgcttcagatgctgatgaattctcagaggtgttctccaagcctctcaagtctcttccttatgattcacctggacagacttttgtggcatttgagaagccagaaggagtgccaacagttgggaaattttctaacattctgaaatttatt

SEQ ID NO: 262244 - DNA, 210 bp, Glycine max
aaggaccttatttggtatgcacagggtttcacgcctgtgatgtttgattacaagatccatgatgaaaacaattcactctacaatacccctccttgttatgggatttacatgtgtgggttggtgtttgaggacttgtttgagcaaggtgggttgggggaggttttgagggaatatcaaaagaaagctgggattctctacagtgcaattgat

SEQ ID NO: 262245 - DNA, 181 bp, Glycine max
ggtgatgctccatggtgggcttagactccttaaaaccgttgttgtcataatatatatttaaacatgaaattcaaacattctgttttgtattaatgcataaatatattttgtaatcaaattgatattttgtgaactgaagctaagatgaaaaagaacctgaacaggtcacttttttccgtgt

SEQ ID NO: 262246 - DNA, 397 bp, Glycine max
tcgtccacgcgttcgcccacgcgtccgcaaaatgggtgttgtggagggtctcttggcattgggtttgattctgaatgtgtgtgttgtgtgcaatggaggcacaagcagccccttcgtcaggaaagttgagaaggctgtagatatgccacttgacagcgatgtctttgctattcctcctggttataatgccccccagcaggttcatataacgcaaggtgacctagtggggaaagcagtgatcgtgtcatgggtgactgtggatgagccggggtcgagcgaagtgcgttactggagtgagaacagtgaccagaagaagatagttgaaggaaaacttgttacttataggttcttcaattacacatctggttttattcatcacaccaccatcagaaatttg

SEQ ID NO: 262247 - DNA, 375 bp, Glycine max
ccactcgttcgcccacgcgttcgcccacgcgtccgcccacgcgtccgattcaggcgtgagtgctttccctagttgtcttagattccctccactgatcgcaatttcaacaacaccctcttcgatccgctttctaaattctccacccctccgttccactgcttcgtcgcaacacgttacaataatggcttcgaagaattctcaacaagacacgcgcttagcgagaatcgcctctgcaatccgagtcatccccgacttttctaagccaggaattttgttttaagacataaccactctgcttcttgatacaaagggcttcaaagacaccattgacttgtttgttgagaggtacaaagatcaaaacatcaatgttgtctc

SEQ ID NO: 262248 - DNA, 288 bp, Glycine max
cccctttttcagaaaagttgagaaggctttatatattccacttgtcagcaatgtctttgctattcctcctggttataatgccccccatcaggttcatataacgcaaggtgacctattggggaaagcaatgatcgtgtcatgggtgactgtggatgagccggggtcgagcgaattgcgttactggagtgagaacagtgaccagaagaaaatatttgaaggaaaacttgttacttataggttcttcaattacacatctggttttattcatcacaccaccatcagaaattt

SEQ ID NO: 262249 - DNA, 421 bp, Glycine max
cccagattcaaccagttaaacttggaacccaaggctttgaggtactattaactacattacttgctcttattttgataattgatacaattaatctcattctaggtttcaaaattgggattcggatgtatgggccttactggagcgtacaatgaccctctccaagaacaggatggcatatctgttatcaagtatgcgttcagtaagggaatcacattttttgatactgcggatgtttatggagccaatgctaatgaacttttggttggaaaggctttgaagcagctgcccagagaaaagattcagatagccacaaaatttggtattgcttcacgaggttttcctgatatgaagatcaagggttcgcctgaatatgtgcgatcatgctgtgaagctagcttgaagcgtcttgatgttgaataca

SEQ ID NO: 262250 - DNA, 407 bp, Glycine max
agagaggagagagtattggcgcttcatcaagatgggtatttctagggattccatgcacaagaggcgtgccactggtggcaagaaaaaggcttggagaaagaagagaaagtatgagcttgggcgtcaggcagcaaacaccaagttatcaagcaacaagacaatcaggaggattcgtgttagaggtggcaatgttaaatggagggcattgaggctggatactggcaattactcatggggtagtgaagcagttactcgcaagactcgtattctagatgttgtttacaatgcctcaaacaacgagcttgtgcgaactcaaaccctggtcaagagtgctattgtccaggttgatgctgctcctttcaagcaatggtaccttcagcactatggtgttgaaattggtagaaaaa

SEQ ID NO: 262251 - DNA, 404 bp, Glycine max
cccacgcgtccgcccacgcgtccgcccacgcgtccgcaaagcgggttactgtctggtcaagctaccatctctctctctctttcttagtgcctccttgccagaagttaaaatggcccaagaaactttcctattcacatctgaatcagtgaacgaggggcaccctgacaagctctgtgaccagatctccgatgctgtgctcgatgcatgcttggagcatgaccctgacagcaaggttgcctgtgaaacctgcaccaagaccaacatggtgatggttttcggagagatcacaaccaaggccaacgtggactatgagaagattgtgcgtgacacatgcaagaacattggttttgtctctgatgatgttggtcttgatgctgacaactgcaaagtcctcgtcaacattg

SEQ ID NO: 262252 - DNA, 418 bp, Glycine max
cccacgcgtccgggagggtgtaggtttggttgatttgattgttgtgcatccatcgttaagctagtggcgatcggatccagctacagcatagagatcaaggaaggaaggaaggaagatgttgggtgttataaggcacaaggtactgtctcaagtctctagtctgattcctattccatatgatttattttattttatttgcagagtattcgccctgccttctccgcaatcagacacttgtcttctgcagctaaagagattactgtcagggaggctctgaactccgcactcgatgaggaaatgtcagctgatcctaaagtgttcttgatgggtgaagaggttggggaatatcagggtgcatacaagatatccaaggggctgctcgacaagtatggccccgagagggttctcgatacttcaa

SEQ ID NO: 262253 - DNA, 420 bp, Glycine max
cccacgcgtccgggcgttggtgaatccgtttctgtctccccctcgaactcccctcgctctgcgagtttcagctgcgccaaaccaagcactactacgttggactctctgctcccaatattcattcaaaccatcatcactaagatcgaagcacgccatgtgtggcgccactgccgacatcaaggctgcacctttagctgatggagaagcagatcacgcggttcttgtgggccccgccagcgaggacgagagaaaaggagactatgactggacacaggaatggtaccctttgtatctcactctgaatgtgcccgaagatgcacctttgggtcttagagtgtttgataaacagctcgtcttgttcaaagatggcaatggccagtttcgctgttacgaagatcgctgcccccacaggttagcaaa

SEQ ID NO: 262254 - DNA, 425 bp, Glycine max
gaaaacacctaacaagcttggttggtaagttatctacaatctgcatcatggaaggtgttattctgagaagggtcattccttcggataacagttgcctcttcaatgctgttggctatgttatggatcatgacaaaaagaaagctgctgagttgagacaggttatagcagcaacagtagcaagtgatccacagaaatattgtgaagcatttcttgggaagccaaacacagagtattgtaactggattcttgactcagagaagtggggaggtgcaattgaactttcaatattagcagattattatggacgtgaaattgcagcatatgatattcagacaactcgatgtgatttgtatggtcaggaaaggaattattctgaaagagtgatgctgatttatgatggtctccactatgatgcattagtgatg

SEQ ID NO: 262255 - DNA, 352 bp, Glycine max
cccacgcgttcgatgacatacatgtttaaatacgacagtgttcacggacactggaagcatcacgatgtcaccgttaaggacgagaagacccttctcttcggtgacaaggcagtcactgtttttggacacagaaaccctgaagagatcccatgggggtcaactggagctgacatcattgttgagtccaccggagttttcaccgataaggacaaggctgccgcacatttgaagggtggtgccaagaaagttattatttctgcccccagtaaggatgcccccatgtttgttgttggtgttaatgagcacgagtacaaaccagagcttgatattatttccaacgctagctggacaa

SEQ ID NO: 262256 - DNA, 372 bp, Glycine max
tcttgttctagttcttctaccctcttcttcactcttgttccatcactgctttcagagcttgctatttctctttgaagaagaggggcacagacccatgaagagtctcgtaagtagctgtgcttttagttatagtattaagcactgctctggaaagcaatggagaagatgatcatgaacgatgtaaacaggaagcagtggatcctaggcctcacagcgtgtcaatcttagagttcggagcagttggagacgggaaaacgctgaacacagttgcattccaaaatgcagttttttatgccaagtcatttgctgacaaaggtggggctaaactatatgttccatctggcaagtggcttactggaagttttaacctta

SEQ ID NO: 262257 - DNA, 406 bp, Glycine max
  unsure (1)..(406): unsure at all n locations
nccacgcgtccataagtctttggttggtacatcttcaatggctgaatcaaactcggagccttgtattctggaccagccagctagacctgccaatgaatgtctttcaaagttatactgtcctgctacaaaattccccgcattatgtgaaaatgataatctgtatgatgatttcaacatggatgaagtggatctaaatcttgtgaactatgaagaactttttggtatggccctcagtcattctgaagagctatttgaaaatggtggaattgatagcttgtttgggacaaaagacatgtctgctggagatttcagttgtgaggatgctattgctgctgaggctgtttgcattggaatgtgattcctgggctacactgctgtaatatgaatgcattgcgttattcatata

SEQ ID NO: 262258 - DNA, 422 bp, Glycine max
gtgcaataaagttggcaactggcaagcaagcaaagcactagaaaaactaggaagagagaagaacccagttgcaacactaattttctctttccctttttttggacttatccttctttctgcaactccaaaatgggttccaaaggggcaaaaaatctagcactctcttcagccttgttgctccttttggtcggttttgcaacctcagacatcaatcaagacaaagcagaatgtacggataaacttcttggtctagctggttgtctttcctatgttggtggcgaagccaaagtccccaccatggattgttgctctggtatcaaagaggttattaacaagagcaagaggtgcctctgcatcctcatcaaagatcgtgatgatcctagtcttggcctcaagatcaacgtcacccttgctttaaaact

SEQ ID NO: 262259 - DNA, 272 bp, Glycine max
gccacaacaagttcaagcatagtttttgtgatagtgatacttgctctaacatcatgggcatggaggatgttgaattggctatggataaggccaaagaggctagagaggctcctaagggaacaaggccttcaaggaaacccctacaggatattggttggggacttaaaggagattgtgaagttgcaaatggcatctagatccacactgatgatttccatccataatattcctccacctatgtttacacatacgcctgaagaaaccctacgacg

SEQ ID NO: 262260 - DNA, 361 bp, Glycine max
ctctctctctctctctctctctctctctctctctctatatatatatatatatatatatatatatatatattccctcaaaacacttcacaaaaccctctttttattttcccttttcgcgttgattttgttcttcaatttccaaatcgacgttacaatcgcaatcgcaaattgcagaaacgcgcgttcgttccaataatgtctgaccccgctgccgaagaggctgctttcatcgagaagctctacgaatacggcgagcagctcaacaatgccaaggacaagtcgcagaatgtgcaggattaccagggaatcatagatgcggcgaagacgagtgtgaaggcgaagcagctcgccgcgcagctga

SEQ ID NO: 262261 - DNA, 441 bp, Glycine max
cccacgcgtccgcggcaagtggccccaatcccagaagctcctcatcaaggacttcctcaacggaatctccgacgaccaccaccgcgcctccccctctccctccgtctccgactggtggcgcactgtctccctctacaccgaccagaccggcgccaacatctcccgctccgtctccatcgccggcgagtactccgacctccgctactcccacggcacacacctcacccgcctctccgtgcaggacgtcatcgccaccgccgtccaggccaagcccttccccgtcgaccaccgcaacgggatctacctaatcctcaccgccgaagacgtcaccatggaagacttctgccgcgccgtctgcggtttccactacttcaccttcccatccaaggtgggttacacgctcccttacgcctgggtggggaactcaggaaaacagtgtcc

SEQ ID NO: 262262 - DNA, 441 bp, Glycine max
cccacgcgtccgcccacgcgtccgcccacgcgtccgcgttgacttgctcttcgcctgcacccactcagcactgtttcgccttcacccgcaccaccgccaccgctaccgccacgtcactgagacaattcaacagccaccgtccgcccccactcaccacgaggatctcctcgtcgccttccaccgttgtctgcaaagctgtctccgttaagccccaaaccgaaaccgaaggtctcaacattgctgacgatgtcacacagctcatagggaaaacgccgatggtttacctcaacaatatcgtgaagggttctgtggccaatattgctgcgaagcttgagattatggagccctgttgtagtgtcaaggacaggattggttttagtatgataaatgatgctgagcagagaggagctataacacctgggaagagtatattggtggaac

SEQ ID NO: 262263 - DNA, 441 bp, Glycine max
cccacgcgtccgcttggagcaaccaaaaggtccaagcttcacaattaatgggcactgggtgaaatgggcaaactgggaatttcatctgagaccagacccaagagctgggatcataatttcacaagccaaggtgagggaccctgacacatcaaagctgagaagtgtaatgtacaaagggttcacctctgagctatttgtgccatacatggatcccacacaagattggtactttaagacatacatggatgctggtgagtatggatttgggttgcaggccaatgccactagaccctttgaatgattgccccatgaatgctaactacaatgatggtgtcattgcctcttccgatggaacaccatatgtccaacccaacattgattgcatttttgagagttatgctggtgacattgcgtggccgacatgcaaagtgcccccatcac

SEQ ID NO: 262264 - DNA, 435 bp, Glycine max
ttttctctatcttttgttctgctcagctcgatctacctaccttggttcttctctggtctgtgatttcagtgcagcagcagaaaatgaccatcctcattgagcaacctgcccttgagttacaagttgaaggcaacaatgtgcatgctgaagaaaccaatgagcttgtattggatggtggatttccattgccaaaggatggatatatggccccagaaatcaattcatttggccactccttcagagaatatgatgctgaaagtgagaggcaaaaaggtgtggaggaattttataggttgcaacacatcaaccagacatatgactttgtgaagagaatgcgggaggaatatgggaaattggacaaagctgaaatgggcatttgggaatgttgtgagctgctgaatgaattggtagatgagagcgatcctgatttggacg

SEQ ID NO: 262265 - DNA, 438 bp, Glycine max
cagattagtaccacaaaaatggagaaatagaataactgaatatcgtatagctcaaaataaagatttaaccaaatgcaattcatatgaaaaaagccaattaattctttacaaagaacaacaagtaaacgcattaaaaaaaaaaaattagaaaacaatatagatacgatcttttatcctataattttatcaattatgcagataagaaagactcatatatttatggatatagatccctatttcaagtaaaaaaaaaccaagtgatttcttctaattacaacacgtataaaaaagaattattggatatcatagataatctctttatcaagaattatatatcggaagatgcgattctagatatggaaaaaaatatgtatagaaagtattttgattggatgggaatcaatagagaaaatctaaattcgtccatatcgaatccag

SEQ ID NO: 262266 - DNA, 375 bp, Glycine max
ctgcagtttcgactcagagcgtccctttcacttctcagcagcttctgctcaggctcagaaacgaaaaagggttcggtgttctgttcgcgaggagaccaaagtcgaggggaagccttttaagaagtttgaaaagaaatccccaaagaataaaccgaaattcaagttattcggttaaactaagttggatctggtggttttaacatttgttaatgtggccaattggacccccagattgttatggcacttggttctcctttttgatggtttggacattttggtggattcaagttatttaaggtcgtcttatgttattatcttaaaaccatgtgtggaatggttttggtattaacattatctcctattttgcgtttcttg

SEQ ID NO: 262267 - DNA, 476 bp, Glycine max
cattattaagattcaccttagcaatatcatcctgaaagtttattattcacttgtgcaggttttttgagcctttggatttgtgcataagattactactttcgagaagacagcaggatttcaggcactggtgcaattctcagatgcagagactgccacctctgcgaaggatgctttggatggaagaagcatacctaggtatctgctgcctgagcatgtgggaccatgtacccttaggatcacttattccggacattcagatttaagtgtaaagtttcaaagccacaggagcagagactatactaatccttaccttcctgttgctccatcagctgtcgagggaagtggacaggctatggttggtttggatgggaaaagattggagactgagagtaatgttctccttgcatctattgagaacatgcaatatgctgtaacattggatgtcttacacatggttttctctgcttttggccctg

SEQ ID NO: 262268 - DNA, 436 bp, Glycine max
gaaattttaaaaatgactgggataaacttaagaattcaattattgaaattgaataagtaaacaatttaattggattggtcgaatggtatcaaaaaaatggagtactaactcccatttcttatttattattgaattaaccgatcaacttgctttgttatcgaacatttctttttgatttcaaaaattttccggaaaaaatttgaatctatttttatatgcgaatcaatcctactacttctggtcctgaggtttctgcgcttgaaaaaaaaaatctgggacgtatcgcccaaataattggtccggtactagatgtagcttttcccccaggtaagatgcctaatatttacaacgctctgatagttaagggtcgagatactgttggtcaacaaattaatgtgacttgtgaagtacagcaattattaagaaataatcgaat

SEQ ID NO: 262269 - DNA, 442 bp, Glycine max
cagagtgttgtactgtgggatatgccactcggacctccacagcataaagaacgaatggggtgcttccatctatccaatggttcctgggcatgaggtagctggtgtagtaacagaggtgggaagcaaagtagagaagttcaaagttggggacaaggttggtgtgggatgcctggttgattcctgccgcacctgccaaaactgttgtgacaatcttgagaattattgtcctcaatctacgttcacatatggtgccaaatatagagatggaaccatcacatatggaggctactctgactcaatggttgctgatgagcattttgtggttcgcattccagatagattaccacttgatgctgctgcacctcttctttgtgctggcatcactgtgtatagccctctcagatattatggacttgacaagcctggtctgcatgtgggtgtg

SEQ ID NO: 262270 - DNA, 398 bp, Glycine max
cccacgcgtccgctggttactatgaggatggagagtttgggataagattggagaatgtgcttattgtcaaggaggctgatacaactttcaattttggtgatagaggttacttatcttttgaacacattacctgggcaccatatcagacgaagttgattgacctgaaccttctaagtcccgaggagataaattggctgaactcctatcacgccacatgtaggaatattctggcgccatatttggatgaagttgaaaatgcatggctgaagaaagccactgaacctgtaagtgcatgagctgtgtttggagttgaaaagttaaataacttatagatggttcagcgtaattttagtgtcttaccgatccataatactgtaatctagattttagatatcatt

SEQ ID NO: 262271 - DNA, 374 bp, Glycine max
ccccgataaagttgatcatggttacccaactggtattggggttaaaaactccctcattgtgcgttggtgtgatcaacttctttggaatggtattcaccttgttagtgccagaatcaaagggaaaatcactggaagagttgagtggggagaatgaagatgatggtgctgaggctatagagatggcagggtctgctatgacggttccagtttaaccaaagtctatgatcaacaaagtagttcataattctagtgatgctattattgtgtgacaatattacttcgggttttctacagctagatgcacatttatgatgtacatatatggttcttggtgctgtaacttttaaaatcaattataaagggtgtgtatttca

SEQ ID NO: 262272 - DNA, 434 bp, Glycine max
cccacgcgtccgccttccttggctgctggttgcacaatggtcctcaagcctgctgggcaaacacctctctcgggcttggtttatgctcatcttgctaagctggctggaattccagatggagtgcttaatgtagtacccggatttggccaaactgcaggtgctgcaataagctcacacatggacattgataaggtaagctttacgggttcaacagaagtggggcgtgaagtaatgcgtgctgcagctaatagtaatttgaaaccagtttcacttgagctaggaggcaagtcacccgtcatagtttttgatgatgctgatgtagataaagctgctggacttgctctcatgggcatcctatttaataagggagaaatttgtgttgcaggctcccgtgtgttggttcaggaagggatctatgatgaatttgagaagaa

SEQ ID NO: 262273 - DNA, 429 bp, Glycine max
cttgttagggcactggattctggaattgtagctcaggcggctcttgatgttttcagtgaggagccaccacccaaagacagcaagttgattctgcatgagctcgttactgcaacacctcatcttggtgccagtaccatggaagctcaggaaggtgtggctattgaaatagcagaagctgttgttggggcattgaaaggggagcttgctgctactgcagtcaatgcaccaatggttccctcagaggtgttaacagaattgaaaccattcattgatcttgcagagaaattgggtaggctagctgtccagcttgtagcatgatgaagccgggtgaaaacagtgaatgtcacttatgccacctttaggggccctgatgatctggacactcgtcttctccgtgccatgataaccaaaggtctgattgagcccata

SEQ ID NO: 262274 - DNA, 467 bp, Glycine max
gctgaagattccaatcggagctcagaaaaaagaaacctaatcgccgatcgcgtcgccgtcgcgccggaagttcgttgttgttctgtgaaattgccggttttaatttttcgttttgtgataattctgagaattagtaacaattattgtggtttttttttctgttaggtaacgttgctgtggttctttttttttcttttttcttttttataatttcgttgccgttttgtaggtgaagatagtcgttttggttgctgctgagttttttgttttctggtgttcgaattgtgtgcaattttgaattctacttgttagttgtgtaatttgtttgttttctatcacttttgtgttctggagttaaaatgttttctaatgagttaagaatcgtttgcttttgtggtacgtagctgtacaatacgatgccttgaattccaaggtttcggtttggtttattttaatttacaaaaacc

SEQ ID NO: 262275 - DNA, 468 bp, Glycine max
  unsure (1)..(468): unsure at all n locations
cttgacacgttccaacccacacgtgcacgccgctgtcacttccgactccaaggccgctacttcgcgtgacctaactcaacccgatctcgataatagcggcggcggtgccaacggtaacggaggcggcggtggaggtggaggtggaggtggaggtggaggagaaggaggaggtgataatagcaagggcgaggaaggatctgacggtgacaagaggaaaatggctctgttaatgtctcagaaattcactctagcttatgctgcactcgtcggagtgggtggtgtaatgggttatctcaagagtggcagcaacaagtcacttttggctgggggtttgtctgcatcactgctgtattatgtttatactgagctacctggaagccctgttttcgcatcatctgttggccttggcatatctgctgcacttcttgnggtgatgggttctcgtttcaagaaatcangaaaggtctt

SEQ ID NO: 262276 - DNA, 469 bp, Glycine max
cccacgcgtccgacaagatgcagtttatataggtgagatactcaagtctgttcagatggtcacgggggtgatggaagcccttgtcaaaagagttttattggcagaatcagaaactacttttgagaaggaaaaagtgagtttaggtcaggaagaaattatgcgaaagtctgctcagttagagaatatgtccatgaaattggaggagatggagcgttttgctttgggtacaaatggtattttgaatgacatgcggcaaaaagttgcagatttggtggaagaaacaactagacagagacagcgtgctgctgaaaatgaagaagagctttctagagtgaaacgggagtttgagtctctaaagtcatatgttagtagtctaatcacagttagagaaaccttactttcttcagagaagcaattccaaactattgagaagcttgttgagcggttagttggaaagactacccaattg

SEQ ID NO: 262277 - DNA, 474 bp, Glycine max
gcaagcagcaaacatgatttcttccgtgtcctttccagcgtctcttcccgccgttaacttctccggcaacgccatggcttcggcgtcgtgccgcgtcaaatcccggccaatagtcgccttcgccaccgccactgccaccgctgaagctcgctcttcctggacggagcaaccgagaccttcctatctgaactcctcttgctcttcgctttacgatatcctcggcatccccgctggcgcctctaaccaagaaatcaaggccgcgtaccggcgactagccagagtctgccaccccgacgtggcggccatcgaccggaaaaattcgtccgctgacgaattcatgaagatccacgccgcgtactctactctttctgatcccgacaagcgcgctaactacgatcggagcctattccggcgacaacggccgttgtcgacggcggcggtgttctccggttacacgcgtcggaactgggaaac

SEQ ID NO: 262278 - DNA, 432 bp, Glycine max
aaaaaatttctagagcgagaaagtgagaggagagagaaagtagctgatcctccatgggctccagcaaggaacgcgaaaactttggctacaccgccaagctcgccgaacaagccgaacgctatgaagaaatggtggaagcaatgaagaatgtggcgaagctgaacgtggaattgacggtcgaggagcggaaccttctgtcggtagggttcaagaacgtggtgggtgctcgtagggcttcgaggaggattctatcgtcgattgaacagaaagaagaagctaaagggaacgatgcgagtgtgaagaggataaaggagtataggcagaaggtggagtctgagttggccaatatcttgagtgatatcatgactgtaattgatgaacaccttattccctctagctctgttggtgaacctagtggttttttctacaaaa

SEQ ID NO: 262279 - DNA, 439 bp, Glycine max
cccacgcgtccgcccacgcgtccgaccatctcttcctctctcagctgtctttttaggccccgttttctcattttcccttttgcaattttcactaacagtccttctttctatcttagctctcagaaacttcaataacaatgaagaaagttgtgttgaaggtggaagtacatgaagacaaaatcaagcaaaaagctatgaaggttgtctctggcatttcaggggttgagtcagtttctgtggacatgaaagacaagaaattgaccgtaattggggacattgatccagtaaaagtagcagccaagctgaggaagctttgtcacgcagaaatagtttcagttggaccagcaaaagaggaaaagaaggaagagcctaaaaaagatgataaaaaggaagatgactagaaaaaaaatccaccaagcgaaattcgtggcagatcaac

SEQ ID NO: 262280 - DNA, 437 bp, Glycine max
gtgattttggtgtcgtccctttttcttatgtttaaggttgtacggagtttatgtggtgattgaattcgtcgataagaaaccttagtttgatattttgattggttctgtggagagtttttttttctttggtgtggtttttggtttgtgctgtttttggttgggaataacaatggccgatgaaggaaacaaaagcaataacttctattcgatcttggggttgaagaaggagtgcactgaattggagctaaagaatgcttataggaaacttgcaaagtaatggcacccagatcgttgttcagcgaccgggaattcagagttagtggaagaagctaagaaaaaatttcaggaaattcgggaagcctattcagttttatctgacgccaactaaaggttatatgtacgacgtgggagtctacgacagggatgacgactagaac

SEQ ID NO: 262281 - DNA, 435 bp, Glycine max
cccacgcgtccgagagttgatgttactcggatttatatcactcttattaacagctggctcacgcatgatagccaatatttgcattccatcaaagttctacaacagtgcttttgctccatgcactagatctgagattgacgaagaaatggaagataatggctctgaagagcgtaaattattgatggcttcttcttatccacacttagttagaaggatgttgaatggaataaatagcagcacctgcaaagagggttatgaaccatttgtttcgtatgaaggcctagagcagttgcaccgattcatttttgtcatggcggtaacgcatatatcttacagttgcctaactatgttgttggccattgtgaagattcacagttggagagtgtgggaggatgaggctcatatggatcggcataattcattaactgaaattac

SEQ ID NO: 262282 - DNA, 449 bp, Glycine max
gctcgtataggccattcatctcacataggaccactagacaatctttagatcaaagcgctattgaacatgcatgtgggaacaacaacatactgcagggtgtgacatacatatgttccatgaaaagaataaacgtcgcaagaactgaccactaggaatcttatctatgtgcataggtactggaaagagtacagctgactgatttgagagtactgattgcactgatgaactatgcaatgcccctaaagtgtataaccttaatttatccaatgacgctcgcttgaaatagatacttcatactcactatatatggtcatcaaattagaaatcacaataaaatctttctctatggaagtgacaatggcaaccactactcaagcgattaatcctttctacacattagacttgcattcatttctgatatatccatgacaattgcaaacatacactta

SEQ ID NO: 262283 - DNA, 416 bp, Glycine max
gttgctataaacgttgttgttttcagataaacacgtgactcactatctatctatcaatcgagatctccgagttcagccgaaccaaactccgaagctatggcagagctccaaaccaaggttgaacctgttacggtcccggctccggtggatcccgagccaccgctagctgaggctccgccgctcgagaagaaagcggtggcggtgccaccacctgttccggctgcggcagaggaaaccaaagctcttgttattgtggagaaggagaaggagaatgagaagataccagaacctgtaaaaaagaacgcctcaggtggatcccttgatagagacattgctcttgcagaaatagagaaagagaaacgattgtctaatgtgaaggcttgggaagaaagtgaaaaatcccaagcagagaatta

SEQ ID NO: 262284 - DNA, 357 bp, Glycine max
gtgatgtactatctgaagcggaagatttgtgggaagaggctgaagctcgacgtgattcgtgggaccgatgtgtataagtgggatcctgaggatttgcctgggcaatctatattgaaaactggagataggcaatggttctttttctgtcacagagataggaagtatcctaatggtggaaggtctaacctagcaaccagacgtgggtattggaaagcaacgggaaaggatcgtaacgtgatatgcaattctaggtcagctggagtgaaaaagaccctggttttctatgctggcatagctactagtggtgagcggactgattgggtcatgcatgaatataccttggatgaaaaagagctt

SEQ ID NO: 262285 - DNA, 433 bp, Glycine max
  unsure (1)..(433): unsure at all n locations
caaagccctaggccgctgctgcgtcgtctcgcgccgcttccactccctcgtcccgcaggtcgaaaacgtcgtcgtccgcgtcgactgcgtcatctccgacgacgactcctcttcctccgccgccgcctccgacaagtcccgcggccccttctggaacctcctccgcctcgtcttcggcggaatcgtgaaacccatccaaaccctcggtcagttcctcggccccaaacgcccctcctcctcctccgtcacgtccccttcctccaccacctcctcctcccccctcgccgtcggaaccgacgacgactccgacgccggcgtcacccaccactccccgacgcaggtcctcaaaaacttcaacgagattcgcctnctncggatcgagctccccagcggcgagctaggcatcgaagacggcgtgctcctcaaatggcgc

SEQ ID NO: 262286 - DNA, 381 bp, Glycine max
cccacgcgtacgctaacaccaaatagtaatgcccggacaccgcgagtcaaacttgcagaacgagctggggcgattcattcgcactgccgaagcatttggaggcatctgtattggagccctgacagtgttggcagatttcatgggggccatcggttcacgaacaggaatattgcttgcagtaaccatcatctatcactactttgagacatttgaaaaggagagagctagcgagcttggcttctttggtttctaagttctgccaatgaactctaccacacccttttgtttagggaacgttatacttggaaggccgttaacatcgtaagggatgacatagtctagtttgttgtcattttttttactaagttgttcccttttaac

SEQ ID NO: 262287 - DNA, 431 bp, Glycine max
cccacgcgtccggctgtctctcccatcctttcgcattctcaatacccttttgattggtgaagggaaagcaaacatggttgatcaggtccaacaccctacaatcatggacaaggttgctggtcagctccatctccgttctggtctttcatctggtattagaagttatgatggagcctaccgccacccagctatgtaccaaagaccctcttttgggaattactcgaatgctgcattgcagtttcctgtgatgcccacatgcaaagctaccatggatttgtctgctactgcaacatctgcctcacccgtctttgttgctgctccagcagagaaaggccattttcttttagactttctcatgggaggtgtttcagcagctgactccaaaactgctgctgctcccattgaacgtgttaagcttttgatccagaacc

SEQ ID NO: 262288 - DNA, 504 bp, Glycine max
ccggaatctcaaggctcgacccagagcgtccctatagactatctttatataataatataaataagaataaaaaaataaactaaaaaaaaaagaatctagataaatataaaaataagatatataaggtacaaatagtaaatcgaggtacccattttatgataaactctccttccatttttgttcctctagtaggcctagtatttccggcaattgcaatggcttctttatttctttatgttcaaaaaaacaagattttttagatacagaaaacaaagtaaaattctggggtcttatattccccaatcataatactaaattcaaaaaaaggagagtaatgagtataatctttcgctcagacgatctactgatatattctatggctaggttcgaagaacaagcaatttattttgggccgttttcactttgttaggttcattgaggttattgttcgttgcaatttccaattatcttggtatggatatgttctttatttctgagaaaatt

SEQ ID NO: 262289 - DNA, 475 bp, Glycine max
  unsure (1)..(475): unsure at all n locations
aaacaattaacacacacaaacagaggctacgtacgatcaaattaattaagatggcggaagtgaggaacaaacaagtggttctgagggactatgtgagtggttttcctaaggaatccgacatgaacatagttgaaggaaccacaatattgaagcttccacaaggttccaatgatgtgcttctaaaaaatctctacctttcctgtgacccttacatgagaatgctcatgaccaaggtggaaggcctcgacgtgtttggcacctatacacctggctctccattaacagggtatggagtgtccaaagtcctagaatctggacacccagattacaagaaaggtgatttagtgtggggatctacaaaatgggaagaattcagcttggtgtccccaactcaaatacttttcaaaattgagcacaccgatgttccgctttcatattatactggtattnctggtatgccgggaatgactgcata

SEQ ID NO: 262290 - DNA, 374 bp, Glycine max
ccggagcaaaaaaacttgttacgatggtttcttccgacaaggatccacgagaggaagtccttgaagcatggtacatggatgatagtgatgaagatcaaagactccctcaccacaaagaacccaaggagtttgtctcgttggaccaacttgctgaacttggagtccttagctggaaattagatgctgataaccatgaaaatgatccagagctgaaaaagattcgtgaagagcgtggctacacctacatggatgtctgtgaggtctgcccagaaaagttgtcaaattatgagcagaatatcaaaagcttctttgaagaacatcttcacactgatgaagagatccgcttttgtgctgctggaagcgggtattttgat

SEQ ID NO: 262291 - DNA, 370 bp, Glycine max
ctctctctctctctcttctctctctctctttcttcctttctttaatacttattaattcatctgttttatctttctttctttctttccccttttgtatttctgggttcgatattgttatcggttatttgtgcactgcttccgccggggctattcaggaatcatggctagggttttggctcagtctgttaatgtccctggtctagtggctgagcataggcatggtcagcaaaagggatcaggaaaattaaaaagatcgaccaaaatgatgagtgctttacggacaaatggattaagaatgtcaggtttctcaaggcttcgtactttcaatcctctggatactatgttgagacctggcataaattttcattct

SEQ ID NO: 262292 - DNA, 434 bp, Glycine max
ccagaagaagaagagatcatgacaaagctcaaaaaccctcaactcaatgcaatcgaagaagcgcttaggtctctcagaaaactaacgagaataagagaagaaacaaggcttcaactttgcacccctcggttactctccgcgttacgctcactcgttttgtcgaagcacgtgaacgttcaggtgaacgctctggcatcggtggtgaacctctcgttggagaagagtaataaagtgaagatcgtgcggtcggagatggttccgccgttgatcgaggttttgaagtttggatcctctgaagcgcatgagcacggtgcgggcgcgttgtttagtttggcattggatgatgataacaaaaccgcgattggggtttgggggggtttggcaccggtggcttacatgctccgatccgagagcgagcggacttggcatgactc

SEQ ID NO: 262293 - DNA, 438 bp, Glycine max
  unsure (1)..(438): unsure at all n locations
caagttgtgaaaccacatcgcaagaaaattcacaagcgatggatccgaagctgaaagagggtgctcagctcttcgatcgcttcaaggcttcgtttctccggaacgacttcgataactgttccaatctcctttctcagctaaaggtgttacttacaggtttcagaagcctgccaccgttgtttgcagatacacctaatgcagttcatgaattaacaatagcaagggatatatatgagcatgctgttgtccttagtgtgaaaattgaggatcaagatgctttcgaaagggatttcttccagttgaagccttattatacagatgcctgcaatcgtcttccaccatctnctcaggagtaccctatactgggtctcaacctgttgagactacttgtgcagaataagattgctgagttccatactgagttggaattgctttcat

SEQ ID NO: 262294 - DNA, 432 bp, Glycine max
cccacgcgttcgcccacgcgtccgggcgatcgaggcgttggattcggacggcgacgggttggtgtgtttggacgatttgatgaatctgatggaggctgctggagaagaagagaagttgaaggatttgagagaagcctttgatatgtatgatactgataggtgtgggtttattactccaaaggccttgacgaggatgctgaagaagttatgggaatctaagtcaatggtagagtgcaaagtgatgataagtaggtttgatttgaatggggatggcatgcttagctttgaagagttcagaattatgatgaagtgactacgatgatggtggggatgattatgatgctacatggacattgattctggcacttggttgcttgcttcatgtgtctattaggttggttaggttggaggggtttcaatttggattgatta

SEQ ID NO: 262295 - DNA, 441 bp, Glycine max
cccacgcgtccgctttctaaaaggcctcaaggatacactccggacttaattacgttattttggtagggtcaccgtttcgagatattctaaacttgtactgaaaaatatggagggaaaagaagaggacgtaagagttggagccaacaggtacggagagaggcagccaatagggaccgctgctcaggctaaagactacagagagccaccgtcggcgcctctcttcgaaccgggagagttgtcatcgtggtctttctatagggctggcatagcagagtttgtggccactttcttgttcctctacatcacagtgctgactgtgatgggtgtgttcaaatctaagagcaagtgttccactgtgggtatccaaggcattgcttgggcttttgggggaatgatctttgctcttgtttattccactgctggaatctcagggggtcatat

SEQ ID NO: 262296 - DNA, 334 bp, Glycine max
ctcgaacacccactatctcacgagagtcagggtctcactgagaacttaatcccgttataagggtgcagaaaccgatggatgatattatactctcgtactgatttgtatgccagttaaagaagttaacatgaaacttgaaggcatcatgaactgtgagagtctccctatatgcacatgcgcttaagctggatacttctgagtgccaacgctttaccttctatatgaacctggagagataggatcgtgaccttgatttcacatagtcctatcagaggaagtagccactttcatgtatctgtacatcacagtgattgctgagatgggtgagatcata

SEQ ID NO: 262297 - DNA, 302 bp, Glycine max
cggacgcatgctctatctaaaatgactcaatgtttcactccggacttaattacgttattagggtatggtgaccagttggagatattctatacttgtactgaaaaatatggcaggaaaagaagatgacgttagacttagagccaacaggtaccgtgagaggcagccaatatggaccgttgttcaagctaaagacttcatagtgccaccgttggagcctctcttcaaaccgggagagttgtcatcgtggtctttctattagactggcatagcacagtttgtggccactttcttgtatctctaca

SEQ ID NO: 262298 - DNA, 438 bp, Glycine max
atgactatgactctggtttcaacaagccatcgtatgagtcttctggcggtggctatgaagggggttacaacaaaacatcttattctagtgatgagccagcttctggtggtggctatgaaggtgggtacaagaaaacaggttattctggtggcattgatgagacttctggtggctatggcgctggtggtggtggatactctgacgtcactgatggtggctacggcaaaccaagtggtggctatggcgccgctggtggtggtggtgtgtaccctgacactaccactgatggtgggtacagcaaaacaagtggtggttggtatgatgatgaagttgactattagaaggaagagaagcaccacaagcatcttgagcaccttggtgagttaggtgctgcatcttgttgctgcttacgccttgcatgaaaagcacaatggcata

SEQ ID NO: 262299 - DNA, 383 bp, Glycine max
tttggttttgggtttttttcttgctgtcatataacgttagttattttgtttattagtcattctgttttccccccttttttatatctttgtttcttctgcttttacctcaaaataaatacggtatatggtatatagtaattatattcctgttttattttttcaaggaaggtatatctctttcaatttttcccttttagtcctagatgttttcatttgttatttcattaaagtaattttctttatttctcttcgaagatacggtgaaaggtcttcctacatggattcatgttttaaggtttttagctaagttcttcattattatttggtgcagataaaaaaatattgttggtaatatgtcttcttttttttacttgatttgcgtt

SEQ ID NO: 262300 - DNA, 465 bp, Glycine max
gccacgcgtccggttcaccctatttacaaacttctgtttcctcactatcgtgacaccatgaacattgattcacttgcccggagatccttggtcaatgccgacggtattatagagaaaacattcttgtggggtaggtactctttggaaatgtctgctgttatttacaaggattgggttttcaccgatcaagcattgcctaatgatcttgtcaagagaggagttgctgttaaggatccatctgctccccatggagttcgacttttgatcgacgactatccttatgcttctgatgggctagagatatgggatgctatcaagtcttgggtggaagaatatgtctcattctactacaagtcagatgaggaacttcaaaaagaccccgagctccaagcttggtggaaagaactcgtagaggtgggtcatggggatttgaaggataagccatggtggcaaaagatgcaaact

SEQ ID NO: 262301 - DNA, 420 bp, Glycine max
caaaatatctatcaaaagtaaaaagcgaagagaatggaaaaactttaatttttttatggtaaaaagttcaattatacctgttatttcacaagaaaaaaaagaaaaaaacccaggatcggttgaatttcaaatattcaaatttaccgatagaatacgaagacttacttcacattttgaattgcaccgaatagactatttaatctaaaaaggtttacgtaaaatttttggaaaaccaccaaaaattgctgtcttaatttgtcaaagacagatagaattacggtataaaaaattaaataaatcaagttgaatatttcataatcacaaaattcttttaaattgaaaagtaattctaaatatatcgatttattagatctttgaattttgatgaacttttttttttaagcgattcataaaaaatta

SEQ ID NO: 262302 - DNA, 481 bp, Glycine max
gcgcaggatccaaagaaacgcattacctctgctcaagttcttgagcacccatggattaaagatggaaatgcttcagacaggccaatagacagtgcagtcctttccagaatgaagcaatttagagcaatgaacaagctaaagaaacttgccttgaaggtcattgctgagaatatgtctgcagaagagatccaaggtttgaaggcaatgtttacaaacatggacactgacaagagtggtgcaatcacctatgaagaactaaaggcaggattgcatagacttggctcaaagcttacagaggctgaagtgaagcatcttatggaagctgctgatgtagatggaaatggctcaattgactacatagaattcatcactgctacaatgcatagacacaaattagaaagagatgaccaacttttcaaggccttccaatattttgataaagacaacagtgggtttattacaagagatgaacttgaaacag

SEQ ID NO: 262303 - DNA, 474 bp, Glycine max
  unsure (1)..(474): unsure at all n locations
aaagggccttggctcgcttttggattaaatttggagaggattcgattgcttctattaccgatttggttcttggaccctgtaaagatgaacaagaaagagcaagtgcaaagaaaaaggcagaagaaactatcatggtaatggaagagcaaggcctaggagacaagaagttctttggaggcaacaatattggaatggtggatatagctcatggatgcctaagtcattggttagaaggcttggaggaaattgtggggatgaaattgattgagccaaacaaatttactcggttgcatgcgtggactcaaaatttcaagcaagttcctgttattaaagaaaaccttcctgattatgagaaactgttgatccatcttgaatggcgtangcagggatatgttacatagtagaactagaaatcataaaatgggtaatgaaattatgactatagtctataggcctatagtgaataggagttta

SEQ ID NO: 262304 - DNA, 410 bp, Glycine max
acactaccctcaacatagtaaagcagctggtgcaagtgaagcaatggctcaaaccatgttgggcatgtctagtgtctctagcagttattccgtggatttgaagaaagaccttttcctccaattgcagagtcaaagtttaaggcctaagttctctcaactctcattcaacccacttccaccatcaacttcttccttttcttcaccccgtacattcacaaccctggctctcttcaaatctaagacaaaagccgctcctgctaagactaaggttacaaagccaaagcaaaaggttgaagatggtatctttggcacttctggaggatttggttttactaaacagaacgagctctttggggtcgtgttgctatgcttggttttgcaacatcaattgtttggttgaaggaataact

SEQ ID NO: 262305 - DNA, 366 bp, Glycine max
acacgaccatgctcagatttcatacactcatgcttggaatgccatggatagtaccaaatttgagaatgttagtgcccctgccattgatatcgactactggaggcttgacaaggatgcaactctcaaggatgatggcactgtgattagcgctgatgaggctcatcacagggatgttaaccactatgcttctgacattcatcatcaagggaaggaattaaaagaggctcctgctactattggttatcactgagtcattgttgtaaattttttaacaaatctaaaatctaacctttgctggctcatagaccttctagctatttagaccataatgattcaataaaatttatttctattgagcactttaaa

SEQ ID NO: 262306 - DNA, 385 bp, Glycine max
atcacttagtgcagaccccaaaaatgttgttttcattgttagtggacgggggaggaatagggtaagtgactggtttgattcctgtgaaaaacttggaattgctgcagaacatgggtacttcttgagatggtctcacggtggagaatgggaaaactgtggtaagagctccgactttggatggatgcagattgctgaacctgtaatgaaacaatatacagaggcgactgatggctcctcaattgaaagaaaagaaagtgctttggtctggcaataccgtgatgcagaccttggttttggatctgctcaggctaatgaaatgttagatcatctagaaagtgttctggccaatgagcctgttgctgtgaagagtggccagtttattgtt

SEQ ID NO: 262307 - DNA, 455 bp, Glycine max
gacccgggcgacgcgtcacgcgtccctcgatcttcgtccggggactgcttcgaataccaccaccaccactcgccgatggcgacgatcggaggcttacgaggactcccaaggctctcaaaacagcgtctaaaccgaagccctcgctcgattcgccgtagaccaacacaacacgaagcagaattcgcttctggagtttgctagggtggttagggcacatgaacacgttgttgctggtaccctgcatcaccttactcttgaggctattgaggctgctgagaagaagctctatgaagccaaagtgtggttgaaaccatggctgaatttcaaagaactccaagagctcaagcctgctggtgatgcaccatcgtttacctctgctgatcttggtgtcaaaaaggatggtcaccaaccacgatggcaatctgtgccaacacatgaccctcaagtttatgatg

SEQ ID NO: 262308 - DNA, 444 bp, Glycine max
cccacgcgtccgaaaaaacataagaaaagaaaggtgacatggcaaagtgataataatagcttggttctgcgtctcaattcatctcttctctgagtctcaacctaattccccaatcaatcatctttacgtgtttgttcgagaccatggccaaaagccccttcaagcttgaacatcccttggaaagaaggcaggctgagtctgctcgcattagagacaagtatcctgatagaatacctgtgattgttgagaaagctgaaagaagtgacatcccagacatcgataagaagaagtaccttgtcccagcagatttgactgttggccaatttttatgttgtccgtaaaaggattaaggtcagtgcagagaaagctatttttggttttgtcaataacactttacctgcatcttgccgctttgatgtcttctatttatgagggaaaattaag

SEQ ID NO: 262309 - DNA, 444 bp, Glycine max
cccacgcgtccgaaaaaacataagaaaagaaaggtgacatggcaaagtgataataatagctgtcttctgcgtctcaattcatctcttctctgagtctcaacctaattccccaatcaatcatctttacgtgtttgttcgagaccatggccaaaagccccttcaagcttgaacatcccttggaaagaaggcaggctgagtctgctcgcattagagacaagtatcctgatagaatacctgtgattgttgataaagctgaaagaagtgacatcccagacatcgataagaagaagtaccttgtcccagcatatttgactgttggccaatttttatgttgtccgtaaaaggattaaggtcagtgcagagaaagctattttttgtttttgtcaataacactctaccttcaactgccgctttggaggtctttctatttattgaggaaaatta

SEQ ID NO: 262310 - DNA, 417 bp, Glycine max
gttgatcctgtgaacttatggctgacggggtggttctgttggatacatgggccagcatgtttgggatgagggttaggattgcattagctgaaaagggtgttgagtatgaatacaaggaagaaaatctcaggaacaagagtcctttgcttttgcaaatgaacccaattcacaagaaaattccagttctgatccataatggcaaaccaatttgtgaatctgcaattatagtgcagtacattgatgaggtctggaatgataaagctccaatcttgccctctgacccttatgagagagctcaagccagattctgggtagattacattgacaaaaaggtgtatgacacttggaggaaaatgtggctttctaaaggagaggagcctgatgcaaggaaagaaaggagttatctctatctttaag

SEQ ID NO: 262311 - DNA, 443 bp, Glycine max
acgcccacgcgtccgcgggatcagcacaagattgctaaatgaagttcaacattgcaaatgccaccagtgggtgccagaagaagctggaaatcgatgacgacctgaagcttcgagcattttgggacaagaggatctcccaggaggttcttggtgatgctctgggtgaggagtttaaaggatatgttttcaaaatcaccggtgggtgtgacaaacaaggattccctatgaagcagggagtgctgacccctggtcgtgttcgacttttgctccatagaggaactccttgttaccgtggatatggaaggctcaatggagagcgttgaacgaagtctggtcgtggttgcattggcagttcagatctctctggtttgaacctgggaattgtgaaaaagggggatagtgatttgcccggtgctcactgaatgttgaaaagcccagggatg

SEQ ID NO: 262312 - DNA, 393 bp, Glycine max
gttacttcaggaggaattactccgccgtggctgccgcagcggcggcggcggaggctgatgaggaggaagatgaggatgaggcggaggatttggaggaggaggaagaatgtgaagaggaagggagggggagcgaagtggaggaaggggagaaggagagggaagggatgaggaggttggcgaaggcgatagagaggtttggtgaagtgtatgagagaatggaggcgcagaagctgaggcagatggtggatttggagaaacagaggatgcagtttgctaaagatcttgaagtgcagaggatggagatgtttatggacacacaggttcagctcgagagaatcaagcgcgggaaaagatctggctctaacgatatggatagctagccaagtgggcgat

SEQ ID NO: 262313 - DNA, 452 bp, Glycine max
  unsure (1)..(452): unsure at all n locations
cttgcttggttatgatattggagtgatgagtggagcagccatatacataaaaagggacctgaaagtctcggacgagcaaatcgagatcctgctcggaatcatcaacctatactctctgataggctcatgtctcgccggcagaacctccgactggataggtcgccgttacacgattgttttcgccggcgccatcttctttgtcggagcacttctcatgggtttctcccccaattattcctttctcatgtttggccgtttcgtcgctggcattggcatcggctacgccctcatgatagcccccgtctacaccgncgaggtctccccggcctcctctcgtggcttcctcacttccttccctgaggtatttattaatggagggatattaattggatacatatcaaactatgcattttcgaagctgacactaaaggtgggatggccaatgatgcttg

SEQ ID NO: 262314 - DNA, 247 bp, Glycine max
cttatttctccgaacccaatccgaggctataatgttatcctctgatacgtggaatgataagaggaaggtgaaagacagtgcatgggttgtgaaattctgcgttccctggtgcaagcattgtaagaacctgggttctttgtgggatgatttggggaaggcaatggaaggagaagatgaaatagaggttggagaagtcgattgcggcatggacaaagcattgtgttccaaagttgatatttatttcata

SEQ ID NO: 262315 - DNA, 399 bp, Glycine max
cggacgcgtgggcggacgcttgggccaagtgctacagacaccaacaacgctgtagctctctcggctctgtgtcaccggcaccggggatctacatctgaacccgatccagccaatagatctcagaaatccaaatggagaacctaatctctttggtcaacaaaatccagagagcttgcaccgccttatgcgaccacggagaaaacagtgcactccccacactatgggactctcttcccgccatcgccgtcgtcggaggccaggtctcacctccgatccctctctcttactctcttctcttttcatctcataacgattcatatcgaaatctgtatgtctcactgtcagagctcaagaaagtccttcgtcttggaaagcgttgtctgcaaagatttcttaacc

SEQ ID NO: 262316 - DNA, 229 bp, Glycine max
gacccaaacggccgacaagaacagaccaacgagaacaccgggaaaataacaaacaaaaccaaaagggaaaccaccagaagccaaggccaggcgaaagcgcaaaccacgcaaaaccacacacagacacaaaaaaccaacaacagcgagaaaaccacaccaacaaacaaagaccaaaaacacaaaaaacacaacacaaacacacgacccaacaacacacacaccaacacaa

SEQ ID NO: 262317 - DNA, 342 bp, Glycine max
tcgtccacgcgttcgcggagatgtaccctgaaacgtagctacagccagaggctagaactccacgaggcgttacttagaacggtgacagagagtatcttgaatacgatgatcctaaaacggtatttcgaggataggcttgtgatgatcttggacgaactttctgtgagaccgaatatcataagggtgtctactagagaaatgtgaaaaccctttttattgccatgactactgcgttatcaatgtcaaccagtagtaattgtcgtgttgaattgtacatatgtataaggctatggatctcaatttatattggggtgaagtatcgctattaaactttacaataat

SEQ ID NO: 262318 - DNA, 430 bp, Glycine max
tccacgcgtccgcttttcggaaccaagcgtgtgatcggtttgcgttttgatgattctcaagcgcagaaggagatgagagatggggccatacaagattgttaaggcgtccaatggagatgcttgggttgaagccaatgggcagcagtattctcccagccaagttggtgcttttgttctcaccaagatgaaggaaactgctgaatcatatcttggaaagtcagtttcaaaagctgtaattactgtaccagcttacttcaatgatgctcagaggcaggcaacaaaagatgccggtagaattgctggtcttgatgttcagagaatcatcaatgagcccactgccgctgcactttcctatgggatgaacaacaaggagggtctcattgcagtttttgatcttggaggtggaaccaattttttgatgtgtccatct

SEQ ID NO: 262319 - DNA, 434 bp, Glycine max
cgctgttcctacaatcattccattagtgccctaccggtcgcaccctcctccctgcctccgtctccaatttccgacgagcattcgacgtcctcgatgccgaccgcgacagcaaaatcagccgcgacgacctccgcgccttctacgccggagtcggcggcggatgagatgacctgatcggggcaatgatgacagtggctgacaccaataaggacggtttcgtggagtactaggagttcgagcgcatggtctcggcggacagaaagcccgtggggtactgtggggccattagaggacgtgttcatggtcatagacaatgacagcgaccgcctacttatccaccattatcttaagacttacataggctgcgcttgttttccggtcaccgacaacgacatcaacgtccaattttatccgattctgctgcagctaccaaa

SEQ ID NO: 262320 - DNA, 449 bp, Glycine max
cccttatctttctctcttctcatgaccccggttaaaccctaactccctaccctagtccgctttgtctcatccatcatgaaaggaggaaagtccaagaccgaatctaagagagccgatgccaaacttgctgtgaataagaagggcgccgccaccaagactaggaaacccgccggaaaggggaaggcagcgaaagatcctaacaagccaaagaggcctccaagtgctttcttcgttttcatgtaattataatatattgttatctctacgattcatttgacttccgatgcgctctcttatctttcctccgaataattttatcgtcaaaacttttatccttgtccaattggaggaattcaagaaggtgttcaacaaggaacattccgacaacaaagccagtgtctgctttttgtgggcaaagctgctggaacaaaatggaagctatgtctgat

SEQ ID NO: 262321 - DNA, 423 bp, Glycine max
ggcttccctccctcctttgaagttacaaatctgaagagtgtgttgtgttgtgttgaagtaggaagctagcaaagatggttggcatcttatgaggcaataaggggcacaagatcaagggtactgtggtgttgatgagcaagaatgtgttggacttcaacgaaatagtgtccactactcagggtggtttggttggtgctgccaccggcatcttcggtgctgccaccggtattgttggtggagttgtcgatggtgctactgccatcttcagtcgcaacattgccatccagttgatcagtgccaccaagactgatggacttggaaatgggaaagttggaaagcaaacctatttggagaaacatgttgcttcgttaccaaccttggggagacagtgccaagatgcatttttctcaatcggtttatttt

SEQ ID NO: 262322 - DNA, 444 bp, Glycine max
tccacgcgtccgaggattacatcgatccaagtgtcaagagttctaacttcaatcttgaagagggagccaaggtgataattgctgcgcggagcaacaacgagatggatgcatccaaactgaagaacgagttccctgagcttctttccatcaaggaatcactgatcaagtatgtctctgagccaaacaagaaaactgcttaaatatattaaagcggattcatgttttatacatcacacattatgcatttctgtggcgggctacatatatcactcattatttcattggtattttgttgagtattgataagaaccatactacaaaagctagccatgtagttcttggtctcttagctataagcgattcctgtgtcagcatatctacattatattaccagggtttagaagggtgaacccccaagtattattaactgggccagatatggtt

SEQ ID NO: 262323 - DNA, 465 bp, Glycine max
ctccatgtgtttgtgcatgcaggaaagcacgtaaccaaattctctgtttcagcttcctctgggttttgggtacgaacagagttgctctgtttttgacgatggccataaaggcgattgaactgttgaaagggtgcggatcacaagaagaaataatggaagtgcttgctgcggtggcttcggatttgggggatgtgatcgatgatgtgaacaccttgcaggtgattccactgaatggtgcaatgaccaatgaggtttttcagataaactggccaaccaaaaatggtggtgagatcagaaaggttctggttcgtttatatggggaaggtgttgaagttttctttgacagggaagaagaaattcgaaactttgactgtatttcaaagcatggtcaagggcccacgcctttcttttggggccgattcacctctggcatagttgaggagtttattcatgcccgaacttttt

SEQ ID NO: 262324 - DNA, 340 bp, Glycine max
gccacgcgttctgcattgctctttgcaaccttatttctagctaattattatgggtattatggaacctgatatcggggataatggcatacttaatcaaatacacagaggccaacactccttccaatattccatacgcttgactagccactcctcaagctgaacctaaagctgtaaccacagccatcaccatagcaatcatgcatatatacacgcatattgcttatactaatccgtctaacattcaatctgatattaataatgatcttaataatcattttgataatcgtgaggacaaacgtaataacttatggatcaccttctaacaatattcttcatatca

SEQ ID NO: 262325 - DNA, 450 bp, Glycine max
tcctctttcaatctccctctaaaacttcacctacccaactttcacatcattttcttttctccgaacaaatgaaaatgaaaataaggaaagccttcatctataaatatagccatcacacactctccccattcgttccactcgttctttagatctatccactcacctgcctcttcctcacccctttctccatctaacgagtaaggaaaaatggcgcgtaagaagatcagagagtatgactcaaagaggttgttgaaggagcactttaagagactttctggcaaggagttgccgatcaagtctgcacaaattactgcatcaactgatttcactgagctacaagagaaggaaccctggctttcatcttctaaattggttgtgaaacctgacattgttatgttggaaaagcgttggcaaaatataagtggtttgagttgccttaaaatttggatt

SEQ ID NO: 262326 - DNA, 386 bp, Glycine max
ctggtttatagatctctgtgaattcgctatataacactcaacctaagatgcagagcgaggaaggacagatcaccgagctttacagtcctaggaagtgctctgccacaaaccgattgattaccgctaaggaccatgcttcggttcaggttaacattgggcatgtggatgagaatggcgtctacaatggccatttctccacttttgctctctgcggcttcatacttgctcagggtgatgctgacagtgccctagatcgcttgtggcataagaagaaagttgaagttaagcatcatttgacacccatgatagttagttactttgctatgtattaatttctacgcttgctaaagatatttgagtactatgattgacgactttgagcaaat

SEQ ID NO: 262327 - DNA, 378 bp, Glycine max
aatatgaacagaatctcgtctcgacaccttgtctatgcttcagctcgcaactgcaacttccgagaaatataaatatggattactgcatggtcacacatagttaattttattaattactactaggtagctggtttttaataggtagtaagtaagtgtaatcgttgtcttcctgcagatatggaagaagcgggtttaggagattgttgttcctctaatacgactattacgaggaaaagcgagaagcgaaagcatcagcaccaacaacaagagaagccatacagaggaataaggatgaggaaatggggcaagtgggtggctgagattagagaacccaacaagaggtcgaggatctggttgggttcttacgccacccgcgtc

SEQ ID NO: 262328 - DNA, 347 bp, Glycine max
cggacgcgtgggggagttttattattctctgtcgccaataacgaaggcatatggcgccgtttgcctgttggctacggcaacttaccatcttggattatatcatccagcttacattgcactattctacgataaagtgttctacggttttcaggtttggaggttgttcacaaacttatttttccttggaccattctctatcaattttgggatccgtctcctaatgatagtaaggtatggtgtccaacttgagaaaagaccatttgatcgacggactgctgatttcttgtggatgatgatatttggtgcctttgcactattggtattgtcttctatccccatattttggt

SEQ ID NO: 262329 - DNA, 455 bp, Glycine max
cccacgcgttcgaagagaatcttatgaaagttagaagaaaatgggagtggaggagcagttgttgaggcctggcaggggtcccgggccaattcccggtcagaacgtcaccgttcactgcactggtttcgggaagaacggtgacctttctcagaaattctggagcaccaaggatcctggccaggaccctttcactttcaaaatcggccaaggttctgttatcaaaggatgggatgaaggtgtgcttggcatgcaaattggtgaagatgctcgtctccggtgctctccggattatgcttatggtgctggtggctttccttcttgggggatacagcccaactctgtcttggaatttgaaatcgaaatcttgagtgcacaatgaataccttgggtagtctggtctctggtcccccctaagaataaaatcatcatccatttcatggacttgaattatggat

SEQ ID NO: 262330 - DNA, 445 bp, Glycine max
  unsure (1)..(445): unsure at all n locations
gtttgctagctctatgacgcattatgacttttgaacagttgcatgcttaggaagcagtgtctgtcaagaaacgttgtattctggtcatataaattgtggtggaaagatagtaacagacaatggaagcacatatgatgatgattcagatactggaggtccagcaagatttcaccgaagtggaacaaaaaaattgggcatatatcaatactggtaactttatggataatgacgctggcgcctattatatcgtgcaaaataaaactttgctttctatggacaatgttgacctatacatggatgctcgagtttcttccatttctcttacttactatggattttgcctgggaaatggaaactacacggttaatctacattttgcggaaatcatgttcattgatgatcaaaaaaacatttaacagcttangaagacgagtatttgcatcta

SEQ ID NO: 262331 - DNA, 325 bp, Glycine max
tacgttgcacccccagcgacccttcgtgagccggatcaggccattatggccgttctacccattcttccgagtacaatgtcgaaggtggtctaagcctgttaaacggagttgcaccgcctgctggacgtcgtgcaggcgtacgtgcattctactgaacaggtgcctcacttcatggagttatgtcagggtcaatgcgctctgaagccattgaactcgttacactctagctctgaaaatactctcttcaagtgcgtacaaccgcttcattgtcaccactactcgactttaccagccagcttgtccatattgtacagaaaggatggca

SEQ ID NO: 262332 - DNA, 465 bp, Glycine max
tccacgcgtccggagacagcaaattggggtctcgatgattatgaacttcgacaatcagtggggcaggctcgctctaaaggaatggctgttaaagcaatggggatcataaatcctggaaaccctactggtcaatgccttactgaagctaatctaagagaggttttgcaattgtgctatcaagaaaatttatccttgcttggagatgacggttaccagactaatatatatcatgatgaacgaccctgcatcagctctagaaaggatctgatggaattgggaccacctataagcagggaagttcagcttatttcttttcactctgtgccaaaacgttattatggtgaatgtggacagctagggggatattttgaaatgaccaacattcctccagagaccagttgatgagaatctaacctaaaaggtgcatcaatatcacttagtccaaatgtccagcacaaatattat

SEQ ID NO: 262333 - DNA, 456 bp, Glycine max
  unsure (1)..(456): unsure at all n locations
tccacgcgtccgggtgtgtgtgtaggtgcactctctcctttcttacacagagagaaaagagagagaaagaaaaggatgaaatagggaaaacctttgggtctttccctccatagttccatttttccattcaacaacacaacacctcatacagacatcatggaggcaggttacaatcctcgtaccgtcgaagaggtctttagggatttcaagggtcgcagagctgctttgattaaagccctcaccaccgatgttgaagagttctaccagcagtgcgatcccgagaaggaaaatctttgcctttatggattttcaaatgagcagtgggaagtcaatctggcagctgaggaggtgccccctgagcttccagagccagcattgggcattaacttttgccaagagacccggatgcaaaaggggataaggactggctgtctntggttgctgtacacagtgatg

SEQ ID NO: 262334 - DNA, 439 bp, Glycine max
gcacgaatatctagtaggttggagcgatccttgaaaaactctgtacacatgttggtttaccgggacctacttacaggtgatgagcttctctctgactccttccgttacaaggaaattgagaatggaatgctgtcggaagttgaggggaagtgggttgttaaaggagcaattgatgtagacattggtgcaaacccttctgctgagggtggaggagaagatgagggagttgatgatgcacctgttaacgttgatgacattgttgacacattcagacttcaggagcgacccgcattcgataagaagcagtttgctaccttcatgaacaggtttatcaagaatttgactcccaagctcgatgcagagcaacaggagttgtttaagaagcacatcgagggagcaactaaattacctgggccttctttaagattaaagatttcca

SEQ ID NO: 262335 - DNA, 424 bp, Glycine max
cgcatgggtcattacacgtagctttacaaagtccgatgtgtctaagtggttgagggctttaattgatcgagctcggagtgttgagcctggatggaaagtcagtggatttttaattgatgacgctgcagctgaaattgatcttttgagagatatattttgctgtcctgtcctattttcactatggcgtgttcgtagatcatggcttaggaatattgttaagaaatgtagtaacattgagattcagcgggagatttttaagcgtcttgggagaatagtgtacaacatttggggaggtattaatgcatcgcttgccttggaacaattcttgctggattttgttgaccaaactgctttcatggaatatttcaaagtcatgtgggttgcccaaagcgttgaaatgtgtggggccctttcaacgatgaga

SEQ ID NO: 262336 - DNA, 451 bp, Glycine max
cccacgcgtccgcccacgcgtttttccagttcccgcccacgcgtccgcaaagctctctcgctctctgtctcgcgctctgatctgctttgtttcaggagccacccgctcctgcagatttcttttgcggctggagtggaaggccattctcgcaacgtttgagttcagcagatccagaatttttcagaaaacaggtttaggagaatgaagaatacggaacgaattgccaattcggctttagcaggtttaaccttagcgcctcttgttgtgaaagtagatccgaatataaatgttattttgactgcttccctcactgtgtatgagggctgttaccgctccgttaaaccaaccgcaccaactgagacaatgtccaatgaacatgccatgcgtttttccctttgtttggggaaaaatgcaatgttattgtcactcttcttactcttcaagtttctat

SEQ ID NO: 262337 - DNA, 323 bp, Glycine max
accggatcgttagcacaagttcaggaactatgagtggcttggtgcccatttgttctagaacgcttatgttgggataccaatacatgaggacggtcattggaacttgatcattatttgtgtcccagacaaagaatatgaatcacggccaatcatacttcatttggattctttggggcttgactctagtaaatcagcttttgataatattaaaagctatttgattgaagaaaagaactatatggatcgagaagatgtgtctgtagatgtttcaattgcggatagaatatggaatcgcctccctacgagaattgaatctcagatca

SEQ ID NO: 262338 - DNA, 360 bp, Glycine max
tccactcgtccgatcagagcctacagacacgttaaccctttcaatcccttgcacaaagggacggtaactgggcccttgcatacgggtacttcagtggaaaactttcagagaggaacttcaatcataaaatctcacggagggaatatcctaacaagtgtatctggattatagccaacatgaaaattcttacaaccaacaattgtcgatatttctgccgatgctcctgtagataaccaataattgtttactccagttctgaatgttatgaaattacagactctatactaagcatatgcctttaacaattctgtacctcatggattacataagtcacatctttacccaaatacctggaactat

SEQ ID NO: 262339 - DNA, 376 bp, Glycine max
cttacgcaccattgcctgaatgttgatgatttcgaatagatgctggaaactaacagattgtgggtgaccattcagggggatctggagaggatcattctattcggcctagaataaaggtgattgtatattcgatgccataaggtgagatacttactgctgttgccaatttaacagatgcacaaactgaactcatagatgcctaataggacgacgattctgaactatcagtaggacctgcaccaccagctatagactctgatgcagaattatctaatgaatctcaacgccttgaagatgcaaccagtatcatagaagctgaggcaaacagacaccatgatgttcttggagctaaccataatatgaccaatgacaacat

SEQ ID NO: 262340 - DNA, 353 bp, Glycine max
cgcttgagtttggaacagaggaaaatccacatgcaaatcatattcaccatcctctaatgcatggctatcacaagagctggattgggctgctcagcaaaggctgagctgggtgcagaagaattacatgatttacaattattgctccgacaaaaacagatttgctcaaggccttccactcgaatgcacacattcgtagaggacttcatcttccactagcacaagtgttacattataatttcatttaccattcttttattttatttccttttaattcctggtcacagtttgtgctcttttacgatgtaaaatatatcgcatgtaaaataacggttctgttatttggatgtcaaaaa

SEQ ID NO: 262341 - DNA, 446 bp, Glycine max
ttacctttcgacccactcgtccgtccacgcgtccgttcaaggtgacttcgccattctcaacttttgtaacctccgacaccagggggcctccttcggtggtgacttgggggagtataagcctcttcattccgccgttgacgccaagcttcaggccatttgcgagggcctggctgagctgcacaaacaggggaagaccgagaagcctccgaggaaaacgcgatccaaactcgcttctccgccagagaacgacaacaacatcgacaacaactcttgtaaggtcgaagctgcttcctcctcttctgaaagttcttcgccgctttcggttctgactttcgctgacgtcagcgagccgcaatgggaaagtgaatcggataattctaatctccagatgtacccctcttatgaaatcgactgtgattctctgtgaaaccccgtgttttcttttt

SEQ ID NO: 262342 - DNA, 267 bp, Glycine max
gttacacccagtcgcctgcatcttggtggttagagttcgtgtattggtaccctgctaactggtaggggatatagacgctggactgaactatctgttaaagctcattctttgaatggtcaacagtgtatacattgtatgttaattgtacgagatggttgtgttacaatcacaaaatgggaaagtatcacaatgtcgtttgatcatgcttaaaatgccgaggaagaataggatgattattcaattgactacgatggaaatgatcttgat

SEQ ID NO: 262343 - DNA, 418 bp, Glycine max
cccacgcgtccgcgttatcaacacattcaccgagtttgaacaagtttacttaaaccacttgaagaaagaattgggacacgaaagagtctttgcggtgggcccggttctgccgattcaaaccggttcgatttcaacaaaaccggaagaacgaggcgggaacagcaccgtttcgcgacatgacatcatggaatggctcgacgcacgtgacaaaggttccgttgtttacgtgtgtttcgggagccgtacgtttctaacgagttcacaaatggaggtgttgacacgtgcgttggaaataagtggggtgaactttgttttgtccgttagggttcctgaaaaaggacaccttgcgaatgagcacggtacggtgccgcgttggttttcagatagggtgaaaggaatgggatttgtgattgaagga

SEQ ID NO: 262344 - DNA, 466 bp, Glycine max
cgaacttatgggagatcttgctgaaattcggggcaaccttcttgcattgcaccgaattgcgcggcctccgtcatgatgagctgggtcaggaaacacttcttaatttgttacttcgtaactaccttcactacaacctatatgatcaggctgagaagttgaggtcgaaggctcctcgatttgaagcacattcaaaccagcagttttgtcgttatctcttctacctagggaaaattcggacaattcagctggagtataccgatgcaaaagagtctctcctgcatgccgtccggaaagctcctgttgctgcacggggttttcgaattcaatgtaacaagtgggctgtgatagtgcgtttactgttgggagaaatacctgagcggactgtcttcatgcataaaggaatggagaaagctctaaggccttactttgagcttacaaatgctgtgcggattggagacttggaact

SEQ ID NO: 262345 - DNA, 263 bp, Glycine max
gaacttatggtagatcttgctgaaattgggtgcaaccttcttgcattgcaccgaggtgccgcccttcttcatggggagctgggtcatgaaacacttcttaatttgttacttcttaactaccttcactacaacctatatgatcaggctgataagttgatgtcgaaggctcctctatttgaagcacattcaatccaacatttttgtcgttatcacttctacctatggaaaattttgacaattcatctttagtatacctattcata

SEQ ID NO: 262346 - DNA, 469 bp, Glycine max
tggaagaagccttttgctggttcatcccatgccaagggtattgttcttgaaaagattggtgttgaggctaagcagcccaactctgccattcgaaaatgtgccagggttcaactcatcaaaaatgggaagaagattgctgcatttgtgccaaatgacggttgcttaaattatattgaagagaatgatgaagtcttgatagctggatttggacgaaaaggtcatgccgtgggtgatattcctggagtcaggttcaaggtcgtgaaggtttctggtgtgtctctcctggcccttttcaaggagaagaaggagaagcctaggtcttaagcttgtgggtcgtgtcctctctatagtctatccaaaaaattattatgaattttgcttcttgagactggatgagttctctgaacaattttgtatctctctaatagtaatttttctgaaacttaaatttggttcgtatgtcgcactt

SEQ ID NO: 262347 - DNA, 458 bp, Glycine max
cccacgcgtccgcccacgcgtccggattccgcaacagagagtagaaaagatggcgcggttgatcacagtggtgtggtgcgcggtggcggtgctactgtgcgccgcggcgggcgcgtcgtgggtggaggaggcggcgaacccgatacgaatggtggcgggggtggaggcggaggtggttcgggtgatagggcagtgccggcgcgcgctgaagtttgctaggttcatgagcaggttcgggaagagttaccgaagcgaggaagagatgagggagaggtacgagatattctcgcaaaacctgaggttcatgcgctcccacaacaagaaccgcttgccctacactctctctgttaatcattttgctgattggacttgggaggagttcaaaagacacagactaggcgctgcccaaaattgctctgccactcttaacggcaaccacaagctcactgatgctgttc

SEQ ID NO: 262348 - DNA, 446 bp, Glycine max
  unsure (1)..(446): unsure at all n locations
caaattgcaactccttctcggcttttcctaatcagcacgaacacaaacacagagagagacgtggattttgaactgagaagagcgagagagaagctagagaaagagcagagggagaggaaggaaagagcaagactgaaacttcagaaggaaaagaaggccaaagaagaggctcagaagcaaaaggaagccatcgaagctgttcaaagatctcgtcgtattgatgccgctcaagctcaactcaaggctgcccaacagatgcaagataacctacttgctggcggaggaatagtgttttaccgactactagagggctttttttatgaaggcggtggagataagatcaagctacctncttcttgctttgcagaactggctgagcagggtacttttgataagagacagggacccttatactgtcagttggcgttaggtcatgaagaaagcac

SEQ ID NO: 262349 - DNA, 345 bp, Glycine max
tctcgatcaatcatggctttgcccaatcagctaaccgtcgattaccctactttgaaactcgggatcgtcggtgacggtggtacaggaaagacaacgttcgtgaaaaggcatcttaccggtgaatttgagaagaaatacgaaccgaccattggagtggaggttcacccattggatttcttcacaaactgtggaaagattcgcttctactgttgggatactgccggacaagataagtttggtggcctcacggatggatattatatccatgggcaatgcgccattatcatgtttgatgttactgcccgactaacttacaaaaatgtgcctacctggcatcgggatctt

SEQ ID NO: 262350 - DNA, 401 bp, Glycine max
gcggccgagagctctttgagaaaatctgcagtgctgggcgttctacctaggatgaggctccatggttctgggatcatctcatatctggggtcagctattgacatgctatgcacggatgtcatcaggacttcaagcttgaaaacactttgctggatggaatcccggcacctagtttaaagatatgctattatacgtactcccagtcttcactgcttcattcacaaccaaagtcaactgtgggaactactgcatatattgctccagaacaattgctgatacaagagtatgatggccagcttgcaaatgtctggtcatgcagggtaaccatatatgtgatgctagagggatcatatcctttttcagatcctaatgaacccacagactttctcaagacaattcat

SEQ ID NO: 262351 - DNA, 473 bp, Glycine max
accaagcgttcggacagtcagagggtaaagctactctcaacatctatgctatgaatcaatgcgtagggtagcagcacgtgtcggtctggtgttccagagacctgctatacactggcttgaagacatggtgaggccgatcagagaatgtgaatgcagcacacgatgcacttcttttccgtaccaagtgcaactcgctcgcacacttcactaagtacaccattcagggtgaatctcaggaagcctacaaggtattggaccacaaaagctactcctactcagatgtttataatgaatcttatccatgtgatgattcgctaacacacccagaaccgattgctgtagactgtctatgaaattcattatgatgattggacttaagacgagttcaaaagacacagactaggcgctgtccaaaattgctctgccactcttaacggttaccacaagcccactgatgctgatcttcttccacg

SEQ ID NO: 262352 - DNA, 359 bp, Glycine max
cttaataccaattttctagggtttatacaattttcgatggcttcttcagatgttgagtaccgttgctttgtcggtgggctcgcttgggccactgacgaccaagctctcgagagagccttctctcagtacggcgaaatcgttgaaacgaagattatcaacgatcgtgagactggaagatccaggggttttggatttgtgaccttcgcctcggagcagtccatgaaagacgccatcgaagggatgaacggccaaaaccttgacggccgtaacatcactgttaacgaagctcagtcccgtggtggctgtggcagcggacgcagttgatgtggtggatatggtggtggtcgcagtggtggata

SEQ ID NO: 262353 - DNA, 446 bp, Glycine max
atgatgttgatcatggattaaatttagaaaaggctggagctactgctgttgtccgggagaccttggaaccaagtcttcaactagcagctgccgtgcttgctcaggctaaacttcctacatcagagattgcatcgactataaatgaattcagatcccgccatctatctgagctcactgaactatccgaaacaaatggaacttcttttggatatggatataatacaactacgagcagagccaaatctcattccccagattcatcagatgatacgtaagtctatgaaggtaaactggcgacatgaagattgccccatatatacaaagtggaaggtaaaagaaaacagaaaagtgaaaaattgtatagcaacagagtaaatgttccatcatgatgtacagaaatatatatatctgcctaaaaaaatttgattaatcatccttaaatttca

SEQ ID NO: 262354 - DNA, 506 bp, Glycine max
cccaccgtccgcccacgcgtccgcaaagaccgagttagaggtgactgttgagagcaagaacggagacctcaagcacctggggtttgtgaggattgctgctattcaaacatttgtgattgtgtcaaatctgtatgagtacgcaaagcagaattctgggcctttgagatccgtcgtaggaacggttgagaacactgtaaccaccattctcggtcctgtctgcaacaaattcaaggacgtgcctgatgatgtccttgtttttgttgacaaaaaggtggatgaagcttcccacaagttcgatgagcacgctcctccttttgctaaacacattgcggatcaagccaagggtgtgattcagaaagtgacttgtgaggcaaggaaagtagcaagtgaagcacaatcttgtgggccaagagcagctgttcattatgttgctacagaatcaaagcattttgggtttgataattcagtaaagttgtggaatggacttaaccacttttcaccatttc

SEQ ID NO: 262355 - DNA, 404 bp, Glycine max
cccacgcgtccgcccacgcgtccgcccacgcgtccgggcacgctgagcatggaacacagagggctagaactcaagctggcttcagcaaaggatctcaaagacttgaatatattctcaaagatggatgtatatgctgtgctttcactctccggcgatcaaaagaccaagactcccgtccacagaaacggcggcaccaacccaacatggaattttccggtcaagttcacttttgatgaatcggtggcgcggcagaaccgtttggccctcgaaatcaagatccgctccgagcgcgccctcgccaccgataaggacatcggccaggtccacgttcctctcatggaactccttaagcaacctggcgacggtaaatccttccagcacgttagttaccaagtcagaaaacc

SEQ ID NO: 262356 - DNA, 411 bp, Glycine max
gttgttgttggatatgaatgaattctgagttcaagagactcacaacatgaagcatatacggtcgaaattggaagagatgagggtatgaatgattacaaaggacgagaaggagaacgtagcgttgctgttgatcggaagcgattcactgaaaagcaataaccttgttctttcacaaggaccataatataccaacatcatcgtcgatctgcttccctcgctaacactgactactaggaatctgaaacagatgtaaaattatctgatgttagtgttcaataatgtgatgacacatattggatcatatgggtttgcaatttgagaggtaatgaatggttttgcgtaattaatgatgatgtcatgcaagtatgatttcaacctctgtggattaagtagtcaagtgccttactatga

SEQ ID NO: 262357 - DNA, 251 bp, Glycine max
gttacgacccgcacgaaaggcgtaacgatctgggcactgcctcggagagagactcggtgaggtagagatgtctgtgaagatgcggactacctgcacctggacagaaagaccctatgaagcttcactgtttcctgggattggctttgggcttttcctgctcaagttatgtggagggcaaagaaggcctacttctgggggggccagagccattagtgagataccactctggaagagcttgaattttaaccttg

SEQ ID NO: 262358 - DNA, 253 bp, Glycine max
gaaagacaaatggcaacaagcgaagaagtggttgcggctgcgccggtggcagccgggctggaggcatggctgaagcacaaactggatagaaaatggacgttttggtgcgacaaccaatccaaacctaaacagggcgcttcttggggtacctctcttctcaaggtctacaccttcgacaccggtgaagagttctggagtttgtatgatcaggtattcaagcccagcaagtgctaattattgcggtttttcactt

SEQ ID NO: 262359 - DNA, 459 bp, Glycine max
cccacgcgtccgcccacgcgtccgcgatcctagcactctcttctgcagctttcgccgacagcttcattcaccatggctgagcaaaccgagaaggcttttttgaaacaaccaaaagtgtttctcagctcgaagaaaactgggaagggaaagagacccggaaagggtgggaaccgcttttggaaatccattgggcttggatttaagactcccagggaagccatcgaaggaacctacattgacaagaagtgccccttcactggcaatgtttccatccgtggccgtatcttggctggaacatgtcacagtgctaagatgaacaggactattattgttaggaggaattatctccattttatcaagaagtaccagaggtacgagaaaaggcactccaacattcctgcttatatatcacctgctttccgtgtgaaggaaggagatcacgttattaatggtcaatgc

SEQ ID NO: 262360 - DNA, 451 bp, Glycine max
tgaagccgtcctgacagacatgcatgcgccgttcgagcggctcctcgatcggctccagccggcgccgacagcgatccttggctgcgtcgagctccgctggcccatcgccgtagccaatcggaggaatattccggtggctgcgttttggaccatgtccgcgtcgtactattccatgctgcatcacctcgatgtctttgcacgacaccggggtttgaccgtcgataaggatacgatggatggacaagccgagaacatcccgggaatttcttcagctcatttggcagaccttcaaactgtgcttcatgaaaatgatcaacgagtcatgcagcttgctttggaatgtatatcgaaagttcccatagcatattatctttgactcaccacagtccaagagttataagctgaaacagttgagtccttaaaagctaatattccctttccaggctatcct

SEQ ID NO: 262361 - DNA, 345 bp, Glycine max
cgtcacgcctcccgtcctgcatgcatgcgctctattttgcagcttcttaaaaatgcgttatggaactatgggtgtgcatatcatgaatgcttttatgtaacagccaaatgtgtttctcaactcgtagtaaactgataatggaaagagacccgggtatgggtgtgaacactcttatggaaatccactgggcttggctttaatacttccagggaagccatccaatgaacctacattgactagatgtgtcatttaagtgtctatgataccattcgtggccgcatcttggctataacatttcacagtgctaagatgaacatgactattattggtaggaagaattatctt

SEQ ID NO: 262362 - DNA, 482 bp, Glycine max
caactgagttgagaggtccggttaactacaagtatacagatttgaaagctgcaacaaaaaatttcagtgttgaaaataaacttggagaaggaggatttggtgctgtatacaaggggatacacagcacctgagtatgcaatgcaaggccaattgtcagagaaggctgatacctacagttatggtattgtggtcctagaaatcataagtggtcaaaagagtaccaatgttaagattgatgatgagggtcgtgagtaccttcttcaacgagcatggaaactgtacgagagaggcatgcaattggagcttgtggacaaggacatagaccctaatgaatatgatgctgaagaagtgaagaaaatcatagaaattgctttattgtgcactcaagcatctgctgcaacaggccaacaatgtcagaattagtagtgctactcaaaagcaagagcttagtggagcaactgcgaccaactatgcctgtgttt

SEQ ID NO: 262363 - DNA, 471 bp, Glycine max
ctttagagttggaagatgctaaagaacctccattgaacttacacaagcctaaagaaccctatacagcaacgattgtttctgttgataggctagtgggaccaaaggctcctggggaaacttgtcatattgtgattgatcatggtggaaatgttccctactgggaaggacagagttatggtgttattccaccgggtgaaaatccaaagaaacctggggctcctcataatgttcgactatattcaattgcttctacaaggtatggagacttttttgatggaaaaactgccagcttgtgtgtgcgtcgtgctgtttattatgatcctgagacaggaaaggaagatcctttcaagaatggcatatgtagcaattttttgtgtaattcaaagcctggagacaaaattcagatcacaagcccttcaaggaagataatgcttttacccgaagatgacccaaatgctacccatataatga

SEQ ID NO: 262364 - DNA, 397 bp, Glycine max
ccctctttcaaggctccacttttatgggtccttggaatttcttcatcgaagtatcaaacttgtcttctctctctctccttttacttcctctgcatatatgatatattcttccaaaatcctcatctaagggttaattttgttccggacaagtttttattattattattattattctttaaatttcagaatgatgtacttataagtttctgatccaaggtttaagatgttatagtttccttgaattctcatctgggttcaacctgcttgatgttttgactgaacaacatatgaatattgcacagttatcgatgcgcctggacatagggatttcattaagaatatgattactgggacatcccaagctgactgtgcttgtcttatcattgattcgaccact

SEQ ID NO: 262365 - DNA, 360 bp, Glycine max
accacgcgtgcgggcaaggatctcaagcgatgttttgtggcatccaactccaaggatgacggtgccgaggaagctgccaactgcacatttcaagtcattatcatgaaccaccctggccagattggaaatggatacgcaccgacgcttgattgcaacacgaggcacattgctgacaaagtttcgtgaaaacttgaccaagattgacaggcgatctggtaaggagcttgagaaggagcccacatctttgaagaatggtgatccacgtatagttaagatgattcccaccaagcacatggtggctggaacttactctgagtatcctccccttagaccatttgctatgagggacattcatgaaac

SEQ ID NO: 262366 - DNA, 499 bp, Glycine max
caattacaaattacactctttgcctcgcaccttcaacttaaccttttctactgataatctggacaacttgctagaagaagataaagaaagagaaaaagtgtgtgtgtgtgagagagagcaatggctggctcgtgggcacgccgttctctgattgttctggctatcatttccttcggatgtttatttgcaatttccattgctaaggaggaagccacaaaattggggacggtcatcgggattgatcttggaacgacctattcatgtgttggtgtttacaagaacggccatgttgaaatcatagccaatgatcaaggtaaccgtatcaccccatcgtgggttgctttcaccgacagtgagagactaattggagaggctgccaagaatctggcagctgtcaacccagaaaggaccatctttgatgtcaagagacttattggaagaaagttcgaagataaggaagttcaaagagatatgaagcttgttccttataagattgtca

SEQ ID NO: 262367 - DNA, 389 bp, Glycine max
gtcagctcttagatcctagggatgaaagttgtatatttttagcagtaacacagatttattgggtgtgaagcaatgtgggaaacacatgtgttggtcctagcatttcaaaaaatggttttgttcaatcagtttctgcggcgatttggcagtcccaattgcctgaagattcagtgtctaatagagaatctgtaaaagaggaagtaactaatgttcctgaatctgccttgcctgtccaaaacaaaccttctgagcagataactatgccgaaaccagaagcctatcatgagggaaaatcataaatagaaccggaacatgataagaagaaacagactaaacgtggttcggtgaagagagtttctagtgcaaggcttttcagttgattctgtgtt

SEQ ID NO: 262368 - DNA, 246 bp, Glycine max
tgaaattctaaaaatgactgggagatacttaataattcaatcatggaaatctatggattgggcaaattaatcggagggggcgtatggtttcaaaaaaatggtgtactaactcccatttcttattcattatccggattaaccgatcaactagctgtgctatcgaacatatgcttctggtactcaaaaatctcgcggaataaatctgcctctacttatatttgcaccctattcctactactctttggg

SEQ ID NO: 262369 - DNA, 453 bp, Glycine max
  unsure (1)..(453): unsure at all n locations
cgctggattcctgagaaagtttcttctgttgattgtgacaagatggtcatggttgcttgtggttggcggcatacaatttctgtttcatctttgggtggcttatacacatatgggtggagcaaatatggccagttaggacatggaaattttgaggattctcttgtgcctcaaaagcttcaagccttgagtgataagttaatcagtcaggtatcgggtggttggaggcatagtatggcactgacgtctactggactactatatggatggggttggaataagtttggacaggttggagttggtgacaatgttgatcgttgctctcctgtgcaagtgaagttcccccatgatcagaaagtagttcagatctcatgtgggtggagacacacaattgctgtaactgaaaaggaaaatgtattttcttggngaagaggcacaaatgggcaacttgggcat

SEQ ID NO: 262370 - DNA, 399 bp, Glycine max
  unsure (1)..(399): unsure at all n locations
cccacgcgtccgaaagttaagcattctcttcctcctagtcttatccttcagttctgtactggcanaactatgcaacccacaagacaaacaagccctactccaaatcaagaaagatcttggaaacccaaccactctctcctcatggcttctaaccactgattgctgcaacagaacatggctaggtgtttcatgcgacaccgacacccaaacataccgcgtcaacgacctcgacctctccgatcttaaccttctcaaaccctactctattccttcctccatagccaacctttcctacttgaattttctttccattagcaggaccccaaccctaatcggtcaaatcctctcagccttcgcttaacttacccaactgctgtatctttatatcatccacaccaa

SEQ ID NO: 262371 - DNA, 272 bp, Glycine max
ggcacgcgtacgaaagttaatcattctggttctactagtcttatctcttctagttgtgaactggggagaactatagcgcccgcgtgacaaacatgccctactgcaaatcttgatagatcttggaaactcgaccactcttttctcatggcttctaaccacttattgctgcaacatatcatggctaggtgtttcatgctactctggcacccatacatattgagtcaacgactactaccttgactagcataaccttctctaaccccactctattt

SEQ ID NO: 262372 - DNA, 493 bp, Glycine max
aaaaaagtttccatatacacaaagagagtgacgagaaagaaaaatggtgtggaatttgtcggtgtcagcaactagggtagggttccctccgccaaacccaaagaaagagtagaagaaacctacaaaactcatctctataaacaactccgtttgtcactccggcggctttagcaatcactccctccgttttgcgttttggattcatttatctgctgctttatcttaaaggccaagcgataaataacctctctctctctctctctctgtgagattgagaatccgatccttcgtttccgaaattctcgcgagatggacgagaacctgctcgacgatattatccggaggctcgtcgcggcgaagaacggtagaacgacgaagcaggtgcagcttacggaggcagaaattcgacaactctgtgtttcctccaaagagatctttctcagtcaacctaatcttctcgaacttgaggcttctattaagatttgtggagatg

SEQ ID NO: 262373 - DNA, 386 bp, Glycine max
gataatcctacgtatttgtgaatagtgctgtactggctcgaagtcaggaggaggtgacccggattgtagctactggaaggccatttgagtgcatggatcatattgcccttaagggaaagggaggtcaatacagatatgcataataatatcctgacgtacaactagcacctgctcttcaaatgctacccatttcacaagaaggatacacagtttattcacaatgagaagcccataaagaactttgttttaatgggtcaatacaatgatatatcatgtaatatcaaccccattttgaattgtgatacttaccccataggctaaaattttttctgggccaaattcattgttcataaggaatttggtgctccatttaaattcgtttttac

SEQ ID NO: 262374 - DNA, 439 bp, Glycine max
caaagttaagggacccaaatttcaagagattgttaatattcgtttaggagatggaactactcggcgtggacaagttctagaggttgatggtgaaaaagctgttgttcaggtatttgaaggtacatctggaatcgacaataaatttacgactgtgcaatttactggagaggtgttaaaaactcctgtctcactagacatgcttggacgcatatttaatggctctggaaaaccaattgataatggtccaccaattttacctgaggcttacctggatatttctggaagttccatcaatcctagtgagcgaacctaccctgaggagatgatacagactggaatatctacaattgatgtcatgaattctattgctagaggtcaaaagatccctctattctcagcagccggtctcccccataatgaaatcgctgcacagatctgt

SEQ ID NO: 262375 - DNA, 354 bp, Glycine max; identical to SEQ ID NO: 226309

SEQ ID NO: 262376 - DNA, 449 bp, Glycine max
atcgatttatcgctcttttatgtggttggcttcctttcgctctcttctctgcaaatgcttcattccaagatggttaggactctgtaggctgataaagacaacactcataccgttggaaagaaggatgctgctggccatgttgcttaatttagttcttgcttcctttgtcttcttgagttttatcagagacgggagtgcagggatcactagctctttcattcggtcagagtggccggcagttgacatcccccttgatcatgaagcatttgcagttccaaagggttataatgcacctcaacaagtgcacatcacgcaaggtgactatgatggaaaagcagtaatcatctcatgggtgaccacagaagagccagggcacagccatatacagtatggcacatcagagaataaatttcaaactagtgaagaaggcacagttacaaactatactt

SEQ ID NO: 262377 - DNA, 443 bp, Glycine max
cggacgcgtgggcgcaagtgcccttagacttaattggaccactatcctatgcatgcctttgatttatattataaaataaaaataatactatatataacatgttaattgcttaatatgtgctttaagagtaaagaataacatcgtgaaatcaaattacccctttttcaatacgtgttgaatcatcgatcttggtttgtaatttggttgtatattcacaaaattaataagtatattgtgatgtgattaattcccttctctgttatggtgtacttgccttccctgtattgtccatctccatcgtctgtctattaataagaattcttatgtgatattttcatttcaaaaaaaaaaaaaaataaaaaaaaattaaaaaaaaataaaaaaaaaaaatttataaaaaaataaaataaaaaaaataataaataaatatttttaataatata

SEQ ID NO: 262378 - DNA, 412 bp, Glycine max
gagaaatggcgatggcaatggcgcttcgcatgctttcatcttcaattgacaagcctctgcgcgctctgttcaatgccggttccctctactacaagtcgtctttgcctgatgaagctgtttacgacaaggagcgacccggagttacatggccgaagcagttgaatgctccacttgatgtcgtggatcctgagattgctgatattattgagcttgagaaagctaggcaatggaaggggctagaattgataccgtcagagaatttcacctctgtgtctgtgatgcaagcggttggatcggtattaccaacaaatacagtgaggggtaccctggtgcatgatattatggtggaaatgagtttattgacatggctgaaacactgtgccaaaagcttgccctataagcttttaaattg

SEQ ID NO: 262379 - DNA, 448 bp, Glycine max
gaaaatacaagccgtagaagagggctcgctctttcgtgtttttgttcgcgaaggaaactctgtccttagctatcgcgatggatcggtaccagaaggtggagaagccaagagctgaaactccaatcgatgaaaacgagatccggattactagtcagggaaggatgcgcaactacattacttatgccatgagcttgcttcaggagaaaggttctaatgaaattgttttcaaagcaatggggagagctatcaacaaaaccgtgacaattgtggagttgatcaagaggagaattgtgggccttcaccagaatacagcaattggatccactgatatcactgatacttgggagcccctagaggaaggcctccttcctttggagacgacaaggcacgtgtcaatgataacaataaccctttcaaagaaagaactcgatacattgtctgtggggta

SEQ ID NO: 262380 - DNA, 436 bp, Glycine max
cccacgcgtccgtttgttgttgtaactcgttcttcttcttttgttgttctgtgtttgtgtttgttttttctctcacctgaaaatgtcttgctgcggtggtaactgtggttgcggaagctcctgcaagtgcggcaacggctgcggaggctgcaagatgtacccagacttgagctacactgagtcaaccaccaccgagaccttggtcatgggagtggcacctgttaaggctcaatttgagggtgctgaaatgggtgtgcccgctgagaacgatggctgcaaatgtggaccaaactgctcctgcaacccctgcacttgcaagtgaggtgttgggagagcaagcttcaagcagagatagcccttaattaggaataatgataaactattaatgtgtagctaaaaacttatgtattatgtctgtgatggttttcgtgcactc

SEQ ID NO: 262381 - DNA, 445 bp, Glycine max
ggtgaagtcaacaaagaaagaaaaaaagctttctccgagaaagcttctgttcacgtcagggtccggggtaggcttcttcattgagattgggttggtgttcagtgtgaatgcatttccagtgagataagagaaaaggaacgaggggaagaagcgacttatattaagaaatattaatatacttaatttaatattaatgttcgggtacccccctccggctcgtagttgagaagagctttcgtttaggaaagggctaaatgggtgcgatccctctcgttgagagtcaagggtctcctggagtagaatgcacatcctggatctattaagccggcaagggttcagcattggctttcacgaccgcaaaggggccatctttcagtcggagtagataagatagatatacttaatttaatatcttctattatatattgtaatattataaagaaaa

SEQ ID NO: 262382 - DNA, 443 bp, Glycine max
tgtccatccaaaccttaaaaagattcagtgaagaacaacgttaatggcatctcttggtgtgcaagcagttcatcctcctccattaacatccacctccgacccacctcctctttttgatggcaccaccaggttgtacatcagttattcttgcccctatgcacaacgtgtatggatcgctcggaacttcaagggactaaaagacaagatcaatttggtccctataaaccttcaagacaggccagcttggtataaggagaaagtctaccctgaaaataaggtgccatccttggagcacaatggcaaggtgttgggagaaagtcttgatttgatcaaatatgtagatgaaaactttgaagggacacctttgtttcccagagatcctgccaagaaagagttcggagagcaattgatatcccatgttgatacattcagcagagacctgt

SEQ ID NO: 262383 - DNA, 378 bp, Glycine max
cccacgcgtacgcccacgcgtgcgctggtctagaaaattcagtgctgaaacatggcttcggctactctctctgtagccaaaccagaccttcaggcaaatgggaaaggcttctctgaattctctggcctccgaagctcatcaggcttccttcccttttctagaaaatcttcagaggatttccattctgacattgccttccagacctatgcagttggaagcagtggaggatacacgaagggtgtgacagaagcaaaactgaaggttgccataaacgggtgtggaaagattggaaggaacttcttgaggtgctggcacggtcgcaaagactcccctcttgatgtcattgccatcaacgacaccggcggcgtgaaacaagcc

SEQ ID NO: 262384 - DNA, 377 bp, Glycine max
ttcagttcagccctgtttagagctgtctgctaagtagcgaaggctatcgactctttgatgggcgcgctcatacaaatgaattgggaaagtgtatacatttgtttcaaggacattgagctgtaatattatgatctgcaattatcaagtacgatctatcactatttgtggatgactacatatactgtttgtccgagactaccgaacttctgctgggaatccagaagcaaccatgttttgaaaaagcatccttgatgtcattcttaaacaatttagacatatgttataataagatactgaagctaccacttaatgtattcgactgtttcggataatacctaccattttcaacagggaaacgtgacaatttatcattctta

SEQ ID NO: 262385 - DNA, 282 bp, Glycine max
acgcttccgtatcgttgagaaatatagggaaaaattggattcgctgaaactgcacaagctgctgggcacaaacgttctcaagtgtggcacatgaaatgtgttgcttgaccccaatgaagtctacgaaatctccatggccatatctcggccaaacattcggaaattcgttaaggatgggtttatcatcatgaagccttccactatttacttacgctcgcgtgctagtacgatgaaagacgcacctaacaaaggtcggcactctggttatggttagataaatgg

SEQ ID NO: 262386 - DNA, 449 bp, Glycine max
gtgcagtatcgttgagaaataaggggaaaaaatggtgtcgctgaaactgcagaagcggctggccgcaagcgtgctcaagtgtggcagaggaaaggtgtggcttgaccccaatgaagtcaacgaaatctccatggccaattctcggcaaaacatcaggaagttggttaaggatgggtttatcatcaggaagccaaccaagattcactcacgctcgcgtgctcgtaggatgaaggaggcaaagaagaagggccggcactctggttatggtaagagaaagggtacaagggaggcgaggcttcccaccaagatactttggatgagaaggatgcgtgtgctcaggcggttgcttcgtaagtacagggaatcaaagaaaattgacaagcacatgtaccatgatatgtacatgaaggtgaaaggtaatgttttcaagaacaagagagtcttgatgg

SEQ ID NO: 262387 - DNA, 347 bp, Glycine max
gtgcagcttcattgagaaatcaggggaaaatatgctgtttcagaaactgcagaagctgctggccgcaagcgtgctcaagcgtggcacaggaaaggcgtggcattgaccccaatgaaatcaacgaaacctccatggccaattctacactaaacattaagaagtctgttaacgatgggtttatcatcaggaatccaaccaagattgactcacgctcgcgtgctcatacgatgaaggaggcaaagaagaagggccaacactctggttatggttcgagaaagggtacaagggaagcgagcattcccaccataatactgtggatgagaacgatgcatctgctcatgcggttg

SEQ ID NO: 262388 - DNA, 419 bp, Glycine max
ttttatccaattgaaattttaaaaatgactgggataaacttaagaattcaattattgaaagtgaataagtaaacaatttaattggattggtcgaatggtatcaaaaaaatggagtactaactcccatttcttatttattattgaattaaccgatcaacttgctttgatatcgaacatttctttttgatttcaaaaatttttcggtaaaaatttgaatctatttttatatgcgaatcaatcctactacttctggtcctgaggtttctgcgcttgaaaaaaaaaatctgggacgtattgcccaaataattgttccggtactagatgtagcttttctcccaggtaagattcctaatatttacaactctctgatagttaacggtcgagatactgatggtcaacacattaatgtgacttgtgaa

SEQ ID NO: 262389 - DNA, 439 bp, Glycine max
gtgctttcccgccgccgctatactgccaccgtctccgccagcgatggcagaagatgattcaaagcctctgaactacatctccgaagtcatactcaagaagaggaaaagcaccgaagcatgggcgttaaggaaaaaagaacagttccagcaaaagaaattccaatccatcagaaagcccgaggatttcatccacgagtatcgcaacaaggaagtggaccttataagaatgaagcggagggtgaagaggaaagtgcctgaagctaactccaacactatgataatcattcggatacaggggaaaaaaagacatgcatcctaggactaggaaggtgttgtacagcttggtgttgaggagaaggttcagagctgagtatgtgaagccaagtgagggaataatggccaagctgcatagggtggaaccatatgtcacctatggata

SEQ ID NO: 262390 - DNA, 248 bp, Glycine max
cccacacacacagttcgtcggaatgggaagggtgattcgcgctcagcgtaagggtgctgggtcggtgttcaagtctcacactcaccaccgcaagggtccggcgaggttccgcagcctctacttctgcaagcgcaacggctacctcaaggtcgtcgtcactgacatcatccacgaccccggtcgcggctcccctctcgccaaggttgcattccgtcacccctttctctacaagaagcacacttatctct

SEQ ID NO: 262391 - DNA, 450 bp, Glycine max
atctggagggcaagtggcttcatcacccccatttttctgtggatctccacctagcagggcttcaaaccctgtgatccaagatgagcaatttggtagtaatggtaatgagaattttggtgcattttccttggcacccccttcaccatcttcctcagcaagaggctgtgttaggatgaagtttggtcacaccccagctgcagtgaggattgaaggttttaattgccttagcagggataggcgcaactgcagcatttctgctgttgcttaattcaattttaaaccatgaaaaagaaaagaaaaggggattaaagaatcacaaaagttctaagagcagaggagatttttgggactgaggagctaatcttaatttcaatcttattgtattatatgtatataccgttgttcacgagttaatttaaggtgtcatgtataattgagagaaggtgggaa

SEQ ID NO: 262392 - DNA, 439 bp, Glycine max
accacgcgttcgcccacgcgtacgaccacgctttcgctcacgcgttcgaccacgcgtccgttgtttgttgttgatactcgttcttcttcttttgttgttctgtgtttgtgtttgtttttcatctcacctgacaatgtcttgctgctgtggttactgtggttgctgaagctcctgcaagtgcggtaacagctgccgaggctgcaagatgtacccagacttgagctacactgagtcaaccaccacctggaccttggtcatgggagtggcacctgttaaggctcaatttgagggtgctgaaatgggtgtgcccgctgagaacgattgctgcaaatgtggaccaaactgctactgcaacccttgcacttgcaagtgacgtattgtgagatcaagctatacgcatagatagcccttaattaggaataatgagtatctattaatg

SEQ ID NO: 262393 - DNA, 390 bp, Glycine max
gcgtggatcacgcgaccacccttcagaggaagagtaccgtggatcttgactcatcatgcgggctcgcggtggcaccaaccgccgggtcagcactccaccggcgcatccgactccagatgcttccaccaagctcagttacaaatgctccgtttgcaacaagaagcttgccctctgtaccaagcgctcggtggacacaaggccagtcaccatagactcgctgactccggcgaccaagaccaacccaccatgacctacttcggcggcagcttcatcaacaccgactccagaggtaggacccacgaatgctacatctgccacaagtcctttctcaccagacaggccctctgcggacacagacgacgtcactacgaaggtaacagtaatggaaat

SEQ ID NO: 262394 - DNA, 238 bp, Glycine max
attggaagaaagttcgaagataaggaagttcaaagagatatgaagcttgatcctggtaagattgtcaacacggatggaaaaccttcctaccaatggaaaataaaggttgggggacccaaggtttcaacccctaagaaaccagtgccatgattctgactaagattaaagaaactgcggaagcattccatggaaagaaaatttatgatgccgtggatactgtaccagcttacttcaatga

SEQ ID NO: 262395 - DNA, 432 bp, Glycine max
cacccttctttccttttctgcttttcgatctgttgtgttttctgtttcttattgtgatattctcgtgtcgaataataattaaatgtgtttgattgttgatttttgttgttcagatattttaccttcacatgtattgttgataccaaaaacaaaacaagccaagtgaaagagagaagaaaagtcaaagacaatgtcagggatcattcacaagattgaggagacccttcatgtgggaggccacaagaaggaggaggagcacaagggtgagcagcaccatggtggagaatacaaaggggagcatcatggtgaacacagtactgaatacaaaggagagcatcatgttggtgagcacaagccggagcaccatggaggagaagagcacaaagaggggttcctagacaagatcaaggacaagatccacggcgaggaagg

SEQ ID NO: 262396 - DNA, 446 bp, Glycine max
tgtaaataaaatatttttggagaataaatttgatgctgagatgcactttgctgctgttgcatatgtgggagagagcacactggaccctcttaagtattatcacagtattacgtggaataccttgttggtattggagtctatggctaaatatggtgtgaagacattaatatattctagtacatgtgcaacgtatggggaacctgaaaagatgcctattatagaaataacagaacagaaaccaattaatccatacggaaaagccaagaagatggcagaagatatcatctttgatttttccaaaaattctaagatggcagtaatgattctgagatacttcaatgtgattggatcagacccagagggcatactaggtgaggctccaagacctgaacttcgagaacatggtcgaatttctggtgcctgctttgatgcagctcgtggtatta

SEQ ID NO: 262397 - DNA, 455 bp, Glycine max
attcaatccattctaaacaactttcctcatttacaaagcctccacttacaaaaaagaaaaaaatgcaccatcaatgatctgtgaacaagggaaaccacacacatagctttaattcgatctaattgcttcatggaggaccaaccattatcatcaaaatcaaagactgctgctttggatcaaacccttcattcaattgggtttgaaattgaagacttgtcaccacaaaaaatctctggtcgtctacctgtcacccagaaatgctgccagccattcaaggtgctttatggaggggtatcagcattgatagcagagtctttggcaagcatgggagcacacatggcttctggttacaaaagagtggctggaattcaactaagcatcaaccatttgaaaagagcagagattggtgacttggtctacgctgaagctacacctttaaatgtctgcaaaaccat

SEQ ID NO: 262398 - DNA, 357 bp, Glycine max
aatccctaatctaaatagtaacccgtcaaagtttctaaatttttctccattaccacttttagttatcaagtaaaaatgttaactaattacataatagcagtaaattgtcatctcataaaaaaatttgacaaaaaattcatgtgtaatttttttagataaattaaatttttaatctcttgtcttgaagaacaatttatgacatcatactagtaaatgagagattaaaaacataatttaacaaaaaattatatgtatttatcctattaaaattcttgatgacatgataagctatggacgataaatagtattggtatgttattagttagtattggtattttacaacatcaactaaaagtc

SEQ ID NO: 262399 - DNA, 436 bp, Glycine max
aagattaacccagactcagctaaaggctactttttactaggaatgtcaagggctatgttgggactatgggaagagcatcaagtgaccttcacgtggcttcaaagttagattacgatgaatagattagtatggctcttaaaaaggttgaacctaatgcccttaaaatcgatgagcatatgataaaatatgaacgcttaagaaagcaaaagcaacagaaaagagctcctatcaagactgaagcttctattaagaaggagcaagaaactgaagcccaagtacaagcagcattatctgctttaaaagatgggcaagtcatgggtattcactctagtggtgaattggaaaagaagttaaatgctgtatcaaagacattacgcttggcgatcctgtattttactgcaacatggtgtggcccttgatgttcattttccctatt

SEQ ID NO: 262400 - DNA, 262 bp, Glycine max
gcattttcagaggaaaatggcgggtacggtttcgactttgttcttcttcgggtttatggtttctctgggttgtccttttcagatctccgctgatgaatgcgcagatacggagttcgcactcacattggatcactctaactgttacgacactgacagcaagcacgatttcatcgtcgtcgagttctacgccccatggtgtggtcactgtaagaagcttgctccggagtatgagaaagctgcttctatcttgagtagtcatgat

SEQ ID NO: 262401 - DNA, 332 bp, Glycine max
gcgcccacgcgtccgcccacgcgtccgggagtcataacagtgaagaataaaaaagatgaaacaacatttactgttcactttcctgctagtggagaaacgttggttgttagagcttggcatctccgtccatcccttatctggaaggatggaaaatggattgaatcttacaaagtggggacaaatgacagttctacccatgagggtgatacaccaaatgaaaaacgacctaaattgggtagtcatgtggtagatgtaaaagggaaagacaagatgtcaaaaggcattggtgctgtggagtcggcaaaacctgatgagatgacattacttaattt

SEQ ID NO: 262402 - DNA, 441 bp, Glycine max
cccacgcgtccggcaaaatattacggagaactcagttagaatattggtggtttttcttggtgttaccaagggcgaggatggttctctctccaaccaagacaagtcaaaggttttatttacaacgtatatggcatttacaatatatgcttctggggatgtcattatagaatgcaatgtgaaaccaaaccctgatcttcctcctttgccacgtgtgggaatctagttaaatgtggaaaagtctttggatcaagtaacttggtatggaagaggaccatttgagtgttatccagatagaaaagctgcagccctggttgcagtctatgaacataatgttagtgagttgcatgttccttatattgttccgtgggaatcttcatgtaaggcagatgttagatgggcaacatttagatacaaagatgcttttggaatatatgcttctaa

SEQ ID NO: 262403 - DNA, 391 bp, Glycine max
  unsure (1)..(391): unsure at all n locations
ctctgcctaaaaggattgaaagatgggtcaagcactaggttgctatcaagttgatcagtcagatgtggctatcaaggagcattttggaaaatttgatgatgtcctagaacctggatgttattgactgccttgagtgtctngggtaccagattgctggtagtttgtcactgcgtgtgcagcaacttgatgttcgatgtgagacgaaaaccaaggacaatatctttgtcactgtggttgcatctgtgcaataccgagctgtgtctgagaaagcatctgatgcattctataggcttaccaacacaatggagcagatccaatcatatgtttttgatgtcatcagggccagtgtaccaaagttggaattggattctgtctttgagcagaagaatga

SEQ ID NO: 262404 - DNA, 337 bp, Glycine max
gtaaacaaaatacgtttgaccggtggggaaccaactattagaaaagatattgaagacatatgtttggaactgtcgaccttgaagggactgaagacattgtcaatgacagtccaagtgatattgccctgagagagagaactttcaaagctgaaagaatgtgggcttaattctgtaaacattagtttagacactctagtaccagcaaagtttgagttgatgacaagacgcaaagggcatgaaaaagtaatggattcaattaatgcaaccatagaccttggatttaagccagttaagggcaatcgtgttgtaatgcgtggatttaatgatgatgaaatct

SEQ ID NO: 262405 - DNA, 363 bp, Glycine max
cccacgcgtccgcccacgcgtccggcagcagccacacttcttcgccgtttcagctgaagagccatccgcaggtaagcaatggttaagcataataatgttatcctcattgtgaaacatcggaaactactggcagaactatgtgaagacttggtttaatcaaccagcccgaaagaccagaagacggttggctcggcagaagaaggctgtcaagagtttccccaggcctactgctggatctctcaggcctattgttcatggccagactctgaaatacaacatgaaagtcagagccgtgagaggattttcactggaagaatagaatgctgcatgaattgcgaagaaacgtgctccagctattgggat

SEQ ID NO: 262406 - DNA, 478 bp, Glycine max
aatacttcaaacacaacaacttctccagcttcgttagacagttaaacacttacggtttcaggaaggttgatccagatcgctgggaatttgcaaatgagggttttttgaagggtcaaaagcacttgcttaggagtattacacgacgaaaacctgcccatggtcaaaatcatcaacagcctcagcaaccgcatggacagagttcatcggtaggggcatgtgtagaagttgggaagtttgggcttgaggaagaggttgagaggcttaaaagagataagaatgtgctcatgcaagagcttgtgaggttgaggcagcagcaacagaccactgataaccagctgcaaacaatggttcagcgccttcagggaatggagcaacgacagcagcaaatgatgtcattccttgccaaagctgtccagagccctggcttctttgctcagtttgtacaacagcaaaatgacagcaataggcgcataactga

SEQ ID NO: 262407 - DNA, 124 bp, Glycine max
tggacatttaagagggactcttgggtataaatttgttactccactccaatactttttgtgtatgacatttgtaatttgttagagttagatttataacatgacacacataaacttgcacgtgatt

SEQ ID NO: 262408 - DNA, 443 bp, Glycine max
gccaaatactaatgtttcaaataccctgccaaatactaccatcatatccatggctgtgcaaattgtaggttttgatggggttgagatccatggggctcatggctacctgcttgagcaatttatgaaagataaagtgaatgaccgaacagacgaatatggtggatcccttgagaaccgctgccgatttgctttggaagttgttgaagctgttgttaatgagataggggcggacagagttggaattaggctatcgccattcgcagaatattcagagtctggagactctaatccaaaagaattggggctttacatgatgaatgccctcaataagtatggtattctttactgtcacatggtggaaccaagaatgaagactgttggagaaaaaactgaatgccctcataacctggtgcctatgagaaaggccttcaatggcactttta

SEQ ID NO: 262409 - DNA, 384 bp, Glycine max
accgcataagagagaaacacataaatgctgataatcgatgctagcgcgaagacaattgctcgaacagtgtcgttggaggcgccaccattggggattagggttctgcctcggctctaccacgagagggtggtggaccactacgataacccccgcaacgttggatccttcgacaagaacgaccccaccgtcggaacgggtcttgtctgagcacccgcgtgtggtgacgtcatgaaactccagatttaagttgatgacaaaacggtgaagatcgtcaatgcttgctttataaccttcgggagtggatccgctatatgttgcttcttctaaactactgaatgggttaatgaaaagcaaatttatgaagtttttgaccattaaaaacac

SEQ ID NO: 262410 - DNA, 469 bp, Glycine max
  unsure (1)..(469): unsure at all n locations
cccacgcgtccgcaaaaacactcatcactctatctctctcaaaagtgaaaatgtgtgggggtgctataatttctgatttcatagacgtgaatttgaacagtggtcggaaattgaccacccacaacacccatcatcagcttcacactttctctgatttccacgccacctcttcttccaaacatcaaccatcctaccaggatccaaacctccctaggcctcctccgcttccaaacaaccaaggagtgaagttgaaggctttgactttgaacactggtcgagtacggaagaacgtgtacagaggaataaggcaaaagccatgggggaagtgggctgcagaaataagggacccacgtaagggtgtgcgtgtgtggctgggtactttcaacactgctgaagaagctgctcgtgcttacgacaatgccgncaagcgcattcgccgagacaaggccaagctcaactttcccgacag

SEQ ID NO: 262411 - DNA, 479 bp, Glycine max
gtaaaggcgaaagactttaggtttggaattgggaattagggttgttcgcgtcacgaagatgatcgaggtggtgttgaacgatcgattggggaagaaggtgcgcgtgaagtgcaacgacgatgacaccatcgtttagctgaataagctggtggcggctcagacgggcacaagagccgacaagatccgcatccagaagtggtacaccatatacaaggatcacatcactctcaaggattacgagatccacgacggcatgggtctcgaactctactacaactaaacacaatgtgtgttttatgcatgatatattactatgatctgggaatgggatgaggcgccaaatgtaattttgacttgcgaaagtccctatgatttgaataatgtacattcccaaatgatattgggtttacataccgatgacaccctaagttgctttgtatatataacctatctgatgacttgttgctaagcttcattaa

SEQ ID NO: 262412 - DNA, 329 bp, Glycine max
atcctcctctgtctctctctctccaccattgccatggatccttacaagctgctgacatccagcgccttcaattctcccttctggactacaaattctggtgctactgtttggaacaacatcttctttttaacctatgtagctagaggtccaattctgcttgaggattatcatcttgtggagaagcttgcaaactttgacagggaacgtatcctagaacgtgttgtccatgccaggggagctagtgcaaagggtttctttgatgtcacacatgacatttctcacctgacatgtgcagatttccttcgagcccctgtagttcatacgcctgt

SEQ ID NO: 262413 - DNA, 445 bp, Glycine max
agcgagcgaggtagggttttcgttgttcccccgtctttgaattcagttcgcgacgatggggtccatccccgatccaggcgagttgagcgagttgactcagccgagcttcgacgagttccagcgccaaacttccctcatgaccagctgcaccctcctctggaaggagctctccgaccacttctcctccctcgagcaagacctcaaccacaaatccgaagccctcaaacgcaagattcgcaccctcgacaacactacttccgactccctccgcctcctcgatcgccgcgaaacctccctcgacgccacgctccagatcgccctccgcacgctcgacacgcgccgcaccgctgccctctccgccctcctcaccgacgccgacgacatcatcaacagctcccccgacggtgaggtcgacgacaccaccggcctcatcctcaaactcaag

SEQ ID NO: 262414 - DNA, 454 bp, Glycine max
gaaacaactaagggttgctgctcgcatattatctatttcaactgatgaaacgtttacttcagattggtgtgacatgctacctgatgaagctgaggttctagttttaaatcttaactctagccagtacccattaccgaagttcacagaaaatatgagcaaacttaaagttctgatagtcacaaattatggtttccatcgttcagaattaaacaattttgagctacttggttctttatctaacttgaaaagaatcagattggaaaaggtttcagtcccttccctctgcatattgaagaatctgcgaaaattgtcccttcatatgtgtaatacaaggcaagcttttgaaaactgttctatccaaatctcagatgcaatgccaaatcttgtggagatgagcattgactattgtaatgatctggttaaattgcccgatgggctgagtaacatcacccca

SEQ ID NO: 262415 - DNA, 422 bp, Glycine max
  unsure (1)..(422): unsure at all n locations
gatgaattgaacccaaatactaacgtggtttctcttcaccgattccctttatatacactttttcaattacagttacaggtaatggattaaacaattattagtcggttaataaacacactctctctctactaattctcatcgcattccttttcctctttctccttccaattgagaattcgtttctctaattgacgcanagttcacagtgaaattagtgcaatggaagcggatttcgtcaccagtgacatgctcacactcacgcaggacgctttttacgccaacgataatgatgatgtagctgttgaaggggaaagatgtggaatatgtatggatatggttattgacaggggacttctggattgctgtcagcactggttctgctttgtatgcattgacaactgggctactatcactaatctttg

SEQ ID NO: 262416 - DNA, 470 bp, Glycine max
gccacgcgtccggtagttgtccctgtcaagctagagaggcagctcaatggcatcaatcaagtggccattctgttgcataatgactgtctttatctctcccaggagattcttgggtttgcatttgagtatcgaacagactttccaagttccatgaaggagcatgctgtgtttgttgatttagctccaagatttcagctgttggcagaagaaatattgcagagacaagttcaccttgttatttataatttgaaggaggctatagatggtgctgatggatttcagaatactcatcagatgaaacagtttgagtcagctaaattcagcatagaccatgttgttatcattctggaaaaagtacatatcatatgggagccacttttgctgccttcaacttacaggagaagcatgtgtacagtcttagagtcaattttctcaaaaattgctagagatatacttctggtagatgacat

SEQ ID NO: 262417 - DNA, 455 bp, Glycine max
gccacgcgtccggcaaaaggccatataatttttttttatttgaaataatgtccgggatcatccacaagagtgaggagaccctccatgtgggagggcacaagaaagaggagcacaaaggagaacaccatggtgagcacaaaggtgaacacaaaggagaacaccatggtgagcacaaaggtgaacacaaaggagaacaacaccatggggagcacaaggagggacttgtggataagatcaaggacatgatccatggtgatggccatgacaagggtgagaaaaagaagaagatggacatgatgaagaaggagcttggacatgaccatcatggtcatagcagcagcattgacagtgattagatcttatatgttaagcaggtgtacggtacgatggttatgaggagcccgaatcccttttcctgcttaatgatataattcaaataaaatagcgattccgga

SEQ ID NO: 262418 - DNA, 284 bp, Glycine max
acgctccagaaaaaatggcggtgcctctactctcgaagaagatcgtgaagaagaggctgagggagtagcaagaggcctcaaagtgacaggaagattgctgtgaagacaaactggtgaagaccaaggagtagggagaaagagtaagaagagaaagttcaagggatgcactctgatgccgaacattggttatgctttagacaagaagacccgccactatctaccgagtggagtcaagaaatttgttgttcacaatgtgaacgatttggaactgctcatgaagcaca

SEQ ID NO: 262419 - DNA, 472 bp, Glycine max
cccacgcgtccggaatcagagttttttttaccactatcaggtttaggattattatctgaaatggcatcggtgtctactcagcaacagttccgttacacgcagccaccatcaaaggtgcttcatttgagaaatttgccgtgggagtgcacagaggacgaactaattgaacttgggaagctatttgggaaagttgtgaacacaaagtgcaatgtcggagcaaatcggaatcaagcttttatagaatttgcagatttaaatcaggcgatcgcaatgatatcatattatgcctcatcgtcggagcctgctcaagtacgagggaaaactgtgtatcttcagtattccaataggcaagaaatagtgaataacataactgcagcagatgttgctggaaatgtactgttggtaacaatcgagggtgaagatgcaaggcttgtcagcattgatgttttacacttggtcttttcagcctttg

SEQ ID NO: 262420 - DNA, 499 bp, Glycine max
ggcaactacatccgaccctgcttccatcaacccggccaacgcgcttttgggcatgcccgggtggaaacccggtccccatttccaggatgatatgaagagctatgtgaatgaaggggtgagggtgttggtacatgggaagagcatagttgcggaagatgagttggacaagaggtgggaagaagttactggggaggttattgatgaagtgatcttcttcagcaagcacactgctgccttcaacaagcctgccctgactgttcaccctattggagttcctcatttgcgccaaggcgatgttcccccccaaggcggcagacctggatgggcagctcttccaaatcctaggatggggccttggcttcgccttttgaaaaaccttgcccaagctcataatcttgtccctgaatttgagattactttagaggccactcaccatggaccgttgaccaataagccaaccatgtttttggagattggtagtactgaaaactattggaag

SEQ ID NO: 262421 - DNA, 442 bp, Glycine max
gttagctacctaaaccctagtctccatacatcaactcgagaggctaaagagactgcaacgttgtgctgtccgtcttgaccgagccagagctatgactaggtccttgattttgccctgtaaaactaatcccaatcacaacagaaataatcaatggcaccgaaacagaccaaggctgataagaagatctcttacgatgctaaactgagcgacctaatggaggagtaccgccaaatcctcgaagaaaactccgacaacttgggatcgaaccagctccagaacattcgcaagggtctacgctgcgactctgttgtgctcatggggaagaacaccatgatgaaacgctatgacaggatgcacgctgagaaaaccggaaacaatgcctatctcaaccttatccccctccttgtcggcaatgtcggattgattttcaccaacggtgacc

SEQ ID NO: 262422 - DNA, 356 bp, Glycine max
gtttctaaggatgaaattcctccagatgaatatgctttggaacttaatggcgttaccatagtagaaacagcaaaattaggccctcgcccagagaagcctattgagatatatgaatttgagagctagtccattttggtcgaaagtgttagagaaattgttgccattttggaccttgatgttcttttctatccttgtccaagaaatggcccaaatttccgtcgaaaggttctagagatgggtggcaaactgcagttcccctacatggttgacccaaacacaggcgcttcaatgtatgaatcagatgacataattcgggatttggttgacaaaaatggtgatggaaacgtttctctatc

SEQ ID NO: 262423 - DNA, 210 bp, Glycine max
gtttgttgttgtaactcgttcttcttcttttgttgttctgtgtttgtgtttgttttttctctcacctgaaaatgtcttgctgcggtggtaactgtggttgcggaagctcctgcaagtgccgcaaccgctgccgaggcttcaagatgtacccagacttgagctacactgagtcaaccaccaccgagaccttggtcatgggagtggcacctg

SEQ ID NO: 262424 - DNA, 334 bp, Glycine max
ttcaattacaacctaggaactctcacatcttcttactcttaattttctcttcagaccactgagataatggcaagcactcctagcattccatcacacataaaagcttgggcttattctgaatatgggaacacagaagagattctcaaatttgaatctaacatacctataccagacatcaaggaagaccaagtgctcatcaaggttgtggctgcggcccttaacccaatagattataagagggctcatgggtttttgaagaacactgattctccctttcctactgttccggggtactatgttgctggtgtggtggtcaaagtgggaagtcaagtga

SEQ ID NO: 262425 - DNA, 376 bp, Glycine max
cccacgcgtccggccgaaggttcatccaatctccgaaggccttcaccggattgcaaccatgtcgaggagaaaggttagagagccaaaggaggaaaacgtgactctgggcccagctgttagagatggtgaacatgtttttggagtcgctcgcatctttgcctccttcaatgacaccttcattcatgtcactgatctgtctgggagggaaacacttgtccgcatcactggcgggatgaaggttaaagctgacagagatgaatcatctccatatgctgctatgcttgctgcgcaagatgttgctgctagatgcaaggaacttggcataactgcttttcatattaaggctcctgccacaggtggaaacaagacaaaaaca

SEQ ID NO: 262426 - DNA, 492 bp, Glycine max
ccctttctttttttctatacattctttctcttccaccctctttcaaggctccacttttatggttccttgtaatttcttcatcaaagtatcaaacttgtcttctctctctctccttttacttcctctgcatatatgatatattcttccaaaatcctcatctaagggttaattttgttccggacaagtttttattattattattattattttttaaatttcagaatgatttacttataggtttctgatccaaggtttaagatgttatagtttccttgaattctcatctgggttcaacctgtttgatgttttgactgaatcagtttgaaatagtggtgattatctgataccaaacataaaagattcagctctttttcttgtttctttgtcacaagacttggattttgagaatctggaaacatgggttgttgtgcaagtaaagagtcagagccgcaacacaatggttacagacatgcttggactggtggtgtgcac

SEQ ID NO: 262427 - DNA, 276 bp, Glycine max
aaagattcaacaatggcctctgcttctgctactcttctcaagtcatctcctgttcttgacaagtgcgagtgggtcaaaggccagacccttcgccaacctctcgtgagatgtaacccttactcagcatcagcgtcataccatcaaagctgcttcctatgctgacgagctcgtcaaaaccgccaaaacagtggccttaccggtgcgtggtattttggcgagggatgagtcaaatgcaacctgcgggaagcgtttggcatctattgggttagagaacac

SEQ ID NO: 262428 - DNA, 320 bp, Glycine max
accacgcgtccgcaatatattccattctctctgtgtatttccctacctctcccttcaaggttagtacgatgtcttctgttgttcttcctcgttctttccatgaattgtgtatgttcgttggtctatactatgattattcgattgtgtttcgttaggtttcatcgatcttcaatcctcatactcagattcagcttttattatctttacaacaacgttcttgatttgatgattctctaatctgagatttgctctaattagagctttctcatgccagatccctttacatcaagccttaattgatgattcattaatcgaagatt

SEQ ID NO: 262429 - DNA, 406 bp, Glycine max
gccttatccagtttacggtttcggttccttaccctacctttgacgtatcgaggccttaaatgtgggattaggtctgagcaatctggttggtagaacctttggtcttataaagacaaggtttatgagttgtattagacgatcaaattcctactgccttcgatcctttagctgatgcaaatgctgatgactcgggtgctgtgtcaaaggaggatgtgcatattctcgttcagcagcgaaatggtacgaaaagcctgacaaccgttcatggatggaaagaatatttcagctatcacacgatacttaaagacgttaagaaagagttctgttgccatggaacagtatgtcatgacccagaactaggacaggttattcaacttgaaggtgatcagatgaagagtgtttctac

SEQ ID NO: 262430 - DNA, 477 bp, Glycine max
cctttgatcactcttcttctcttgcggctagggttatagcgcagcttcttctagatttaaggaagatgggtaaggaaaaggttcacatcagtattgtggtcattggccatgtcgactctgggaaatccactaccactggtcacctgatttacaagcttggaggcattgacaagcgtgttattgagaggtttgagaaggaagctgctgagatgaacaagacgtctttcaagtatgcctgggtgctggacaaacttaaggctgagcgtgaaagaggaatcaccattgatattgctttgtggaagtttgaaacaacatagtattattgcacagttattgatgcgcctggacatagggatttcattaagaatatgattactgggacataccaagctgactgtgctgttcttatcattgattctaccactggtggctttgaagctggtatttccaaggattgacagactcttgaacatgctc

SEQ ID NO: 262431 - DNA, 481 bp, Glycine max
cccacgcgtccgccctgcattagttaaatttttctgctctgcgtcttcttgggcctctcggccagaatccgagagcaaccctgacccctaaggccaggggtttttctcggcttcttcagattcctgaaatggcgtctgtttcagctttagccaagtacaagctcgtcttcttgggtgaccaatccgtgggcaaaaccagcatcatcactcgcttcatgtacgataaattcgataacacctatcaggctacaattggtattgattttctatcaaaaactatgtatctcgaagatcgaacttcgactgcagttgtgggatacagctggccaggaaagatttagaagtcttattccaagctacattagggactcatctgtagctgttattgtatatgatgttgcaagccggcagacttttctaaatactgcaaagtggattgaagaggtgcgaacagatagaggcagtgatgtcattattgttc

SEQ ID NO: 262432 - DNA, 353 bp, Glycine max
aagagttctttcaacatgcacacagccttaaccttcgctgcccgcaacgttgtgccattggcacccacagagagtgtctcccatattaccatctttcctaccaaattgaaagccccgcgctcctcacctcgttactctccgattagggttgcaaccgtggagcccgacacttcaactgtcgactacaactctgcgttctcagtgtttcctgcagaagcatgcgaaactgtaggaggggaagcctgcatggcggacatgtaccctgaaacgaagctacagccagacgctaagactccacgagtcgttacagagaacgttgagagagagtatcttgaatacgatgatcctaaaac

SEQ ID NO: 262433 - DNA, 304 bp, Glycine max
gggaagaccaaagatgaactggggaattgactagtgcggcgcgctcctatgattgactgtagacagcggaggtggcggtggtggtgtagacacggcgtgacggggagcattttggatagatgatggtagtaagaggaagaagaagaagagttgtatcgtagaatgagccaaccaacggtgatacttgccactgcgagctatgatcacactgtgcgtttttgggaggccaagagtggccgttgctgccgcaccatccaatatcctgattcgcaagtaatccggctggagatgaccccggataaac

SEQ ID NO: 262434 - DNA, 274 bp, Glycine max
gagaaactgcgaaaatggcatcggagtcaggtcaaagtcccaatccttcttggttaacgcccaaaaggcttcttatgatattttgtctcattaacatgctaaactatgtgtatcgaggagctttagtcagtaacggtgtcaatggaagtcttgcaacttgcactgactctggaatttgtacaggtggcagtggaattcatggggattttaacttaaacaattttcaagatggagttctgtcatctgcatttatggatggacttctaattgcttt

SEQ ID NO: 262435 - DNA, 494 bp, Glycine max
  unsure (1)..(494): unsure at all n locations
catactctgattcattagtgaagaaaaatggcaaccatcatcgccggcatcccaactacatcgatcactcgcgcaggtcttgtgctcaaacgacctgttggagcctcgtcctctaccgttcttggattgccagcaatggctaaggcagggaaagtgaggtgctccatggaggaaaagccttcaagcagctcaaatatagggatgggggcatccttgttagcagctgcagttgccgcaaccatgtcaagcccagccatggctttggtggatgagagactcagcactgaaggaaccgggcttccctttgggcttagcaacaacctccttggttggatcctgtttggtgtcttcggtcttatatgggctctctactttgtctacgcttccacccttgaagaagatgaagagtctggattgtccctctaaacccccaagtggcgatgcatgcattgtagaaattgcaaagaattatctctntttctggtgattaaaaa

SEQ ID NO: 262436 - DNA, 367 bp, Glycine max
cccacgcgtacgcagtacatctagcacagatgccccaactacaaatgtgtctgcagataccgatggtctggctgcttcgaatttagatgctggtagtaatcttgagcagactattcaacaaattatggacatgggtggtggcaattgggacagagacacagttagtcgtgctcttcgagcagcttataataacccagagcgtgctatagattacttgtattctggaatccctgaagcagcagaagttgctgtgccagttcctcaaacagctgggatttcttctggagcattttctggaggacctaattcatctgccttaaatatgtttccacaggagacgatttctaacacttgtgctggacttgga

SEQ ID NO: 262437 - DNA, 446 bp, Glycine max
tatgctttcaagtagtaccaattgggcactttgtttagtgtcttcattttttttttcatcctcatcaaattaaccccctaaacatcatttagctagctagccaaattaattattaattaggcaaataatgggaaacccagaatccaatttgccacccggttttaggttccacccaaccgatgaggagctcattcttcactaccttagtaaaaaggtagcatccatacccttgcccgtttccatcattgcagaggttgatatctacaagttagatccatgggacttaccagctaaggcaacctttggggagaaagaatggtatttttttagtcctagagaccgaaagtaccctaatggtgcaaggccaaacagggcagctgcttcaggttattggaaggccactggcactgataagaccataatgacatcattgcaaggaggagcac

SEQ ID NO: 262438 - DNA, 301 bp, Glycine max
tttgctctctctctagaattattgaacactgtgtttatggcccatatttaggaagacatgagcgtgatatttactgcctatagaacatttatgtacctggtcatatagacctcaagttggcagatgatagtacacatatgttctagaaaattagacgaacataagtgacatgcttctgataagcaactcatttcacactaccgttacagagatgattcacaatgtgcaatccatagcatacatcatttgtgattgttgaatacattgatgatacatgggagaacaaacccattttggcttc

SEQ ID NO: 262439 - DNA, 428 bp, Glycine max
atgactccgatgggttcttgaaagacgctattcagatggtgaagcccgcgaagggtactacaactcttgcttttatatttaaagagggtgttatggtagctgctgattctcgagctagcatgggaggatatatatcgtcgcagtctgtgaagaaaattatcgaaatcaatccgtatatgcttgggacaatggctggtggtgctgctgattgccagttttggcacaggaatctcgggattaagtgacaggagcctcaaagctacttgccaatatttcatactcttatcgtggaatgggttcatctgttggtaccatgattgccggatgggatgagacgggccctggtctatattatgttgatagtgaaggaggaagacttaaaggcactagattctcggatggatctggttcaccatatgcttatggtg

SEQ ID NO: 262440 - DNA, 447 bp, Glycine max
cttattctagggacaggaggagcagatgaactggcacccggttaccttaaactagcctatgacattatacacaaagctggaggagtctgcatagctgatgaagtgcaatgtgggtttgcgcgcacaggaagccatttttgcagattggagacacagggtgtgattcctgatatagttaccatggcaaaaggtcttggcaatggtttgccattagcagctgtacttacaactccagaaatagcaagcgtgatggcccaaaaccattaatataatacttttggagagaaccctgtatgttttgctgggggacttgctgagctcagagttcttgacaacgagaggcgtcaatgtcattgtgctgatgtagggtctcactcgattcagcgtctaaaatctatgatgcatgtacatgacattattggatatgtaagaggaagaagcttaatg

SEQ ID NO: 262441 - DNA, 453 bp, Glycine max
gattatcctaagtctttgggaatagtgctgcaatggcttcaagtcaggaggaggtgacccttttgggagctactggaagcccatttgtgtgcagggttcatattgccctcaagttgaagggagttcaatacaaatatgtcgaagaaaatttgaggaacaagagtgaactgcttctcaaatccaacccagttcacaagaaggttccagtgtttattcacaatgagaagcccatagcagagtctcttgtgattgttgaatacattgatgagacatggaagaacaaccccatcttgccttctgatccttaccaaagagccttggctcgtttctggtccaaattcattgatgataaggtttttggtgctgcatggaaatccgttttcacagctgatgagaaagagcgtgagaagaatgttgaggaagcaattgaggctctgcagtttcttgagaatg

SEQ ID NO: 262442 - DNA, 400 bp, Glycine max
ctcaaggttcctcatcttccattgccattctgaatttggtatcatctgcatgcaccagaaaggggaaaaagtatcgtgaagcagcactttcctctctcgaacaggttataaaagccttggggaatccagagttctttaatatggtttttcccttgttgtttgatctatgcaattcagagcccctaaagtccgggcaagcacctttggccagtgatgctgctggatcagagttgaacagtgttgaagagatttctgttccacataacaaaatagttgactgtttaacctcttgtatccatgtggcacatataaatgatattcttgaaaagcaaaagggcttagcacacatgtatacagcattcttgttacctgaaacataaatggactgtcaaaactacag

SEQ ID NO: 262443 - DNA, 348 bp, Glycine max
attaatttctcgtatcgaaaatcatttccaccaccacaattttttttatttccgtttactaaagattagtaattgtttggtttgtgtgtagattttgattcgattcgattcgattcagtcgaggttttaagcagcagcaagatgtctgggcgtggaaagggaggaaagggattgggaaaaggaggagcaaaacgacatcgtaaggtgctccgcgacaacattcagggaattacgaagccagcgattcgtcgtttggctcgcaggggtggcgtgaagcgtatcatcggtttgatctacgaggagactcgcggtgttctcaagatcttctttgagaatgtcatccgtgac

SEQ ID NO: 262444 - DNA, 445 bp, Glycine max
cccacgcgtacgactttatccatccatcccaaaaagtttgctttggttaatgcccctaacaaatttccatttttattttccctgtttgtgactagagagttgggttcccatgccggttgatttggacaacgcttccacagcttcaggggaagccgccagcgtctcttccttcggccaccaaacaaaacccgacgtcccaaagaaaaaacgaaaccttccggtcatgccagatcccgaagcaaaggtgattgctctatcgccgacggcgctcttggcaacaaaccgttttgtgtgcgagatatgcaacaagggattccagagggaccataatctgcagcttcaccggcggggccacaacctgccgtggaagctgctgcagagggtcaacaaggaggtgcgaaagagagtgtccgtgtgccccgagcccacttgcgtgcaccacgac

SEQ ID NO: 262445 - DNA, 463 bp, Glycine max
  unsure (1)..(463): unsure at all n locations
ctcaaaatccctttcttgtgtcgattagattactttcacaccagagtcgttcgagtacttcaccttctttctctctaagcgcaaaacctcgtactgtttttggcggttaaggatgtcggggaaaggagcgaaggggttgatcacaggcaaaacctccgccgccaacaaagacaaggacaagaagaaacccatctcgcgttcttctcgtgccggccttcagttcccagttggtcgtatccaccggcttttgaagtcaaggacaaccgctaatggtagagttggggccacagctgctgtctactctgctgctatcttggagtatctcactgctgaagtattggagctggcagggaatgctagcaaggatctcaaggtcaaacgtattactccccggcatttacaactagcaatccgcggngatgaagagttggataccctgataaaaggaacaattgctggagga

SEQ ID NO: 262446 - DNA, 320 bp, Glycine max
ctcaaactctctttcatgcgtccattagattactttcacaccatagtcgttcgcgtacgagagcttatatctctgtaagcgcagaacctcgtgctgcgtttggcggctaatgatgccagggaaaggaccgaaggggtagatcacaggctaaacctgcaccaacgacaaagacaaggacgagaagaaacccatctcgcgaggtgctgtgccagaccttagatcccagttggacgcctgcacctgctcttgaagttaacgacaaccgctaatggcatatctggggccacagctactgtctactttgctgctatctagagata

SEQ ID NO: 262447 - DNA, 354 bp, Glycine max
gttgaacagaaaccctagcaagtggagcaatggcttacgttgaagtcgatgtggcggcagcagcagcagcagggctgccgaagaagagaacgttcaagaagttcagttttcgaggcgtggatctcgatgcacttctcgacatgtccaccgatgaactcgtcaagatgttcagtgcccgcgctcgtagaaggttccagagaggcctcaccagaaagcccatggccttgatcaagaagctccgtaaagcgaaaagggaagctccaccaggtgagaagccataaccagtactcactcaccttcgcaacatgattattgtgcctgagatgattggttccattatcggagtgtacaatg

SEQ ID NO: 262448 - DNA, 447 bp, Glycine max
  unsure (1)..(447): unsure at all n locations
gttaaaagttaagaagtagcaaagatgttttcattcgggcacaagggtcaaaagataaaggggactatggtggttatgcagaagaatgtgttggatatcaacagcatcaccagtgttgacgggatcgtcggcaccggcttagacttcttaggcagtgcactcgatacagttacttttttagcctcctccatctacatccaacttattagtgctaccaaggctgatggtggtaaaggaaaagttggaaaggctacaaatttgagaggaaagataacattaccaaccataggagctaaggaagaagcatacgatgctcaatttgattgggacagtgacttcggaattcccggtgccatttatattaagaacttcatgcanaacgagttctacctcaagtctttaattctcgaggacattccaaaccatggaaccattcacttcatatgt

SEQ ID NO: 262449 - DNA, 447 bp, Glycine max
attgaaaggtgtgaagtaagggcgatgcgttcattgcggcacaatggtcaaagcataaaggggactatggaggctctgcagaagaatgtgatggatatgaccacgcatacctgagttcacggtatcgtacgatccagcttaaactgctcacgctgtgcactatattcagcatgtagctgagcatagaccatattgattcaactgatcaatgctaccaaggttattggtgggaatgcaaaagtattaaaggatacacaccaataggaaagataacattacgcaaccatatgagctaatgaagaatcatactatagctaatactatagcagacagaaaactgccaatgacgcgtacatgttatattaagatctggacgcttgacgtactgtacataaagtctgtaatgctcgacgacattctaaaccatgtaaccattcacttcatatg

SEQ ID NO: 262450 - DNA, 458 bp, Glycine max
cccacgcgtccggtctctcgtaatcatgcctaagcaaatccacgagattaaggatttccttctcactgccagaaggaaggatgcgaggtcagtgaagatcaagaggagcagagatgtggttaagttcaaggtcagatgctccaagtacctctacacactttgtgtgtttgacccagagaaagctgataaattgaagcaatctcttcctccaggtttgagtgttcaagacctgtaaaggtactgggcgagagatcaagaagaagcaattcattgattcttctgaagtttgattctctgtagttgaagcttgagatttttgtcagttggtcttttattatagattattgctaagacatggttgtttttatctgtttggaaaatgaaacttgaatttatgtctaatggagtattctagtgctgtggaactatatatatgaatttattgtctggtttatttt

SEQ ID NO: 262451 - DNA, 456 bp, Glycine max
  unsure (1)..(456): unsure at all n locations
gcggctaacaccggaatctgcaaactcaaaagttccatctcttcttccacacatccatcgttaatcattttcccgcaaaatattttctttctctgttctgtgccttcttctccaccgttggttcaaaaatcgcagccgttgatcagattgagccttcgtgttgatcttcatcgccatcatggaggtccgttccaatcccgcctccgacaactcctccgaccaccttcgaccgcccgccgtttcgtccaagcagccgctgccttctcctaccgccgtcgacacctncgccgtttctcagagactccagaaggaattaatggctctcatgatgagtggaggagatctcggggtgtctgcttttcctgatggagagagtatttttacatggattggcacaattgaggtggaaaagggactcagtatgagggtttatcttataaactcttcttacgtttt

SEQ ID NO: 262452 - DNA, 374 bp, Glycine max
cgcttgctttccgtcgctagaaacttccgctccaattgctcctctgatggagctgcaaagagcattgtcttccaatttcagtgtgtgacatggaaattggagaaactgttgagcaatttgccatatgacgatttggacatctcggaggaagtcaaggagcatgtggatttggtgagaacacaattgagacgggccacggataaatatgggtttatgatttcaaagatgccatctcatgaattatgccagccactggctgaagaaattagtcaggttcttggcatatatgaaagcttgttgcacacacaactatgctgacctgaaaatttatcataactacgacagtattcctatcaactttaaatggaaatgct

SEQ ID NO: 262453 - DNA, 461 bp, Glycine max
  unsure (1)..(461): unsure at all n locations
tccagttcagccctgttggggaaagtaagaaaagtggtgaagtctatagactctttgatggtggcggccagagaaatgagaggagaaaatggatccatttgtttgaaggagtttcagctgtaatattctgtgctgcaattagcgagtatgatcagacactttttgaggatgaaaacagaaacagaatgaccgagactaaggaacttttcgagtggatcctgaagcaaccatgttttgagaaaacatccttcatgttattcttaaacaagtttgacatatttgagaagaagatcctgaaagtcccacttaatgtatgcgagtggttcaaagattaccaaccagtttcaacagggaaacaagaaattgagcatgcttatgagtttgtgaagaaaaaatntgaggagtcatnatttcagagcactgctcctgatcgtgttgatcgcgtctttaggatctaccgg

SEQ ID NO: 262454 - DNA, 232 bp, Glycine max
cgtcaggcttattccccaatcaatgaatggccttgcatatttagatgaagaaaaggccatgttctaggtgtccatccctctgctactgtgtagagtattattcctacctaccgtcatctcccttactacacaccttcaactatcctattcatattaacaatctctctgccaaggagcttaaacaactctctgatgaactgcgttcttactttatttttagtgtttctagaac

SEQ ID NO: 262455 - DNA, 405 bp, Glycine max
  unsure (1)..(405): unsure at all n locations
gcaagcctattgttagtctaagtctgggctgcaaagctatatttcttttgggaggaaaatccagagaggatactcccttggcaatgttccttcgaagcggtgatgctgtacttatggctggagatgcaagggaatgctttcatggggttcctcggatcttcacagataaagaaaatgctgaaataggccatcttgagacacggctgacgcatgaagatgatatttgtttcttaaaatacattcaaacatctagaatcaacatcaatatcagacaagttttttgagtagtatgttcttttctttcgaagtgaaatttgttttattagctcaaggaacaaaaaaatgatgtatgatttctatttaacgtgattatngctctatatgacaagccgagtctatcccagc

SEQ ID NO: 262456 - DNA, 462 bp, Glycine max
cttacggcaagaaattgaaaaacgggttaatttaaccctcccttttgtacaatgcgtaatcgatgacctatgtataaatgaataagaattctttggatttgaagaaaaaaaacaactttgctgacatatatttgtttggtcagaagagtcctccgaatattctggtcttatattggtaattgttttcaatattttaaaaataaaaatagcgaagagaggataggctcattacataaaaaattggtaaatttcccataagtaattgagtgtgagagccaaatgaatcgaaagattcatgtttggttcgggaagagatcctagacattttgaaatgaatggaaagagagtctactttcattaagtgatttattagataatcgaaaacagaaaatcttgagaactattcgaaactcagaagaattacgggaaggggccattgaacagctggaaaaagcccaagcc

SEQ ID NO: 262457 - DNA, 455 bp, Glycine max
gtttattccccaattaatgaatggctttgcatatttagatgaagaaaaggccatgtgggggatatgcatccctctccgagagtggagagtattattcccaccgaccgccaactcccctactagacaccgtcaactatcctattcatatgaagaatctctctgccaaggagctgaaacaactcgcggatgaactgcgttctgatgttattttcagtgtttctagaactgggggccatttgggctcaagccttggtgtggtggaactcactgttgcacttcactatgtcttcaatgcccctcaggacaagatactgtgggacgttggtcaccagtcttacccgcataagatactcaccggtagaagggaccagatgcataccatgaggcagacaaatggcttatctggcttaaccaaacgttctgagagtgaaattgattgttttggcactggtcac

SEQ ID NO: 262458 - DNA, 464 bp, Glycine max
tcgcccacgcgtccgcccacgcgtccggttccaaatcccatatggaaataccataaatatgatgggttattcaaacccaaccaagaaggttcatgatcaaattcagctgtatggtgatgtaaaagatcttgatgatttttgtttgaaggctcaactagttaactacatacaatatagagctcttctggagggatggacttcgcgcatgtggaaaaaatatacaggagtattgatttggaagacacaaaatccttggactggtctgagaggtcaattttatgatcatcttcttgaccaaacagcaggtttctatggctgtcgatgtgctgcagagccaattcatgtacagcttaatctggctacatattttatagaggttgttaatactacatccgaagaattgtctaatttagctatggaagtttcagtgtgggacctcgaaggcacatgtccacactacaaag

SEQ ID NO: 262459 - DNA, 431 bp, Glycine max
cggttacggcaagaaattgaaaaacgggttaatttaaccctcccttatgtacaatgcgtaatggaggacctatgtatcaatgaataagaattctttggattcgaagaaaaaaaacaactttgctgacatatatttgtttggtcagaagagtgcttcgaatattctggtcttatattggtaattgttttcaatattttaaaaataaaaatagctacgagaggataggctcattacataaaaaattggtagatttcccataagtaattgagtgtgagagccaaatgaatctacagattcatgtttggttcggtaagagatcctagacattttgaaatgaatggaaagagagtctactttcattcagcgattcattagataatcgataacaggaaatcttgagaactatacgaaacctaggagaattacgggaa

SEQ ID NO: 262460 - DNA, 459 bp, Glycine max
atgctctgaacgttctcatggcaatggatattatttccaaggacaaaaaggaaattcaatggaggggccttcctcgtactactgtgaatgatattgaagaactaaagacagagcggcttgggctcaggaatagaattgaaaagaaaacagcctatctgcaggagcttgaggagcaattcataggtcttcagaaccttattcaacgaaacgagcagttatatagctcaggaaatcctcccagtggaggtgtatctttaccttttattttggtacagacacgccctcatgcaactgtggaagtggaaatatcagaagatatgcagcttgttcattttgatttcaatagcactccttttgagctgcatgacgacaattatgttctcaaggcaatgaaatttggtgagagaccacaagatgataatatgacacacaatcttactgacggatgtgaaatttcta

SEQ ID NO: 262461 - DNA, 407 bp, Glycine max
  unsure (1)..(407): unsure at all n locations
tatcttacccttctctcctccaacagatctctcaaaccctgatttcttcagtctcttccacttcggttgacctcgtatgcggtgtcccttacactgccttacccattgctacatgtgtctctcttgctcagaacattcccatggtcatgcgccgcatagaaatcaaagattatggcactgctaaagctattgaaggcgatttcaagcctggccaaagttgcttaatcattgaggatttggttaccagtggcacgtcagttttggaaactgcggcgccattgcgtgctgtgggattaaagatcagtgatgctgntgtgttgatcgatagagagcaaggtggcagagaaaacttggaggagaatggcatcaagctgcatgcaattattaaattgactgaaatggtgaaa

SEQ ID NO: 262462 - DNA, 348 bp, Glycine max
aaaagcttcaactgtgaagctatcttcgtatcgagcatggccaaatatgcatgacagtcggtttgcgctttacaagttgccattgcgggttcccaaagatgaccaagaatatgctggtttatggggaggaacttttggttggcctcctggaaagccttctgaagacaagcctggaaaggcttcatatttatatccgcattcttataacgctttactgtatcaacagcatctgagttcaacacaaattttgtaaggcactcactatgtgttacatgctaacggttcatcaatgattacagctaatatcaatgatcctttatacgaaccctttacctgggacactgatgc

SEQ ID NO: 262463 - DNA, 450 bp, Glycine max
  unsure (1)..(450): unsure at all n locations
cgaaaatgtggaagagaaggggatttgaagaagaagcagttcaattgataaactcagatttgagagacctaagtctagctggcataggctttggagcctctttcttcggattctttgctgccattgctgctatttatctgttgattttggatcgtacaaactggaagacaaatattctcacagcactactcattccatacattttcttcagcttgccttcattaattttcgacgtcttcaggcgattagcttgtcacgctttattgttatcaattttgcaccatcatttttctgtaatagtaattttcctttttattatcattctacttatgcaggggagagcttggaaaatggattgctgcagttgctgttgtattacgactnttcattcctagacacttccctgattggctggaattgccaggtgctttgattcttcttatcgtcgta

SEQ ID NO: 262464 - DNA, 458 bp, Glycine max
cattaattgtctacgtggtcattcctgtatcatactggggcctcaatgtgtacaatgccaataggtttcccattttctcctcacacttgttcaccgcccaaggtcaaaaatacaacatacctaagattgtagacaaccattttgagctaaatgttgcagagtatgaaaagcaaggtagaattcatctcagtgtgtttttcgctctcacttacggctttggatttgccaccatagcatccaccctcacacatgttgtctgcttctatggaagggagattatggagcggtatcgtgcttcttccaaaggcaaagaagatatccacacataattgatgagaagatacatagacataccttcttggtggtttcattcattgctgctcgtgacacttctggtttctctcgcactatgtatctttctaaaggaccaggttcagatgccctggtggtgacttctc

SEQ ID NO: 262465 - DNA, 285 bp, Glycine max
ctcacgagcttctcagagaggtcctcctacgaattgaatcgtcggagtccacgtggccgctgcggaggagcgtcgtggcttgtggcggagtgtgccgcacctggaggaggctcatcgtcaaggagattgtcaagccacctcaattctcttacaacataaccttccccatctctctcaaacagcctgtcccgagggaacatctacttcagtgcttcattaggcgcaacagtgcctcacagacatattatctgtttctcagtttatctagtgccctaatagctgatg

SEQ ID NO: 262466 - DNA, 246 bp, Glycine max
ctcttcctacttgaagaaagtagtatacatccctgacaagattccttttgatccgatctcttgttttgagggagacaacatgattgataggtccacaaaccttgactggtacaagggtccaactctgcttgatgcacttgaccagattattgagccctagatgccctttgacaagcccctcatgcttacccttcatgatgtgtacatgattgtaggtattggaacttgtgccagtgtgacgtgttt

SEQ ID NO: 262467 - DNA, 288 bp, Glycine max
attttcttccttacatggagtttgtcatgccttcactgcttcaatctgcttcacttaagcgggatgtaaccattacatcagcagattcagacaatgagattgaagattctgatgacgaaagtatggagactattactcttggggacaaacgaattggaatcaagactagtgttctagaggaaaaagctacagcatgtaacatgctttgttgctatgctgatgagctgaaggaatgattctttgcatggattgatcacgttgctggaactttagttacactccttaaat

SEQ ID NO: 262468 - DNA, 453 bp, Glycine max
ggaagtctcttcctacttgaagaaagtaggatacaaccctgacaagattccttttgttcctatctctggttttgagggagacaacatgattgagaggtccacaaaccttgactggtacaagggtccaactctgcttgatgcacttgaccagattagtgagcccaagaggccctctgacaagcccctcaggcttccccttcaggatgtgtacaagattggaggtattggaactgtgccagtgggacgtgttgagaccggtgtcttgaagcctggaatggtggtgacttttgcaccaactggactgacaactgaagtcaagtctgtggagatgcaccatgaatctcttacagaggcacatcctggtgacaatgtgggattcaatgttaagaatgttgctgttaaggatttgaagcgtggttatgttgcctcaaactcaaaggatgaccctgcaaa

SEQ ID NO: 262469 - DNA, 307 bp, Glycine max
acgataagtctcttcctacttgaagaaagtaggtttcaaccctgacaagattccttttgggccggtctctggctttgagggagacaacatgactgagaggtccacatacctttactggtacaagggtccaactctgcttgatgcacttgaccagtttagtgtgcccaagaggttctttgtctagtcccttatgctttccctacaagatctgtacaagattggaggtattggaactgtgccaatgtgacgtgttgagacctgcgtcttgaaacctgcaatggtggagacttttgtaccaacttgactg

SEQ ID NO: 262470 - DNA, 463 bp, Glycine max
cccacgcgtccgctcgatccagcacataacaatggaaacgcagctttacgtgttttctctgtagattctgctcttaaacgccgtcgttttcaaactctttttttccccttcgcttctctgtctttgtaaccgaaaggggggaaaatataattaacaccgatttcgcgaccaattcttcttctgcgttgaattgggacaacgagaaattggatctcagtttttggcaggaaataaaaattgcatttgagtgtaaaataacagagtatagtgtagggccttgttcttgatactgtgctaaatttgttggatggcggagaaatcatgcatcaagcgccttcagaaggaatatagagccctttgtaaagagccagtttctcatgttgtggctcgtccttctccaagtgatattcttgagtggcattatgtgttggagggaagtgaatgaacaccttttgcaggtgga

SEQ ID NO: 262471 - DNA, 201 bp, Glycine max
gtgattgttgtgactcgatcttcttcgtagttatctagctcataatgtcgaatgagtgaggggggcttttttcacgtgaaaatgtcatgctgcggtggtcacatatggctgcggaagcgcctgcaagtgctgcaacggctgcggatgctgctagatgtacccagagttgatctacaccaaatcaaccaccaactagacctt

SEQ ID NO: 262472 - DNA, 246 bp, Glycine max
gaaggtgctttctgtggcggtttataatcactacaagaggatatttaatgaaacctcttggtacaagtggcctgcaggagattcagataataataatgtgaagactgatgctgttgatgatgatagagttgaacttgagaaaagcaatattctactaatgttgccaacacgattagggaagtcatcactagtgagacctctagatagggtagctaatgttttggctggaaataatatattgtactt

SEQ ID NO: 262473 - DNA, 465 bp, Glycine max
  unsure (1)..(465): unsure at all n locations
cccacgcgtccgctcgatccagcacataacaatggaaacgcagctttacgtgttttctctgtagattctgctcttaaacgccgtcgttttcaaactctttttttccccttcgcttctctgtctttgtaaccgaaaggggggaaaatataattaacaccgatttcgcgaccaattcttcttctgcgttgaattgggacaacgagaaattggatctcagtttttggcaggaaataaaaattgcatttgagtgtaaaataacagagtatagtgtagggccttgttcttgatactgtgctaaatttgttggatggcggagaaatcatgcatcaagcgccttcagaaggaatatagagccctttgtaaagagccagtttctcatgttgtggctcgtccttctccaagtgatattcttgagtggcattatgtgttggagggaagtgaaggaacancctttgcaggtggata

SEQ ID NO: 262474 - DNA, 343 bp, Glycine max
cccacgcgtccgcccacgcgttcgcccacgcgtccgcccacgcgtccgcccacgcgtccggaacaagttccgcatgtcactgggtctgccggtggcggcgacggtgaactgcgccgacaacaccggcgcgaagaatctctacatcatatcagtgaaggggatcaagggaaggctgaaccggttgccgtcagcttgcgtgggtgacatggttatggccaccgtcaagaagggaaagcctgatctccgtaaaaaggtgctccccgccgtcatcgtccggtagcgcaagccgtggcgccgaaaggacggtgtttacatggacttcgaagataatgctggggtcata

SEQ ID NO: 262475 - DNA, 204 bp, Glycine max
cgggacgacccacgcgaacgagaacgcgaaggaagaaacagcaagaaacgacggaaaagacaagacaaaagcgagaggagaggaagcagacagagaaagcagaggagcggccagagcagcagaagaagaggaagaagaggagcaagaagaagcagcgagaacggggacaagcaaccaagaaggaaaaagagaacggacagaagg

SEQ ID NO: 262476 - DNA, 376 bp, Glycine max
ctttttctctctgttttttgttctctcttcgcttaaaccctatcgttcttctcgttttcgccgattctcgccatgccgaaagctaaatccgacgccaaagccgccgatagcaggttgaagcggaagggcgctggtgctgggaggaagcaatcgaggaaagctgctaaggaccctaacaagccgaagagaccttcaagcgctttcttcggtttcatgtccgagttcagagagcagttcaagaaggagcattctaacaacaaatccgtcgctgttgtcggcaaagctggtggtgaaaaatggaaatcgctatctgatgctgaaaaggcccctttcgttgctactgctgagaagaagaaacaggagtatgagaaaacta

SEQ ID NO: 262477 - DNA, 349 bp, Glycine max
acaggttcctatgttttgtggatcttactctctagagaaagcagtatctcgcgttgcacgaggggttggtaaaacgggaaaacatctatttttaactgatattgacaatggaaaaccccctcttcttcttcagatggttcgtgattcctaagatattaaattcctgtctgctttacgctccttcaaacaccgtgttgcctatgcaaatgttcgatatgaccaacttgttggatggagtacgttatctatcatgcgtataaaggagctccctaagcgccggcatctttcaagacatgagaagtacccgcatattggtaatgtagaaacagaaaaatctacttttgttgtt

SEQ ID NO: 262478 - DNA, 431 bp, Glycine max
aaaaatttttgaataataattaaaaaattccttcatatttttagagataggagacaaaatttacatggatatagtaagtcttgcttgggctgctttaatggtagttttttcattttctctttccctcgtagtatggggaagaagtggactatagggatactcaaaattgagttaagggatcaaagtacccattttgttttctacttgggtttttcaatttcttaactttaactattgaattaaagtatttcatttatactaattaattgagttcaaatataaacaaatataaaatagatctgcatttcagggttctattatattctagtagtgtaatgtattctatgtatatgtatattatagaaattgaaaatactctttcaatcaaacacagatttgaattatatctatattcgtattttgagaaaatc

SEQ ID NO: 262479 - DNA, 372 bp, Glycine max
atctgttctttgtctgtcaaaggaaagaaaaggaaagattagaagagataatgaagagagtgacgtaaacagaagcgcacactacacagttaccaaaatcaggttcaaacgcacagatctgggagaagagacgaagaacaataacaagatgggacaggatcagaaccagagatcgctgatctacgcgttcgagtctagtggaacggcgattctcgacgagtacactgaattcacaggcaacttcaacacaatacgcgttccagtgccttcagaagcttactgcctacaacaacaagttcacctacaactgtgacggtcacaccattaactacctaggcgacaacggattcacttattgagctgttgccgatg

SEQ ID NO: 262480 - DNA, 274 bp, Glycine max
acgaaaaattgttgaatgataattaataaattccttcatatgtatagagataggagggaaaatgtacatggatatagctagtcatgctcgggctgctttaatggaagttctttcattgtctctttccctctcagtatggggaagaagtggcctatacaggattctcaaaagtgagttaatcggatctaagtacccatatttgtttatacttggctttttcaatttctataactttaactattgatttaaagtatttcatttatactaattaatt

SEQ ID NO: 262481 - DNA, 414 bp, Glycine max
caaaggatgggtgcacgctcaatctctcttgcctcgaacacacgacattactatggttcctcgcctcggattccgcgtcaaactcaagcggccgaccatggaactccgccatgataaccgtacacttgacgatgaagtcgactactactatcatactccgccagccaacatcgtcaagaaggaacttgatcaaacacctattgacattaatactggtctacaactccttactgctaacaccaggagtgaccaatctaccgtggatgacggactgtcatcggatgcagaagataagcgagccataaccaccgagcttgcacagctgcaagtggagcttcaacgcatgaacgctgataacaagaagctgaaagagatgctcagccatgtcaccggtgactacaacgacttgcagat

SEQ ID NO: 262482 - DNA, 445 bp, Glycine max
  unsure (1)..(445): unsure at all n locations
gcttcacggtgaagcacctaagccacttctccaccctagacgtcctcttgaaaccctactacgagcaccacacttccccctctcaattcatctctctctcgatttacattccagagatagaagaagaaagagagcaatgacagcaacaacagagagcgagaagaagaagcgagaagaagaagaggaaccagaacaagttgtgaacccatgggaagtttcagccaaaggtaaaatcgattacgacaaactcatagatcgtttcggttgccagaagctcggcgaagccctaatttcgcgtctcgagcaactcacctctcgcactcctcacgtctttctacgacgcggcgttttcttcgcccaccgcgatttcgcggagattctggacgcgtacgagaggggcgacaagttctacttgtacaccggacgcngaccttcctccgaagcg

SEQ ID NO: 262483 - DNA, 257 bp, Glycine max
gtttaagaagcacattgtgggagcaactaaatacccgctctctaagattaaggggttccaggtttttgatggggagagcatgaatgatgatgcttgcttggtctttgcatactacaaggatggtgctgctgatccaacattcttatacttcgcatatgccttaaaggaggttaagagctaattgacataatgtaccaagatatctactcttattctacctaggttcttatatttaagttttgtcctaagttacttaa

SEQ ID NO: 262484 - DNA, 317 bp, Glycine max
acgaaatgttatggaggacaactaccggtcctatttgcgctaagacactgagaagaacaccagggggagatatggtgccggtccaaattacgacgttgtcaacaagctatatgaagaatgcataaccaaagtttggccttagggttcacttgaagagcatgtgcattctctattgaataattgggagatggaaatgtttcacaatgtggacctgcatgatttcagagtaatatgatcctaagaaatacacttttagtctgaacgtgaggaatcctatgactttgtaagagttgattaaatttggttgtatggtatat

SEQ ID NO: 262485 - DNA, 360 bp, Glycine max
ctcggcgtccatcggaaatttccaaggtaaaaagatgaatctgaagaacatgaagattccgaacgttccaggcggcggtgcgtcctctgcgctgctgaagcttgggcttcttggtggaattggtttatatgcagctgctaacagtctctacaacgttgaaggaggtcaccgagccattgttttcaaccgtctagttggtgtcaaagacaaggtctatcctgaaggaacacactttatgattccgtggtttgagaggcctgttatctatgatgtccgtgcacgaccccatctagttgagagtacatctggtagtcgtgatctacagatggtgaaaattggacttcgagttcttactttgcc

SEQ ID NO: 262486 - DNA, 428 bp, Glycine max
cccacgcgtccgcccacgcgtccggctaatcatcgaagactacccttacgccaacgacggccgcgtcctctgggacgccctcaaaacctggttcaccgaatacgtgaacctctactacgccgacgatggttctatagtgtcggacactgagctccaagcctggtgggaagagatcagaaccgttggacacggggataaaaaagacgaaccttggtggcctgtcttaaaaacaaagttagatttgattgacattgtgacaacaattgcgtggacgacttccggccaccacgcggctgtgaacttcggacaattctcctttgcggggtatttcccaaacagacccaccattgcaagaaacaacatgcccttggaggacccttcggacgccgaatgggagctggtcttggagaagccggaagtgattatgc

SEQ ID NO: 262487 - DNA, 441 bp, Glycine max
cccacgcgtccgtggaactactgataggattatcatggtatctggcgcaataaatgaaatacagagggctgtagaacttatcctttctaagttgctcagtgagcttcatagtgaggatgacaatgatgctgagccaaagacaaaagtgagactcgttgttcctaatggttcatgtggtggaataattggcaagggaggtgctaccattaggtcattcattgaagactctcaggctggcataaagatatctcctcaagataataattactatggacagaatgataggctagtgacgctgacaggatcttttgatgaacagatgcgtgcaattgaattaattgtttcaaagttatctgaagatcctcattatgcacagtccatgaattctccattttcatattctggttatcaaggtgtttcatacacatatgtgctttcgtc

SEQ ID NO: 262488 - DNA, 319 bp, Glycine max
cacaagcataagcacaagcacaagcacaagcacttctctaattccctttcacactctattacagatttcacaagtgcttacacttcaaatggctttggaagctcttcaatcacccaccacagccactccatcgtttagtccctttgaagaaaccagtctcagttacttagagacaccgtggacgaaaggaaagcgttctaagcgtagccgcacggagcaacaactgcaacacccttcatgcaccgaggaagagtacctcgctctttgtctcatcatgctcgctcgcggctgctcctgcatgtgtcttcaccgtcaaatc

SEQ ID NO: 262489 - DNA, 432 bp, Glycine max
gaaaaatttcgcgccccagaaaccctagaggaaccctgattcaatcgattcgctgttgccttcgaatttcgttccttggaagattagggagcaatggcaattgcagccccagggcatctgaacgtgaatgaatcacccatttggggatctagaagtgttgattgcttcgagaaattggagcaaattggcgagggcacatatggtcaggtttacatggctaaagagatcaaaactggtgaaattgttgctctgaagaaaatacgaatggacaatgagagagaggggtttcctataactgccatacgagaaatcaaaattctaaagaaactacaccatgaaaatgtgatcaagctgaaggaaattgtgactgatacaggtcctgagaaagatgaacaggggaagccagatggtaacaaatataaaagtggcatc

SEQ ID NO: 262490 - DNA, 390 bp, Glycine max
caaatattatccattacatttacatctgataatttcctcacaaaaatggacggacagagtttgtactcactagtgtttcttgtgcttgctctggccattgtgaacacagtgcatgggcaagggacgcgtgtaggggtctattcgagcacatgcccacgggctgagttcattgttaggtccacaggtcaatcccacgttaggtctgatcctaccttgggtgctgggacgcttccgatgcacttacatgattgctatgtgcaaggttgcgatgcttattgtctcattgtcggtgatggaactgatagaacagcatttgcaaaccttgctttacgaggatttgatgttactgataatgcatagacacagctagaggcttcgtgcccacgaggt

SEQ ID NO: 262491 - DNA, 414 bp, Glycine max
ggaaaagaggagaatgtgaagaaggctcaggaagcccttttggtaagagccaaggccaactcggaggcaactctgggaacctacaagggtaactcaaagcttgctgatggtgcctcagagagcctccatgttgaggactacaagtactgatcaatctaagtgcgggtaggaatcggtattttatgggtacaaccgaattttcttgttaatgagtattgtgcttcgactcttcccagaataataatcgtttggaattttgctttttgtttttcctagtgttccttcatatcaattttagtaattcggtgtattggtcaaacctgtgcaaacaggggaggggatgtaactttgttttcttgatagacaccaccaccttgctgttaacgaggctttgtgtttattttgcaattatct

SEQ ID NO: 262492 - DNA, 434 bp, Glycine max
  unsure (1)..(434): unsure at all n locations
ccaagccccactcaaccaccacaccactctctctgctcttcttctacctttcaagtttttaaagtattaagatggcagagacattcctatttacctcagagtcagtgaacgagggacaccctgacaagctctgcgaccaaatctccgatgctgtcctcgacgcttgccttgaacaggacccagacagcaaggttgcctgcgaaacatgcaccaagaccaacttggtcatggtcttcggagagatcaccaccaaggccaacgttgactacgagaagatcgtgcgtgacacctgcaggaacatcggcttcgtctcaaacgatgtgggacttgatgctgacaactgcaaggtccttgtaaacattgagcagcagagccctgatattgcccagggtgtgcacggncaccttaccaaaagacccgaggaaatcggtgct

SEQ ID NO: 262493 - DNA, 431 bp, Glycine max
cattactccagtatgctgctacagcatcctttctcagtaaattgtacagtgattaccttgatcatctcaaaatgtctggtgcaagttgcaagactgatgcattctcggtggaaatgcttcacgattttgctacttctcaggttagctacatcttggggcaaaaccctatgaaaatgagttatttggtgggctatggtgacaggtttcctctccaggttcatcacagaagtgcatcaatcccttggaataaccaaccctaccgttgtgaagatggtaagaaatggctaaactctaaagatccaaatccacaggttcttttgggagccatggtgggaggaccagacactaatgacaatttcgtggatcataggaccaaccaaaagttcactgagccaaacataacaagcaatgctggcttaattgcaacactt

SEQ ID NO: 262494 - DNA, 286 bp, Glycine max
ctacgttttgctctacgcctctccctctctctcaaaaatctttctcttcgattttagggttttgttttgctgctgcctccgttccccccttctcataaacaacgcgttttctcttctgcttcgtatctattctttgcttttggttttggttgattcaaggccttcacagcattcgttgcggcattttaatcgatttatccaagcaggactgaatgaactaatggagtctaaaggtgggaaaaagaagtctagtagtagtagtagttaattattgttctacgaagct

SEQ ID NO: 262495 - DNA, 402 bp, Glycine max
gcttttgcttggagttcgactcgatgcagggacggttttcaccaccacaactgtgtttaagagcctgcaggaacctattaggaccttccctcagagtatgatatctctttcacaagcgctggtgtcacttgggaggttggataggtacatgtctagcagggaattgatggatgattcggttgagagagaagaagggtgtggtggacacactgctgtggaggtcaaggatggaacctttagctgggatgatgatggccaacttaaagacttgaaaaatattaacttgaagattaataagggggagcttacagcaattggtgggactgtacgctcatggaagtcttctctccttgcttcaattcttggcaagatgcacaaaattttctgggaaggttcaaggtt

SEQ ID NO: 262496 - DNA, 445 bp, Glycine max
cacagagcgagcgaaagtagaatctgaaaaacaatggcggcgaagctagacacccacgccgtggcttccgatctgatcgacttcctcaacgcttctccaacggctttccacgccgtcgacgaggcaaagaggcgtttgcgtagcgcggggtaccaccaactctctgagagggaagtgtgggaactgcaaccgggcaacaagtacttcttcaccagaaatcactccaccatcgtcgccttcgccatcggcaaaaagtacgttgctggaaatggattctacataattggggctcacacggatagtccttgtctcaaactcaagcctgtcaccaaggttgttaaggctgggattttggaggttggtgtccaaacctatggaggtggtctgtggcacacgtggtttgatcgagacttgactgtggcggggagggtcattgtgcgggaag

SEQ ID NO: 262497 - DNA, 101 bp, Glycine max
gcgtgtatgaggaatcaccattgatatagctttgaggaagcttgaaacaacaaagtattatggcacaggtattgatgcgccatggacatactggattttca

SEQ ID NO: 262498 - DNA, 443 bp, Glycine max
aaaaaaagagagccaaaccaaacctttcccgaaacggttcgttttgcccttcttcggaacccggccttctgcgccgctgctgctgctccggtcgccgtcggcgactctccggtaaccgaagaccactgccgatccgtcagaaacctcggatctcggatctgaacgagcgaaacgatgccgtctcacgcggatctggaccggcagatcgagcatctgatggagtgcaagcctctgccggaggccgaggtgaaggcgctgtgcgatcaggcgagggcgattctcgtcgaagagtggaacgttcagccggtgaagtgccccgtcaccgtctgcggcgacattcacggccagttctacgatctcatcgagctctttcggataggaggaaacgctcccgatactaattacctgtttatgggcgattatgtagatcgtgggtactattc

SEQ ID NO: 262499 - DNA, 432 bp, Glycine max
ggtagagagaacaaaagggcaaggaagaaaacaagaaaaaggagaagagaagagactagatggctggctcagctattggtttcgaaggctatgaaaaaagacttgagatatcattttttgaacatggtgtgtttgctgaccctgaaggaataggcctccgagcattgtccaaagaccaattggacgagattcttaaaccagcagagtgcagtattgttgcatcactttcaaacgattatgttgactcttatgttctgtcagagtcaagcctgttcatctatccttataaaattatcatcaaaacttgtgggactaccaaattgcttctgtccatccctgtcatcctcaagttggctgatgctcttgacattgctgtgaaatctgtgaggtacactcgtggaagtttcatttttcctggggcacagtcttttc

SEQ ID NO: 262500 - DNA, 425 bp, Glycine max
aaactgagcttagtcagtcagatatgtttgatcctcgtcttcaggcaaaaatactgaatgttgttgacgtctcctatggaggtgagaatgggtttaatcaggctattgaactatctgctgaaattctgtccaatgtgaagtttatccaggaaaagcgactgattggaaaatactttgaggaaatcagccaggatactggaaagtatgtttttggagttgatgatactctaaaagctttggagatgggagctgtcgagacacttattgtctgggaaaatctggatatgaataggtatgtcttataaaatagtgctactggtgaggctgtcattaagcacttctacaaggaacaggattcccaccaaagcaattttctgtatcctgagagcaatgctgattttgagggtcatgagaagttgtctttg

SEQ ID NO: 262501 - DNA, 218 bp, Glycine max
cctaaacgtccgaacttatggctgtaacctattcacgtacagactcgcaaaggcattcaaggcgaaaaaaagattcggggaggcgaaaataatcgaaaatccattgatacccgatataggtcaaaacatactaactgcatgctgaatccattaggctctcaatgatacaactctgttgaacttgaatacatcttaatagccatattgataataataaa

SEQ ID NO: 262502 - DNA, 397 bp, Glycine max
tgtttccccttttgttttctcaagagttgtctgtgagaacaatctccaagctgttcaggaactgtttttggattggttttctgtgtcaaattcccataggaatgtctttggtgaggaagagtctgacttcaagagtggagaatgttgaggacagccatgacatgtcagtgttggacttgcctgagttggccttggattgcattcttgagaggcttcccccctctgcactgtgtcgaatggccgctgtatgccggtccttgatggagaggtgtgtgagtgatcacctttgggagaggcacatgaagcagaaatggggtagagttattggccctgcttcttataaggagtggaaatggcattttgcttccaaaatgaatgttgggggtcttaagcatgg

SEQ ID NO: 262503 - DNA, 433 bp, Glycine max
ctttcctcaaccttctttcttcttatatatcgaacatggctaagtatcattcaagtgggaaaagctcttccatgactgctatagccttcctgtttatccttctaatcacttatacaggcacaacagatgcacaatccggggtatgttatggaagacttggcaacaacttaccaacccctcaagaagttgtggccctctacaatcaagccaacattcgcaggatgcgaatctacggtccaagcccagaagtcctcgaagcactaagaggttccaacattgagcttttgctagacattccaaatgacaacctcagaaacctagcatctagccaagacaatgcatacaaatgggtgcaagacaacatcaaaaactatgccaacaatgtcagattcaaatacgtttcagtgggaaaatgaagtgaaaccccgaacac

SEQ ID NO: 262504 - DNA, 323 bp, Glycine max
cttctcaccccagtttcactttctcattattttctctcctattgataaagaaacagagagagagagaaaaaaatgcctgcggtaggaggtattagcaacggagggggcaaggagtaccctggaagcctcactccttttgtgacggtaacatgtatagttgcagccatgggtgggttaatcttcggttacgatatcggaatttcaggtactaacatttacacacatgtgtatacgtatgttagtgttttattttgatttaacctatgatcttatgtttttaatgtgtgtgggggttatgatcaggtggggtgacatccatggat

SEQ ID NO: 262505 - DNA, 308 bp, Glycine max
aaccaggaagagccacgcggacgaaaacggccaaagcaaccaaaaactaagagaagaacacaggggccaagaaacccgcacaagggagaaggacaaggcaagcagaaccagaagaaggagctgaagcacaaaccacagccaaacaggagggatacaggcatcaagacagcgctagagcgaataagaaccaagcagagaaaggaacggcacgtaagaagctttttgatgatggtgtggtgaagcgtgaggacttatggatcactaacaaactctggatgtcaaatcatgcaccagaagatgtgccaaaa

SEQ ID NO: 262506 - DNA, 359 bp, Glycine max
tcgcccacgcgtccgatcctagatgctaccaacaaatttgatgagaagctacttcttggtgtcgggggttttggaagggtttacaaggggacccttggagaatggacccatgggggttgtaaaaagggtaacccgagatccgagcaagggcttgctgaatttcggacagaaattggaatggtatctaagcttcgccaccgtcatcttgtgtccctcattggttattgtgatgagaggtcagaaatgattcttgtgtatgaatacatggctaatggacccctccggagtcatttgtatggtacagacctgccgcctctgtcatggaagcagcggcttgagatttgcattggagcagcaag

SEQ ID NO: 262507 - DNA, 312 bp, Glycine max
aattcccgaatcagaaatgactcaagcccagattcaaccagttaaacttggaacccaaggctttgaggtttcaaaattgggattcttatggatagtcgggactggagcgtacaatgaccctttccatgaacatgatggcatatctgatatcaagtatgcgttcagtaagggaatcacattttaagatactgcggatgtttatggagccaatgctaattgacttttggtcggaaaggctttgaagcagcttcccatagaaaagattcagatagtcacaaaattatgtattgcttcactagtgtttcctgatat

SEQ ID NO: 262508 - DNA, 371 bp, Glycine max
gcgtcatctccgattccccgacaatggccacccaaatgagcaagaagagaaagttcgtaggggatggagtgttcttcgctgaactgaacgaggttctgacaagggagttagccgaggacggatactccggcgtggaagttatggttacgccgatgctcaccgaaatcatcatcagagccaccagaacccaagccgttctcgttgagaagggaaggagaattagggaacttaccttggtggttcagaagaggttcaagtttcccgagaacagtgttgaacttcatgctgaaaaggtcaacaataggggtctttgcgctatagcacaagctgagtctctcacgtacaagcttcttggtggtctatctgtgctc

SEQ ID NO: 262509 - DNA, 315 bp, Glycine max
gagaaaatcagcttcagacagcaagtgatcatttggtgggctggccttatgagaggtgctgtgtcaatcgcacttgcatataatcagttcaccatgtcggggcacacttcactgcgaagcaatgcaatcatgatcacaagcaccatcactgttgtgcttttcagcacagtggtgtttggtctgttgactaagccactcataaggcttttactgccccatactccacatcataaagaatcaagcatcacgataatcacagatccatctactccaagtccaaaatcagtcactatcccacttcttgggagtgcccaa

SEQ ID NO: 262510 - DNA, 197 bp, Glycine max
gccacgcgtccggggtttgggtttctcttcctcccttggagaaaaagaagagccaccgctgcgacgccgttggtgcatttttgaggtgccgctgtcatgtttgggcgtggtggaccaaggaggagtgataactccaaatattatgatattcttgggatttccaaaaatgccagtgtagatgaaatcaagaaggccta

SEQ ID NO: 262511 - DNA, 378 bp, Glycine max
ctcacgcgtacgtataggacaggcccaacacctgtctaaagccgcgtctgtcgcgtcctgacggtccaagacaagcccctatacccaacctaagagcaatgagtgtaaaacatgagtacgtggcacgcaacacgggctgaactaggtcttctcgcattatattcgggcaaggctgcttcatggtacataatacgcagggcattacagtatgggtccaaatatacgagtatcatgaaaacctgtactgctcataatgccgagctaacaaccagcttggcacgaagagtcttccggctttctaagtcactcaatgacctacatgctttgatcagtccaacgcctcagggcactaacttaccgctatctctgttggtaaag

SEQ ID NO: 262512 - DNA, 273 bp, Glycine max
gaaagacttacgaatgcgcaaaaactggagctgcttttgactgctggcattggttctgatggggtagatctcaaagctgcagctgctgctggtctaactgtggcaaaggtcacggcaagcaatgccacatcggctgctgtggatgaactcatgagaattcttattctaattaagaatttcttgcctgtgtgccatccagctcaatagggtgaatggaatgttactggcattgcacatagagcttatgatcatgacggcaagacaatcagaacc

SEQ ID NO: 262513 - DNA, 338 bp, Glycine max
atccacacaacaacactccttaaaccctaaccaaccatggcttcttccaccttcaccgcaatggccgcttgcaagctttcctcctccgccgccatctcctccttccccacccaccgccgcaccaacgccgtccttctgtccagacgcagccgcgccgccagggtctccgccatggccaaggagttgcacttcaacaaagacggcaccgcaattaggaagctccagagcggtgtgaacaagctcgcggatctggttggggtcacgcttggtcccaagggaaggaatgttgttctcgaaagcaagtacggctcgccgaaaatcgttaacgacggtgtcac

SEQ ID NO: 262514 - DNA, 410 bp, Glycine max
acatcttgttcaggaattcacgaggaagaacaagaaggatattagtggaaatgccagagcgctgaggaggttgagaacagcatgtgagcgggcaaagaggactctctcttccactgctcaaaccaccatagagattgattccttgtacgagggtattgacttctacacaaccattacccgtgcccgttttgaagagctaaacatggatttattcaggaagtgcatggagcccgtggagaagtgtttgcgggatgccaagatggataagagtaccgtccatgatgttgttcttgttggtggttctactaggattcccaaggttcaacagttgttgcaggacttcttcaacggaaaggaactttgcaagagtattaacccaaatgaagctggtgcttatggtgctgcagtgc

SEQ ID NO: 262515 - DNA, 436 bp, Glycine max
attactttggaggtagagagctctgacacaattgacaatgtgaaggcaaagatccaagacggggagggtattcctccagaccagcaaaggttgatttttgcgggaaagcagcttgaagatggacgtacgctggcagactacaacattcaaaaggagtctacccttcaccttgtccttcgtctgaggggaggtatgcagatctttgtgaagactttgacagggaaaactatcaccttggaggttgaaagttcagacacaattgataatgtcaaggcaaaaatacaggacaaggaaggtatccccccagaccaacagaggttgatctttgctgggaagcaactggaggatggaaggactcttgctgactacaacattcagaaagagtctactcttcaccttgtcttgcgtcttcgtggtgggttttgagtttgagaat

SEQ ID NO: 262516 - DNA, 428 bp, Glycine max
gactccattatctgctttgtatgcatcaaagttgcttcatgaggctggactgcctcctggggttctgaatataatatctggctttggtccaactgccggtgctgctattgctagtcacatggacatagataagcttgctttcactggttcaaccgaaactggaaaaattgtccttgaactggcggctagaagtaaccttaagcctgtaactttggagcttggtgggaaatccccattcattgtatgcgaagatgctgatgtagatgaggctgttgagttagcacactttgcattattctttaatcagggacaatgctgctgtgccgggtctagaacatttgtacacgaacgtgtgtacgaagaatttattgagaaagcaatggcacgcgctttgaaacgtgctgttggagatccatttaaagggggaa

SEQ ID NO: 262517 - DNA, 373 bp, Glycine max
gcaccagcgaaacgctcttcgttatcttttctcagactccgcggcgtagatccgaggagttcgggaaatcctaactcatcatctcaactcaagtcatggctggacttgcacctgagggatcacagttcgatgctcgtcaatatgattctaaaatgagtgacttactttcatctgatggacaggacttcttcacatcctatgacgaggtttatgatagttttgacgctatgggtttgcaggaaaatcttctcaggggaatttacgcatatggttttgagaagccatctgccattcagcaaagggggatagttcccttctgcaagggacttgatgttattcaacaggctcagtctggaactgtgaagacggctac

SEQ ID NO: 262518 - DNA, 447 bp, Glycine max
ggaaggatggacttcccttggtgggatcatgctcagcataactgggacagaagctctttttggtgacctagcccattttccagtctcagctgtacagcttgcatttactctagttgtgtttccttgccttcttttagcctattctggtcaagctgcttaccttatgaataacttgacccattcacaagatgctttttatcgttcaattccagatagaatatattggccagtatttattgttgcaacattggcagccgtagttgcaagccaggctacaataactgcaacttttttaattattaagcaagcccttgctcttggatctttccctagagttaaaattgtgtatacatcaaagaaatttcttggccagatatatgttccagatattaattggatccttatgattctttgcattgcttgtaccgctgggttcgaaaataaaac

SEQ ID NO: 262519 - DNA, 381 bp, Glycine max
ggaggaatcaaatgttgatggcttttttgaagatgttttggtgaatggtaaaccatggactggtggagtcccggaggtgtttagtggttcacatgtgtatgtatgtgctcatggaagtcgtgacgtgagatgtggtgtttgtgggccagttctcatcaagaagctgcatgaggaaattgagcttcgaggtttgaaggatcagatatctgttactgcttgttctcatattggtgggcataagtatgctgggaatgtaatcatatacagcccaagagcagatggaaaaattatgggtcactggtatggctatgttactcctaatgatgttcctgatttgttggaccaacatattgcaaagggagaggtcatccaacgactttt

SEQ ID NO: 262520 - DNA, 474 bp, Glycine max
  unsure (1)..(474): unsure at all n locations
cggatagtgagggagctttcaaaggagctactatctttggacttggaggcaattagtagtggggtgacagatgttgacatggagaaagaggccaagccaagtttttacttaaaacacatcttacctattataattaaaaatcaagttgttcactttgttggatttggtaatcgcctggcatttgatccaatagcatttgaactgcagccttactatgctcttnctaattggggaacttcatatagagacttcgttgcagatgtaattttcatgccctgcaatntgttcccagaatacaagaaaccggtgctttgcttcttaaaagattgcgtgaacattcaagtcttgttggaccattggatcgttatcttgttggtccatttgccgaattaatgaaagagaaaagtgaaagtaatgccaagaaagcatccaagtatctagctttgcatctcagatttgaaattgacatgatag

SEQ ID NO: 262521 - DNA, 413 bp, Glycine max
accaggtgaacttggaacccaaggctttgaggagttaaaaatgggattcgaatgtatggggggtactataccatacaatgaccctctccaagaacacgatggcatatatgctatcaagtatgcgttcactaacgtaatcacattatttgatactgcggatgtctatggagccaatgctaacgtactattagttggaaaggcttagaaacagctgcccagaaaaaagattcagatcgccacaaaatttgtgattacttcacgaggattttctgatatgaaaatcaagggttacactgtatatgtgccatcatgcttgtaagctagcttgaaacgtcttaatgttgaatacattgatctctattatcatcacagattggacacatctgtacctatagagtaaacaatgggtgaac

SEQ ID NO: 262522 - DNA, 343 bp, Glycine max
gcgcggacgcgtgggcggacgcgtgggcggacgcgtgggtccaaacaaaacccatcaaagtctttcgccctcagggatcatatattcattcagttctatacaaaatcctcaaaaactcttcctctctgccatgaccatggaatacagaaccttagaactcaacatcatatccgcaaaggacatcaagaatgttaatctcttctccaagatggacgtatacgccgtcgtttcgatctccggtgaccctattcaccctcagggcgccaccacccacgttcacaaagacgccggcagcaaccccacgtggactacccccggaaattctctgtcaacgaatcgctgg

SEQ ID NO: 262523 - DNA, 315 bp, Glycine max
  unsure (1)..(315): unsure at all n locations
ggagaatcatctattttggagaaatacaaacacagaaccgctctcttgggacactcgaatgaaaatagctattggtgctgctcggggcttggcttacttgcacacctcagaaaagcaaatcatatacagagatttcaaagcctncaacatactacttgatgaggattacaacgcataaatttcagattttggcttggcgaaattagggccttcgggtggagattcacacgtgagtacgaggatcatgggaacatatggctatgctgctccagaatacgttgcaacaggacacctttacgtgaaaagtgatgttta

SEQ ID NO: 262524 - DNA, 306 bp, Glycine max
cccacgcgtccgctggtgaatgcgtagaaaaggaaaatatagaaattagcgtgaaaaatgttgggtgtgttcagcagctccatagtgtcgccgccggaggagctcgttgccgccggcagccgtacaccgtctccgaagatgacggctgcggcgctgcggaagtggttcgaggagaagaaccccttcgtagtgtctgtggaagtcggagagcatgtccagctcgcttatacccaccataacgagtcgccgttttagcccagatcctttgctgtgaatgatgagggattctgcttgtttgaaggagcc

SEQ ID NO: 262525 - DNA, 423 bp, Glycine max
tccacgcgtccggctctctcactcacaaacgcacactgaattcaaaaacatcgaaagagagagtcatggtcgagcaaaccttcatcatgatcaagccagatggcgttcaaagaggccttattggcgagattattagcagatttgagaggaagggtttttacttgaaagggttgaaactcgttactgtggaccgtccttttgctgagaagcactatgctgatttgtctgcaaagcctttctttagtggtttggtggattacattgtctcttgccctgttgttgccatgatctgggagggtaagaatgttgttacaactggccgaaaaattatcggagccacaaacccagcttaatctgagcctgtaactattttaggtgactttgctattgacattggaaagaaatgttatccatggaaatgat

SEQ ID NO: 262526 - DNA, 454 bp, Glycine max
aactgtggcgtcaaaatgggagaatacttctgcaacatctgcaaattcttcgatgatgatgtggagaaagaacaatttcactgtgatgattgtgggatctgcagggttggtggtcgagataattttttccactgcaagaagtgtggatcttgttatgcaattggtctgcgtgataatcatttgtgtgtggagaactccatgcggcatcactgtcccatttgttacgagtacctttttgattcattgaaagacaccattgttatgaaatgtggtcacacaatgcaccatgaatgttacgtatagatgataaaaaatgacaaatattgttgtcccatatgcttcaagtcagtgattgacatgtctaagacgtggaatataattgatgaagagattgaagcaactgtcatgccttaagattatctgaacaggaatgtttggatactatgtaatgact

SEQ ID NO: 262527 - DNA, 346 bp, Glycine max
cccacgcgtacgacacagatggctcgaacgaagcataccgctcgtatgtccacatgatgtgaggctcctaggaagcatcttgcaaccaatgctgcacgtaagtctgcaccaactactggtggtgtgaataagccctacattaatccgactggtaccgttgctcttcatgagatcaggaaataccatattagttccgagctattgatccggaagctcctcttacagaggctgggtcgtgaaattgctcatgacttcaagactgatctgcagttacagagtcacgccgtgcttagcattgcacgaagctactgatgcattcattgtcgggctcaatgaggacactaac

SEQ ID NO: 262528 - DNA, 442 bp, Glycine max
aggactttaggttgggatttgggaattagggttattcgcgtggcgaagatgattgaggtggttttgaacgatcgattggggaagaaggtgcgcgtgaagtgcaacgacgatgataccatcggcgacctgaagaagcttgtggcggctcagactggcacaagagccgacaagatccgcatccagaagtggtacaccatctacaaggatcacatcactctcaaggattacgagatccatgacggcatgggtctcgaactctactacaactaaacacaacaaggtgtgttttatgcgtaatatactatgtgctgggaatgggataagcgctaaatgtaattctgacttgcgaaagttcccatgatttgaaataatgtacatctccaaatgatattgggtattatataccgttgacagcttaagttgctttggtatataacctata

SEQ ID NO: 262529 - DNA, 379 bp, Glycine max
tgttgctatagatatctttatatttttttcccccaaaaatccaagatccaacctttgcttgtaatatctgaggtatcaatcttcatatatttgcttttggtaaggatattgattaggagaactcggtgttttttgttttattgggtgtgtcagaaacttgttttaaggagaagctactgagagagctgttatatgaggttcgaagctttggctatgccatgaaaattttgaattgtacaatatgggtagcaacaggactattgtttggtttaaaagggaccttaaaattgaggacaatcctgcattaactgctgttgcatacgagggttctgtactccctgtgtatgtatggtgcccctaaagaggaaggacaatttta

SEQ ID NO: 262530 - DNA, 294 bp, Glycine max
tccgagacttaagccgggatttgggtatagggtattcgcgtggcataaggaagacgtgggtcaacgatcgattgggaacaaggtttcgtgaagtgaacgacaatgattccatctgtatccttaagaagcttgtggcagcttagactgtcacatgatccttcaagatccacatctagaagtggttcaccatctacattgaacacattactctcaatgattactagatccatgacggtctgggtcttgaactctactacaactatacacatatatggtgtgattaatgcgtaatat

SEQ ID NO: 262531 - DNA, 379 bp, Glycine max
  unsure (1)..(379): unsure at all n locations
agcagattcacactatggtatggggcatacataggagcagagtgacaccagangtagtgctgggctgctagattataaatagagggcactcctttgcttaagaagcacacagcagcaagcatcttcttcttaaactagtagtattattcttccattcataatgggtggtttcacattccaggatgaaatcaacttccctgtggcttctgctactctttacaaggccctagttacagatgccgacaacgtcattccaaaagctcttgatttcctcaagagatgttaaaacgtttaaggaaatggtggccccagaaccattaagaagatcaattttcttgaagattgagaaaccaaatttgtgctgtacaaaatttaaagc

SEQ ID NO: 262532 - DNA, 306 bp, Glycine max
cccacgcgtccgagacaaggcactggaaatggctgtagactctttgggattcagctacttgagaattctaatgcagaaggaaatctacaaacagtcacttttgcaggaagggtggttgatgataggtcggttccatctttagatgctgagtctgatcaactttctgaaccttcaaaggccaaccgacctgatattccttcagttagttgcaatgctgaaaaatcatgcctgcagtctccccaggagtcacaatgcacgcaattaaggagctgtacaaaggttcacatgcaaggaatggctgttggg

SEQ ID NO: 262533 - DNA, 432 bp, Glycine max
gttacttggagcccccacatataatcctcagaaaagggttgattgctgggattgagtaccgttttttggctgaacacgtggctgatttcatggcgaagacactcttcttcacgtctctgcttttccgttccactgctgaccacaaacgggacgttgccgaattttgtgggaatgtggagttatgcaggctcactgaacaggtcgttttctctgacccttataaaggttctcaatataatcgttgtacttccccctatcttgatcgtgatgctgaggctgttcgggaagacaatctgctgaagcttgaagttgctgagctgaaatccaagttcattgagagggcccaggcactaatacatggagatctacacactggttctgtgatggttactcgggaatcaactcaagtttttgatccagaattggctttta

SEQ ID NO: 262534 - DNA, 467 bp, Glycine max
aaaagaatgtaactggcatctaccactactggcaggaaaagaacatagaccgaacattgtgggaactcggtaccttgccacctggactgctgacattttatggattaactgagcccttggatccatcatggcatgttttgggttttggctacaccaatgttgatcctcagttgatagagaggggagctgtattacacttcaatgggaactccaaaccctggttgaagattgggattgagaagtacaagcccctatgggaaaaatatgttgaatactctcatcctttgttgcaacagtgtaacttccattgattttgaattgcatttaaattgatacttcaaaccttggtggaagattcagatacagggctaagctctgttgatggggtaggagaatatattattggccgtttgtaagtctggcaagcttggtgattcttaccaaaaagtgaattcaggtcttgattt

SEQ ID NO: 262535 - DNA, 305 bp, Glycine max
agctactcatcataccggcgcactcaaggcgctggcttcggccctttctttcatcttcccgagagggagcattcagggggagctaacatgccgaacaatgtgtctgacaaagctgacaagggaccacgcatctgacgacgaagcatcagggcaactgtgctcatagaaacacttactgcactgtttcaactgaatgaaattttgtatgaactgaatgaccattcattgcgtttgaactgttagcgttgagattacagtcgcagtcatgttaataccttccaagctcatccagagcgcctcttacc

SEQ ID NO: 262536 - DNA, 380 bp, Glycine max
catgggagtcttcacctttgtcgtccgcaaatccggcagcgaatggagcgccaagcggcagtccggcgacatcgaggggtccgccgattccaccttcgatctccaacggaagctcgtgcaagccgctctcgccgttgattcctccggtggagttcagtcctctttctctcccgtgtctcctacctccgctgtgttccaggtgatagtgggtggtgcagtattcgttggacgtggtggtggtgctgttgcatctgcacctgcatgtggtgctgccgcagctgatgctgtcccagctgctgagaaaaaggaagaaaaggtggaggaagagtccgatgatgatatgggattgggactgtttgataagagtttttctgcttttt

SEQ ID NO: 262537 - DNA, 474 bp, Glycine max
gagggcggtcctcaggtcacgttcgacgccaacgcgcctctgcgcgagagaatattcagctgcagccgcgaagcgattgagaaactcaaagccatagcgaacaaccgccggtggccggaaaacaacaacttcgccggcgagttgttacggaagaaaagcaacgataatctactaaaggagaacaaggcgacgacaattcttgagaactggttcaaggtgaattcaaattcgatttcgaaaccgcaaacggtggaaatttcgtcgtttcaatcagtgtgcgcgcttctgtggcgcggggtgacgcgagcgaggaaatttccttcgtccaaaacgacgacgtttagaatggcggttaactgtcgccaccggttagaacccaaactggaagcgtattacttcgggaacgcgattcagagcgtgcctacttatgcttccgcgggtgaggtgttatccagggatctacggtggtgcgcg

SEQ ID NO: 262538 - DNA, 450 bp, Glycine max
acgatcgatttgaaggcaggaggtaagtccaagatgaccaaacgtacagcccccaaatccaatggtatttacctcaagctggtcgtcaagctgtaccgttttcttgttcggaggactggtagtaacttcaatgccgtcatcctcaaacgccttttcatgagcaaggtcaacaagcccccgctatccctctctagattgattcgttacaccaagggaaaggaggataagatagctgtggtagtcggggccgtgaccgatgacattagggtgtatgaagtccctgctctgaatgtaactgccctgaggttcactgaaactgccagagctagaattgagaaggctggtggctaatgccttacctttgatcaactggctcttagagctccactcggccagaatacggttcttcttagaggtcccaagaatgcccgtgaggcttgcaagcacttt

SEQ ID NO: 262539 - DNA, 476 bp, Glycine max
cgcaaatgtgatgcacgcatcgcatcaggaatgcctaaagcgccatctgggtcgacacgagggaacactaatcgcagacgaacacttctcaacacactcactaactcactcactccaagccctagatgactgctccattctttcacatgccacagaagtctgtgatctacgcttatgtcgctcgaggaaccgacattctcactgaatacaccgagtacagtagcaatttcaatactatcgcttttcaatgcctccagaaattgcctactgccattatcacattcacctacaattgccatggccacaccttcaattatctcgatgacaacggttacacatactgtgtacttgctactgaatcagcaggaagacaagtgcctattgcatttttggagcgtattaacgatgattttgtgtcgaaatatgcagggggaaaggctttcacggatcctgccaatagacttaacaaggaattt

SEQ ID NO: 262540 - DNA, 429 bp, Glycine max
cccacgcgtgcgcatggagcaagatacaggctgagattagagctcgtcgtatatgtatggtgacagaagacagaatcaggcggaagataatacattctcaactaaaacttgaggccaagattcatgacctggaggtaacttgtaaagctaacaggttttcagtgatggtattctggactttttcttttcaaactgatgccagtttgctaatcactctttctactacaatgattatgtgtggtttcattggtttctctgttttaaatatgcatttgtgtcattatttcaaatttctatgtctctctaggtgattagttaatgcatataactattgaaacggtgtcatgggatgggtctaccatatgagtcaactgcacttctgaggtctaatatcctatagattgacgtttagacattggaagcatgcgc

SEQ ID NO: 262541 - DNA, 445 bp, Glycine max
aaacaattaacacacacaaacagaggctacgtacgatcaaattaattaagatggcggaagtgaggagacaaacaagtgggtctgagggactatgtgagtggttttcctaaggaatccgacatgaacatagttgaaggaaccacaatattgaagcttccacaaggttccaatgatgtgcttctaaaaaatctctacctttcctgtgacccttacatgagaatgctcatgaccaaggtggaaggcctcgacgtgtttggcacctatacacctggctctccattaacagggtatggagtgtccaaagtcctagaatctggacacccagattacaagaaaggtgatttagtgtggggatctacaaaatgggaagaattcagcttggtgtccccaactcaaatacttttcaaaattgagcacaccgatgttccgctattatattatactg

SEQ ID NO: 262542 - DNA, 316 bp, Glycine max
accacgcgtccggtcgttctgaacggaaaagcactggcgcagctaccctgaggcttctctggtcggctcttctctgtggtgagtcaccatggtgagggttagtgtgctgaacgatgctctgaagagcatgtacaatgctgagaaaaggggaaagcgccaagtcatgattaggccatcctccaaagtcattatcaaattccttttggtgatgcaaaagcacggatacatccgagagtttgagtatgttcatgaccacagggctggtaaaatcgtggttgaatcgaacgtgtgactgaacaagtgtggggttattagt

SEQ ID NO: 262543 - DNA, 472 bp, Glycine max
gtcatcttccccaaccagagatgcgccctacaacatatacttactaaagctttcaactttggagacaccctttcagatgtgagccaaggcccataacacaggggatggatctaagttcctggctaagatactggcagaatggaaagactataatgcccagattgattccagcagtgatgcagataagccaattcgcaaagctcctgccaaaggatcgaacaaggggtgcatgaaaggtaaaggggggccagagaactcacggtgtaactaccgaggtgtcaggcaaaggacttgaggaaagtgggttgctgaaattcgagagccaaacagaggcaatacgctttggctaggtactttgcccactgccattggagctgcccttgcatatgatgaagcggtcatggcaatgtacggctgctgtgccacgctcaacttttccaatgtttcagtttccaggttctctgaggaatct

SEQ ID NO: 262544 - DNA, 392 bp, Glycine max
cagaagtagaggaataatggagcaggaagagcacgaggtgtacggtgcagacattcccgacgaggggattgacatggacgcagacgccgaacagcaagacgagcaacttgcccccaatcacacaaacaaggaactggaggacatgaagaagaggctgaaggagatcgaggaggaagctagcgccctacgcgaaatgcaggcaaaggttgagaaagagatgggcgctgttcaagattcgtctggcacttctgcgactcaagttgaaaaggatgaagtggatgctcgatcaatctatgttggtaatgttgactatgcatgtacgcctgaagaagtccagcagcattttcagtcctgtggaactgtgaacagggtgacaatactgacagacaaat

SEQ ID NO: 262545 - DNA, 432 bp, Glycine max
cccacgcgtccgggcggggctcggaggtgggaatgacgagagggaacagactattaaccagcttctgacggagatggatggcttttctggcaattctggtgttattgttttggctgccactaacagaccggatgttcttgattcggcgttgttgaggcctggccggttcgacaggcaagttactgtggatagacctgatgttgccggcagagttaaaattcttcaggtgcattctagaggaaaagcacttgcaaaggatgttgactttgaaaaaattgcaaggagaacccctggattcactggggctgatctgcagaatctgatgaatgaagcggctattcttgcaaccaggcgtgacctcaaagaaataagtaaagatgagatatctgatgcgcttgaaaggatcatagctggacctgagaagaaaaatgc

SEQ ID NO: 262546 - DNA, 443 bp, Glycine max
tcgtcgacgcgtgctgcaaaggatgcaagatgactgtcacgagcgcgctacaaggaatatatggggtgacgtaagttaacttggaccgaatagccaacaaatcaacacttgtagactacgtaaagccctccaaagccgaacttcgtgtaccataccgaacatcgaagaatgccaagctgtcgccctaccttccatactacgtgcttgcacatttatacacactatcagtgtacgactggaaaacttcactcacgtacttgcgactcatcaaccacgccaacttgtactaactcgcacttactaactcaactgatgttcattatactacagcattaatatacgaatatccctcatctttttctctcatctaacggacattcttcacttgattgtaaatacactgtactaattaggcattctaattatagtcctttaccatttta

SEQ ID NO: 262547 - DNA, 476 bp, Glycine max
acgtagaaattgatcctttagcatcccttccgattctgcacttccttagtctgctggacaacaagattacatagaaacgaaattacaggctttatgttattaacaagctgaaatccctacgggtgttagatttcaagaaagtgaaaaataaggaacggttggaagccaaaaatttgttttcttcaaaagaagttatagaagaaattcaaaggacacccacaaaaagtgaaactcctaatgtttctgaagtgattgaggaacaacagatgcccaaagtcgttgctcctacacctgagcaaattattgctattaaggctgccattgtgaattctcagactcttgaagaggttgctagacttgaaaaggcattgaagtcaggccagcttcctgcagatttattgttggataatgttgatgaaaaacatgaggacatgattcatgacgatagaggtcaagctgatggagaatctaatgat

SEQ ID NO: 262548 - DNA, 375 bp, Glycine max
aaagggccttggctcgcttttggattaaatttggagaggattcgattgcttctattaccgatttggttcttggaccctctaaagatgaacaagaaagagcaagagcaaagaaaaaggcagaagatactatcatggtaatggaagagcaaggcctaggagacaagaagttctttggaggcaacaatattggaatggaggatatagctcatggatgcctaagtcattggttagaaggcttggaggaaattgtggggatgaaattgagtgagccaaacaaattacctcggttgcatgcgtggacttaaaatttcaagcaaagttctgttattaaagaaaaccttcctgattatgataaactgttgatccatcttgaat

SEQ ID NO: 262549 - DNA, 376 bp, Glycine max
cccacgcgtccgtgtcattgccttccagacctatgcagttggaagcagtggaggatacaagaagggtgtgacagaagcaaaactgaaggttgccataaacggatttggaaggattggaaggaacttcttgaggtgctggcacggtcgcaaagactcccctcttgatgtcattgccatcaacgacaccggtggcgtgaaacaagcctctcaccttctcaagtacgattcgatcctcggaaccttcgatgctgatgtcaagcctgttggcagcgacatcatctctgtcgatggaaaggaaatcaaagttgtctctgaaccgaaccctgccaaccttacttggaaggatttggggatagacttggtgattgaatgaact

SEQ ID NO: 262550 - DNA, 434 bp, Glycine max
gtaaataccggtttacaacttctcaccgcaaacgctgggagtgaccagtcgacggtggatgatggggcctcgtcgggggctgaggataagcgtgccaagatgactgagctggcacgactgaaagaggaccttcgaaacatgaatgcagagaaccaaaagctgaaggagatgctcagccatgtcagcagtaactacgcgaacttgcaaatgcatcttgcagcagtactgcaacagcaacagaaccaacgcactgagagcacggaacaagaggttggtcaaggaaaattagctgatgagagaaagcatggagttggcggatgaacggggcctagacaattcctgagtttagttccaagtgaaatagatgatcaattatctaattcttctttccgtgaaaggacttgatcaaccacaccttccagcaattaaaatga

SEQ ID NO: 262551 - DNA, 320 bp, Glycine max
acgcccacgcgtccgcttaaacatagagtgtgtttatgtctccttggctgatcttcaaggggatgaggatcatgcattgaaggggattatgttgagagctgaagatgtgcaagggaagaatgtcctgacaaatttctggggaatggatttcacaactgacaagctgaggtcattggtgcgaaaatggcaaactctaattgaagcccatgtggatgtgaagacaactgatatctacacattgtggatgttctgcattggatttaccaagagaagagctaaccaattgaagtgactctgctatgcacaaataagccatatta

SEQ ID NO: 262552 - DNA, 449 bp, Glycine max
ccgctattctactcgcaagcaaatcagaacaagagaagagaatggcaggagcagaggggctgaacagagaacagtacgtgtaccttgcgaagctgtcggagcaggcggagcggtacgaagagatggtggagttcatgcagaaggtggtggtggggtggacgccggcgtcggagctcacggtggaggagcgcaacctcctctcggtggcctacaagaacgtgatcgggtctctgcgtgccgcgtggcgcatcgtgtcctccatcgaacagaaggaggaagggcgcaagaacgacgaccacgtgtccctcgtgaagcactacagatccaaggtcgagaacgagctcacgcaggtctgcgccagcatcctcaacctcctcgactccaacctcgtacccttcgtcttcgccagcgagtccaaggtcttctacttgaagatgaagggcgattac

SEQ ID NO: 262553 - DNA, 470 bp, Glycine max
ctcaaatattatctatcaaaatcagaacggattcagaatacccacttatatgagttatttgggtctaaactatggttcaattgcaggcttgcttgctgcacgctactgaaaaagaaagaaagaaaatccgtttggatgaatgcgcgagaggaatcaacccaatcaagagaaactctctctcccttctacacttttaagaagaaaaagtgtgtctgatttccaattttgccctcaccttttcgtgatttctcatttatatcctgctccttttcgtttccatttctttgctgctacttccaactccttccattctgaactttgaatctctagggtttaattccccactcatcgaatggaacctcgggttgccaacaagttccgtcttggccgcaagattggtagcggatccttcggcgagatctatctcggtacgaatacccagacaaatgaagaggttgcaattaagctcg

SEQ ID NO: 262554 - DNA, 449 bp, Glycine max
cttgcttggttatgatattggagtgatgagtggagcagccatatacataaaaagggacctgaaagtctcggacgagcaaatcgagatcctgctcggaatcatcaacctatactctctgataggctcatgtctcgccggcagaacctccgactggataggtcgccgttacacgattgttttcgccggcgccatcttctttgtcggagcacttctcatgggtttctcccccaattattcctttctcatgtttggccgtttcgtcgctggcattggcatcggctacgccctcatgatagcccccgtctacaccgccgaagtctccccggcctcctctcgtggcttcctcacttccttccctgaggtatttattaatggagggatattaattggatacatatcaaactatgcattttcgaagctgacacttaaggtgggatggcgaatgatgc

SEQ ID NO: 262555 - DNA, 428 bp, Glycine max
cttgcttggttatgatattggagtgatgagtggagcagccatatacataaaaagggacctgaaaggctcggacgagcaaatcgagatcctgctcggaatcatcaacctatactctctgataggctcatgtctcgccggcagaacctccgactggataggtcgccgttacacgattgatttcgccggcgccatcttctttgtcggagcacttctcatgggtttctcccccaattattcctttctcatgtttggccgtttcgtcgctggcattggcatcggctacgccctcatgatagcccccgtctacaccgtcgaggtctccccggcctcctctcgtggcttcctcacttccttccctgaggtatttattaatggagggatattaattggatacatatcaaactatgcattttcgaaactgacactaa

SEQ ID NO: 262556 - DNA, 451 bp, Glycine max
cttgcttggttatgatattggagtgatgagtggagcagccatatacataaaaagggacctgaaagtctcggacgagcaaatcgagatcctgctcggaatcatcaacctatactctctgataggctcatgtctcgccggcagaacctccgactggataggtcgccgttacacgattgttttcgccggcgccatcttctttgtcggagcacttctcatgggtttctcccccaattattcctttctcatgtttggccgtttcgtcgctggcattggcatcggctacgccctcatgatagcccccgtctacaccgccgaggtctccccggcctcctctcgtggcttcctcacttccttccctgaggtatttattaatggaaggatattaattggatacatatcatactatgcattttcgaagctgacactaaaggtgggatggcgaatgatgctt

SEQ ID NO: 262557 - DNA, 426 bp, Glycine max
cttgcttggttatgatattggagtgatgagtggagcagccatatacatacaaagggacctgaaaggctcggacgagcaaatcgagatcctgctcggaatcatcaacctatactctctgataggctcatgtctcgccggcagaacctccgactggataggtcgccgttacacgattgttttcgccggcgccatcttctttgtcggagcacttctcatgggtttctcccccaattattcctttctcatgtttggccgtttcgacgctggcattggcatcggctacgccctcatgatagcccccgtctacaccgccgaggtctccccggcctcctctcgtggcttcctcacttacttccctgaagtatttattaatggagggatatttattggatacatatcacactatgcattttcgaagctgacact

SEQ ID NO: 262558 - DNA, 314 bp, Glycine max
cccactcgtacgcccacgcgtccgcctgaatggggaatcacaggccctactgatgctagggggtattacaactggccgggggacactgaatctttcctcaaagaatgtggaggctgggatggggcatatggtgagtttttcctcacctggtactctcagatgctattggaccacggagacaggattctatcatcagccacgtcaatctatgacaacacttgagagaagatctcagagaatgtggctggcattcactggcactatgggtcaaggtctcacgcgccagaactcacagcgctgtattacaacaccct

SEQ ID NO: 262559 - DNA, 452 bp, Glycine max
  unsure (1)..(452): unsure at all n locations
cacaaaagcaaagatcaaacaaaccaaggacgagaacacgatgttgcttgaacttgcacttgggttattggttttggctctgtttctgcacttgcgtcccacacccactgcaaaatcaaaagcacttcgccatctcccaaacccaccaagcccaaagcctcgtcttcccttcataggacaccttcatctcttaaaagacaaacttctccactacgcactcatcgacctctccaaaaaacatggtcccttattctctctctactttggctccatgccaaccgttgttgccttcacaccagaattgttcaagctcttcctccaaacgcacgaggcaacttccttcaacacaaggttccaaacctcagccataagacgcctcacctatgatagctcagtggccatgggtcccttcngaccttactggaagttcgtgaggaagctcatcatgaacg

SEQ ID NO: 262560 - DNA, 253 bp, Glycine max
tcgccacgcgtccgcggacgcgtttggagagcttcgacaccatcgacaacgtcaaggctaagatccaggacaaggagggtattcccccagaccagcagaagctgatcttcgccggcaagcagctcgaggacggacgtacccttgctgactacaacatccagaaagagtcaactcttcacttggtgttgcgtcttcgtggtggtatgcagatcttcgtcaagacccttacgggtaagactattacccttgatgt

SEQ ID NO: 262561 - DNA, 312 bp, Glycine max
aagaaacgaagatagaatgtgcacagccctaaagacgaattaccagcttagcgaggagatcggtcgcggtcgtttcggcaccatcttccgctgcttccacccactctccaacgaaccctacgcctgcaaactcatcgacaaatccctcctccatgactccaccgaccgcgactgcctccagaacgaacccaaattcatgacccttctttcacctcacccaaacatccttcaaatcttccatgttttcgaggacgaccaatatctctccatagtaatggatctctgccaaccccacacgcttttcgaccgcat

SEQ ID NO: 262562 - DNA, 429 bp, Glycine max
ctttctttttctgtgagcctttctttcaggttcttaacttgatcagtgtgcagtgtccaaatgataagggtagttgcaaattgcaatggctaagcatgatgttgagggtggttccttctctgcaaaggactaccatgatcctcctccagcaccgttgattgatgctgaggaactcacacagtggtccttctacagggctttgattgctgagttcattgccacaatgctcttcctttacatcacagtgctcactgtgattggttacaagagccagagtgatgtaaaggctgggggtgatgtgtgtggtggagttggcattcttggcattgcttgggcctttggtggcatgatcttcattctggtgtactgcactgctggaatctcatggggtcacataaacccagcattgacatttgggctcttcttggc

SEQ ID NO: 262563 - DNA, 449 bp, Glycine max
atggcatctatggcggctataggttctctcaatgttccacgttctgcttcttggcgttcatcgtttgtgggaagaaaaagcgttccacgcagcctttccttctctgcatcacaactttgtggagacaagattcccacagattcagttttattggcaccaaaaataggtcgcagtccagttatcgttactcctaaagcagtttctgattcccaaaactcacaaacgtgccttgatcccgatgctagcagaagtgtgcttggcattatacttggaggtggtgctgggactcggctttatccactcaccaagaagagggcaaagccagctgttcctcttggagctaactataggcttattgatattcctggtagcaactgcttgaatagcaatgtcttcaagatctatgttctcactcaattcaattctgcgtcggtaaaaccgacaccttt

SEQ ID NO: 262564 - DNA, 433 bp, Glycine max
tccacgcgtccgcacgcacgtctctctctctctctcgccatggctatggctatgcaaagcgggatcggagtcggcaagatcctcatcatagcaggagcaggttacaccggcaccgtcctcatcaaaaacggaaaactctcggatttaatcggcgagcttcagttgctggtgaagggattggaaaaatctggggagcatgctgaaggtgaaggtgaatatgctgatgccatagctgctcaggtgcgtcgcctggcgaatgaagttcggcagcttgcatcaaacaggccaatcacagtactgaatgggggttctgaacaaagttatttatcatcccttggcggttcaactgctggcttgggcgctctgggttatggctacatgtggtggaaaggaatttcattctcagatcttatgtatgtgacctgaccgaatt

SEQ ID NO: 262565 - DNA, 423 bp, Glycine max
  unsure (1)..(423): unsure at all n locations
cccacgcgtccgcccacgcgtccgcccacgcgtccgtttagacttactcatataaataactcagggcggtggctatgtcaaactgagaactaagatcccgctggcggttggcgcaacctttcgatcttcatccaacggggcaacgttggatctgctgaactgaacttctttttatatgcactctgtgatttcactctgcttcgccatcctatgggggacaacaacagcaacaacgatgccttcatgcgcaaccaaaacgccgtcgttcaggcccgcaccaaagcgcagaaccgctccaacgtccttcagctcaaactgattggacagagtcacccaaccggtctcacagcgaacctgttgaagctcttcgagcctaggcctncgttggagtacaagccaccttcggagaaacgaaaatgccca

SEQ ID NO: 262566 - DNA, 439 bp, Glycine max
tgaagagctgcgagaactaggttctggtacctttgggactgtgtatcatggaaagtggagaggaacagatgttgctattaaaagaataaagaagagctgcttcactggtcgatcatctgagcaagagagactgactgtagagttctggcgggaagctgacattctttccaagcttcatcatccaaatgtggttgcattttatggtgtggtacagcatgggccaggaggaacaatggccactgtggcagaatatatggtggatggttctcttaggcatgtattacttcgcaaggataggtatcttgatcgtcgcaagaggctgataattgcaatggatgcagcttttggaatggaatatttgcactcaaaaaacattgtgcattttgacttataatgtgacaatttgctagtaaaactgaaagatcctttacgttcaata

SEQ ID NO: 262567 - DNA, 261 bp, Glycine max
cgggacgacccacgcgaccaggagaggagagcacaaagaaaagcaaacacagacacagcaagagagagcagggaggagaggggaaagggagaaagagagacaccggaggcacaggaaaccaaggacacggaagagcaagagaccaacgagaacaaggacacgcagagaagaccacaacaagagcagacccaggacgcaagagagacgagagcaaacacacaaaccaacccggcgcaacagaaaagcagaaaagccacaacg

SEQ ID NO: 262568 - DNA, 237 bp, Glycine max
caaaaggccatataatttttttttatttgaaataatgtccgggatcattcaggagattgaggagaccctccatgtgggagggcacaagaaagaggagcacataggagaacaccatggtgagcacaaaggtgaacacataggagaacaccatggtgagcacaaaggtgaacacataggagaacaactccattgggagcacaaggagggactttgtgataatatcaaggacaagatcca

SEQ ID NO: 262569 - DNA, 474 bp, Glycine max
ggctcctccgacgatcaccatcaccgccaccgccacgtcgaggaggaggaggagatgccgccgctgcgccccccggttcagctcggcgagatcacagcggaggagctcaaggcctacgacggcaccgatcccgagaagcccttgctcatggccatcaaggcccagatctatgatgtctcccagagcaggatgttttatggacctggtggaccttatgccctatttgctggcaaggatgctagcagagccttagcaaagatgtcttttgaagagaaagatctgactggggatatttctggtcttggcccgtttgagcttgatgccttacaagactgggaatataagtttatgagcaagtatgtgaaggttggaactgttaaaagtgaagaagttccagtaactgaaccagagtccattggtgaccattagaatctactttccgtgatattgatgctgctgccaagcctactgata

SEQ ID NO: 262570 - DNA, 444 bp, Glycine max
aggatcacatgcgtaaagctggtgatgtgtgtttttcgcaagtcttccgtgagcgtggtggggtgactggtatagttgatgatacgcaattatgatgatatgaaatatgctatcaggaaacttgatgactcagaattccgcaatgccttttctcgtgctttcatactggtgagggaatatgatcgaggttattctagaagtcctagtcgtgattcaaggaggagctattctagaagcctcagccgcagtccatgtatctcacgaagccgcagccatagcctcatcataagtcatatctatagtgacaggagcagaagttggtctccgaaaccaaaacactttcgacgttcaatatcttctttcaaggttagttttttaccaagtttgatacattatgcaggttttgtgctcttgtgtcttttattgttgaaattttaaattttg

SEQ ID NO: 262571 - DNA, 429 bp, Glycine max
cccagttcaatgttatgctgatttcatgcgtgctttcagagacactttcaagcacctccttggtgacaccattgtggaaattcaagttgggatgggaccggcaggtgagctgcgttacccttcttacccagagcaaaatgggacatggaatttcccaggaattggtggtttccaatgctatgacaagtatatgttgagtagcttaaaagctgctgctgaagctgagggtaagcctgaatggggaagcacaggccctactgatgctggacactataacaactggccagaagacactcaatttttccgcaaagaaggtggaggctgggatggtccatatggtgaagttttcctcacctggtactctcagatgctgttggaccacggtgacaggattttctcatcagccacgtcaatctttgacaacactgg

SEQ ID NO: 262572 - DNA, 326 bp, Glycine max
tactcggtcctgggttccctggtagacccacgcttacgattgaattcaaaaacttaagttcattccttgtgttttgctttcttcctcaaagccaaacatgtgaaacagagggcggcaactgcgactgctctgacaagactagctgcaccaatggaaacagctatggtgttattgtagagactgagaagagttacatctagactgttgttatggatgtaccagcatctgaacatgatgggaagtgcatgtgtggcactaactgcacttgcacggactgcacctgtggccattaatgaatatgtatgtaaatgtaattgccatgtgtt

SEQ ID NO: 262573 - DNA, 172 bp, Glycine max
cccacgcgtccgctaccatgcttccttgcagtacaccctctcatgcttctgcgctttttatagcccctattttaaatatagcccttgactgtcttttttccatacttcctccacgaataatcatcattatttatatttgcatgtttcttgcatatatcattcaccataattt

SEQ ID NO: 262574 - DNA, 465 bp, Glycine max
cccacgcgtccggaacattactcatacaagctcatctcagagaaagtatccagcggtaataggagagttgtgccatcaatgttctctggccgatcttaggaaatccaccaacaacttcgatcaaaacagagtaattggacgtggattatttagtgaagtatataaaggctctgtacaacataagggtgcttctgattatactgttgcagtaaagcgattcaatgaacgaggattggaagcgttcaagaaggaaatagaattgctctgccagctttttcaccctaattgtgtctctataataggattctgcaaccacataaaagagaagattattgtgtacgagtacatgtccaatggttctctagctgattacctacaaagtggagatgcagaagcattatcgtggaagaaaagactagagatctgcattggagtagctcgtggactacactaccttcacactgg

SEQ ID NO: 262575 - DNA, 379 bp, Glycine max
gcgagaaggccatgaaaaggtggctcatgtatgcaacatgcatccaaattttcagattgaacgttataattgtattaatctgacggaaaccattgaggagtttgattcatcttggaattttatcatcaataaatatgaactcacgaaaaatgattggcttcagtccttgtacagtgctcgtgctcaatgggttccagcatattttcgtgattcattttttgcagcaatatctcctaatcaaggatttgatggttcttttttttatggttttgtcaaccaccagacaacattaccactgttctttaggcagtatgaacaagctttggagtgctggtttgaaaaagaattagaatcagattatgatactatttgtacaacc

SEQ ID NO: 262576 - DNA, 372 bp, Glycine max
ttgtttctttgcactccccgcccaaaccctaactggctaccctattccgctttctctcatccatcatgaaaggaggaaagtccaagaccgaatctaagagagccgatgccaaacttgctgtgaataagaagggcgccgccaccaagactaggaaacccgccggaaaggggaaggcagcgaaagatcctaacaagccaaagaggccttcaagtgctttcttcgttttcatggaggaattcatgaaggtgttcaacaaggaacatcccgacaacaaagcagtgtctgctgtgggcaaagctgctggagcaaaatggaagacgatgtctgatgctgaaaaagcaccttatgtggcaaagtctgagaaatggaaag

SEQ ID NO: 262577 - DNA, 435 bp, Glycine max
  unsure (1)..(435): unsure at all n locations
cttttctctctctcttcaatttcacccttttagcatttgtacattcctttcccttccttgaagcgttcttaattgcgagaggggatatcggagaagttgattggcctcccattaattgcaggtctgaatgatctgatggagtctaaagttgggaagaagaagtcgtctagtagtaagtcccttttgtacgaagctcctctcgattacaccattgaagacgttcgaccacacggtggaattaagaagttcagatctgctgcttactccaactgcatccgcaagccatcctgagattccctaggttgtgtgacgacatagcccccgtagtcttgcatctgctatattattctagtctcttcntttcccttttcttgttctcttccttgcccttttgttctctctacctatacagcaagactttgtttctttttgagt

SEQ ID NO: 262578 - DNA, 323 bp, Glycine max
aacagccttaaccttcgctgcccccaacgttgtgccattgtcacccacaaatgctgtcttcgagattaccgtctttcctaccaaattgaaagccccgcgctcctcacctcgttactctccgattagggttgcaaccgtggagcccgacacttcaactgtctactacaactctgcgttctcagtgtttcctgcataatcatgctaaactgtattatgggaatcctgcattgcttatatttacctcttaacttatctacattctgtagcttatactttatgagtcttttcttaaatctatttatagagtatttttattctatttt

SEQ ID NO: 262579 - DNA, 340 bp, Glycine max
actcggtccttaattcccgtgtctggtccactccttacaatccactcgtttctgcaatgctgatcttagcaaatctaatgattatcacatactgcataaagttggtgatattcactccaagggcattatttctcttgtcttaaattcaattcttacattctttcaacaatttaatatgtttcacctactttaatatttttattatatatatattatcttttatattcttttttcaatttatattttatttttatttatttctatattattaatctttttcttatttattttttatttattatttatcatacttttatcttttttttttctatttattttt

SEQ ID NO: 262580 - DNA, 234 bp, Glycine max
taagttcaagagaagtatattagggaataaccgattaccgtgccatgattctgttgatttatcatgacaagaacaaatataacactttgtaataccgattatgtgaatgctatagcaacaatgactttgctgttcaatttatttctgctatcattgctggtgacatagatgttgctgctgtatatgcacatgatctggcacattttggtcttgaagtaaggcttacttattatt

SEQ ID NO: 262581 - DNA, 405 bp, Glycine max
cccacgcgtccggttgagttctatgctccttggtgtggacactgcaaaaagcttgctccagaatatgaaaagcttggtagcagcttcaagaaagccaaatctgttttaatcggcaaggttgactgtgatgagcacaagagtttgtgcagcaaatatggagtctctgggtacccaacaattcagtggtttccaaaaggatctcttgaacccaaaaagtatgaagggccacgcactgctgattcacttgctgagtttgtaaatacggaaggaggaacaaatgtgaagattgctacagcttctttcaatgtaatggtgcttacatctgaaaattttaatgatgttgtcttatatgaaacccaagatggtctggttgagttttatgcacccctggtgtggacatttgca

SEQ ID NO: 262582 - DNA, 355 bp, Glycine max
tcttactccttacaatatgggcatattcaatctgtcccataggtatctctatctgatgtttttgcttcctattgccatagatttcaattgctgattaattttgcttgcagagttgttttggcaccgctgaccagacagaggtcttacgacaacgtcccacaaccccatgccatcctctactactcccagagaacttccaactgaggccttctcattactgaatccactggcgtctctgacacggctcaaggctatccgcataccccttgcatatggacttaagaccatgttcaagcttggaaacccattttcgatgccgttcactccaaaggcggtggtttcttctgtcaaattt

SEQ ID NO: 262583 - DNA, 430 bp, Glycine max
cggacgcgtgggcggtgatccgttggagcatcctcagaaagagacttactggggaaatgtgaatccaatcggtgagaggagctgttacgatgaagggaaaaggactgcggagacgttggccatggattatcatcggggtgctggtgttgaggttcgtattgctcgaattttcaacacatatggaccccgcatgtgtttggatgatgggcgtgttgttagcaattttgttgcacaggctattcgtaaacaaccattgactgtatatggtgatgggaagcaaacaagaagtttccaatatgtctctgatttggttaatgggctggtggctttgatggaaagcgaacatgtgggacctttcaacctgggtaacccaggggagtttaccatgttagagcttgctcaggttgtcaaagaaacaattgattcaagt

SEQ ID NO: 262584 - DNA, 149 bp, Glycine max
caaaaaggttgctctttttgattccaagggagttcccgttgcaattctcaataatattgagagggataagcggcctaaagaagaaagaatagcccgaacttggggaaccattgcccctggcctaccttatgttgaacaaactataacca

SEQ ID NO: 262585 - DNA, 437 bp, Glycine max
  unsure (1)..(437): unsure at all n locations
cctcaccaaccttatcacaaggtttcgagatcaaggactctctgctagggacatggttgctttatctggagctcacacatttggcaaagcaaggtgtactagtttcagagatcgcatatacaatcaaaccaacattgatagaacatttgcattggccaggcagaggaggtgtcctaggactaatggcacaggtgacaacaatctagcanatctagacttcagaactccagatcattttgacaacaactacttcaaaaaccttctcatcaaaaggggactcctgaattctgatcaggtgcttttcaatggtggatccactgattcactggtaagaacttacagccagaataacaaggcatttgatactgactttgttaaagcaatgattaggatgggagatatcaaacccttaactgggtcacaaggtgagattagga

SEQ ID NO: 262586 - DNA, 411 bp, Glycine max
cccacgcgtccgggattgtgaccttggaagcattagaaccttttgccagtgaagccccaaaacaggatccttctccacttccatacttgactgagaaagaacccaaaatctatgatatttccctagaggctcacataaaacctgctgggcatgaagattcgggtgtggtgtcacggactaatctaaagcacttatattggacattgacccaacaacttgctcaccatacaatcaacggttgcaaccttaggccaggcgatctccttggaactgggacagttagtggtcctgagccagagtcccgtgcatgcttgctagaattaacatggaatggacaaaacacagtgtcagtgaatgagttaaatcggaaatttcttgaagatggagacgaagtcatcttaactggatatt

SEQ ID NO: 262587 - DNA, 319 bp, Glycine max
gacagacgtagaaaatccaattaagattgaccatggattattcattgacgaactcatggctgctatctccatcattaccttcagcttgcactactactccttagatggctaaaggcggaagtggagctcttggtgcagagctcactacactcaacactgctgctgacatatgaagaaccaatcgacccaccactcaccgttgaacacacccagctcttaatcgatggacaattcggtgatgctgatactggcataacttttccacagttggaccccaagacaggcgatgtgattacccatgttgctgacgatgaccatg

SEQ ID NO: 262588 - DNA, 331 bp, Glycine max
cccacgcgtccgcagcaaccagcttgcagaagcagatgagtttgaggacaaaatgaaggaatgggaaagcatctgcaatccaatcattgccaagatgtaccaaggtggtgctggtccagacgtgggtggtgctggtgcagcagaggatgagtatgctgctcctgcttctggtggaagtggtgctggccccaagattgaggaagtggactaaatgtagttgctttcctacagatacctgctttaaaaacttattttactttatgcttattttaatgggatttaatcgcatgatttttggtggatgggattcaaactattttttcctttctga

SEQ ID NO: 262589 - DNA, 432 bp, Glycine max
cttgaatcttcgttatccttctttttttctccttgaactcgaatattcactatggcagatgaggtggttctgctagatttctggccaagtccatttgggatgagggtcacgattgcacttgctgaaaagggtatcacatatgagtccaaagaagaggacttgcagaacaagagccctttggtcctcaaaatgaacccgggtcacaagaaaatcccggttctcatccacaatggccaacccatttgtgaatctctcgttgctgctcagtacattgaggaagtctggaatgacagaaatcccttgttgccttctgacccttaccagagagctcatgctcgattctgggctgactatgttgacaataagatatttgatcttggaagaaagatttggacatcaaagggagaagaaaaagaaactgccaaaaaggag

SEQ ID NO: 262590 - DNA, 369 bp, Glycine max
ggacttttgatgtctctcttctcaccatcgaggagggtattttcgaggtgaatgccactgctggtgatactcacttgggaggtgaagattttgataacagaatggtgaaccattttgttcaggaattcaagaggaagaacaagaaggatattagtggaaatgccagagctctgaagaggttgagaacagcatgtgagcggtcaaagaggactctctcttctactgctcaaaccaccatagagattgatttcttgtactagtgtattgacttttacacaaccattacctgtgccccgtttgaagagctaaacatggatttattcaggaagtgcatggagcccgtggagaaatttttgcggaatcccaaat

SEQ ID NO: 262591 - DNA, 413 bp, Glycine max
cccacgcgtccgcccacgcgtccggctttattctttttcttcgcttcttctgtagagcacccaggattgaagatgatagaccttgcgcgcgtgcagaaggagcttgtggaatgcagcaaggacgcggagggatcgggcatcaaagtcagtcccaaaaacgacaaccttgctctcttgatcggcaccattcctggccccgtcggaactccatatgaagggggcattttccagattgatatcacattgcctgatgggtacccgtttgaaccccccaagatgcagtttaaaaccaaaggttggcatcctaatatcagcagccaaagtggagctatttgcctggatatcttgaaggaccagtggagcccagcactcactctgaagactgcacttctttctgtgcaagcacttatctc

SEQ ID NO: 262592 - DNA, 435 bp, Glycine max
  unsure (1)..(435): unsure at all n locations
acacttccaccacccttagtctggaggccggtccggcccaagcgagcccactccgaaaaatgtttgccgtggcgtccatcgccgncggcatacagttcgggtgggctctccagctctctcttctaaccccctacgttcagctnttaggagtcccccacgcggcggnctncttcatctggctctgcgggcccatctccgggctcgtggtacagcccattgtgggctactacagcgaccactgtacctnccgctttggtcgcaggcgcccctntattctcgggggcgccttagccgtcgccgtcgccgtgttcctcattggttacgcagccgatataggatacgcggcgggcgacgacatatcgaaaacgacccgaccccgagcggtcggggtcttcgtcataggattttggatcctagacgtggccaacaacatgc

SEQ ID NO: 262593 - DNA, 425 bp, Glycine max
gacaattcgcagtttgttacctcactttggtttttttctctgcagtaatagaaaaggaagagggaaagaagaagaagaagaagaagaagaagaagatgttgagggttgcagctagaaggctctcttctctctcctcctcctctccgtggcggcccaaccacgccgctttcgcttatgtctctcgaaacgcactcgttgatgaccgcagatccgatccttcctcccatcccctttttcccttcagaagttttgctactgaatccctgatccacccaatataaaacagcattattcctgagattcctgcaactgttactgctgttaagaaccctacttctaagattgtctatgatgagcacaaccatgaaagatttcccccaggtgacccaagcaagaaggcatttgcctacttcgtccttacaggg

SEQ ID NO: 262594 - DNA, 215 bp, Glycine max
ggcacgcgtgcgattactcgtcctcatgggcatgctgatttaaccggttcgcaagatcattagcgatacttatggaggatggggtgctcatggtggtggtgctttctccgggaaggaccctaccaatgttgataggagtggtgcttacattgtgagacaagctgctaagagcattgcggcaagtggacttgccagaaggtgcattgtacaagtgt

SEQ ID NO: 262595 - DNA, 438 bp, Glycine max
  unsure (1)..(438): unsure at all n locations
catcctgcggccagtggcacttttttcactcttatgcttctagggctcaagtactgctcttgccagtttcagggcaatctgcaaaaatttcagatggggcttcagctgctggaagatcggatatatagggcatctttgggttggttttcttttgagccagaatggtatgacacaaactatacaaactttgctcagtgtgaggctcaatctgtttctctatttgttcaataccttacaaatatgaaaggagatactgtccaagttggttcaaaaggaaatggacaagaaaatgggaatcctttggctgatgtgagtgatcaccatcatcctgtttggggtcaaatggagaactatgctgcangaagagaaaaacggaggcagctacttttaatgctttgccagcatgaggctgataggcttgatgtttgggcacagccg

SEQ ID NO: 262596 - DNA, 368 bp, Glycine max
tttctctctccctctctagaaccgtaaccgtcgtttctttctttctctctcctcaaccagagataaagagtcaccttcttatttttctgaatctcgcggcgttgttctttctgctgctgcggctgtggttccggcggcgatgggacagcaatcgttgatctacagcttcgtcgctcgaggcaccgttatcctcgcggagtacaccgagttcaccggaaacttcaccggcgtggcggcgcagtgccttcagaaactcccttccttcaacaacaagttcacctacaactgcgatggccacaccttcaactacctcgtcgataacggattcacttactgtgtggttgccgttgagtctgctggacggcaga

SEQ ID NO: 262597 - DNA, 422 bp, Glycine max
cccacgcgtccgttttcgatatcaatagcgaaaatgtcatcagctggtgtctctacacttactgtggttcccactgagccattgttgtcaccaaaggcattcccttttccaattccatcacacttgtctttggaagataaatccattttcatatacctctccttttccgggctcattgactcccatccgtgttatggagtgggataccattgaatctgtcaaattcaaaatccaaaggtgtgaaagccttccatttttaacaaacaagcagaagttggtttatgctggccgagagcttgcgcgaagtgatacgccgctcaaggactatggagtaacggatggaaatgttttgcatttggtaatcaaactgtcagaacttcaagtcatcaatgtgaaaacttcttgtgggaaagagttcacgt

SEQ ID NO: 262598 - DNA, 377 bp, Glycine max
cccacgcgtccgcccacgcgtccgggccaggcaagccccactcaaccaccacacctctcctcggtcacgctacccctttctgctcttcttctacctttcaagttttaaaagtataaagatggcagagacattcctatttacctcagagtcggtgaacgagggacaccctgacaagctctgcgaccaaatctccgatgctgtcctcgacgcttgcctcgaccaggacccagacagcaaaattgcctgcaaaacatgcaccaaaaccaactttggtcatggtcttcggagaaatcacgaccaaggccaacgttgactacaagaagatagtccgtgacacctgcaggaccatcggcttcgcctcaaatgatttggaactg

SEQ ID NO: 262599 - DNA, 302 bp, Glycine max
agccaagtgaaagtgagaaaaaataaaaatcaaagagcataatgtcagggatcattcacaagagtggggagacccttcatgtgggagggcacaagaaggaggaggagcataagggtgagcaccatgctggagaatacaaaggggagcaccatggtgaacacagtagtgagtacaaaggagagcatcatggtgaacacaaagctggagagtaccatggtgagcacaagccagagcacatagaggggttcctagacaaagtcaaagacaagatccatggtgagggcggcgccgtcgagggcgag

SEQ ID NO: 262600 - DNA, 378 bp, Glycine max
cgcctcttttcctctccgtctccgacctccgatcctccctcgccgagacatcctccgacggtggcagaatcgtaattttccgcggcaccgtcgacacacctcgaaaaccttgagacccggtgtcttggtttctcgcaagtccagcgataacagcgtcgttcttcaaagaactcaaacgagtttttatctgatctctggagaaatatggctgccaatttctggacatcatctcattacaagcatcttctggatcaggaagatgtggatgtggtgaatacactcgacaaggaaaagggtattacactgggagggatttaagcttattaaagatgcacatggctaattatattttgaaattggctcaacaagtaaaagtga

SEQ ID NO: 262601 - DNA, 270 bp, Glycine max
tctggttttgctgttgagaacattgtatctgaacatggagagaaggctccaaatgttgtttataaaggaaagttggagaatcaaatgaagattgctgttaagcggtttaataggaatgcttggcctgatgctcggcagtttttgtaaaatcacccgcccaattgggttcttttttaaccttgctcttaactattaattctcctgtagacctgttcatgaccttgcattgcacagatgcattatttatgtactttgcattacttaaacact

SEQ ID NO: 262602 - DNA, 329 bp, Glycine max
cccggggcgacgccgtcctacgccggcgcgttagattgggctctgaagactgtgcgcgcggagggtcccatggcgctttataaggggtttattcctacgatctcgaagcaaggaccgttcactgtggtgctgttcgtgacactggaacaggttcgcaagttgcttaaagatttctgatgaggatgatgacgagaagatgtatgctactttccttttcaataagatgctttttctggttgtgttatgttttaatagtactagtgatgtagttctaggatggcaattttgttattctattaatcaatgagaagtgctgtttattttccgaa

SEQ ID NO: 262603 - DNA, 391 bp, Glycine max
caaacccactaagatggcttcctttgtatccttcctagtgctgcttcttgcagcccttatcgtcatgcctcaagggcttgctacttactacaaaccaattaagaagccaccagtgtacaagcctccagtgtacaagccaccagtgtacaaaccaccggtttataagccaaaaccaccggtttacaagccgaaaccaccggtttacaagccaccatataagaagccaccatacaagaaaccaccttatggaaagtaccctccagtagaggacaacacccatgcctaaagcaagcaatgaggtctattatctacttaataaataagaggaactgctttgtgttttctagcattgtgatttacaacttcgtagcaatgcatattcttgactctt

SEQ ID NO: 262604 - DNA, 407 bp, Glycine max
  unsure (1)..(407): unsure at all n locations
tacacatcacattttctcaaagtaatttattaattaataaataaatggcggcggcggcggcagtgacggtgctactcccacctaggattccgaccgccaccaacgttacccgctgctctgctttgccttctctgcctcctcgcggcaccaacactaaaaccactttgctcttatcttccctcaaccacttctcagtgtcccgaaaatcttctctgcttcagaccagagcttcttcagaggaatcatcctcagtagatgccaatgaggtgttcacagatttgaaggaaaagtgggatgctcttgaaaacaagtccacagtacttttttatggtggtggngctttagttgctgtttggctatcgtcgattcttgtgaagcgcatcaactctgttccctgctttccaaag

SEQ ID NO: 262605 - DNA, 407 bp, Glycine max
cccacgcgtccggcaagcactagagcacaggtacttctcatctgcacctctgctcacagatcctgttaaacttccaagacccgctcctaagaaggaatctaaggtttcagatgtaatttcaaacgaaggtcctactgtcttgtcacctccaagaaagtctaagagagtaatgccagggcgtgatgggtctgaaagcaattctttgcaaggagaatagttcgatgacaggtgtggtagggtcagacaagccacttgtggatatacgggcaagaatgaacccagtccacatggcactagaattttctctttttggattaaaaccctccaattgaactattattaccaatgcttaccgaatacatttaaaaaggaaattagatccaaaattcttaccgcccaaaccaatg

SEQ ID NO: 262606 - DNA, 355 bp, Glycine max
cccacgcgtccgctcgtcgtcatggagaatagtaacattcagaagcagaatctggatggtcggtacaactcggttttgcttgaattgtctgcatctgatgattatgaagctttcaaaagagaggtggaggaaaaaggcttagatgtgaacgaggcaggcttttggtacggtagaagaattgggtcaaagaagatgggatctgaaacgaggacccctctgatgattgcttctttgtttggaagcgccaaggtgctcaattatattcttcttcagaaaggaagaggtggtgatgtgaacagggtctgtgggtcttgaagggccactgctcttcattgtgctgttgctggtggcttcc

SEQ ID NO: 262607 - DNA, 432 bp, Glycine max
gttaatttcttcacatagagctatcaagatccaacgttaacatgaagaatgttttagtaaggtgagctgcgcgagctctgcttggcggcggtgggcggagctactaccgccagctctcaacggcggcgatcgtggaacagagacaccagcacggtggcggcgcgtttggaagcttccacttgcggaggatgtccactcttccagaggtaaagggtcagcactcagaggagaaaaagaacgaggtcaacgacaccagtaacgccgtcgttacgagttactggggaatcacaaggcccaaggttcgtaaggaggacgggacagagtggccgtggaactgcttcatgccatgggatagttaccactctgatgtgtcaatagacgtgaccaagcatcatacaccaaagtcattaacggacaaggttgcttttaggg

SEQ ID NO: 262608 - DNA, 383 bp, Glycine max
catgaatttatatcaaaattcccagaaaaataccagacctttgttggagagcgtggggtaaggctttcaggagggcagaaacagagaatagcaattgctagagccctgcttatggacccaaaaattctcctcttggatgaagccaccagtgccctagatgctgaaagcgaatacctagtgcaggatgccatggagtctctcatgaaaggaagaacagttctagtcattgctcacaggttatccacagttaaaactgctgatactgttgcagttatatctgatggccaagtagttgagagaggcaaccatgaagagcttctcagcaagaacggtgtctatactgcattggtcaagagacaactgcaaacaacaaaagccgaaat

SEQ ID NO: 262609 - DNA, 379 bp, Glycine max
cattatcaaatgttagggaggacaactaccggtcctatttgcgcgaagacactgagaagaacaccaaatggagatatggtgcccctccaaattacgacgttgtcaacaagctatatgaagaaggcagaaccaaggtttggcctcagggttcacttgaagagcaggtgcagtctctagtgaagaattgggagatggaaatgttccacaaggtggacctgcaggatttcagatcaatagacccaaagaaatacactttcagcctgaacggaaggaagcctatgactctggaagagatgatgaagcttggtggagggtatataccaatgctgcaaacctctataccagagaaaatgaggccttacaatccctatgaagaaac

SEQ ID NO: 262610 - DNA, 403 bp, Glycine max
  unsure (1)..(403): unsure at all n locations
gtgacattttagaccttgcttggtccaaaagagggtttctactgtcatcctctgttgataagaccgtgcgcctatggcatgtaggaatcgacagatgtcttagagttttctcccacaataattatgttacatgtgtcaatttcaatcccgtcaatgataattttttcatcagtggttcaattgatggaaaagtacgcatatgggaagttgttcactgtagggttagtgattacattgatatcagagagatagtcacagcagtgtgcttccgtcctgatggaaagggcacaattgtgggtaccatggcaagcaattgccgtttctatgatatcgtagataatcatctgcaattggatgttcagttgtgtttacgaggcanaaagaagacatcagggaaaaagat

SEQ ID NO: 262611 - DNA, 307 bp, Glycine max
  unsure (1)..(307): unsure at all n locations
tccacgagtcaccaacgcacgaaagccgggatctttcagataatggattcctgttcnaagggtgcataaccgcatggataagctcacactaacccgtcaatttgggatccaattcgggcccttaggaactttgcagaggcagagggtaaatgtaataatatcgattcatacagatacagaagacagggttctctattgattcaaacgctctacctacgagatagggatagagcaagaagaaaaaaccgaggatttcacatagtacttttgggcgaaaaatcgatctgaattttttcggacctttcgc

SEQ ID NO: 262612 - DNA, 423 bp, Glycine max
cttctacttccctttgttctcaaaccttatcccttatcctcccaaaaccaaaccatgtctaccgccgcagcttctctcgcactcccaaccctcactctccgaactcgacaacctctctgttctccccaatgcttctcctcgtccctctccctcacccctaactccaaacccatttccatttccgccgttttcctcaaaacaacgctgtcgtcgtcgtcgccgttgtcgctgtcggctcgcttcgttccccatgtctctgtgttggagcaagaagaggacaccttccgcgacggaaacgggcccagcttcttccgggaccctaagctctttggcgggaaatctcccttcaatggccacagtgcgcgggtcgcggagctcttcgagagggcggggaatgtggaagtggttgaagttatttatgat

SEQ ID NO: 262613 - DNA, 293 bp, Glycine max
cccacgcgtccgcaaaacatatgtcgccgaagaactcttgttgccattggaactcatgatctggataaattggagggccctttcacctatgaggctttgccaccttcaagtataacttttacaccattaaagcaggaaagaaacttcagggctgatgagctaatggagttctacaaatcagatttgaaactcaagaaaatcttggcatataatggaggatcttccggtttccccggtatatattaccggtagagaaccggggtatccttaaccccaattattaatggtgcaca

SEQ ID NO: 262614 - DNA, 390 bp, Glycine max
cacaaagaacaaaagacaaagacagagagaaacaatgtcttccccaagcaaacgccgagacatggacttgatgaagctgtcatcaggatgatgagtgattacaaggtggagacggtcaacgatggcatgcaagagttctttgtggaattccacggacccaaagacagtccttatcaaggtggtgtgtggaaagtaagggtggatctacctgatgcctatccttataagtctccatctattggctttgtcaacaaaattttccatcctaatgtggatgagatgtctggttctgtttgcttagatgttattagccagacttggagtccaatgtttgaccttgttaatgtgtttgaggtgtttcttcctcaacttcttctgtaccccaatgca

SEQ ID NO: 262615 - DNA, 408 bp, Glycine max
  unsure (1)..(408): unsure at all n locations
gcaaaagtaaaaatgtggtttcttggttggaaaggggcatcagggttctcagcctcttccacagccgaacaagtcactcaagggattgatggaaccgccctcaccgccatcgtcacaggagcaacaagtggccttggtctggagaccacccgggttcttgcattgcgcggtgtccatgttgttatggcagtaaggagtctggacagtggtaagaatgtcaaagaaacaatacttaaggaaatcccctcggctaaaattgatgtcatggagttagatctaagctctatggcatcggtaaggaaatttgcagcagattttaattcttctggtcttccactcaatatcctaattaacaatgcangggtgatggcgaactcattcacactttcccaagacaatattgaattg

SEQ ID NO: 262616 - DNA, 384 bp, Glycine max
gggaaattataaatcacagatcactgaggcatcccaatattgtcaggttcaaggaggtaatattgacccctacacatttggctattgtgatggaatacgcttctggaggagagttatttgagcggatatgcaatgcaggacggtttagtgaggatgaggcacgcttcttcttccaacaacttatatcaggggttagctactgtcatgcaatgcaagtatgccatcgtgacttgaagttggagaacacattgctggatggtagtccagctcctcgtttgaagatttgtgattttgggtattcgaagtcctctgtgctacattcacaacctaaatctactgttggtacccctgcatacattgctcctgaagttttgcttaagaagg

SEQ ID NO: 262617 - DNA, 433 bp, Glycine max
  unsure (1)..(433): unsure at all n locations
gattgatcctgattctcgaaatgctggccagaaccgtttacttgcgatgaattacatagatgaaggaaatgatgacaaactttttgaggctcacagggactggggtaggcgatttatgagactatattcacagttcacatcatgggacaactcanaagatcctgaacggcctcttgtgataggatatgtctctcctgaataatttacacattctggggcataattcataaaagctccccttctttaatatgactataccaattattaagggggtggttattcaacaattggcaaagcagattccaaaaccattccggttaaaaaggaaggcttaaaaaaaggtgggatctggaaagatatttatggaaccgattaaaagaagggtggccacatgggtagaggagatcaagttgatattttaatagaacttact

SEQ ID NO: 262618 - DNA, 164 bp, Glycine max
  unsure (1)..(164): unsure at all n locations
gccccgcgctcctcacctcgttactctncgattacgattgcaacctcctcagggggatgtgaagcttttgggtattgtgggaagcccatttgtgtgcagggtccagattgcccttaagttgaagggagttgaatacaaatttttggaagaaaattttgggcaac

SEQ ID NO: 262619 - DNA, 427 bp, Glycine max
cccacgcgtccggcgttctctgagagatgccacccacaagacaagaaagcgttgctccaactgcagaaggacctcggcaacccttatcacatcatatcctggaacgcaaaggaggattgctgcgagtggttctgctgcgttaagtgtgacgagaaaacaaaccgcgtcattagcgttgccttatcatccccttttccagacaccaatctctcggcccaaataccttcctctgtgggtggacctccttacctcgaagtcctcgtcttccacaaattccccaaactcgtgggcccaatccaagcccgaatcggcaaactcaccaaactcaaataccttgatctcttcaacaacaatctctctggcccaatacccgaatttttcgcgcaactcaagaacctcgacgatatcgacctttcctttaacaacc

SEQ ID NO: 262620 - DNA, 355 bp, Glycine max
  unsure (1)..(355): unsure at all n locations
gttattgttggtgttgtgggttatgtgaaaactccccgtggtctccgaacattgaacactgtgtgggctcagcacttgagtgaggaactgaaacgtangttttataagaactggtgcaagtccaagaagaaggccttcaccaagtactcaaagcagtatgaaactgaagagggaaagaaaaacattgaggcacagctggagaaactgaagaagtatgctactgtggttcgtgttttggctcacacccagatcaggaaaatgaaagggttgaagcagaagaaagcccatatcatggaaattcaggttaatggtggtactattgcacaaaaggtggactttgcatacaagttctttg

SEQ ID NO: 262621 - DNA, 401 bp, Glycine max
atcccacgcgtacgcccacgcgttcgcccacgcgtccgtatgactctagcagtctatacacatgcgaccgaggaccgggacacttgaactgtcgactacaactctgcgttctcagtgtttcctgcagaagcatgcgaaactgtaggaggggaagcctgcatggcggagatgtaccctgaaacgaagctacagccagaggctaagactccacgagtcgttacagaaaacgtttagagagaatatcttgaatacgatgatcctaaaaccgtatttcgaggaaaggcttgtgatgatcttggaagaactttctgggagaccgaatatcaaaaaggtgtctactaaagaaatgggaaaaccctttttaatgccatgactactgcggtttcaatggcaaccaataa

SEQ ID NO: 262622 - DNA, 357 bp, Glycine max
acaacgtaaaagctaagattcaagacaaggaagggatcccacctgaccagcagagacttatcgtttgcgggtaaacaacttgaggatggtcgcacccttgccgattacaacatccaaaaggaatcaaccctccatctcgtgcttcgcctcaggggtggcatgcaaatctttgtcaagactttgaccgggaagaccatcacccttgaggtggaatcctcggacaccattgataatgttaaggccaagatccaggacaaagagggcatccctccagatcagcagaggctgattttcgctggtaaacaacttgaggatggaagaacccttgctgattacaacattcagaaggaatccacc

SEQ ID NO: 262623 - DNA, 354 bp, Glycine max
aaaaaggaaaccctagctggataggtcaaacatcatcatgtcggacgaagagcaccatttcgagtccaaggcagacgccggtgcctccaaaacctaccctcagcaagccggtaccattcgcaagaacggctacatcgtcatcaaaggacgcccctgcaaggttgtggaagtttcgacttccaaaactggaaagcacggtcacgccaagtgccactttgttggaattgatattttcactgccaagaaacttgaggatattgtgccctcttctcacaactgtgatgttcctcatgtgaatcgtactgagtaccagctcattgatattgctgaggatggatttttgagtctgcttac

SEQ ID NO: 262624 - DNA, 403 bp, Glycine max
catagcgtagccatggccatgggattgacctcacaactcctcctttctttgttcatcagtacccttcttcttcttcttccctcttccctttcacaatctaaccagttttgtgacgctggaacttcatccaagctgttgatcaagggcggcaccgttgtgaatgctcaccaccaacaggttgccgatgtctatgtcgaagatggtatcattgttgccatcaatcccactattacggttggagatgaggtgacggtcatagatgccactggcaagtttgtcatgccagggggcattgaccctcacacccacctagagtttgagtttatggatacggaaactgtagatgacttcttcagtggtcaggctgcagcattagctggtgggacaacaatgcacattgact

SEQ ID NO: 262625 - DNA, 429 bp, Glycine max
attttgaagaaaatgggtcgtgcaagaatcagcttgaaacatatctcaaatgagagatctcgcaagaaaactttcatggagagaaggaaagtacttataaaaaaaatctctgaattttccaccttgtgtggagttgaagcatgcttgattgtgtatgatgatgggaatggtgacattgaaccagtgacttgtcccaaagaccctgtattggcacactccatacttcaaaactatgagtttcaaaagaatcagagacctcccaagaagtttggtattcaggactttgttgaggataggaagaacatcattgaagctgagatttccaaagtgcataaagagatcaccaacatcaagtatccaacttcggatccaagtttcataaacatggaagaggatcaattgagggccttcattgctctggtggatgct

SEQ ID NO: 262626 - DNA, 423 bp, Glycine max
  unsure (1)..(423): unsure at all n locations
gggaaataaaaatactccatttacgtttcctgcatgttagtggtgatgagcatgtccgttcttggtgtgggctaaagattaaacaaattagattagttctattgagagctttctgaagttatatacacattctggaagtcagatcttttctgcaggtatttctgacccctactcatttagctatcgtcctagagtatgctgctggtggtgaactcttcgagaggatatgcaatgctggtcgattgagtgaagatgaagcaagatttttctttcaacaactaatatctggagttagctattgtcattccatggtacatatgcattcagaattttnggtgtggtggtaatttaaaagtcccttggaatatcatcttatgcctnctactgcagcaaatatgtcatagagatctgaaattggaaaac

SEQ ID NO: 262627 - DNA, 386 bp, Glycine max
cacaaaaccaatatcttagttttggtggagagaagagaaattgaaggaaacatacttatcatgacatgaactagatatgacttgccctcttcaactccaccgattcagccctgcaacagacacatccaccgccatcgcaaacggcgtcaactgtccaaagccagcacaaacggcgccgtcaacgcgccgtttattggcgaaagtaggccttagcgtgacggagatggttgctcggcaccacgctcacgcggtggggcccaaccagtgctgctccttcgtgatccaggcgatcgacgcgccggtctccgccgtgtggccggtggtgcggcgcttcgacaacccgcaggcctacaagcacttcgtaaagagctgccacgtggtcgccg

SEQ ID NO: 262628 - DNA, 261 bp, Glycine max
  unsure (1)..(261): unsure at all n locations
cccacgcgtccgcaaagtttgcactgttggagaccataaaagaagctgtaccagaaatgtggtcaccggctatgaagaatgcatggggagaagcttatgatcagctggtcgatgccattaaatctgaaatgaaaccaccctcctcttagactccagtttaagcagttcctttccttccctctcaattctcaaattggtatattaataaaagtgagaaagtttaggcttgtgcttttattttgtgtgaatgtnatatacttt

SEQ ID NO: 262629 - DNA, 331 bp, Glycine max
gccatcatcacagacccaccctggaccgagagggaatggatatgcccctagcctcgactgcgcacttgtcacattgatgccaagattgctgaactcatgaccgacattgacaggcgatgcggctaagagcttgagaaggagcccaagattctgacgaacggtgatgctggctaagctaacacgatgccataccaaacccatgggtgctgcaactttttccgagtattcttcacttggacagtacgctgatagggacacgcgtccaactgttgccgatggagtcatgaggaacgttgctaagaaggatcctaccggagccaaggttaccaag

SEQ ID NO: 262630 - DNA, 426 bp, Glycine max
cccacgcgtccgcttcgatcttgcggatatgtttccttctttcaaacctatgcatgtcataaccgggttgaaagccaaattggataagatgcataacaaggttgacaagatcttagataagatcataaaggagaatcaagcaaataaaggcatgggagaagaaaagaacgaaaatcttgttgaatccacatgtattattcaaacaagtatgctaatggatcaatgtcatttttctgtccttgttataatgtgaaatatatatgaaactacattcaacattaattatgcaggacatatttgcagctggaaccgatacttcagcaaaagtaatagagtgggcaatgtcagaaatgatgagaaatccaggaggaagggagaaggcacaagctgagatcagacaaacgttctgaggaaaagaagcaatca

SEQ ID NO: 262631 - DNA, 282 bp, Glycine max
cggacgcgtgggtgacagacgaagatgcaccaaattatcgttcaattatacatggctcaatggacaatgcaatcactctgtgctcaacttaagttgccttacaatgcatccagactttcctttcttatatccttttccaatataatcgtgagacttatgacatatctgtgtctcacttcatcaataataaattatagtcaagaagagcaatcattacaaaaaaaatgagccccttggacaataattgtaattataaagttaccccttaaaccttataatgga

SEQ ID NO: 262632 - DNA, 404 bp, Glycine max
cccacgcgtccggaaacttaatcgatcatcacttcacttcactaatacatcatggcagacgagacccagaacaagtatgagagctctgaggttgaggtccaggatcgtggtgtttttgactttctcggtaagaaaaaggatgaagaagacaagcctcatcctcaggaggaggtcatcgccaccgagtttcaaaaagtcactgtctcagaccaaggagagaacaagcacagcctcttagaaaagcttcaccgatctgacagcagctctagctcttcaagtgaggaggaaggagaagatggagagaaaaggaagaagaagaagaaggaaaagaaagggctgaaagagaagatcgaggagaaaatagagggtgatcatcatcatcacaaggttgaggacccaagtgt

SEQ ID NO: 262633 - DNA, 404 bp, Glycine max
  unsure (1)..(404): unsure at all n locations
gaaattgtggcttgctggcttttcaaagggcatacaggaaatgcacagaaaggcatctttggttcttgaagatgcagttaggaatatttacactgttgttgcattttgtgctggtaataaggtgatggaactctaccagttgcagttaaataaaatatttaagcaaagctttcttcatggagtggccattggttttggatttggcttttcacagtttctgctctttgcttgtaatgcccttctactttggtacactgcactatgtgtaaataagagttatgtggatctacctactgctctcaaggagtacattngtttctcatttgctacatttgcccttgtggagcctttcgggttggctccttacatacttaagcgacgtaaatctctcatgtcagtgtttg

SEQ ID NO: 262634 - DNA, 386 bp, Glycine max
tggattcgaccctcttcgtcttggtgaagtaccagagaatcttgagaggttcaaagagtcagaactcagtcactgcagatgggccatgcttgctgttccagggattttggttccagaggcattgggcttaggcaactgggtaaaggctcacgaatgggcaacagttcctgggggccaagcaacctacctaggcaatccagcttcattgggcaccctacccaccattctggccattgaaatccttgctatttcctttgtggagcaccaaaggagcatggagaaggacccagagaagaagaaataccctggtggtgcttttgatcctttgggatactcttaggaccctaaaacatttcatgaatacaaagtcccagaacttaagaatg

SEQ ID NO: 262635 - DNA, 362 bp, Glycine max
acgaacactcgtatcctgcgttataagatctacaactggctcagaaatgggccatctggggatacctgaaacctacgcttgttacacaactcacacgcaatggaataggccaactatagcaacccatcccatatcgatttcaattgctgaatggcaaatcatcacatgctcatcaagattatttacgaccagaatttacgcaagaattggactgaaaagtaggctacgtttcaatatttaatggccacttatgccatgatttatcaagctctttgcataactatctttatgaaaacatcttgcaacagcatgacttttggactgaatacagaaagcgccgtggaatacgcttaccttgacac

SEQ ID NO: 262636 - DNA, 408 bp, Glycine max
acacaagccaagtgaaagtgagaaaaaataaaaatcaaagagcatagtgtcagggagcattcacaagattggggagacccttcatgtgggagggcacaagaaggaggaggagcataagggtgagcaccatgctggagaatacaaaggggagcaccatggtgaacacagtagtgagtacaaaggagagcatcatggtgaacacaaagctggagagtaccatggtgagcacaagccagagcacaaataggggttcctagacaaagtcaaggacaagatccatggtgagggctgcgccgccgatggcgagaagaagaagacggagaacaagaagaaggagcatggccatgagcatggccatgacagcagcagcagcagtgacagtgattaaactgctgcattaactatata

SEQ ID NO: 262637 - DNA, 426 bp, Glycine max
cccacgcgtccgattttgatggggagctgtttccacgttacctgagctttgtgaggggtgtggttgattcagatgatcttcctctcaatgtttctcgggagatccttcaagaaagcagaattgtaagaataatgagaaagagacttgtaaggaaggcatttgatatgattcaagaccttgctgaaagtgaaaataaagaggactacaaaaaattctgggagaactttggtaggttcataaaattaggttgcattgaagacactgcaaatcataagcgcattacaccactattgaggttttacacttccaaaagtgaggaggagcttaaaagcctagatgattatgttgaaaatatgggtgaaaaccaaaaggctatcttttatctaacaacttacagcttggagagtgccaaaactgttacatttt

SEQ ID NO: 262638 - DNA, 418 bp, Glycine max
cttcacacaacaaaacttttttctggcattgtagcatcatgactggcagagaaatcctccatatgatgaaggtgaaagcagggtttggaacaccagacacagggaatggaaaaggcaaaatatcaaaacacattacacatggctttcacttgatgaagggcaaatcagcgcatcctatggaagattatttagtttcagaatttaagcaagaaaaggacagagaattaggcttgtttgcaatatttgatggccacttaggccatgatgtagcaagctatttgcagaaccaccttttccaaaacatcttgcaacagcatgacttttggactgagacagaaagcgcagtgaaaaaagcttacgttgaaacagatgagaaaatatttgaacaagaacttgtgttggggcgaagaaggtcaac

SEQ ID NO: 262639 - DNA, 430 bp, Glycine max
tcttactccttacaagatgggcaaattcaatctgtcccataggtatctctatctcggtgtttcctggctatttccatagatttcaattgctgattaattttgcttgcagagttgttttggcaccgctgaccagacagaggtcttacgacaacgtcccacaaccccatgccatcctctactactcccagagaacttccaacggaggccttctcattactgaagccactggcgtctctgacacggctcacggctatccgcacacccctggcatatggactaaagaccatgttcaagcttggaaacccattgtcgatgccgtccacgccaaaagcggtgttttcttctgtcagatttggcacgttcgaaaagtttcaaattcaggtcttttctttttctttaatgcccttaacttcttctttagaactggttt

SEQ ID NO: 262640 - DNA, 357 bp, Glycine max
tgaaccacaaccaatattaaggggatctaagagatggcagatgcagttaaattatacggtgttgcaggaagcccctacgtttgcagagtcaaaatagctttgaatctgaaacaagtcaagtatgatttttatgtagaagatttaagcaacatgagtgccgatcttttcaaatacaatcctgttcataagaagatacccgtgcttgtacacaacgaaaaaccgatttccgagtcgcttgtcatcgatgagtacattgatgaggcatggaaaggagtttcgattttgccttatgatgcttacgacaaagctcaagctcggttttggccaaatttgttgattaaaaatgtatacctgcac

SEQ ID NO: 262641 - DNA, 355 bp, Glycine max
tgacaggaggaggaaggttgaggatcttcgagaaatttgtggtgataatcagccatggcttcgaagcggatcttgaaagagctcaaagatcttcagaaagatcctcccacctcttgcagtgcaggcccagtggcagaagacatgtttcactggcaagcaaccattatgggtcctccagacagtccgtactcgggtggagtgtttctagttactattcattttcctccagactatccgtttaagccgcctaaggtggctttcatgacaaaggttttccacccgaacatcaacagcaatggcagcatctgtcttgatattctgaaggaacaatggagcccggctcttactatttcca

SEQ ID NO: 262642 - DNA, 459 bp, Glycine max
tggatatctgcagaattcggcttaagcagtggtaacaacgcattttacgcggtgacgttattccgttgcctgcggccatcccggattcgtttcagtgatcaagatttgtcttactgatcatatcatgggaaacttactttgtttagctcaagtggatcaatcaactgttgctattaaggagacttttggtaagtttgatgatgttctggagccaggttgtcattgtgtgccttggatatttggaagtcagattgctggacatcttactcttagggttcaacagttagatgtcaagtgtgagaccaaaactaaggacaatgtctttgtcaatgttgtagcatcgatacaatatcgtgctctatctgaaaaggctagtgatgcatattacaaactcagcaatacaagggcccaaatccaggcctatgtttttgatgttattagagccagtgtcccaaagct

SEQ ID NO: 262643 - DNA, 299 bp, Glycine max
cgggcgcactcaatctgcgacatgatgagctctatctgggggtaccctggctatttgcataaactgcaatcgctgatcacttatggttgcaaagacgtcatcgcaccgctgaccatacagaggtcttacgacaacgatccacatcctcatgccatcctctactactactagagaacttccaactgaggccttctcattactgaagcctctggcgtctgtgacacggatcaaggctatccggacaccactggcatatggactaaaaaccatgatcaagcctggaaacccattgtcgatgc

SEQ ID NO: 262644 - DNA, 391 bp, Glycine max
cccagcgtgcgcccaccgttcggcccgcatccgtcactcttgctaaattggctatctctatctattctctctgtctgccatggggctctccaaaaccacctccgaatacgacgactctgtccactcaaccttcgcttctcgatatgacagaacttcgcttcccaggtttaagatgccggacgagtcgataccaaaggaggcagcgtatcaaataataaacgatgagttgatgtcggatgggaacccaaggtagaactcggcatcatttgtgacaacctgtataggagccagagagtgataaactcatcaaggctgccattaatcagaactatgttgacatggacgagtatcctgtcaccactgagttacagaatcgatgtgttaacatgat

SEQ ID NO: 262645 - DNA, 346 bp, Glycine max
tcgacacacgcgtccagccaaccatgcgcacaatcgtacacacatgcgttcaaattcctagaacttgcacctcaggcacttacggtgtgacatttaaacagtgagttgagctgatctgaattggcaccaaagaaaaaaatacagttttcaatcctaaaccactaacaacttcttgctttcacacttctctgttgccgtgataatctggttgcagaagtttgactcatgcttaataaacttcactaaccactcaacttatatttgccgactaaaatatcccttatataactactaattctcatatgtgagaaaaactgaaccctctaatatcaccatattttacttc

SEQ ID NO: 262646 - DNA, 320 bp, Glycine max
gctactacgaccaagaggagggccacgtgtcctacgaggggatgaggttcgcctcggcggacctgggcacatggggaagcttctgacggcaatgcacaaagagcacgaacaacatgagcggggttttcacggggcagcacgggttggtgttcgatggcgatcacgtgaaggattgcgaaaaagatgagagaggaggggtttttgatattgatgtgaagctttacttaaacattaggcttaggctaggtgacttcataagaagtagctcaagggttagggcgaattgcgagcttcacgttactctggtttcgaggggagtg

SEQ ID NO: 262647 - DNA, 388 bp, Glycine max
tggagattaacatgggaggggtcacagtagaagaggcacttagtactcagagattgttcatattagattaccaagatgcattcatcccatatttgacgaggataaacagcctacctactgcaaaagcttatgccacaaggacaatcctgttcttgaaagatgatggtactttgaagccacttgctattgaattaagcaaaccacatccagatggagataatttgggtcctgagagtatagtggtgttgcctgcaactgaaggtgttgatagtacaatttggctattggccaaggctcatgttattgagaatgactctggatatcatcagctcgtgagccattggttaaatactcatgcagtgatggaaccatttgccatagcaaccaa

SEQ ID NO: 262648 - DNA, 399 bp, Glycine max
atggatatctgcagaattcggcttaagcagtggtaacaacgcatagtactttttttttttttttttttttttttgtgcaatttggaaagatttcagaaaagattctctattcagcagttaaatacaaagttaagcaaactgcacacgtgtttagttttatcttgtctaatacccaatgatcagcaactcagtcattacgaattcacagtacattaaaacgaacatagcttgatgttttccttcctttcttccattaacttccaactttactaatgaccatacttctggaactcccactcactgttgtcaagagggcacacttgacgagtcttcagccagcgactgatgcagtgaaagtgaaaagcatggtttcagacaccccaagcaacagttcacttc

SEQ ID NO: 262649 - DNA, 357 bp, Glycine max
cgaagattaacatcaaacgtgccgcagacacaacaggcttcttataactcacagattggtaatattaggttaccatgaaacattgataccatatttgacgaggataaacagcatagctagtgcaaaagcttatgccacaaggacaaatctgttcttgaaagatgatggtacttagaagccaatagctatagcattaagcaaaccacatacagatggatataatttgaagcctgagagtatagtcatattggctacaactaaaggcgtcaatagaacaatttggatatcgatcacagctcatattattgccaatgactatggctatcatcaggtcatgagccataggttatatactaa

SEQ ID NO: 262650 - DNA, 370 bp, Glycine max
cccacgcgttcgaccacgcgtccgaccacgcgtgcgctctcttaatttttttcttggatctctgcggtttgactgaattcttaggattgctctgaatcggtttagtcttcttcgttattcttcaaattcctcgtgacagatctaatctaatcaggcttttgggggtgtttcagacattgcatgcatatgggagcagtggttgtgttggatgctataaaaggcctacactgagagctactgtggatgtgccatcaaaagggttggctacacaaggtaacggattgaggaaaccaagttcatcataggatttttggaccactagcacgcatgatatggacaacagcgctgtccagtcgcaggggagcatcta

SEQ ID NO: 262651 - DNA, 393 bp, Glycine max
aagcgtcttaataaacgctcttctctgaaaaacctgatttcttctgttcttctcgggtctttcgtttcgatcttcgatctctgaaaatgagagagtgcatttcaatccacatcggtcaggccggtattcaggtcggaaacgcctgctgggagctctactgcctcgaacacggcattcagcctgatgggcagatgccaagtgataagactgttggtggaggtgatgatgctttcaacaccttcttcagtgaaactggggctggaaagcacgtgcctcgtgcgatttttgtagatctcgagcctactgtgattgatgaagttaggactgggacataccgtcaactatttcatcctgagcagctcattagcggaaaggaggatgctgcaaacaact

SEQ ID NO: 262652 - DNA, 390 bp, Glycine max
ggcggctactttagaatcagccttcatcctcttcgcacctcaacggttctccaatagccatcgtggctctgcaaaagcaccgatctccatcaagctccatgcttccacctcccttttcttctcttccaagtcctccttcaaaacgggaagactctgcttccagttatgctccactttgcaagaggtagcagcaacagaagaaacacctgagctaacgcaaccaacagacaacgtaaagaagctgtacgtggttaacttgtcttggtctctgacggcggcagacatcaatgacctctttgcccaaagcggaaccgtaaccgacgtcgagataataaagagcaaagacgggaggagcaagggctatgccttcgttactatggcttcccggga

SEQ ID NO: 262653 - DNA, 355 bp, Glycine max
cttactttttcgcgctcgctctgttgtgaatagagattcatcacttccactcggcccattctccggtttcttcaaatcgtaaacttttttgggattgaagaccgaatcgttagaaattttcagggtacaatggcttccaacatctcgcccgctgcctttgataaagaacagatatttggaatggctgaaaaggagatggaatatagggttgaattattcaacaagatgacccagacctgtttcaagaagtgtgttgacaataggtacaaggagtctgagctaaatatgggtgaaaatagttgcattgaccgctgtgtttcaaaatactggcatgtgactaatctagttggtcagc

SEQ ID NO: 262654 - DNA, 316 bp, Glycine max
cccacgcgtccgcagaacgtaggtccacacataagtaccacaatcgcaatacggactcacaggtgtacagaacgatttagaagaacgattagaccaaatattctgaaaagcgctttagcttggataagaccatggaatacataaacttataactgaacacattatccgcaggggacatcaagaacgtagaccttttcttcaaaatggacatattccctatcattacaatgtaccacaacactatatatgctgacggctctaacacccacgtacacatagactccggcagcaacgagacgtggtactaccccgtgaa

SEQ ID NO: 262655 - DNA, 378 bp, Glycine max
cccacgcgtccgcaagatttcaggtccaaacaaaacttatcaaaatctcatatactgattcagttggatacataaccatcgagatttactatcaaaccaaaaattctcaaaatctcttcacctctgtgatgaccatggaatacagaaccttagaactcaacatcatatccgcaaaggacatcaagaacgttaacctcttctccaagatggacgtatacgccgtcgttacgctctccggcgaccctctccaccctcagggcgccaccacccacgtccacaaagacgccggcagcaaccccacgtggaactaccccgtgaaattctccgtcaacgaatcgctggccaaagagaatcggttgtctcttgagatcaagctcg

SEQ ID NO: 262656 - DNA, 423 bp, Glycine max
aaagagctaacaagagattcaagaccggcatggctaatgaagaggaacagaaaaaccacctcttcggcatcaaagatctcggtcacaagactctccttcagagtgatgcactctatcagtatatacttgaaaccagtgtctatccaagagagcacgagtgcttgaaagagatacgcaagatgactgcaaaacacccactgaacatcatggcaacaccagcagacgaaggacaacttctgagcatgcttgttaagctcacgaattcaaagaacgccttggaaattggtgtattcactggttactctctgctctccactgccctggctcttccccctgatggaaagatcttggctttggatgtgaatcgcgaatactatgagttaggattgccaataattcaaaaagctggagtggctcacaaga

SEQ ID NO: 262657 - DNA, 374 bp, Glycine max
ttttccactcatttcaactcatttatatttaatccattttttctatcttatctattactcaatatcctacccactttcctttctttatcataattaaactatccaatcaaaaccaatccaataaataaacaaatccattcaataatcaaaaaattaaacatatttattctaaccctctatattaaactataccatttttcaaaaccatatctatcaaccactcatccatctctcctaaagacaatattatttaattcctccaaatataacataaccatattattatatacctccactatcatatatctcttattctattttaaatctatctatccccatatattaatatatatattatccaaacatcccttatt

SEQ ID NO: 262658 - DNA, 399 bp, Glycine max
gttctctcacacactcattcggtgctccgaatctcagattctaggggtagggttcggaatttctccaccgatcagaaaatgagttcaactggtggttctaccaagggcggaaggggcaagcccaaagcctccaaatccgtttcaagatcgcagaaagctggtctccaattccccgttggaagaatcgctcgattccttaaggctgggaaatacgcctagcgtgttggtgctggtgctcctgtgtacctctctgcagtgctcgaatatctcgctgctgaggttttggaattggctgggaatgctgctagggataacaagaagaatcgtattgttcctaggcacattcagcttgctgtgaggaacgatgaggaactgagcaagcttttggggtctggtacc

SEQ ID NO: 262659 - DNA, 340 bp, Glycine max
acgatcaccggtcgcaagatcatcatcgatacttacagccgatggcttgctcatggtgggggtgccttctgcggggaggatcctaccaatgttgatagtagtggtgctcacattgtgagacactctgctaagagcattgaggcaagtatactacccacaaggtgcattacgcaagtgtcttatgccattgctgggcccgagcctttgtctgtctgtgctgacacctatagcacctgcaagatccatgatgagtagattctcaacattgggaagctgaactatgatttcaagcccggtgtgatcttcatcaacccttatctcaacaggggtgggaattaca

SEQ ID NO: 262660 - DNA, 396 bp, Glycine max
cccacgcgtccgaacaaaacaacgacccaactaaccctaattcaacttttccgatgtgatcacttcgagtaaaaattccaaatgagtcgggcacaggatgcaaaccaatcattcttcccttttggaaatccttttaggatgatatcacctaaaagccctaaaatttcttcacagctgttgttaattctacatgcttttgaagcaactttggaagagaggctgaaaaagcttattcccaagagcaaggatgagatcctcagcttgtcttgcatgactttggctatgcagtcactttgtgagagccataatgacattaataccatcataacagagcttgagcttcctgtacatgattgggatgagaaatggatagacgtgtacttgacattagtgtga

SEQ ID NO: 262661 - DNA, 387 bp, Glycine max
gcggccagcgttcggaaagtcctcacttgttatcaaccctaaacgtttctgatctggttccccacgacgccaatgcgttttttcaacacaaccccctttccaaaacccttagggtttattatggatcccaagcatcagtatcgaaactccccgaatacgagatgccatcggtaacatggtgcgtaatccagggtctcaaggagaactcgtttcgcgagtaatcatcttcgattacctcaagtgtttgggaatcatccccgaccaactgcactacctttagctttcctccaccgtcgacgtcatgctcgagcgcgtctagtttctccaaaaattaggtcttaccgtctactacatttacaattacccttttaattttgggttcaattt

SEQ ID NO: 262662 - DNA, 394 bp, Glycine max
attgcagctggaggaattgtggatgctcggggttatgttgctgctctagcacttggtgctcaaggggtctgtctaggcactaggttttgaaatattacttttacattaatcatatttgaggaaattgttctcatattgctgcagtaatttcttagcatatgcagtttttgtgttcaacttaagaatagttgttgcctacgtagaagcctctcatcaggctaataaattgcacagtttattcctcatgagactataattgtattcacttggttgtgaacagatgtacacagttcccccaacatcatcaccatgtccaacctaataatctcaatttatattcgacattttttctggaactattacaccttttcgtatatgtgtttcatgccaagat

SEQ ID NO: 262663 - DNA, 337 bp, Glycine max
cgcgttcttttctacggagcctcgaccaagaagaatcgcagtgagaagaagagggggtcagagtgggaaagagaaagagagaattcgtaaaccctaatttcggaaagatcggcgatgactgcctccaaggatcgcgagaacttcgtctacatcgccaaactcgccgagcaggccgagcgttacgaagagatggtggaatcaatgaagaacgttgcgaatctcgacgttgaactgacggtggaggagcggaatttgctttctgttgggtacaagaatgtgattggtgctcgcagagcgtcctggaggatcctgtcttccattgagcagaatgaagaaa

SEQ ID NO: 262664 - DNA, 334 bp, Glycine max
acgatcgttttcaatatgcagatcttcgactaaaccctaaccggcaaaacgattacacgggaggtcgagtcctccgacacaatcgattacgtgaaagctaaaatccacgacaaggaaagcattccaccgtatcagcagcatttgaacttcgacggtaaacaactcgaagacggcagaactctcgcagattacaatattcagaatgaatcgacgctgcatctcgttatacgccttaactgaggcatgcaaatcttcgataaaaccctaaccggtaaaacgattactctagatgtcaagtcctctgacaccatcagtaacgtgaaagctgagatcc

SEQ ID NO: 262665 - DNA, 356 bp, Glycine max
cccacgcgtccggtcttcttcatcaacggtggcgtatggatcaatccgtttgataggaaaaccaggggcatttccaatggctaacgaaatccctcacgatgaggtagtgtgcgttaccggcgccaacggtttcatcggttcgtggctggtccgaaccctcttggagaaggagaacccacgctacaccatccacgccaccatcttccccggctccgacgccttccacctgttcaacctacacccctccgtcgtcagccgactcaccctctttcccgacgacctcctcgacgccgacgtcctctgccgcgccattaccgtctgctacggcgactttcacgtggcctccccctgcaccc

SEQ ID NO: 262666 - DNA, 411 bp, Glycine max
cccacgcgttcgcaaacacgctgttcctacaatcattccaaatgtgcccttccggtcgcaccctcctgccttcctccgtctccgatttccgaccggcattcgacgtcctcgatgccgaccgcgacggcaaaatcagccgcgacgacctccgcgccttctacgccggagtcggcggcggaggagatgacgtgatcggggcaatgatgacagtggctgacaccaataaggacgggttcgtggagtacgaggagttcgagcgcgtggactctgcggagagaaagcccgtggggtactgaggggccatggaggacgtgttcagggtcatggacaaggacggcgacggcaagctcagccaccatgatctgaagacttacatggcctgcgctggttttccggccaccgacaacgaca

SEQ ID NO: 262667 - DNA, 389 bp, Glycine max
caacacgctatccccattgcttcttctcttctccctctctcgcttcctacttgacggcgccgtttcggtctccagaagatgcttctgagtacttcgcgcttgaactagacatgatgagttcaagtttcaagacatgggctgtgggatttgcacttggaaatgaacgagaggcaacgttggagagctgaagaggatgctttattacgttcttatgtcaaacagtatggtcctagggaatggaatcttgcgtctcagcgcatgaacacatatcttaacagggatgctaagtcgtgcttggagaggtggaagaactaccttaagcctggcatcaaaaaaggctctcttactgaagaagagcagcgccttgtcatccacctttaagcaaaata

SEQ ID NO: 262668 - DNA, 256 bp, Glycine max
aattgttgtaactctatgattcctaaattctctaaaattcgaaattctaatttcgttaggggaaagagattgtttgtgtgtgagtgagtatggctggaaaaggcgagggtcctgctatcggaatcgatttgggaacgacgtactcttgcgtcggcgtgtggcaacacgatcgtgttgaaatcatagccaacgatcagggtaacagaactaccccattctacgtgggttttaccgacacagaacggttgatcggcga

SEQ ID NO: 262669 - DNA, 444 bp, Glycine max
gccacccttatgaacattgctgataaccccaccaatgtgcagcttcctggtatgtatgacaaggaagagaatccccgtgtgcccatcatcggcaccggtaacgatttctccacactctatgcgcctctcatccgtgatgggcgtatggagaagttctactgggcaccaacaagggatgaccgcattggtgtctgcactggaatttttcgcaccgattcaattcctgaacaggacgttgtcaagattggtgacaccttgcctggccaatccattgatttctttggtgcactgagggccagagtatatgatgacgaagtgaggaagtggatttctggtgttggtgttgacggcattgggaagaagcttgtgaactcaaaagatggacctccaacctttgagcagcccaagatgactctggagaagctcttgacgtatggtaacatg

SEQ ID NO: 262670 - DNA, 445 bp, Glycine max
gccacccttatgaacattgctgataaccccaccaatgtgcagcttcctggtatgtaggacaaggaagagaatccccgtgtgcccattattggcaccggtaacgatttcttcacactctatgcgcctctcatccgtgatgggcgtatggagaagttctactgggcaccaacaagggatgaccgcattggtgtctgcactggaatttttcgcaccgattcaattcctgaacaggacgttgtcaagattggtgacaccttgcctggccaatccattgatttctttggtgcactgaaggccagagtatatgatgacgaagtgaggaagtggatttctggtgatggtgttgacggcatttggaagaagcttgtgaactcaaaagatggacctccaacctttgagcagcccaagatgactcttgagaagctcttgacgtatggtaacatgc

SEQ ID NO: 262671 - DNA, 490 bp, Glycine max
  unsure (1)..(490): unsure at all n locations
ccacctccgatcgaagactagtacatggtgagccaagtaggaaagaggaggcgtcactcgagaggtcaccatgcaacctcacaaacgcttgcatggctgcacattcaagaagaaggctcctaaagcaattaaggagataaggaagtttgctcagaaagcgatggngacgaatgatgtgagagtggatgtgaagctgaacaaggctgtgtggagccagtggattcggagcgtcccgaggaggattagggttcgcattgcccgaaagaggaacgacgattaggatgcaaaggaagagctatattcccttgntactgttgtcgaaatcccccaagatgagctcanaggtttgggaaccaangttattgatgatgaagattgattatgtattgcttacatatctngtntattttatagttgatgcagaattgcgaatatcttttaattttgtgagacattggagatatttaagttgataatatcgattgctttc

SEQ ID NO: 262672 - DNA, 393 bp, Glycine max
accacgcgttcgtccacgcgtccgggaaggtgatgaaggatcttgctatgaggctagagaaactaggagagcacctgctggacttgttgtgtgagaatcttggcctagagaaaggcgtcctcaagaaggctctctatggatcaagaggaccaacttttggcacgcaggttgccaactacactgcatgccccatctcagagactgtgaacggtctatggaccacactgatgccagtggaattatgcttgtatagatgatgacaaggtcagtggactgcagcttctcagagatggccagacagactgacgtgccttctatgcaccactggattgctgataacattggtgatcagctagaggttatcaccaatggtaagcacaagagtgtggagca

SEQ ID NO: 262673 - DNA, 309 bp, Glycine max
aacatccccttttcttcttctcacttctctccaagttttttcttcacatttctctgcctttgatctgcacacacaacaacatccctctaaaaaacatagagggataaaataaaaacatgaagaaatttgtactcaagttagatttgccagatgacaaggcaaagcagaaggccctgaaaacagtttcaacactttcagggattgatgccatctctatggacatgaaggagaagaaattaacagtgataggaacagttgatccagtgaatgttgtgagcaaactccgcaagtattggcagacagacatac

SEQ ID NO: 262674 - DNA, 408 bp, Glycine max
aagaacttggttaagaagtgccttgagctcttctttgaaattgcagagaacaaggaggattacaacaagttctatgaggctttctccaagaacttgaagctaggtatccatgaggattcacagaacaagggaaagattgctgaattgctcaggtaccactccaccaagagtggtgatgaaatgacaagccttaaagattatgtgaccaggatgaaggaaggtcagagtgacatctactacatcacaagtgaaagcaagaaggctgttgagaactcttcattcttagagaagttgaagaagaatggatacgaggttctttatatggttgatgccattgatgaatatgctgttggtcaactcaaggaatttgagggcaagaagcttgtctctgccaccaaggaagggctc

SEQ ID NO: 262675 - DNA, 506 bp, Glycine max
  unsure (1)..(506): unsure at all n locations
nccacgcgtncggatcatgagacctggaatgttcangtgtttagatccattgatggtggggctgctgttgggttcccggagactcctgaagatgctgccagagctggtcttattagtgggaaggataatatcattgatcgtagcattcaagatgcttatattaatgctattcgacgtgcaaagaacttcatctatattgaaaatcagtatttccttggaagctcttttgcctggagtgctgatgatattaagcctgaagacattggtgctttgcatctaatcccaaaggaactttcactcaagattgttagtaagattgaagctggggaaaggtttgctgtgtatgttgtagtcccaatgtggccagagggtgttccagaaagtgcatcagttcatgcaatattggactggcagaagagaacaatggagatgatgtacaaggacattattcaggcactcagagctaagggaatcgatgaagatcctcgaaactatttgacattctt

SEQ ID NO: 262676 - DNA, 393 bp, Glycine max
ctcttctcttcgctcctgcacttgttgtttctttgcccttcatggcatctcaggctagccttctccgtgaaaagcagctcaaagatctttgcaaaaaccccgtcgacggcttctctgccggtttggtcgatgaaaccaacatttttgaatggagtgtcaccataattgggcccgccgatactctctacgaggggggatttttcaatgctattatgagtttcccatccaattacccaaatagtccaccttcagtgaagttcacctcagaaatatggcaccccaatgtatatcctgatggccgggtttgcatatcaattcttcatcctcctggtgaggatccaaatggttatgagcttgcaagtgagcgctggacacctgttcatacggtagaga

SEQ ID NO: 262677 - DNA, 418 bp, Glycine max
  unsure (1)..(418): unsure at all n locations
tccacgcgtccggtgctgcttaatactttttctcgcctataaaaggtccgccactgcggtacttgggcacttncagaacaactttttaatcatcgaagcccgcgcgagaagaactgtttgcgcggtccaaaacgcgtttccaagctccgtttcaaacccgtcgctatggctacgctcggcgctcgcatggtggccgccgcacccaccgtaactccgncggcctcgctcgacttcgaaaccttcgttttcaagaaggagagattacctcgctggacacgacgagtacatcgcgaaaggagggagggatttgttccctctgttgcagggtgctttcaaggggattaagcagattggcgtcattggatggggttcgcagggacctgctcaggcacagaatttgcgggactcgcttgctgat

SEQ ID NO: 262678 - DNA, 170 bp, Glycine max
cccacgcgtccggcatcacgtcccttttcaaaccaagttccacagacaccaacaacgctttagctctgtgttctctccgtcaccggcaccggcgatctacatctgaacccggtccaagcaatagatctcagaaatccaaatggagaacctaatgcttttggtcaaccaaa

SEQ ID NO: 262679 - DNA, 364 bp, Glycine max
gttctattctctgaacaatggcgtctctctctcacctcaacaaactcctctgcatgcccccgctcaactcttcaccctctatttcggcaccacgcagcagcgtcggaatttggaccaaacctgtcggaaggccgaggctactggtgcgtgtccgagcggtcacgagcgacgacgagtgggggccggagaaggaggaggcgtacggcggcggcgtagcggtggaggagaaaccgacgaagtcggagacggagacggagaagctgaagaaggccttggtggattcgttttatggcaccgatcgtggactgaaagcaacgagcgaaacgagagcggagatcgttgaactcatcacacagctcgaggc

SEQ ID NO: 262680 - DNA, 410 bp, Glycine max
cccacgcgtccgcaacaaccaaccatcaagggaagttagtgagagagagagagagagagagagagcggaagatgaatggtggtgaatcttatggtgctattgagacacagtacataagaaggcatcacaaacatgaaccaagggaaaaccagtgcacctctgcacttgttaaacacataagagctcctgttcaccttgtgtggtcgctggttagaagatttgatcaacctcagaaatataaaccatttgttagcaggtgtatcatgcaaggggacctaggcattggaagcgttagagaagtgaatgttaaatctggccttccagccacaacaagtactgagaggttggaacaactggatgatgaggagcaacaatcttggaataaggataagttggaggtgaccacaggc

SEQ ID NO: 262681 - DNA, 470 bp, Glycine max
gttccaaacttcttcttggaatgtcccttccttaatacccctcaaagaaaagccaccttaacatctggtctctgaaaattctctttagagagatagagagaggaagaaagaatggcagcttgcactgtctactcaacacaatctctgagcacaaattgctccatctcaaccccatcaaagacgcaactcagttttttccaccaaaagcaggtagttttctggaggaacagcaagaagggcagctgcagcagcagaagaagctatgtgataacatgtgcagcaggtgactcacagacagtggtgattggcctggctgcagactcagggtgtgggaagagcaccttcatgaggaggctgaccagtgtgtttggaggagcagcagagccaccaaagggtggcaaccctgacttcaacactctcatcagtgacaccaccactgtcatatgcttggatgattaccactctttgga

SEQ ID NO: 262682 - DNA, 410 bp, Glycine max
cccacgcgtccgtccacgcgtccgtcgcaccagtttcaccgcacgaatatcttggtgtttggagcgatccgagaaaaactcttgtaacatgttggtttaccaggacctccttacaggtgatgagcttctctctgactacttccgttacaaggaaattgagaatggaatgctgtgggaagttgaggggaagtgggttgttaaaggagcagttgatgtagacattggtgcaaaccactttgctgagggtggtggagaagatgatggagttgatgatgcagctgttaaggttgttgacattgttgacacattcagactttaggtagcacccgcattcgataagaagcagcttgttacctttcatgaataggtttatcaagaatttgacttccaagctcgatgcagagcaacag

SEQ ID NO: 262683 - DNA, 368 bp, Glycine max
cccacgcgttcgcaaaggtgctcagatttttgaagctctgggtctttcatcagaagtgattgaaaggtgctttgctggaaccccaagtcgagttgagggtgcaacatttgagatgcttgctcgtgatgctcttaaattgcatgagttagcatttccttctcgggttttctctgctggaagtgctgaagcaaatgcattaccaaatcctggggattatcattggagaaaaggcggtgaaattcacttgaatgatccacttgccatatcaaagcttcaagaggctgccagaactaacagcatagatgcatatgaacagtactctaagctcattcacgagttaaataaagcctgtaatttgcggggacttc

SEQ ID NO: 262684 - DNA, 412 bp, Glycine max
agccaagctaccagtggattaagaaaagttgactcggcaaatgattcagctactggagttacccccagaaaaggaatgattctacctttccaaccacttgcaatgtcttttgacactgttaattactacgtcgacatgcctgcagaaatgagagatcaaggagtgacagaagataggctacaactgcttatgggagtaactaggtcctttaggcctggagtcctaactgcactaatgggagttagtggagctggcaagacaactgtaatggatgtgttagcaggaagaaagactggtggctacatcgaatgagatattataatctctgggtccccaagaaccaagaaatctttgcatgagtctctggttactgtgaacatactgatattcattcaccccaagttactattag

SEQ ID NO: 262685 - DNA, 329 bp, Glycine max
gcgtaagcagtgctaacaacgcagagtactttgcatctgtttatgatttattttactgggctgtgaatcaaacatgcttgatgccatacttgttaagattctattagtatccaggatacaagtcgacttctacaagctgacttataagatgagagagcagagctctgtctaatcgaaggaaatgaggttatcgcagatacataacattaaattgactagattacccaattttccatgaggtagaagcggtggttagaactgcacttgtaaagatgtaatctacagaagagtggactaatccaaccattcatgcaggtacaatgaaaagt

SEQ ID NO: 262686 - DNA, 256 bp, Glycine max
  unsure (1)..(256): unsure at all n locations
cccacgcgtccggcttctgcagaagtagagttccgatgctttgttggtgggcttgcttgggccaccgaccacgatgctctcgagaaagccttctctcaatttggcgaaatcgtcgaatcgaaggtcatcaacgatcgtgaaactggaagatccagagggtttggatttgtgaccttcgccacagagcaagcgatgagagacgcaattgaaggaatgaacggccagaacctcgacngtcgtaatataaccgtgaacg

SEQ ID NO: 262687 - DNA, 415 bp, Glycine max
tcgtcaggttgtgtctaatgctcttgatatgaagctcagggatgacttagagagacttaagaagatcaggaaccaccctgggttgaggcactactggggccttcgggtcccgggtcaggacaccaagaattcctggcccaagggaaaaaactgttggggctttaaaaaaccggtaaccattaaggtttgggctggaaattaaaatttggttaagaaggcatgttggaagtacactacatgttttgaataataccaactttgtatccgtggttaaatggcttgacaatttcaatttggtttgttatttgcatctgagattccgattagttaaataatgttggttttcttagttgtagagaaccttgaatagtatttttgaaatacgaattcagtttgatccgggaaggaaaatttc

SEQ ID NO: 262688 - DNA, 364 bp, Glycine max
caggactatacctatctatatagtgtatgaaaattctggggggtgaagtcgtttttggggtagttgatggatgttgaaatccttgacggttgtttggtgaaatgagggatgttatcggggttgatgaacttattgagggcctgctttcggccgggttcggatggatttacacgtgcaggttcctatgccggtggtagacaggatggactattgtggtacatggactctgtgcagcacttgtatggggatgcactaatggctgtaatcgaagccaataacatgctggaagatcagagccagattgaatcacgctgtttgagctccaatgaatgcgtaccttatggtaccttcatcggtgtctatg

SEQ ID NO: 262689 - DNA, 509 bp, Glycine max
gcctaaccatatggctacccatctacgaccgaatcctcgtgccgtcgctccaaagggtcaccaaaaaagagggtggcatcacagttcttcaaagaataggctttggcatgttcctctctatactatgcacaatggtgtctggtgtagtggaagaaagaagaaggacattggctttgaccaatcctattggattagagccaagaaaaggtgccatttcttcaatgtcaggtctatggttggttcctcagctaacactggcagggttatctgatgcattcgcgattgtgggacaagttgagtttttctacaaacagtttccagagaacatgaaaagccttgcagcgtctctatttttctgtggcctcgcgggatcaagttatttgagtagtttgctgatttctattatccatagggcgacagctaaatcttcaacttgggaatggttacctcaggatctcaataaggggagattggattatttttattacattataactgctctagaagtc

SEQ ID NO: 262690 - DNA, 388 bp, Glycine max
cccacgcgtccgcccacgcgtccgcggaaattgaaggcagatgatctgtttttgatctgtgcaacagatggactttgggagcatttaactgatgaagtggctgttgaaatcatctccagaagtcccagaataggaatagcaaaacgattggtgagagctgcactagaagaggttgcaaagaaaagagaaatgaggtatgaggatctaagaaaaactgataaaggtctaaggcgtcattttcatgatgatattacagtgatcgttctatatctcgatcattcaaaagaatctcaaaatggtagatcaaaacataaaggagtttatgattgcattaatactcctattgatatcttctctctgaactcagatgaagctgatctttaaaatg

SEQ ID NO: 262691 - DNA, 355 bp, Glycine max
ctcaccttacctcttattccaaatcttaattcaaatggcatcggaaactgagacgtggggctttcatgctctatatcaaccagctcctcagtctaatcatcaacaacttgtacagcaacatggacatctttcttagtgagctcatcatcaatgcatctgatgcttagtacaagacccgatttgagagttttacatactaaatcatgcttgatgctcatccagagtcgttcattcccattttttctgactagaccagctccacattgtctatcattgacaggagcattgccatgactaatgcctaatggatgaatatcactaggtactattgcaaggactggtaccaaggaattta

SEQ ID NO: 262692 - DNA, 411 bp, Glycine max
  unsure (1)..(411): unsure at all n locations
taacttccagccaaatatggagggaaaccgcaactgctatgctgatgagcattacctgccaaccttggttactatgcttgatcctggtggaatcgcaaattggtcggtaacatatgttgattggtctgaaggaaaatggcatccaagatcattcagagctcgggatattacttatcaagtcatgaaaaacatagcatatattgacgaaagtccacattttacaagtgatgcatagagaacagtggtgattacaccttgcatgttgaacggctcgaaacgatcatgttatctatttgccaggaagtttttgccagaaactcangatagattgatccaactctactctaattctacaatattctaaagtattaatgattctcatcattctttggtgatccaacaccatgtgat

SEQ ID NO: 262693 - DNA, 362 bp, Glycine max
ttcttgagtgttttctcagttcctcacatcatgtaccgctttgcaacctccctcgcctccaaagctagaattgccaggagcagcactcatcagattggaagtagggtcacttggaacaggaattatgcggccaaagacattaagtttggtgtggaggctcgggctctgatgcttaagggtgtcgaagagctcggtgatgccggtaaagtaacaatgggccctaaggtgcgtaatgtggttattgagcaaagttatggagcacctaaagtgacgaaagatggagtaaccgctgctaagagcattgaattcaaggacatagtcaagactatcggtgccagtcttgtaaagcaggttgctaatgc

SEQ ID NO: 262694 - DNA, 411 bp, Glycine max
  unsure (1)..(411): unsure at all n locations
ggggtatgggagacttcgagacccagatgttttaaggcttctcactcctcttaggtttcagttgtgacaacctctaagtgacaagagtggaacattcattctnttagtggcaatttggctatatatattaagttctgggctgtgagtatattagaacaaatgtccttccgcagcatagttcgtgatgtaagggatggctttggaagcctatcaaggagaagttttgaggtaaggctttctggccataacaggggcaagtcacgcagttcggtccacgagttgcaggatcagccaccggttatacagaacagccggtgggctagccttcctccggagcttcttcgtgatgttattaatagatnggaagcaagcgagagtacatggcctggtcgtaagcatgntggtgcatgt

SEQ ID NO: 262695 - DNA, 255 bp, Glycine max
  unsure (1)..(255): unsure at all n locations
atggctggtggtgctgctgattgccagttttggcacaggaatctcgggattaagtgtcgtttgcatgagttggcaaataaaaggagaatttcagtgacaggagcctcaaagctacttgccaatantttatactcttatcgntgaatggtttatctgttggtcccataatggccgattggaataaaccggcccttgtctaatataatgtgatagtgaaggaggaagacttaaaggcactagattctcggttggatc

SEQ ID NO: 262696 - DNA, 364 bp, Glycine max
cccacgcgttcgcccacgcgtccggaaaacagcatcgaacccgtcgtagcagaaaaacttgtcaccatggtttcttccgacaaggatccacgagaggatgtccttcaagcctggtacatggatgatagtgatgaagatcaaagactcccccaccacaaagaacccaaggagtttgtctcgttggaccaacttgctgaacttggagtccttagctggaaactagatgctgataaccatgaaaatgatccagagctgaagaagattcgtgaagagcgtggttacacctacatggatgtttgtgaggtctgcccagagaagttgccaaattatgaacagaaaatcaaaagcttctttgaagagcatc

SEQ ID NO: 262697 - DNA, 367 bp, Glycine max
cgtcacgtgtgatggatatctgcagaatcctgcttaagcagtggtaacaacgcatagtacgaagatcacacacaacattcatgcactcacaggccactcgggaaaaactacatcacatatcaacgaaattaatcaattcttaactctttaaaacaacgctcgagccgacctgcctgtgccaccactactatgggacgcaggactgtcaaagtacgctgacatgtatgcacgacaaaggcgacaggatcgcttgttaaagcattcaaacgggccgtatggggaaaatatcttctggcgtagaggtgatcggtggacgccagcacaagccgtaatggcgtgggtgacggagcaacgatggtataactat

SEQ ID NO: 262698 - DNA, 283 bp, Glycine max
  unsure (1)..(283): unsure at all n locations
acacacacaaacacacacatacatccgtcagctgagctaggttttatcaatggcggccagaaatgcaattctcaaacacctgcgtgtgagtgttaaacctgttctttcatcttccacatctcaaaaccctagactcatcgaacgaggattgattcaattgttccggcgtcatttttccgaggaagttcgtggatcttttctcgacaagtcagaggtcactgatcgagtggttacttgtgtcanaaatttccagaaaattgatccgtcgaaggtcacgcctact

SEQ ID NO: 262699 - DNA, 411 bp, Glycine max
acgactcctactgcaccaatgcatgaatcctgacggtatttggatcccatgtgtacctaagcgtcaggaggcattacaaacctcactgtaagagctcgctgctaagggactagctcatatgattctaacggcccatatccagaggacagaatttgcgatcgtactgactggacgatggcctacagtaagctaagccgaccttgatgttcacgagagattcacgaaggaatttggagaggaaggttaatactgttggaactctcactcttaaggtccacactgagtctcaaatatattgctataatttgaaatctattatcctttggatccaaattaaatgcatctttgtcatatttggggatgaacaggcccctttaggaccgagatttatttataaaggtcgatactcat

SEQ ID NO: 262700 - DNA, 461 bp, Glycine max
cggcccgggacgaccgacgcgtccgacccagcctccatacacactctctctgagtcggtcgagttgaatcggtgtgagtcagtgaccgactcgaaccatgtcggacgaagatcaccattttgaatgcaaggccgatgctggagcctacaagacctatcctcaacaagccggaaccatccgcaaaagcggttacatcgccatcaagggtcgtccctgcaaggttgctgaaggttctacttacaagactggtaagcacggtcatgccaagtgtcactttgttgggattgatattttcactgccaagaagcttgaagatattgtgccctattctcacaactgtgatgttccccatgtgaatcgtactgattaccagatgattgacattgctgaggatggatttcttagcttgcttactgaaaatgggaacaccaaggattgacctgagcttgctactgatgaga

SEQ ID NO: 262701 - DNA, 458 bp, Glycine max
ctttttctcaaccaaaaggggttcaattctttctagttctattacatcgtccgcgaccatgaacatggcgatcgtgcttctgttcatggttttcgcagtttcatcagctttagacatgtcaataatatcacatgacaacgctcatgcggatagggccacgaggcgcaccgacgacgaggtgatgtcaatgttcgaggagtggctggtgaaacacgacaaggtgtacaacgcgctcggtgagaaggagaagaggtttcaaatcttcaagaacaatctgcgctttatcgatgaacgaaactctctgaaccgaacctacaagttgggactcaacgtgttcgctgatctcaccaatgcggagtacagaaccatgtacctgcgaacctgggacgacggtccgaggttggacttggatacgccgtcaagaaccactacgtgccacgtgttggagataccatacc

SEQ ID NO: 262702 - DNA, 405 bp, Glycine max
attctgctcatttgctttgactcctcattatcaaggaaaatggctctcattgggttgctcttgatgggttgtctcacaatgttctactctgctcatgcctatggtggacggtggactaatgctcatgccaccttctatggagggagtgatgcatctgggacaatgggtggggcatgtgggtatgggaatctctacagccaagggtatggaacaaacactgctgctctaagcactgcactgttcaacaatggcttgagctgtggctcttgctatgagattaggtgtgccaatgaccacatgtggtgcctttcaggttctattgtggtcactgccaccaatttctgtcctccaaacaatgccttgcccaacaacaatggtggctggtgtaacccttctcttcaacac

SEQ ID NO: 262703 - DNA, 454 bp, Glycine max
cccacgcgtccgctcaacaaatgaatattctcggacaatcattcaacgaatcaaacaacgggagctactcttgttcgtcgccggagactggtagctcctctaacattccaaacacttttcactccgacgaggaagtgcacacactagcttcggcgcgtgctaagaaacgtgcggggcgtcgaatttttaaggagacaagacacccggtgtaccgaggagtacgaaggaggaacaacaacaagtgggtctgcgaggttcgtgttcccaacgacaagtccaccaggatttggcttggaacgtatccagtgcctgagatggccgtacgtgcgcacgacgtcgccgcgctcgcgcttcggggcaagtcggcttgcctcaacttcgccgactcggcgtggcggctgcccttgccggcgtcgacaaatgcgaaggagatacggcgagtggcggctgcggc

SEQ ID NO: 262704 - DNA, 452 bp, Glycine max
tccgcttggattgtgtctttagggatgatgctgaaatccctaacctaaaattcccctccctgatggctttaccagaggttgggttgagactgctcctttcacccgttacttccaaccttcttctccgcacagcatgctgttcaatagggcttgcgcttcccgtgtattccacgtttaaagctattgagaacaatgacccatatgagcaacaaaggtgcctattgtattgggcagcttatggttcttttagtgctgcagaaatgtttgctgaaaaattattttcctggattccactctatcatcacatgaagtttgcatttcttgtttggctacagctgcccactcttgatggtgcaagacaaatgtattctagtcacttgcagccattcctgttgaagcatcaagctagaatggatctgattgttgaatttgtgtatggtgcaatgagtaaa

SEQ ID NO: 262705 - DNA, 452 bp, Glycine max
gttatcaacagattcatctcaacatgttcgctctgcactggcttctgttataatgggtatggcaccggtgttagggaaggatgctacaattgagcaacttctgcctattttcctttctcttttgaaagacgagtttcctgatgtcaggctaaatattatcagcaagcttgatcaagtgaaccaggttattggtattgatttgttatctcagtctctgttgccagccatagtagaattagctgaagatcggcactggagagttcgacttgcaatcatagaatacatacccttattggcaagccagttgggtgttggtttttttgatgataagcttggagctctttgcatgcaatggctaaaggacaaggtatactcaatccgtgatgcagccgctaataacatcaaacgcttggcagaagaatttggaccggattgggcaatgcagcacatta

SEQ ID NO: 262706 - DNA, 359 bp, Glycine max
tgcaaatcagccactgctaccttgtactgccgccccgacgcggccttcctctgcggcgcctgtgactctaaggttcatgccgccaacaagctcgcatcgcgccacccgcgcgtcgtgctctgcgaggtgtgcgagcaggcgcccgcgcatgtgacctgtaaagccgacgccgccgcgctctgccttgcctgcgatcgcgatatccactccgccaaccccctcgccagccgccacgagcgcatccccgtcacgccgttcttcgagtccgtacattcagtcaaggcctcctcgccgatcaacttccaccaccgcttcttctccgacgccgacgctgatgctgacgtcagcaccgaggaggc

SEQ ID NO: 262707 - DNA, 338 bp, Glycine max
  unsure (1)..(338): unsure at all n locations
cccacgcgtccgaggggatgggtagaatctcggttgagaatgcttaccctgaagatagagcgagatacaaatgggatgctgcagtgccatccttacccacatgagtatgtagacacatccaagccatgtgcacattctgcatttttcatgggcttgcaaaggaaagaaggagtaagaagtcaagaggggcagcaatttgatatacgtggaacagttgatgaattcagacaagaaataaatatgtacatgtactggaagccaaggatggatnattttggttctcatgttcgtcgaaagcaactccctgcatttggttttctgatgggtacaaacgcact

SEQ ID NO: 262708 - DNA, 307 bp, Glycine max
tggagttattcacagtgagaaattcctaagctccacaattggagccaagaatttgtgaaccatccaattgtcaaagaaagtctgccccctagagatcctgttttctcctttttcaagggtctctatgaaagcctttttggttcaaaatagatttgatgatgtggtgtgagacttagtatttctaagaattatgtgtttgttaaaggcttctatgaaagcctcactgcttcaaaatagattcatgtatgtgagactcagaatctctggggaaaattgtgtgtggtgtggactacttgtttggttggca

SEQ ID NO: 262709 - DNA, 383 bp, Glycine max
agcttctctgttaaaaaaaaattaggcgtctaaagggccaaagaaagttgaagctttttttgttgaggtgaaagtgaaatggttggcaaggataatctgagggctgaggacttgaacttgtgctttaagaagcttatgatggtggccgggagtgggaacagtgagaaaggggtgaacttgaaggttggggtgatcaccgagtggaaggatattcctgtggagcttctgatgcaaattctgtcccttgtggatgatcagacggtgatcatagcttctggagtttgtcgtggatggagagatgctatttactttggccttgctcgtttatcactctcatggtgtagcaagaacatgaatatactggtcctatctcttggttctaa

SEQ ID NO: 262710 - DNA, 250 bp, Glycine max
cgacccactcgtccgagcccgtcaagcatggctattggtgcatgagaaaaccacgaggggtctcgagtacgaactcagggacactgttcaggccgactttcaacggtctcgagatctatctggccgacgttgagactccctggctaaacgtctgtctgaccgagctcttaccgttccagagcttcaagggggcccgcatcacctgctgcctccacatgaccatatataccgggcgtctcattgagaccct

SEQ ID NO: 262711 - DNA, 446 bp, Glycine max
gtctgctgttagatctgtacccgcctagccattgatttggaaaagtccaacttcaaggatgagtaagcttcagagtgatgctctaagagaagctatctcaggaatcatggctgattccaaggaaaagaacaggaaatttgcggagaccattgaactccaaattgggttgaaaaattatgatcctcagaaggacaagcgtttcagtggctctgctaagttgcctcatattcctcgccccaagatgaagatttgtatgcttggagatgcccagcacgttgaggaggctgagaagataggattggactacatggatgttgaggccttgaagaagcttagcataaacagaaagttggtgaaaaaactagccaaaaaatatcatgcctttttagcctctgaagcagtcatcaagcagatttctcgtctcttgggacctggtctcaacaagg

SEQ ID NO: 262712 - DNA, 324 bp, Glycine max
atttgcgcgaggatttatttgcagggaagcttaaataagggaatgtgataaaggaagcactgaataggcatgacgcggaattattaacctcctcggggagttatgctgaccatcaacttggatacaggaagccagctctaatattgatagttggtgttaactgtcgaaggatgactacatatccggcaaatgctgtcctatagattgaagaatgagcgtgctaagatatcgcaggctgctgatgatgcatgtagagcagctgctagcggtcaggttgaaatatcctccgaacggactggctgcgatattgatgtggctgagatc

SEQ ID NO: 262713 - DNA, 453 bp, Glycine max
gtcggaaaagggatagatcgcctgaaacaagaagtgctgatggtatggatactgagggtgacacacctagcaaaaaacagcgtctgagtagatcactgtcacggtccaggtcagtgtcacgcccaccacatgaagttgtgcctggagaaggcttcaaggattctgctcaaaaggtcaaggcaatcaaacttgcaaagaaatctgtcaagaagagaaacaaggatgcccgtcgtggagaagctgatagagtcatacctaatctgaagcccaagcacttgttttctgggaagcgttccaatggaaaaactgagagacgctaggacaggggatgctgtttaatgcattttagaggacacctgttggcatttttcagggctgccaaaaaaaattgttatttaatgtaagtgttttgttggagtttaaggttctgtgctggcaacatagtttacttat

SEQ ID NO: 262714 - DNA, 443 bp, Glycine max
acaaccttcagtggtgcatgttcatatcaagaggcatttgatgaaggaactgccagatccagatgaggctgttgctcaatggtgtcgagatatatttgtggccaaggatgctttgttagacaaacatatggctgagggtacttttagtgatcaagagctgcaggatactggtcgaccaataaagtctcttctggtagttatatcttgggcgtgtctggttgttgcggggtctgtaaagttcctgcaatggtcttcgttactctcttcctggaagggtgttgcattttcagcttttggtttggcagttgtaactgcacttatccaaattctgattcaattttcacagtcagagcgttcaaactcggccaagatcgcgcctgcaaagtcaaaaaacagggggtcttgatatatttggcgaacttaaagttgcatttatgtgtgat

SEQ ID NO: 262715 - DNA, 454 bp, Glycine max
gtctgctgttagatctgtacccgcctagccattgatttggaaaagtccaacttcaaggatgagtaagcttcagagtgatgctctaagagaagctatctcaggaatcatggctgattccaaggaaaagaacaggaaatttgtggagaccattgaactccaaattgggttgaaaaattatgatccccagaaggacaagcgtttcagtggctctgttaagttgcctcatattcctcgccccaagatgaagatttgtatgcttggagatgcccagcacgttgaggaggctgagaagataggattggactacatggatgttgaggccttgaagaagcttaacaaaaacaaaaagttggtgaaaaaactagccaaaaaatatcatgcctttttagcctctgaagcagtcatcaagcagattcctcgtctcttgggacctggtctcaacaaggcagggaag

SEQ ID NO: 262716 - DNA, 301 bp, Glycine max
cccaaacaagaatcctcaatatgagagatgccgaattgttggctgccaaagaagagatcagctctcttgagaaggaattttcttcatacaaagttcgtgcacatgcacttcttcaaaagaaggatgctgaacttgctgctgcttaagattctgaacaacttaaagctctaaaagaaactcttaaaggatatttgatcaatattttggaaaaaaacttggtttgataatggatattaaattattcaccattggcatccttaatttcttccagaaggtggaaattgaagtataatcattacca

SEQ ID NO: 262717 - DNA, 411 bp, Glycine max
attgatactgggggtttggcacctttcaaaaaacatccttttaatataacactgtcactgtccatgttagtttcaagcccaccacatgaaatttttccttgaaaaagcttcatcgattttgctcaaaaagtcaatgctattaaacttgctaagaaatctgtcaagaatataaacatggatgcccttccttgacaaacttatagagttatacctaatcttaatcccaagcacttgttttctggtaagcaatttcaatttaaaaactgagagacgcttggacatgggatactttttaatgcattttatagtacacctgttagcatttttcaagtcttccaaataaaaatgttatttaatggtaattttttgttggactttaatgttctgtgctggctacataatttacttata

SEQ ID NO: 262718 - DNA, 385 bp, Glycine max
cccacgcgtccgcaacattcaacaatggtacctcaagctttgtcagtgcctgcgagtgccagcttcactatcgcttctcgcaccagaagtccctcccacctcgtattttctcacagaaacccgtgctcgatagcttcttccttaccaaacccatatggccattcatcaggagttgggttatcaagtaaaagccgtggttttcctttaaaacttgatgagaaaaatatccatggtgcgagtacaagttatggtgcaattgaagccaaggggaatccaccaataacacccgcagtgatgactcctggaggacctcttgatctctcatctgttttgtttaggaatcgtataatattcataggacaaccagtcaattcacaagtggctc

SEQ ID NO: 262719 - DNA, 133 bp, Glycine max
ttatgactacaaaccaattaagaagccaccagtgtacaagcctccagtgtacaagccaccagtgtacaaaccatcggtttataatcctataatatcggtttacaaacctgaaacaccggtttacaatctacca

SEQ ID NO: 262720 - DNA, 461 bp, Glycine max
agcaaatgagagctatgactgagatgcaaggggttctttgctcaacaagacccatgaggatgggaccagcctctaataaaacccctgccactcagtcccagccaaaagcttcatatctgaattctcaacctcaaggctcacagaatgagaatgatccaaataatacgactatttttgttggcaatttggatcctaatgtaaccgatgatcatctgaggcaagttttcagccagtatggagaattagttcatgtgaagattccagcaggcaagcgatgtgggtttgtccaatttgcagacaggagctgtgctgaagaggcccttcgggtgttgaatgggacgctgttgggtggacaaaatgtgcgtctttcatggggtcgcagtccttcaaacaaacaggctcaggcagatccaaaccagtggaatggtgctgctggtgctggttctggtggtggatattat

SEQ ID NO: 262721 - DNA, 452 bp, Glycine max
cccacgcgtccggttttgcagccatggaaacaggcatagcatgctacactcgcgggcctttgctgcctagtgtttcttccaagcactctccaccctccatctctccatcttttggcttgaggagtctgaaatcgagctctttatttggagaatctctaagagtggcatccaaatcaacactaaaggtttcaaagacaaagaatacttcactcgtgaccagatgtgaaattggtgacagtctggaagaattcctcacaaaagcaacaccagataaggggttgatcaggttgttggtgtccatgggagaagcattaagaacaatttccttcaaagtgaagacggcttcttgtggtggaacacaatgtgttaatacttttggggacgagcagcttgcaatggatttgctagctaatcagcttctttttgaagccttaaattactctcatttctgc

SEQ ID NO: 262722 - DNA, 429 bp, Glycine max
atgaaatgttcaaagatgtgagaatagagaatttagaatgtaattgaattttaacactatggtataccccctacctcatgtggttgaccttgtgtaaaaaaaaaaaaaaaaaaataaaaaaacaaaaaaaaaaaaaaaaaaaaaaaaaaaaaaaaaaacaaaaaaacataataaaaaaaaaaaaaaacataaaaataaaaaaaaaaaaaaaaaaaactattaacaaaaaataaggggcgaacttttaatgtgccaaacttaacatacacgaaaatgtggaacctaatccctcaaaaagtgtaacccaaagtcaattaaggagaacaatgtttaaatcattgaattttggaaaaccgggtgctttaaagatttaataaaggtcgtatatgtccataattagccattttgtgttaaagccaaagggatttt

SEQ ID NO: 262723 - DNA, 459 bp, Glycine max
gatcaactgaggagagtgagagaaaagagaagagaagatgacaacacgcttcaagaagaacaggaagaagaggggccacgtcagcgctggccacggtcgaatcggaaagcacaggaagcaccctggaggacgcggtaacgccggaggcatgcaccaccacaggatcctcttcgacaaataccaccctgggttcttcggcaaggtaggaatgcgctattttcacaagcttcgcaacaaattctactctccgatcctcaacatcgacaagctgtggtccctggtcccgcaagaagtgaaggacaaggcctccaaggagaacaaggcgccgctcatcgacgtcacgcagttcgggtactttaaggttctcggaaagggcgttttgccgcagaaccagcccgttgtggtcaaggccaagcttatttccaagatcgctgagaagaagatcaaagaggctggcgg

SEQ ID NO: 262724 - DNA, 452 bp, Glycine max
cccacgcgtccggttttgcagccatggaaacaggcatagcatgctacactcgcgggcctttgctgcctagtgtttcttccaagcactctccaccctccatctctccatcttttggcttgaggagtctgaaatcgagctctttatttggagaatctctaagagtggcatccaaatcaacactaaaggtttcaaagacaaagaatacttcactcgtgaccagatgtgaaattggtgacagtctggaagaattcctcacaaaagcaacaccagataaggggttgatcaggttgttggtgtccatgggagaagcattaagaacaatttccttcaaagtgaagacggcttcttgtggtggaacacaatgtgttaatacttttggggacgagcagcttgcagtggatttgctagctaatcagcttctttttgaggccttaaattactctcatttctgc

SEQ ID NO: 262725 - DNA, 315 bp, Glycine max
ctttgaacgacgcagaaggttcatccaatctccgaatcctttaatcgcattgcaaccatgtcgaggagaaaggtcagagagccaaaggaggaaaacgtgactcttggcccagctgttagagatggcgaacatgtctttggcgtcgctcgcatatttgcctcctttaatgataccttcattcatgtcactgatctgtctgggagggaaacgcttgtccgcatcactggtggaatgaaggttaaggctgacagagatgaatcatctccttatgctgctatgcttgcagctcaggatgttgctgccagatgcaaggaa

SEQ ID NO: 262726 - DNA, 398 bp, Glycine max
ttgccaggctgtagttgcagctgctataggagcaaagtttggaattgatggaaaccctggtgatttgccaaaatggtatgcagttgttgtggttctcttcatttgcatttacgtatcagcatttgcctggtcatggggtcccctaggttggttggtgcctagtgagatctttcccttggagatccgttcggctgctcaaagtataaatgtgtcggtgaacatgtttttcactttcttgattgcacaagtcttcttgacaatgctttgccacatgaagttcggcttgttcatcttctttgcctttttcgtgttgatcatgacattcttcatctacttcttcttgcctgaaaccaaaggcattcccattgaagaaatgaaccaggtttggaaggcacacc

SEQ ID NO: 262727 - DNA, 453 bp, Glycine max
cttcttttctcttctttcttcttcttccatctctttttttctgcttaaggtctacaaaagttctcttcgtcttctcctcctattgaactttggtcatcacacgagaaaacccacgtctggatcttctggtgtaaaggccattagaagccttttagaaattttcaaattgagttggtgtatagtgttgaagggggtgaaatttggagcccagtttgttacttcatttgaaaggtcatagtttgaaccctctttttctggagatttacctgggaaaagatgatgatgtttgaagatatgggattctgtggcgatttggatatgttatgtggttctcttggggatggggatattgctgtgagacaaactgaaccggatcctgtagttgaagatgactacagtgatgaagaaattgatgtggatgaactcgagaagaggatgtggagggacaaaatg

SEQ ID NO: 262728 - DNA, 453 bp, Glycine max
cccacgcgtccggtgagtgtgtgtgataataattgggatcaactaatcaatcaatttgaatggcatcatccaattcggctcagctagaagggaacaaacccgcaaagagaaaacccgtgttcaccaaagtggatcagctcaaacctggaaccaacggtcacacgttggtggctaaggtcttgtcctccgacaccgtcgtacacaaaccgcgaccctcttccgcccacaacctcaaacccactgtcatcgccgagtgcctcatcggcgacgacaccggcaccatcgtcttcaccgctcgcaacgaacaagttgatatgatgaaggctggagctacagtaattattcgcaatgcaaagattgacatgttcaaaggatcaatgaagatggctgttgacaaatggggccgtgttgaagtaactgatcctgcagattttgaagttaaagaggataaca

SEQ ID NO: 262729 - DNA, 451 bp, Glycine max
caaggttggaaagtatgagaagaggatcgacgacatcttgaacaagttcgaccctgtcgttgaaagggtcatcaagaagcgccgtgagatcgtgaggaggagaaagaacggagaggttgttgagggtgaggtcagcggggttttccttgacactttgcttgaattcgctgaggatgagaccatggagatcaaaatcaccaaggaccacatcaagggtcttgttgtcgactttttctcggcaggaacagactccacagcggtggcaacagagtgggcattggcagaactcatcaacaatcctaaggtgttggaaaaggctcgtgaggaggtctacagtgttgtgggaaaggacagacttgtggacgaagttgacactcaaaaccttccttacattagagcaatcgtgaaggagacattccgcatgcacccgccactcccagtggtcaaaaga

SEQ ID NO: 262730 - DNA, 451 bp, Glycine max
gggaaaaataggtgtttacttggtagtcatattaattgtcattggcaaatactgcctaagagactgtgaaggtctggttgttagaaatttggcatgtatttgatttttttcccacgcgtccgcgttttactacgctctcttggactcagttcagtttcacgaccgatcctacaatggcgacagtcacgttttccttttccgctaaaaccctaactctaccttatcaccccaaaaccccaatctccaactttaccccggtaacgaatcttcgcctccctccttctatcgtgacccgaacccgcaattgtaaccggattcgggcggcgctggatggggatttctcggcgaaaaggagcagcagcagcaacaacaacgaccagagggagacgataatgttacctggttgtgactacaaccattggctgattgtgatggagtttccaaaggaccc

SEQ ID NO: 262731 - DNA, 449 bp, Glycine max
  unsure (1)..(449): unsure at all n locations
tgacgatggaggctcagagctcacattctatgctctcttaaaagcctccattttctccaaacattggttacctttctggagaagattcaatgttgaacctaagtcaccagaagcttttttcggtggccataaatgtagcaatagttgcactgagtataagccagcatgggtatttatcaagaatttgggcaaagacatgtaaagtgagattgaatcagccgtagcaaggggcgaggttccagataatgcgatgaatcagcacagaagattctcagaattgaatcccaaaaataccaagcagaatcatcaacctatcgtgcagataataattgatggaagagacactaatgctgtanatgaagacggatttcaactgccaagagtcgtatacatggcacgcgaaaaacgacacaactaccctnaccacttcaaagctggagcggttaatg

SEQ ID NO: 262732 - DNA, 356 bp, Glycine max
caacctttctcttcctcctcactcaaacttcccctctctacgccgttcctcccaaatggatgcaccaatggagttttggggtgttgaggttaaggttggtcagaccgtgacagctgacccaatggatcctgtggattcatacatacacatatctcaggttgcgctcggagaggcgaaaaaggagaaacctaatgagtctgtggttttgtatttgaaagttggtgaacagaagattgtcttgggaaccctatctagggatggcattcctcatctatcgttggatttggttctggactccgattccgagctttcccacacttcaaaaagtgccagtgtctttttctgtgggtcagagt

SEQ ID NO: 262733 - DNA, 386 bp, Glycine max
cccacgcgtccggattagactcccgaagaaccggaccaggctatggctgggaacgttcgacaccgccgaggaagccgctctggcgtacgacaaggccgcgtacaagctccgaggtgacttcgccaggctcaacttccccaacctccgacaccagggttcctccgtcggtggtgacttcggggagtataagcctcttcattccgccgttgacgccaagcttcaggccatttgcgagggcctggctgagctgcagaaacaggggaagaccgagaagcctccgaggaaaacgcgatccaaactcgcttcttcgccagagaacgacaacaacaacgacaacaactcttgtaaggtcgaaactgcttcctctctctgaaggtcttcgccgt

SEQ ID NO: 262734 - DNA, 359 bp, Glycine max
cccacgcgtccgcccacgcgtccgtccacgcgtacgcccacgcgtacgctctctcacaataaccactaattctcccaactcaatttctctctcaaccggcccaatttagcataagcccagcatggccaccgcaacagcagcagccacctcgtccttcatggggacgcgcctcctggaggcccactccggggcggggcgggtgcaggcccggttcgggttcggcaagaagaaagccgccgtcccgaagaaagtttccagggggtcgggctctagctccgataggcccctgtggtatccgggcgccaaggcgctcgagtacctggatgggagccctgtcggagactacggattcgacccat

SEQ ID NO: 262735 - DNA, 400 bp, Glycine max
accacgcgtccgtcttcctgaacaaagaatatggaagcctcttttcatcactgatgacaggattgtatctggcatttaaactcacgtctgttgttgaaaaggtgcaatccttctttgctgcagtgaaagcattgtcgcgtaaagaaatgcactatggggcttatgcaacatcagagcacgtcaatgcatctggtgatctttgtgctatttgccaggagaagattcatgcttccatcttactacgttgtaaacatattttctgtgaagattgcgtatcagagtggtttgagagtgataggacctgcccattgtgcagggcttttgcaaaacccgcataccttatgtcatttggggatggctatactagcttgtttcttcagctattctgaagtcgtctata

SEQ ID NO: 262736 - DNA, 444 bp, Glycine max
cttctgtctatacactctatcttctcttcacgagctcttgagattttaaaaacccattaaggggggatctcaccgcgagtttttgcgcaatgccgttactatgaatctagcaccgaattagatttgatacactatctacaaccacatcgctagagataaaaacccttacttcttcaaatggagtcggtgccgtcaactccgcacaggggtggcacatactctcccaagacggcagagtatctgatctgaactttcttcggcgacacgcccttcccactctcatcgaagttctggcagacattgctggagctttatctcaatgatcaatggtccactcagcgtcgttaacacgcttgctagctattaaccaaaaacaattgtcacaccatgcatcttgcgaagattttgttacatctagcgtgctgcttgcaaaagtacatgtct

SEQ ID NO: 262737 - DNA, 450 bp, Glycine max
gcacaaagcacttgttactagactggttgaggttaaaactggctctacagctctagcaaccggtgatggagcaaacgatgcgggaatgcttgaacaatgccacttcgctgtatgtatcaccgaattagatttgatacactatctacgaccacatcgcgagagaaaaaaacccttacttcttcgaatggggtcggtgccgtcaacgccgcgcaagggtggcgcatactctccggagacggcggagtatctgatcggaactttcgtcggcgacacgcccttccccctctcatcggagttctggcagaaattgctggagcttcctctcaatgttcaatggtccactcagcgtgttcaacaagcttgcgagctattagccaaaaacaattgtcacaccaggcatcttgcgaagattttgttccatctagcgtgctgcttgcaagagtacatgtc

SEQ ID NO: 262738 - DNA, 449 bp, Glycine max
  unsure (1)..(449): unsure at all n locations
cataacacaaagcacaaagcaaagctcatccttgagttaaaaaatggcagcagcttcttccatggctctctcatccccatccttggctggcaaggccgtgaagctgggcccatcaaccccagaagtgggaagggtgagcatgaggaagaccgtcaccaagcaggtctcctcaggaagcccatggtacggcccagaccgagtcaagtacttgggcccattctctggcgagcccccgtcctacctaaccggtgagttcccaggcgactacggctgggacactgctgggctttccgcagacccagaaaccttcgccaagaaccgtgaactcgaagtgatccactccaggtgggccatgctcggagccttgggctgcgtcttcccggagttgctgtcccgcaacggngtgaagttcggagaagccgtgtggttcaaggccgggtcccagatct

SEQ ID NO: 262739 - DNA, 452 bp, Glycine max
cttctccctctacactctctgttctcttcacgagctcgcgagattttaaaaacccattccgttttgatctcaccgggagtttttgcgcaatgccgttaccctgaatctagcaccgaattagatttgatacactatctacgaccacatcgcgagagaaaaaaacccttacttcttcgaatggggtccgtgccgtcaacgccgcgcaagggtggcgcatactcttcggagacggcggagtatctgatcggaactttcgtcggcgacacgcccttccccctctcatcggagttctggcagaaattgctggagctttctctcaatgttcaatggtccactcagcgtgttcaacaagcttgcgagctattagccaaaaacaattgtcacaccaagcatcttgcgaagattttgttccatctagcgtgctgcttgcaagagtacatgtcttcttctgg

SEQ ID NO: 262740 - DNA, 341 bp, Glycine max
cgataatgcaggagagaagaagaaaaagagaaagaagcagggagagcaggaagaatctcctgaaatgccaagcaagaagaaaggcaaaaaaaagaaaagtgaggactaaagtgaagtcatctactaatcaatcctgtggtgaatgacaaccatttttgtatactcctggcagctcagtagtttgtttggtataatttttgttttcatttttatgcattttgtagctttatacatcctttattattatttaatgggattcgttccatctttcgggacttgagtggataatttgatgcaatcatgtttatgaatggaagatggtggtgcgctaccttttttgt

SEQ ID NO: 262741 - DNA, 345 bp, Glycine max
gataaggaaaatgggagtctcaggcaacaatgaagttttagtgacaacaaaggtagttgttgactatgatagagcaagtgagctcaaagcttttgatgacacacaagatggtgttatgggacttactgatgctggtgtcacaaagatccctcttatattccataaccccaaaaattctcatcatgatgaatctgatgatggttcaggtagcacacaactcagtgttcctttcatagaatcttgtggtggttgctgaagatccagctacaaggaaagtggtggttgagaaaatcagacatgcatgtgagacatggggttttttccaagttgttaatcatggaatac

SEQ ID NO: 262742 - DNA, 218 bp, Glycine max
aacacacacaaacagaggctacgtacgatcaaattaattaagatggcggaagtgaggaacaaacaagtggttctgagggactatgtgagtggttttcctaaggaatccgacatgaacatagttgaaggaaccacaatattgaagcttccacaaggttccaatgatgtgcttctaaaaaatctctacctttcctgtgacccttacatgagaatgctcat

SEQ ID NO: 262743 - DNA, 461 bp, Glycine max
agaaaatgccgtctagtaactgggggtacagacaaccatttaatactttgggatttaaggcccctgggatggacaggtaagttttatgagaaggtatgtgaaacatgtcatattactttgaataaaattgctatttttggcgacaatggaactataattcctggaggtgtaagagtaggtacccctgccatgacgtcaagaggatgtctggaagctgattttgagacaatggctgaatttctcattagagctgcacaaattgcaagcatactgcagagggagcatgggaaattgcagaagacaacattgaagggacttgagagccatagggacattgttgagctccgggcacgggttgaagcttttgcaactcagtttgccatgccgggttttgacatttgaacatgaagtggctggtgaattgccattattgattatttacatattcaacaatggtgggt

SEQ ID NO: 262744 - DNA, 419 bp, Glycine max
gggttttcgctcaccggtgtgcagtcgagcccccgaagaaaaagcgaaaatgccgtcgcacgggacattcagaatcaagaagaagttggcgaagaagatgaggcagaacaggcctatcccctactggatccgcatgaggaccgacaacaccatcaggtacaacgcgaagcgccgtcactggcgtcgcaccaagcttggattctgaggtgcttgctttgcctcggttctgtttatccaattaattagtgttttattttcttgagccaaaaacaatgctttggagattttaatattttgcattttgttccaagactatattgtgtaaggaacttattgtagttcagactaatggtggtgttggtcacctttttttaaaagtattttggaaaaaaaaaaaatacaaataaaattatcaatga

SEQ ID NO: 262745 - DNA, 450 bp, Glycine max
cccacgcgtccgattcattcaagattcagcaagtgcgttttggaagcagagaccgaaatacttcgagatggcccgtacaaagcaaactgctcgtaagtcaactggaggaaaagctcccaggaagcagcttgcaaccaaggctgcacgtaagtctgcaccaacaactggtggtgtgaagaagcctcatcgttatcgccctggaactgttgctcttcgtgagattaggaaataccagaagagcactgagctcctaatcaggaagcttcctttccagaggttggttcgtgaaattgcccaggatttcaagactgatctgcgtttccagagccatgctgtgcttgcattgcaagaggctgctgaagcataccttgttgggctctttgaggacactaacttgtgtgccattcacgccaagcgtgtgactattatgcccaaggatattcagctggc

SEQ ID NO: 262746 - DNA, 460 bp, Glycine max
cccacgcgtccggcagccaccactcagagccagcgagtgatgatcgcttcgccgcagtaatcgccggaagcgaattcgccgtttccctgccgagatctctcaatctccgacgactcagatacctctattaattttcctccggttaggttgttagggtataaatagtacgtagtttttccttatttatggcttcggagaatgtgaagaccggggattccgccgtcaccaccatcgtcaatctcgccgaggaggccaagctcgccagagaaggcgtcgtcaaagctcccagctacgccctcgccagcatctgcaagtcgctcgtcgccggtggcgtcgccggaagagtgtcacgtactgcagttgctcctctggaacgattgaaaattttgctgcaggtccagaatcctcataacattaaatacaatggaacagtacaaggcctaaaatatatatggaggac

SEQ ID NO: 262747 - DNA, 452 bp, Glycine max
ctctctttttctatctccttctttctttgtttctgtgtgttcgagattgaagaagatgatggaggctgaacccgagggcatggcccatcatgcgaacctacactacgcacagaaacagcttcaaccctacatgatgatgccgacgcagactcagcccgcttatatgtgggccacatctgtccaaccttcgatccagtcggcggcttcttcacaacgcagcagctccgatgaagtccgtaccctctggatcggtgatttgcaatactgtatggacaaaaattatctctacacctgtctggcacacaccggcgaggtgacttcatgtaaagacattcggaacatactgactatgtcaatcggagggatatcggtttatcgagtttactagtcgtgctaaagctgagagagtgctttaaacatacaatggcaccattatgccaaatgcttggcag

SEQ ID NO: 262748 - DNA, 222 bp, Glycine max
tgactctgttaccaagagcaagtttgacaacttgtacgggtgccgtcactctctccctgatggtctgatgagggctactgatgtgatgattgctggaaaggtggctgttgtggctggatatggtgatgttggcaagggttgtgctgctgcattgaagcaggctggtgctcgggtcatcgagactgagattgaccccatttgtgcccttcatgctctcatgga

SEQ ID NO: 262749 - DNA, 455 bp, Glycine max
aaaaaactgaattgtgtgaatcgaaaactaaacattgctattgtaaaagttgcaaatgcttataaacaccctaatattattgcagaatttatagctggacaattaaagaatagagtttcgtttcgtaaagcaatgaaaaaagctattgaattaactgaacaggcgggtacaaaaggagttcaagtacaaattgcaggacgtatcgacggaaaagaaattgcacgtgttgaatggatcagagaaggtagagttcctctacaaaccattcgagcgaaaatcgattattgttgctatacagttcgaactatttatggggttttagggatcaaagtttggatattttctaaataaagaaaaatatattattctttatcttaaatgtgctatattttatcttaaatgtgctatatttttttttagaaaacaaaaaatgaaaaattactcgatttttattt

SEQ ID NO: 262750 - DNA, 449 bp, Glycine max
ctctctttttctctctccttctttctttgtttctgtgtgttcgagattgaagaagatgatgcaggctggacccggcggcatggcccaacaagcgaaccaacaatacgcacagcaacagcaacaaccctacatgatgatgccgccgcagcctcagccccctcagatgtgggccacatcggcccagcctccgtcccagtcggtggctcctccgcaacccaccagcgccgatgaggtccgtaccctctggatcggtgatttgcagtactggatggacgaaaattatctctacacctgtttggcacacaccggcgaggtggcttcagttaaagtcattcggaacaaacaaactagtcaatcggagggatatgggtttattgagtttactagtcgtgctggtgctgagagagtccttcaaacatacaatggcaccattatgccaaatggcgggc

SEQ ID NO: 262751 - DNA, 417 bp, Glycine max
  unsure (1)..(417): unsure at all n locations
ggaaaaggagggtgaagaggagactgtagacacagctgctgcaaagaagaagaagaagaaggaggaaaaggagaaggagaagaaggcagctgcggcggcagcagcagcagcagcagcagtagcaggaactgtaccagaaaatgaaacagcagaagataaagctgaggtaattgaaccaaagaagaatgattcaaaggctaaaaaagcagctgataagaaagtgccaaagcatgttagggagatgcaagaggcactagctcgaagacaagaagctgaagaaaggaagaaaagagaagaggaagaaaggttaaggaaggaggaagaggagcgacgtatgcaagaggaacttgagagacaagcagaagaggctagacgtagaaaaaaaaatagaaaaacataaanaatgaaactatctag

SEQ ID NO: 262752 - DNA, 294 bp, Glycine max
  unsure (1)..(294): unsure at all n locations
gttgaaacccgagctgctgatttgcttgacaagctgcggtatatacctagtcgtgaagctctggcacttcgagctgaggttgcttccatggcttcaaatttgaagcgtcagagatcttcgctgaacaaacggataatgaagatcaacgagttaggggtcctgtgtgattgattaaatggacaagtgtggcccttttttgatgcaccccaagtttaattgaataaatcttccggttaaagtaaatggtctacgtataatgcaaacccatgtnccggggcatctttttttggtttc

SEQ ID NO: 262753 - DNA, 362 bp, Glycine max
tctttcctcaaccttctttcttcttatatatcgaacatggctaagtatcattcaagtgggagaagctcttccatgactgctatagccttcctgtttatccttctaatcacttatacaggcacaacagatgcacaatccggggtatgttatggaagacttggcaacaacttaccaacccctcaagaagttgtggccctctacaatcaagccaacattcgcaggatgcgaatctacggtccaagcccagaagtcctcgaagcactaagaagttccaacattgagcttttgctagacattccaaatgacaacctcagaaacctagcatctagccaagacaatgcaaacaaatgggtgcaagacaa

SEQ ID NO: 262754 - DNA, 327 bp, Glycine max
tcggtcagtctttagagctaaaaatggtctcactctttcatcttagtatgtgttgacatgctggacggggaatgctaaaaccggtacattgttagatgaacatgcatctgaattgccaagtacttctcgtgaatctgtaccagtttgttataacaatttacgacaagaagcaatcaaatatgttgaaaaaagtgcaaaatcaatccaaatctatcatgttgccatgagagctttgaaagaagctgcttagaaagtttgcaccattaaaaattagagttctggaacagccgagggagctacagcaaccaatggaagcaggggtgaatt

SEQ ID NO: 262755 - DNA, 382 bp, Glycine max
gtcagtcttcagagctaaaaatgttctcactcttccatctcagtatgtgttgacatgctggacaaggaatgctaaaaccggtacattgttagatgaacatgcatctgaattgccaagtacttctcgtgaatctgtaccagtttgttataacaatttacgacaagaagcaatcaaatatgttgaagaaggtgcaaaatcaatccaaatctatcatgttgccatgagagctctgaaagaagctgctaagaaggtttgcaccataaaaaatcagagttctggaacagcagagggagctacagcaaccaatggaaagcagggtgaattgcttgtagcagatgaagatgttccaagcaatcaatctgtggcggagaagcaaaagaaa

SEQ ID NO: 262756 - DNA, 298 bp, Glycine max
ggctacttttgattgcttgatgaaaacctatggattcctgacaccagaattctggaaggagaggcgcttctccaaatctccattccaagagtacacagatctactggcaaaaccaacaggaaagactctaatcttggaggaggaaagggtggatgcttgatttgctagttttgctttatggatgttttaggaactttattactttacatactttgttggttctgtgctttacttttggttttgatagacggtatgtctctgtatgcattttgattgtttccaagttttaattgactgc

SEQ ID NO: 262757 - DNA, 335 bp, Glycine max
gcgtacggtcagggttcagagctaaaaatgttctcactcttccatctcagtatgtgttgacatgctggacgaggaatgctaaaaccggtacatggttagatgaacatgcatctgaattgccaagtacttctcgtgaatctgtaccagtttggtataacaatttacgacaagaagcaatcaaatatgttgaagaaggtgcaaaatcaatccaaatctatcatgttgccatgagagctctgaaagaagctgctaataaagtttgcaccattaaaaatcagagttctggaacagcagaaggagcttcagcaaccaatggaagcaagggtgaattgctt

SEQ ID NO: 262758 - DNA, 433 bp, Glycine max
ggcggcgctgtggcggacgcgccggcggtggttgaggagaagacggagttcgacgtggggatggaggaggtgccgagcaacgctcgaatcgcggtgattaaggcggtgagggcattgacgaacctagcgctgaaggaggcgaaggagttgatcgaagggttgccgaagaagttcaaggaagggatttcaaaggacgaagctgaagatgcgaagaagcaactcgaagaagctggtgccaaggttaccattgcttaaacactgtttagctgcagcatatatgttctgcttcttctttggtggttgtagttgagttcaccagtacacttgtatttcatttccattttgtctggatttcaatcctttatttgtaatgaggaaatatgagttcctaattttataataatttttttaatggcgattaagtgtttggttg

SEQ ID NO: 262759 - DNA, 420 bp, Glycine max
ctcacgcgtcctcacgagccgagtcacaatgttattccaacttagcactgtctttttcgcattgtactattttacaagaacacatgattttggtcggacaattcttcatggtcgtgcaaggtatcaagcaactggccgcggatttgttgttcgccatatcaaattttcagagaactacagactctactctcgtagtcattttgttaaagggttggacgttgcgcttttgttgatagtatatcttgcttatggctataatgaaagtggtgcactctcatatattcttttgaatataagcagttggtttatggctctatcctgcttgtttgctccatatttattcaacccatctggatttgattggcaaaaggttgtggaagatttcaaagattggacaaattggctactttaccgatgttg

SEQ ID NO: 262760 - DNA, 399 bp, Glycine max
gagttccagaggttcaaccatacttctcttcttccctttacatccgcactgtttcctctcctacagggataatggttcgcattctgacggaaaatggcggagtggaacgcatggaggagatcatcagggaccatttggaccccatttcaaagcaagtgttggggatctggttggatcattgtgcttgtgccaagcgacaagttggagaggcagaaagagcttatcttaagaaaagggatggtctcattagaaacaagaccattgagattgatcttggttcaagctttcccagattggttggtccagaagtagcaaaccgggtactggatgctatcaaggagtattttacagtctgagatgcaaatttatttggaaattgtggatattctatggattaca

SEQ ID NO: 262761 - DNA, 463 bp, Glycine max
cttgaaggccattgtcagttttgtcacaatgcaattccagctttgcactgtctttttgacattttccttgggtacaagaacacattattttggtcggacaattcttcatggtggtgcaaggtatcaagcaactggccgcgggtttggtgttcgccatatcaaattttcagagaactacagactctactctcgtagtcattttgttaaagggttggaggttgcgcttttggtgatagtatatcttgcttatggctataatgaaggtggtgcactctcatatattcttttgagtataagcaggtggtttatggctctaatcctggtgttgctccatatttattcaacccatctggaattgagtggcaaaaaggtggtgaagaattcagagattggacaaattggctactctaccgaggtggaattggtgttaagggagaagaaagctgggaagcttggtgggaag

SEQ ID NO: 262762 - DNA, 463 bp, Glycine max
  unsure (1)..(463): unsure at all n locations
aaacaaaacaacaacaacaatgggagcacgaaagagactctcttcttccgagcctcatgcttcgtctcctgcaacaaaggaaaacaccacaaccaccaaacccgaacaaaaaccaaccacaacagaccctccaattgcgcctcctaaatggggtcttcttctgaagctctctctcttcttcttgctcccttactcgtatctcctcttccgctactatcccatcgagccggagctccgaagatcgatcctcatcaacgctggaatgagcctcgcgggtctcttcgtcacggtcaagatgaaccccgtcgcgtcccgctacgtccagaagcggaacctctttgggtatgacatcaacaagaagggcacccctcagggaactgtcaaagtgcctgaatcattaggtatagnntgtggtattgtgttcttggttgtggcaatcttgtttcagtattttaacttcaca

SEQ ID NO: 262763 - DNA, 479 bp, Glycine max
cccacgcgtccggactgcccaagatgtatcgacaatgttacggtgcgggcaaaaaaccgtcatgtttctgatcaacaatggtggatacaccatcgaggttgaaattcatgatgggccgtacaatgtgattaagaactggaattacactgggttgattgatgcaatccacaatggtgaagggaaatgctggactgccaaggtgttctgtgaagaggagctagttgaagcaattgccacagccacaggacccaagaaagactccttatgcttcattgaggtgattgttcataaggatgacaccagtaaagaattgcttgaatggggctcaagggtttctgctgccaatagccgtcctcccaatcctcagtaatcttcagaatttatcctatgactaaattgctgcagttgccctttagctctatgaaagtgagaatcatttgagatgatgcccttgtagggaatttacctttgttaatggc

SEQ ID NO: 262764 - DNA, 423 bp, Glycine max
  unsure (1)..(423): unsure at all n locations
cccacgcgtccgcttctccgccacttctgaatctattgaatcaacaatcatgtcggacgaagagcaccatttcgagtccaaggccgacgccggagcctccaaaacctaccctcagcaagccggtaccatccgcaagaacggctacatcgtcatcaaaggccgcccctgcaaggttgtggaagtttcgacttccaaaactggaaagcacggtcacgctaagtgtcactttgttggaattgatattttcactgccaagaaacttgaggatattgtgccctcttctcacaactgcgatgttcctcatgtgaatcgtactgattaccagctcattgatattgctgaggatggatttttgagtctgcttactgaaaatggtaacactaaggatgacctcaagcttnccactgatgagagtctgctcac

SEQ ID NO: 262765 - DNA, 364 bp, Glycine max
  unsure (1)..(364): unsure at all n locations
cttttctactttgagtcttcttgatccttctttttctccttgaactcaaacatggcagatgaggtgggttctgctagatttctggccaagtccatttgggatgagggtcaggattgcacttgctgaaaagggtatcaaatatgagtacaaagaagaggacttgaggaacaagagtcctcttctcctccaaatgaacccggttcacaagaagattccggttctcatccacaatggcaaacccatttgtgaatccctcattgctgttcagtacattgaggaggtttggaatgacagaaatcccttgttgccttctgacccttaccagagagctcangctagattcntggctgattatgttgataag

SEQ ID NO: 262766 - DNA, 370 bp, Glycine max
  unsure (1)..(370): unsure at all n locations
cccacgcgtccgtcaagcattgcatccctcttgatttgtagtttgttttgtgctttagataaagagttctgccaaatcaagaggggttttaagatcatagtgtgtgttttgcaacaatggctaagttctttgctgctatgatcttggcactctttgccatttccatacttcaaacagtggtaatggctgctaatgaacaaggaggccacttgtatgacaacaagagcaaatatggaagtggaagtgtcaagagttaccaatgcccatcacaatgctcgaggagatgtagccagacccaataccacaagccctgcatgtttttctgtcagaagtgctgcangacatgcctgtgtgtgcccccggggtatta

SEQ ID NO: 262767 - DNA, 394 bp, Glycine max
ggagattctgatttgttctctcagatctgagcttaccgtcgccggaatccaactcaacctgggtcggattcttgggtatcatcgcatcgccattcgttttagcctctcaataagagattttagttcgcttcaaattcgaggtttgatttgaagttgaaagttggaatagcttaactgttgtgtaaaacaaccaacacacacgagcatgggaagccaagacaacaacgtagaattgtcatccaattcatttctagcttacaaatctgctaaggtgtttgttgctggtcaccggggtcttgttggctcggccattggtcgcaagctcacccaacttgggttcactaatctagtcttgcgcttccatgccgagcttgatctcactcgacaatctgat

SEQ ID NO: 262768 - DNA, 425 bp, Glycine max
ctccacccacgcgtccgcccacgcgtccgcccacgctttcctcacgcgtccgtctccctctttctagcactgtctctatgcattgttgtctcgctctctgccttccatcacactcggcatttcctttcccaagatactataatatggcagacactgaggatattcaacctcttgtttgtgacaatggaacatgaatggttaaggctggatttgctggaaatgatgccccacgtgctgtgtttcccagcattgtaagtcgtcctcgtcacactggtgtgatggttggcatgggccaaaaagatgcatatgttggtgattaagcacaatctaaaaggtgtattttgactcttaaataccccattgaacattgaattgtgagcaatttgcgatgatatggaaaagaattggcatcataccttctataa

SEQ ID NO: 262769 - DNA, 345 bp, Glycine max
cccacgcgtccgcccacgcgtccgcccacgcgtccgcccacgcgtccgtctccctctttctcgtcactagctctgtgcattcttctctcgctctctgccttccatcacactcggcatttcctttcccaagatagtagaagatggcagacactgaggatattcaacctcttgtttgtgacaatggaacaggaatggttaaggctggatttgctggagatgatgccccacgtgctgtgtttcccagcattgtaggtcgtcctcgtcacactggtgtgatggttggcatgggccaaaaagatgcatatgttggtgatgaagcacaatctaagaaggggtatttgactc

SEQ ID NO: 262770 - DNA, 334 bp, Glycine max
gggaagaatcactcccttatccatttccacacttcaccatggcctcaaccaacgctctcgcttgtcctccattctacgctgtcccaaccgccagtctctgacccgaagagcgaaccataatggaagagtaaattaccggaaaccgaataaccgtttctccgtgaaagcctccgccaaagagattgcctttgaccagcattcccgctctgctatgcaggccggcattgacaagctcgccgacgctgttgggctcactcttgggcccagagggaggaatgttgtgttggatgagtttggaagtcctaaagtggtcaacgatggtgtcaccattgct

SEQ ID NO: 262771 - DNA, 296 bp, Glycine max
ggaagaatcactcccttatccatttccacaccacaccatggcctcaaccaacgctctcgcttgagcctccattctacgctctcccaaccgccagtctctgacccgaagagcgaaccataatggaagagtaaattaccggaaaccgaataaccgtttctccgtgaaagcctccgccaaagagattgcctttgaccagcattcccgctctgctatgcaggccggcattgacaagctcgccgacgctgttgggctcactcttgggcccagagggaggaatgttgtgttggatgagtttt

SEQ ID NO: 262772 - DNA, 114 bp, Glycine max
gaaaaaaaaaaaagccttttactttttttcttttgcatgatttgaatcttgattggaaaagcttcgagttggggtgttttacccatcaattcaattttaagccgtgccttcttc

SEQ ID NO: 262773 - DNA, 344 bp, Glycine max
  unsure (1)..(344): unsure at all n locations
cttttgtactctcattcttcttgatccttcttttacttcttctactctaacatcacacataagganatgttcataaactcctggccacctccaatctatatcaaactcataattacacttacttaacccaatatcaaatcttaatacaaactataaaactcaaactaacaacattccttttatactacaaatgaccccgattcacaaaaagattcccattctcatacacaataactaacccatttaacaatccctcattgaatctcattacatcgatgatttttgccattacacccattacttgtttccttctgacccttatcatacacctcaacctacattct

SEQ ID NO: 262774 - DNA, 114 bp, Glycine max
gaaaaaaaaaaaagccttttactttttttcttttgcatgatttgaatcttgattggaaaagctgcgaattggggtgttttacccatcaattcaattttaagccgtgccttcttc

SEQ ID NO: 262775 - DNA, 290 bp, Glycine max
cttttctactttgagtcttcttgatccttctttttctccttgaactcaaacatggcagatgaggtggttctgctagatttctggccaagtccatttgggatgagggtcaggattgcacttgctgaaaagggtatcaaatatgagtacaaagaagaggacttgaggaacaagagtcctcttctcctccaaatgaacccggttcacaagaagattccggttctcatccacaatggcaaacccatttgtgaatccctcattgctgttcagtacattgaggaggtttggaatga

SEQ ID NO: 262776 - DNA, 311 bp, Glycine max
cccacgcgtccggcgaaaacccccaactccaacctctgttcatcgtctaccgcgctttctttggaacgagaactatgattaagctttttaaagtaaaggaaaagcagagagaacttgcagaaaatgcaagtggcggaccacctgttaagaagcaaagtgctggagagttgcgtcttcacaaagatataagtgagctgaatctaccaaaatcatgtaccatgcaattccccaatggcaaagatgatctgatgaactttgaagtttcaattcgacctgatgatggatattacttaggtggcacatttttggtt

SEQ ID NO: 262777 - DNA, 284 bp, Glycine max
  unsure (1)..(284): unsure at all n locations
tctaaacaactctttctcttcttccttctctctttgttctccctcacgtanatcgacaatagcgganagctaaactttaactttccaccctcatatcaaccatctcctcattctcatcatcaacaccttctactccaacaactatattttccttctttaactcatcatcaactcctcctatactttttacaacattctattttatagttttacacataatatcaatctctattctcatccacattatttcattcatattatttcacacaatactatcaatacac

SEQ ID NO: 262778 - DNA, 441 bp, Glycine max
cctaagcaactgtttctcttcatccttcgctttttgctttccctctcgtatatcaacaatagcgtcatgttaaacatatcctttacacgctcatatcaaccatcttctcagtctcatcatcaccaccttctactccaacaagcacactttccctcttgaactcatcaaccactccttccatactcttgccaaaattctccaataaagcctaacatataacatctacctgctattatcacatcctaatgctcttacattttcattcatatacgactcacattactatcaccattattaaaaaccttattttcatccccaaccactaactcattatattattccttccaccaatctcacccacataccttaatattaacctcaatcttctttttaaaaactaaaaataatactatttgactcattttttaaaattataatata

SEQ ID NO: 262779 - DNA, 444 bp, Glycine max
cctaaacaactctttctcttcttccttcgctcgttgttctccctcgcgtagatcgacaatggcggagacagagacgtttgctttccaggctgagatcaaccagctcctcagtctcatcatcaacaccttctactccaacaaggagattttccttcgtgaactcatcagcaacgcctccgatgctttggacaagattcgatttgagagtttgacagataagagcaagctcgatgctcagccagagttgttcattcatattattccagacaagactaacaatacactgaccattgttgacagtggtattggcatgaccaaagctgatttggtgaacaacttgggtaccattgctagaactggtaccaacgaattcatggaagccttggctgctggtgctgatgttagtatgattggacaatttggtgtgggggtctactctgcata

SEQ ID NO: 262780 - DNA, 304 bp, Glycine max
  unsure (1)..(304): unsure at all n locations
ctttctcttcttcctcctctcttcgttttccctcncgtaaatctacaatagcggactgacaaacttttactttccacgcgcctatcaaccatctcctcattctcatcatcaacaccttctactccaacacagagattttccttcttgaactcatcatcaacacctcctatactctttacaacattctattttataattttacacataatatcacactctatactcatccacagctgttcattcatattatttcacacaacactaacactacacttaccataccttacaccactattttcattac

SEQ ID NO: 262781 - DNA, 278 bp, Glycine max
cctaaacaactctttctcttcttccttctctcttcgttctccctcacgtagatctacaatatcgcatgcttagactataactttccacgctcatatcaaccatctcctcattctcatcatcaacaccttctactccaacaacgagattttccttcctgaactcatcatcaacacctcctatactttttacaaaattctattttaaaattttacacataataacaaactccatactcatccccaatttttcaatccatatatttccaaacaaaactatc

SEQ ID NO: 262782 - DNA, 437 bp, Glycine max
gttgccgggctctaccgtggtttcaacatctcatgtgttggaatcatcgtgtatcgtggtctgtactttggattgtatgattctgttaaaccagttgtcctcacagggtcattgcaggatagcttttttgccagctttgcccttggatggctcatcaccaatggtgcaggtcttgcatcatacccaatagacactgttagaagaagaatgatgatgacctctggtgaagctgtcaagtacaagagctccttggatgcattcacacagatcctcaagaatgagggtgccaagtccttgttcaagggtgccggtgccaacatcctccgtgccgttgccggtgctggtgtgcttgctggttatgacaagttgcaggttcttgtgttcggcaagaagtacggctctggtggggcttaagttctaatgctgagtcagtacta

SEQ ID NO: 262783 - DNA, 339 bp, Glycine max
gattcccgggtcgacccacacgtacggccacgcgtccgtttcgataagacaatactacttaatggtacttcttctataatactagacaggtttacaacttaaacagttaataaacattagtttgaataacaacatgttatttctaaaggtatatttgtttcttcttttccttttattggttacaacttcacgcatttaactgatcttcttcaaaagttatcaatcatcaatttatgattattattaatattcaaaaccattctaatatctcttcattttcacactctcaattccttcttaattcaacttttaaaattttaaacttaaatcattccactt

SEQ ID NO: 262784 - DNA, 200 bp, Glycine max
tctctaccgttgtttcattatcttttttgttggaatcatccattatcgtgatctggtctaattattgtatgagtctgttaaaccaattttcctcacatggtcatttcatcataacttttttgccatctttgccctttgattgctcatcaccaattactcatgtctttcatcatacccaatatacactgttataataaaaa

SEQ ID NO: 262785 - DNA, 394 bp, Glycine max
cccacgcgtccggactgcccaagatgtatcgacaatgttacggtgcgggcaaaaaaccatcatgtttctgatcaacaatggtggatacaccatcgaggttgaaattcatgatgggccgtacaatgtgattaagaactggaattacactgggttgattgatgcaatccacaatggtgaagggaaatgctggactgccaaggtgttctgtgaagaggagctagttgaagcaattgccacagccacaggacccaagaaagactccttatgcttcattgaggtggatggtcataaggatgacaccagtaaagaattgcttgaatggggctcaagggtttcttgctgcaatagccgtcctcccaatcctcaggtatcttcagaatttatcctatgacta

SEQ ID NO: 262786 - DNA, 469 bp, Glycine max
  unsure (1)..(469): unsure at all n locations
cgcgtcgctgctccgtaccagtttcactgcataaatttgagagaaaactctgcaaacgtgttggtttatcaggacctccttacaggtgatgagcttctctcggactccttccgttacaatgaaattgagaatggaatgctgtgggaagttgaggggaagtgggttgttaagggagcagttgatgttgacattggtgcaaacccttctgctgagggtggagaagatgagggagtcgatgacgcagctgttaaggttgttgacattgttgatacattcagacttcaggagcaacccgcttttgataagaaacagtttgttaccttcatgaagaggtttatcaagaatttgactcccaagctcgatgcagagaaacaagagttgnttaagaagcacattgagggagcaactaaatacctgctctctaagattaaggatttccagttttttggtggggagagcatgaatgatg

SEQ ID NO: 262787 - DNA, 396 bp, Glycine max
ctgctccgtaccagtttcactgcatatatttgagagaaaactctgcaaacagtgttggtttatcatgacctgcggacaggtcatgagcttctctcggactccttccgttacaatgaaattgagaatggaatgctgtgggaagttgaggggaagtgggttgttaagggagcagttgatgttgacattggtgcaaacccttctgctgagggtggagaagatgagggagtcgatgacgcagctgttaaggttgttgacattgttgatacattcatacttcaagagcaacccgcttttgataagaaacagtttgttaccttcatgaagaggtttatcaagaattttacttccaagctcgatgcatagaaacaagaattttgttaataagcacatttatgg

SEQ ID NO: 262788 - DNA, 428 bp, Glycine max
ctcttctctctctctcggatttcttgcgcggtttatcatgggggatagtcagtatgcgttttctctcaccacatttagcccttctggaaagcttgttcagattgagcatgctttgacggctgtcgggtctggacaaacgtctttgggaattaaagctgcaaatggagttgtcattgctaccgagaagaaattgccatctatattggttgatgaagcatcagtccagaaaattcagttattaacaccaaatataggtgtcgtatatagtggcatgggtcctgattttcgagttttggttcggaaaagcaggaaacaagccgagcagtatcaccgtttatataaagaaccaattcctgtcactcaacttgtcagggaagttgccgccgtaatgcaagaatttactcaatctggtggtgttaggccttttg

SEQ ID NO: 262789 - DNA, 359 bp, Glycine max
  unsure (1)..(359): unsure at all n locations
ggcggcgctgtggcggacgcgccggcggtggttgatgagaagactgagttcgacgtggtgatcgatgaggtgccgagcaacgctcgaatcgcggggattaaggcggcgagggcattgacgaacctagcgctgaaggaggcgaaggagttgatcgaagggttgccgaagaagttcaaggaagggatttcaaaggacgaagctgaagatgcgaagaagcaactcgaagaagctggtgccaaagttaccattgcttaaacactngttagctgcagcatatatgtgctgcttcttcttttgttggttgtagctgagttcaccagtacacttgaatttcatttccattatgtctggatttcaat

SEQ ID NO: 262790 - DNA, 422 bp, Glycine max
ggctgctctgtgtctgacgcgccggctttggttgatgagaagacatagttcgacgtggtgatctatgaggtgcctagcaactcttgaatcgctgtgattaatgcagcaagctcattcacgaacctagcgctgaaagacgccaacgagtatatctaatggttgccgaagaagttcaagtaacggatttcaaaggacgaatctgtagatgcgaaaaagcatctctaagaaactggagccaatgtcaccattgcttaaacactgtatatctgcaacatatatctgctgcttctgcttttgttcgttgtagctgagttcaccactacactgatatctcattatcattatgtctggattccaatcctctatttgtcatgaagaaatatgacttcttatatgaatattatcattcttaatgcgtatga

SEQ ID NO: 262791 - DNA, 413 bp, Glycine max
aattcccggggggacccactcctggcggcactcttgcggacacaacagttcttgctaatcgcaaccctaataagaagaaggagagcttcaagcgagtgacatccaccagccatgggtcgtatgcacagccgcggtaagggtatatcctcttctgctttgccctacaaaaggacaccccctagctggctcaagatctcttcgcaagatgtggaagaaaatatctgcaagtatgcgaagaagggtctgaccccgtctcatattggtgtcattcttcgagattctcacggtattgctcaggtcaacagcgtcactggcagcaaaatccttcgcatcctcaaagctcacgggcttgcgcctgaaattccagaggatctttaccatttgattaagaaggcagtttcaattaagaagca

SEQ ID NO: 262792 - DNA, 301 bp, Glycine max
gttaatctttccggccttgacctctctaaactggatttatcttatgttgatttcaggtatgcttgtcttaaaaacgtgtttttttcacgagcaaaccttcaatgtgcaaagtttcgagatgttgatgccgagggctccatctttcacaatgcaactttgcgtgaatgtgaatttactgcggcaaatcttcgtggtgctttattggctggtgcatgccttcagagtgcaaatctacaagatgcttgcttagtagactctagcttctgtggagcagatctgcgtactgcacatctacagaatg

SEQ ID NO: 262793 - DNA, 478 bp, Glycine max
accggtccggaattcccgggtcgacgacgcgtccgcccacgcgtccgcccacgcgtccgcatggaagttgtggaagttgttgggcgttctcgacggtggccacagtggaagcaataaacaagatagtgacagggaagtttgtgtccttatctgaacaagaacttgtggactgtgacagagcctacaatgaaggatgcaatggtggccttatggactatgcattcgaattcatcattcaaaatggaggcattgacacagacaaagattacccataccgtggctttgatggcatctgtgatccaactaagaaaaatgcaaaggttgtgaacattgatgggttcgaagatgttccaccgtatgatgagaatgccttgaagaaagctgtcggtcatcaacccgtaagcattgctattgaagcctctggcagagatttgcaactttatcaatcgggtgtatttactggtaaatgtgggacaag

SEQ ID NO: 262794 - DNA, 428 bp, Glycine max
atttgaaggttgttttgtgcttatagataaaagttctgccaaatcaagaggggttttgagatcatagtgtgtgtgtgtgtgttaaacaatggctaagttctttgctgctatgatcttggcactcattgccatttccatgcttcaaacagtggttatggctgctaatgagcaaggaggccacttgtatgacaacaagagcaaatatggaagtgggagtgtcaagagataccaatgcccatcacaatgctcgaggagatgtagccagacccaataccacaagccctgcatgtttttctgtcagaagtgctgcaagaaatgcctgtgtgtgcccccggggtattatggtaataaagctgtgtgcccttgctacaacaactggaagaccaaggaaagaggacccaagtgcccttgaacttcaactcatcaaa

SEQ ID NO: 262795 - DNA, 306 bp, Glycine max
tgtgtgtgtcctaaacacaagctaagatctcttctgctattatcttggcactcattgccatttccatgcttcaaacactggttatggctgctaatgagcaatgatgccacttgtattacaacacgagcaaatatacaattgtgagtgtcaagagataccaattcccatcacaatgctctacgagatgtatccagacccaataccacaagccctgcatatttttctgtcagaagttctccatgaaatacctgtttgtgccccccatgtattatggtaataaaacattgtgcccttgctacaacaact

SEQ ID NO: 262796 - DNA, 420 bp, Glycine max
ctgagttgcaagattcacttcaaattatgcgtttcgctgatcggttcctcatcagggcaaacgacgtcgcagatcatcgcaattccttgattatttccttttgttgatacgcggaatcgcgcacacggtgctggtgtgtgcactgaggtagaaagaagaagattgaattgtaaacagcatgaattaccttcttggagctttcaagcctgcatgtaatgtcttgatcacgtttaatgatgggaagaaccggaagcaggttccgtttaaaaaagaaaatggtcaaatggtcacagtcccacttttccaaagtcaagaaaacattggtgggaagattacaatagaaccaatgcaagggaagaagattgatcacaatggtgtaaaagttgagctccttggacagatagagatgtactttgacag

SEQ ID NO: 262797 - DNA, 359 bp, Glycine max
cgcaccagtttcaccgcacgaatatcttgttgtttggagcgatccgagaaaaactgtgtaaacatgttggtttaccaggacctccttacaggtgatgagcttctctctgactccttccgttacaaggaaattgagaatggaatgctgtgggaagttgaggggaagtgggttgttaaaggagcagttgatgtagacattggtgcaaacccttctgctgagggtggaggagaagatgagggagttgatgatgcagctgttaaggttgttgacattgttgacacattcagacttcaggagcaacccgcattcgataagaagcactttgttaccttcatgaagaggtttatcaagaatttgac

SEQ ID NO: 262798 - DNA, 374 bp, Glycine max
cggggcggcccacgcgtccgaagaatcaaagaaaggggtggtggctgcttcgaaagcttaataatttgtttatttcgagaacatcatagttttcgcagcagcaaactaacaaattactcatatcatataataagatggcccgttctctctcgcaagccaaacgtattggtgtccttgttgctcaatctatctccctaattcccgttcatcggcgaggttacgcagtggcatccgatgtatcggtaagagttggattgggtaatattgggcgaaggaatggaatcgtgggaggtgtagaagagaagcctgatacaagagatggttcaaaagcctactcaactgattgggccccagacccagtaacaagttactat

SEQ ID NO: 262799 - DNA, 440 bp, Glycine max
actcggttctgaattcccgggtcggccgacgcgtccgcgcaccagtttcaccgcacgaatatctttttgtttggagcgatccgagaaaaactctggaaacatgttggtttaccaggacctccttacaggtgatgagcttctctctgactccttccgttacaaggaaattgagaatggaatgctgtgggaagttgaggggaagtgggttgttaaaggagcagttgatgtagacattggtgcaaacccttctgctgagggtggaggagaagatgagggagttgatgatgcagctgttaaggttgttgacattgttgacacattcagacttcaggagcaacccgcattcgataagaagcagtttgttaccttcatgaaaaggtttatcaagaatttgactcccaagctcgatgcagagcaacatgagttgtttaagaagcaca

SEQ ID NO: 262800 - DNA, 388 bp, Glycine max
cccacgcgtccggagggctcagaggatcttcgatgcgagtagggaccggtcgttgcctgtgtttggtgttggagttgtgtgctattgatgagagtgccgtgttgccgattccttctaatgaaatggaggaagcggttcacgttgatagtgaggttgtgtccattttggccccaccaaggaaggagttgcatattgatcctattgagaccgtttattcctcggattctggtgatgggaaggagaggataaccaaggtagtgaacacagtgattgatccaactggaagggaggatgtattgctctgtctgcgaatgttggcgctacaaaaggttgcttctgaatttgggtataacaggatcattctggggtcatgcatttcgaggattgc

SEQ ID NO: 262801 - DNA, 416 bp, Glycine max
gttgtgtgcaacccattggggaagtctggaggtgccctcatccagcaattaatggtggtgacttttgggtcactagctaattcaaccgcatacttgtgaggagtgcttctgctgattgattctgcctgtctagcatctgcaaaatgcttggatccccaatttactgcattgcgtaaagaggaagaactcgagaacgatatggaacgagcagtcgacgtcaagataccagtggtggctgagactgagagtgtaaatggtactcttgcatctgattcaccactgaattcatactcaggtgactcctcaagcagtccatctgaatcctcaactgcttacaattaaaatgtgccttctttctgtgtgaaattgcctcacagaatgagcacattgatctcttttgagagcagtgataggtg

SEQ ID NO: 262802 - DNA, 322 bp, Glycine max
acctgtccgaattcccggctcgacccacgcatccggttgcgtgcaacccattgacaaagtctggatgtcccctcatccatcaatcaatgagattgacttttgggtcactagctaattcaaccccatacttgtaacgattgcttctgctaatcaattctgcctatctagcatcttcaaaatccttgaatacccaatttactgcattgcgtaaagaggactaactctagaaagatattgaactagcaatcgactacaagataccaatgattgctgagacttagaagtgaaattgtactcttgcatctgattcaccactgaattc

SEQ ID NO: 262803 - DNA, 233 bp, Glycine max
tgtgatttcagtgatttatcgctgtgcacttgatctcatcatcatgcgcagctttaaacgaagaagatgccgatcctaaacatcgccgtcagaatgcctgaacaggcgactcaccccgacacgttgaaggcagctcttgcttaattcatctcaaccttcatcttcatgttcttctgctcacgcttcggcatcgcctacaacaagctcacccacaacaagtctgacacccctgc

SEQ ID NO: 262804 - DNA, 429 bp, Glycine max
atttgaaggttgttttgtgcttatagataaaagttctgccaaatcaagaggggtttgcagatcatagtgtgtgtgtgtgtgttaaacaatggctaagttctttgctgctatgatcttggcactcattgccatttccatgcttcaaacagtggttatggctgctaatgagcaaggaggccacttgtatgacaacaagagcaaatatggaagtgggagtgtcaagagataccaatgcccatcacaatgctcgaggagatgtagccagacccaataccacaagccctgcatgtttttctgtcagaagtgctgcaggaaatgcctgtgtgtgcccccggggtattatggtaataaagctgtgtgcccttgctacaacaactggaagaccaaggaaggaggacccaagtgcccttgaacttcaacttcatcaaa

SEQ ID NO: 262805 - DNA, 406 bp, Glycine max
  unsure (1)..(406): unsure at all n locations
attcccggctgcggcccacgcgtccgatttgaaggttgttttgtgcttatagtattaagttctgccaaatcaagaagggttttgggatcatagtgtgtgtgtgtgtgttaaacaatggctaagttctttgctgctatgatcttggcactcattgccatttccatgcttcaaacagtggttatggctgctaatgagcaaggaggccacttgtatgacaacaagagcaaatatggaagtgggagtgtcaagagataccaatgcccatcacaatgctcgaggagatgtagccagacccaataccacaagccctgcatgtttttctgtcagaagtgctgcaggaaatgcctgtgtgtgcccccggngtattatggtaataaagctgtgtgcccttgctacaacaactgga

SEQ ID NO: 262806 - DNA, 398 bp, Glycine max
attcccgccgcgacccactcctacgtccacgcttccttttccttatcgttatctgctccctcaaatcaatatttgttttcgacatcatattatgtgtgtgtgtgttaaacaatggctaatttctttgctgctatgatcttgtcactcattgccatttccatgcttcaaacagtggttatggctgctaatgagcaatgatgccacttgtatgacaacaagagcaaatatcgaagtggcagtgtcaagagataccaatgcccatcacaatgctcgaagaaatgtaaccagacccaataccacaagcccttcatgtttttctgtcaaaagtgctgcaagaaatgcctgtgtgtgccccccttgtattatggtaataaatctgtgtgcccttgctacaacaa

SEQ ID NO: 262807 - DNA, 419 bp, Glycine max
ggcggcgctgtggcggacgcgccggctgttgttgaggagaagacggagttcgacgtggtgatcgaggaggtgccgagcaacgctcgaatcgcggtgattaaggcggtgagggcattgacgaacctagcgctgaaggaggcgaaggagttgatcgaagggttgccgaagaagttcaaggaagggatttcaaaggacgaagctgaagatgcgaagaagcaactcgaagaagctggtgccaaggttaccattgcttaaacactgtttagctgcagcatatatgttctgcttcttcttttgttggttgtagttgagttcaccagtacactgtaatttcatttccattttgtctggatttcaatcttttatttgtaatgaggaaatatgagttcttatttttatattaatttttttaatgcgta

SEQ ID NO: 262808 - DNA, 376 bp, Glycine max
ggcggcgctgtggctgactctccggctaggttgaggagaagactgagttcgacttgttgatttataaaggtgccgagcgagcgctcgaatcgctgtgattaaggctgtgagggcattgactaacctagctctgaaggatgctaaggattttatcgaaggttttccgaataagttcaaggaatggatttcaaaggactaatcttaagattctaataatcaactctaataatctggttccaaggttaccattgcttaaacactgtttagctgcatcatatatgttcttcttcttcttttgttggttgtatcttaattcaccagttcactgtaatttcattttcattttgtcttgatttcaatcttttattttttaata

SEQ ID NO: 262809 - DNA, 393 bp, Glycine max
ggccgtgtcgcagcaaaaccaaaccacatattaacttgtttgctctaagtcatggcgctgatcttgcacgcaaccaaagcaaacaagaatgctttcaagactctgattgcggcagagtacagtggcgtccaagtggaattggcccctaatttcgagatgggtgtctctaatagaactcctgaattccttaaaatgaatcccataggaaaggttcctgtcttggaaacgcccgatggtccagtctttgagagcaatgccattgctcgttacgttgctcgactcaagggtgacaacgctttgttctcatcttctgccattgataatgcccacattgaccagtggattgacttttcatccttggagatcgatgctaatattatgaaattataccta

SEQ ID NO: 262810 - DNA, 453 bp, Glycine max
  unsure (1)..(453): unsure at all n locations
cggtccggaattcccggggcgagcgacgcgtccgggccgtgtcgcagcaaaaccaaaccatatattaacttgtttgctctaagtcatggctgtnatcttgcacgcaaccaaagcaaacaagaatgctttcaagactctgattgcggcagagtacagtggcgtccaagtggaattggcccctaatttcgagatgggtgtctctaatagaactcctgaattccttaaaatgaatcccataggaaaggttcctgtcttggaaacgcccgatggtccagtctttgagagcaatgccattgctcgttacgttgctcgactcaagggtgacaacgctttgttctcatcttctgccattgataatgcccacattgaccagtggattgactgttcatccttggagatcgatgctaatattatgaaattatacctaccaagacttggatttgccccatacct

SEQ ID NO: 262811 - DNA, 308 bp, Glycine max
cgcgtcctggcggcgctgtggcggacgcgccggcttgtggttgaggagaagactgagttcgacggtgggatttatgaagtggcgagcggggctcgaatcgcggtgattaaggcggtgagggcattgacaaacctagcgctgaaggaggcgaacgagttgatcgaagggttgtctatgatgttcatggtagggatttcaaaagacgaatcttaagatgacgagaatcatcttgaaaaacctggtgccacagttactattagtaaaacactttctagctacatcatatatgttctgggtgtcaaatcgtt

SEQ ID NO: 262812 - DNA, 268 bp, Glycine max
ctttcacacaaccaaagcaaacaacaattctttcaagactctaatttccgcacattacaattccatccaactataattctcccctaatttccaaattattctctctaatacaactcctcaattccttaaaataaatcccataagaaacgttcctttcattgaaactcccaattttccagtcttttataccaattccattgctcgttacgattctcgactcaagatttacaactctttggtctcatcttcttccattgataattcccac

SEQ ID NO: 262813 - DNA, 414 bp, Glycine max
gttcatttctacacatccctagctctgtcgttccgtcgttgacgatggcgtttcgggtgcgaagccctgacctccgctctctctttcttctctctctcttgtccatcgcttccgccaatgtcttcttcgaagagcgtttcgatgacgggtgggaaaatcgatgggttaaatcagattggaaaaaagatgagaacgtggctggggagtggaaccacacctctggtcaatggaatggagacgctaatgacaaaggtattcaaaccagtgaggattacagattctatgctatttcagctgagtaccctgaattcagcaacaagggtaagacactagtctttcaattttctgttaagcacgaacagaagcttgactgtggtggtggctacatgaagttgctcagtggggatgttgatc

SEQ ID NO: 262814 - DNA, 414 bp, Glycine max
ggaattcccgggtggagccacgcgtccgcccactcgtccgcccacgcgtcctttttctcgtgggcgcgagtgaacacaggttagatcaatttctaactgtggtggagttggtaatttattaagacagacagcaagcatgcaggttagttcataattgcgatcatccccttcgttttttcaggctatactcagtatgtcatctgctccaagcacaaagctgtttatcggaggtgtttcatattctactgacgagcaaagtttgagggaagctttttcaaaatatggtgaagttgttgatgctaggataattatggatcgtgaaactggtagatccagaggatttggctttattacatacacttcggttgatgaagcatcaagtgccattcatgccttggatggtcaagacctaca

SEQ ID NO: 262815 - DNA, 421 bp, Glycine max
cccacgcgtccgcccacgcgtccgcgtacgcgtgggcgcgagtgaacacaggttacgagcaatggctttctttggtagaattgggaatttattaagacagacagcaagcaggcaggttagttcagaattgcgatcatccccttcgttttttcaggctatacgcagtatgtcatctgctccaagcacaaagctgtttatcggaggtgtttcatattctactgacgagcaaagtttgagggaagctttttcaaaatatggtgaagttgttgatgctaggataattatggatcgtgaaactggtagatccagaggatttggctttattacatacacttcggttgaggaggcatcaagtgccattcaggccttggatggtcaggacctacatggtcgcccgattagggtgaattatgctaatgaa

SEQ ID NO: 262816 - DNA, 369 bp, Glycine max
tgtaagttacatgatgtgaagttgcaaatgctttggagatcaccaacttcaaaatgggggtactgctacttgggtggcacttgttcttcgcaatttaagatggagtatttctgataaatctattatgtatggtttaaaggatacataccttcttggaaggagtcaatttctaacatctgaagaagctgacgtattaggacttactggatcaacagtactgcttgatggagcccacaccaaagaatctgccaaagctctgatgaataccataaggatggcatttcccaaggctcaattggtttttgttgttgcaatggcaagtgacaaagatcatgtgggatttgctcgagagattctctcaggtgtaca

SEQ ID NO: 262817 - DNA, 431 bp, Glycine max
cccacgcgtccggactgcccaagatgtatcgacaatgttacggtgcgggcaaaaaggcatcatctttctgatcaacaatggtggatacaccatcgaggttgaaattcatgatgggccgtacaatgtgattaagaactggaattacactgggttgattgatgcaatccacaatggtgaagggaaatgctggactgccaaggtgttctgtgaagaggagctagttgaagcaattgccacagccacaggacccaagaaagactccttatgcttcattgaggtgattgttcataaggatgacaccagtaaagaattgcttgaatggggctcaagggtttctgctgccaatagccgtgctcccaatcctcagtaatcttcagaatttatcctatgactaaattgctgcagttgccctttagctctatgaaagtgag

SEQ ID NO: 262818 - DNA, 428 bp, Glycine max
gggactcattgttcttctcccaggttatttagaaaagcaaaatggtgaagattggctgcattggtgctggatatgtggggggtcctactatggcagtcattgcacttaagtgcccatccattgaagttgctgttgttgatatctctaaatcccgcattgcagcctggaacagtgaccagcttcctatctatgaacctggccttgatggtgttgcgaagcaatgccgtggcaagaacctcttcttcagcactgatgttgaaaagcatgtctttgaggctgacatagtgtttgtctctgtcaacaccccaaccaaaactcagggtcttggagctggtaaagcagcagatttgacatattgcgagagcgcagctcgcatgaatgctgatgtttcgaagtctgacaagatcgttgtagagaaatccacagtc

SEQ ID NO: 262819 - DNA, 362 bp, Glycine max
gggactcattgttctactcccaggttttttacaaaagcaaaatggtcaatattgtgtgcattgttgctggatatgtggggggtcctactatggcagtcattgcacttaagtgcccatccattgaagttgctgatgttgatatctctaaatcccgtattgcagcctgtaacagtgaccaccttcctatctatgaacctgtctcttgatggtgtagtgaagcaataccgaggcaagaactctatacttcagcactgatgttgaaaatcatgtcttggaggctgacataatgtttgtctctgtcaacaccccaaccaaaactcacgatcttggagctgttaaagcagcacatttgacatattggg

SEQ ID NO: 262820 - DNA, 409 bp, Glycine max
ctctgctgcgtttgcttctcctccacccatctataaacgaacacacactttgattgagaatggggcgtgttcgcacaaagacagtgaagaagtcctcgcggcaagtgatcgagaggtactactctcgcatgacgctggacttccacacgaacaagaaggttctggaagaggtggccatcattccctccaagaggctccgcaacaagatcgcgggattctccacccacctcatgaagcggatccagaagggtcccgcacgtggaatctccctcaagctgcaggaggaggagcgcgagccccgcatggacttcgtccccgatgtctcccgccatagaaccgaccagatcgaggtcgacaaggagaccctcgacatgctttcccgcctcagaaagtcccaaggtttccgggg

SEQ ID NO: 262821 - DNA, 382 bp, Glycine max
  unsure (1)..(382): unsure at all n locations
tgttgacctcacagtgaggctggagaaggaagcctcctacgatgaaattaaaaatgctgtcaaggaggaatcagagggcgagttgaagggaattcttggttacactgaagatgatgtggtctccaccgactttgtgggcgatagcagatcaagtatttttgatgcaaaggctggaattgcattgaataagaactttgtgaagcttgtctcttggtatgacaacgagtggggatacagctcacgtgtcattgacctgcttgtattcgntgccaagaagtctttttaaggctgtactgaaaaaaaagtagctttgctagacattatgggctggtgtctagctgcgatttagcgtcttcttgctcgggcagaaatgagaagtatg

SEQ ID NO: 262822 - DNA, 362 bp, Glycine max
  unsure (1)..(362): unsure at all n locations
cccacgcgtccggataaattgtctcactccgacatgattgctgtcctctgggaaatgatattgagggggaccgacacggtggcggttttgattgagtggatactggcgaggatggtgcttcatccggaggtgcaaaggaaggtacaagaggagttggacgcggtggttaggggtggcgctttgacggaggaggtcgtggcggcgacggcgtatcttgcggcggtggtgaaagaggttctgaggctgcacccgccgggcccgcttctctcgtgggcccgcttggccatcactgatacgaccattgatgggtatcacgtgcctgcggngaccaccgctatggttaatatgtgggccataacaag

SEQ ID NO: 262823 - DNA, 416 bp, Glycine max
  unsure (1)..(416): unsure at all n locations
cccacgcgtccggaaaagggaagtaacttatgtgaataatatgaagggcggtcaagaaatctgaaaaacaccgtcctcttctaagagaacactaagtcagggttcagttgatatatatgctgctcagtgcaaaaattgcttgaaatggagagagattgatacacaggaagagtttgaagagattagaagtaaagttgctgaggaaccttttctttgcagcagaaaggctaatagttcctgtgatgaacctggtgatattaaatatgattcctctcggacatgggtgattgacaagcctaacctcccaaagactccacaaggttttaagaagagcttggtgcttagaaaagattactccaaattggacgcttactacatcacacctgcaggcanaaaactgagaacccgcaatgaga

SEQ ID NO: 262824 - DNA, 433 bp, Glycine max
  unsure (1)..(433): unsure at all n locations
ttcaagaacaatttattgcacaaatattgacaagaagcttactcaagccgatgtcaaacactggtttgaatctatttgtggagaggttcaacggttgaggcttcttggagattaccatcattcaactcgaattgcttttgttgagttcacagtggctgagagtgcaattgcagctctaagctgtagtggggtgattctgggttcactgcccataagggtaagtccatcgaagacaccagttcgatcacgtgctcctcgccctactatgcactgaatcaactttccatgtttctggggttgattgctgctgagatatatttacatatatatatatacatagaaacagctgtgttctaaagaacatgtggcatttagttggtacttttgtcctcatgtcttacagtatggntactttgctttcccttggggatta

SEQ ID NO: 262825 - DNA, 374 bp, Glycine max
  unsure (1)..(374): unsure at all n locations
ctctgctgcgtttgcttctcctccacccatccacaaacgaacacacactttgattgagaatggggcgtgttcgcacaaagacagtgaagaagtcctcgcggcaagtgatcgagaggtactactctcgcatgacgctggacttccacacgaacaagaaggttctggaagaggtggccatcattccctccaagaggctccgcaacaagatcgcgggattctccacccacctcatgaagcggatccagaagggtcccgtacgtggaatctccctcaagctgcangaagaggagcgcgagcgccgcatggacttcgttcccgatgtcttcgccatcagaaccgaccagatcgaggtcgacaaggagacgctcgacatg

SEQ ID NO: 262826 - DNA, 445 bp, Glycine max
cccacgcgtccgtcaagcattgcatccctcttgatttgtagtttgttttgtgctttaggtaaaagttctgccaaatcaagaggggttttaagatcatagtgtgtgttttgcaacaatggctaagttctttgctgctatgatcttggcactctttgccatttccatactttaaacagtggtaatggctgctaatgaacaaggaggccacttgtttgacaacaagagcaaatatggaagtggaagtgtcaagagttaccaatgcccatcacaatgctcgaggagatgtagccagacccaataccacaagccctgcatgtttttctgtcagaagtgctgcatgacatgcctgtgtgtgccccccgggtattatggtaataaagctgtgtgcccttgctacaacaactggaagaccaatgaaggaggacccaagtgccccttgagcttc

SEQ ID NO: 262827 - DNA, 462 bp, Glycine max
cccacgcgtccgagaaggcctgggcttttttgataagcataactgggtgaggaagaaggaaagagagtgaagaagatggcgtcgagcggagcggtaccgttttggagggcggcggggatgacgtacataacatactcaaacatatgcgcgaatctgctcaggaattgcctcaaggaaccctacaaggccgaatccctctctcgtgagaagctccattttgttctctccaaatgggtcgacgccaagcctgaaaaacctactattcgttcagacaccccagagcagtgatctggaatagttggaagctataaatgcataaatctttgagatctggaagttcattgtcattttgaacctttctgggatgtttaattaccttgtttcttcttttcatgaaatggaacatgcactggattttgatttgcaccggtaattttgtaataattcaagtttaaacaaatg

SEQ ID NO: 262828 - DNA, 471 bp, Glycine max
  unsure (1)..(471): unsure at all n locations
ggaannnccgggtcgacccacgcgtacgcccacgcgtccgggtttaaatcacctctgaatttctgctatggcttcaaccagatcagtcttggttcttcttttcattcaggtgtgcttctcacttctacccttgtcattcgctcaatcccccgccaccgggtctaccgaaggttacaccatttatggtcgagtgaagatccccagtgtgggaacaaaagattatattcttcctggaaaaatttcaaatgtcaaagtcatactcaatggtggtcaaagagttacttttctgaggcctgatggatatttctcattccacaatgttcctgcagggacacatctaattgaagtggctgccataggctatttcttttcttccgtacgagttgatgtaagtgccaaacaccattgcaaaatttaagcagccctgacagaaaatatgagggggcttaatgaggtttgtcttggagccat

SEQ ID NO: 262829 - DNA, 448 bp, Glycine max
cctaaacaactctttctcttcttccttcgctcgttgttctccctcgcgtagatcgacggtggcggagacagagacgtttgctttccaggctgagatcaaccagctcctcagtctcatcatcaacaccttctactccaacaaggagattttccttcgtgaactcatcagcaacgcctccgatgctttggacaagattcgatttgagagtttgacagataagagcaagctcgatgctcagccagagttgttcattcatattattccagacaagactaacaatacactgaccattgttgacagtggtattggcatgaccaaagctgatttggtgaacaacttgggtacaattgctagatctggtaccaaggaattcatggaagccttggctgctggtgctgatgttagtatgattggacagtttggtgtggggttctactctgcatatctt

SEQ ID NO: 262830 - DNA, 404 bp, Glycine max
cccacgcgtccgccacgcgtccggtttctggtggaggatccaacttcagagcaattcatgaggcctccaaaaggggatcacttcatggagatgttcttgtgttggtcacaaataaaagtgattgtggaggtgcggagtatgcaagaaataatggtatcccagttatactgtaccatatatcaaaggatgaatctaatccaagtgaccttgttgatacactaaggaaatttgaggttgattttattcttttagctggatacctcaaacttataccagtggaattgatccgagcttacaaaagatctatattcaacattcatccatcacttcttccagcttttggaggcaagggattctatggcatgaaagtgcacaaagcagtaattgcttctggagcaaggttt

SEQ ID NO: 262831 - DNA, 409 bp, Glycine max
cgggtcgaccgacgcgtccgcattctcctctctgaattcctcttattcaggaatttggagagtattgatatatcaaggtaggagaaaccagtagccaaggaagatatggagttttctatgattttcattgttagcaacattatgctgcttttcagttcagcatttgccaaaactgctagtcctccctctctgagcccaactccagcaccagccccggcaccagacttcgtgaacctcactgagttactcagtgttgctggtccgtttcacacctttcttggataccttgagtccactaaagtgattgacacttttcaaaaccaagccaacaacactgaagaaggaattaccatctttgtttctaaggacagtgccttcaatgctttaaagaaaactaccctattcaacc

SEQ ID NO: 262832 - DNA, 418 bp, Glycine max
gaattcccgggtcgaccgacgcgtccgtttcattttccctcactttctcgctcgccaaacgcccctctctctcctccaatggccgggcggctcaccgacgaccagagcgccgagttcaaggaggccttcagcctcttcgacaaggacggcgatggttgtattactactaaggaacttgggactgtgatgcggtcactagggcaaaacccaactgaggcagaactgcaggatatgattaatgaggttgatgctgatggcaatggaaccatcgactttccagagttcctcaacctgatggctcgcaagatgaaagacaccgactccgaggaggagcttaaggaggctttccgtgtgttcgacaaggatcagaatggtttcatctctgcagctgagctccgccatgtcatgacaaattttt

SEQ ID NO: 262833 - DNA, 453 bp, Glycine max
  unsure (1)..(453): unsure at all n locations
gaattcctcgggtcgacgccacgcgtccgggcggcgctgtggcgagacgcagccggcggtggttgaggatgaagacggagttcgacgtggggatcgaggaggtgccgagcaacgctagaatcgcggtgattaaagcgaggagggcattgacgaacctggcgctgagggaggcgaaagagttgatcgaaggggtgtcgaagaagttcaaggaagggatttcaaaagacgaagctgaagatgcgaagaagcaactcgaaagagctgagagccaaggttaccattgcttaaacactggttagctgcagcagtatatgttctgcttctagttttgttggttgtagttgagttcaccagtacgatngaatttcatttccattatggatggattgcaatcttttattatgaatgaggaaatatgagttctaattttatatgatttttttaacgcgtatg

SEQ ID NO: 262834 - DNA, 459 bp, Glycine max
cggacgcgtgggcggacgcgtgggttatcattcgcagctgcttttattcgcaccgcaaacagtgagccatggccgtcggaaagaacaagcgcatctccaaggggaagaagggtggcaagaagaaggcagctgatccctttgccaagaaggattggtatgacattaaggctccttctgtttttcaagagaaaaatgttggcaaaaccctcgtctctcgtactcagggtaccaagattgcttctgaaggactcaagcatagagtgtttgaagtctccttggctgatcttcaaagggatgaggatcatgcattcaagaagattatgttgagagctgaaaatgtgcaatggaagaatgttctgacaaatttctggggaatggatttcacaacagacaagctgactgtcattggtacgaaaatggcaaactcttattgaagcccatgttgatgtgaagacaact

SEQ ID NO: 262835 - DNA, 325 bp, Glycine max
cccacgcgtcaggactgcccaagatgtatagacagtgatacggcgcaggcggggaaccagcatatttctgatcaacagtagtggatacaccatctgggtcgaaattcatgatgggccgtacaatgtgattaagaactgagattacactgggaggattgattgaatccatagtggtgaagggaaatgctggaatgccaaggtgctctgttaagaggagctagtagaagcagttgccacagtcacaggacccaagtgtgactccttatgcttcattgatgtgatagttcataaggacgacaccagtaaagaattgctggaatggggc

SEQ ID NO: 262836 - DNA, 464 bp, Glycine max
cccactcgtccgcggactcgtgggggtttttgtggataagagtgagctataatggctgccaggagaccgggtttaattgctttgtttgatgttgacgggactcttacagctcccaggaaggtggtcacaccggaaatgttgacattcatgcaagaactacgaaaggttgtaacggttggagttgttgggggttctgaccttataaagatatcagagcaacttggcagcacagttaccaatgagtatgattacgtattttctgagaatggtcttgtggctcacaaggaaggaaagctcattggaactcagagcttgaagtcattccttggtgaagaaaagctcatggagtttattaactttacacttcattatattgctgatttggacatccccattaagaggggaacatttatggagttccgtaatgtgatgctgaatgtctcacctattggtcgaaactgtat

SEQ ID NO: 262837 - DNA, 315 bp, Glycine max
cagacgcgtgagtagtcctaagtctctggagaataaggctaaagatgactacagggcacggggagagtttcccgtaaaggagagactggaagcccaagcgagtgaagggatcatattgccatcaagtcagaagggagctcaaaacaaacactagcaggaaagtttgaggaaaaagagtgaacctgcttaacaaatccaacccagttcacaagaaggttccagcgaggattaacaaagagaagcccatagcagagtctattgtgacagttgaacacattgataggacatagaagaacaaccccatcttgcctactg

SEQ ID NO: 262838 - DNA, 453 bp, Glycine max
atttgaaggttgttttgtgcttatagatataagttctgctctaatcaagagggggtttcagatcatagtgtgtgtgtgtgtgttaaacaatggctaagttctttgctgctatgatctttgcactcattgccatttccatgcttcaaacagttgttatggctgctaattggcaaggaggccacttttatgacaacaagagcaaatatggaagtgggagtatcaagatataccaatgcccaagacaatgctcgaggagatgtagccagacccaatacctcaagccctgcatgtttttctgtcagaagtgctgcaggatttgtctgtgtgtgcccccgatggattatggtaataaagctgtgtgcccttgctacaacaactggaagtatcaggaaggatgacccaagtgcccttgaacttcaacttcaatcaaattgtgctttttactataatttt

SEQ ID NO: 262839 - DNA, 458 bp, Glycine max
atcttatctttctctcttctctctccccgtccaaaccctaactccctaccctgttccgcgggtctctcatgcatcatgaaaggaggaaagtccaagaccgaagctaagagagccgattccaaacttgctgtgaataagatgggcgtggccaccaaatctaggaaacccgccggaaaggggaaggcagcgaaagatcctaacaagccaaagaggcctccaagtgctttcttcgttttcatgtaattataatatattgttatctctacgattcatttgactttcgatgcgctctcttatctttccttcgaataattttatcgtcaaaacttttatccttgtccaattgtaagtccacgcgttctttacctgttgatgcttgtttacctcgattgctttattgttaaaattatgttttttgagtaatgctagatctagcttatgcttcgtgaaacttgata

SEQ ID NO: 262840 - DNA, 114 bp, Glycine max
gaaaaaaaaaaaagccttttactttttttcttttgcatgatttgaatcttgattggaaaagcgtcgaattggggtgttttacccatcaattcaattttaagccgtgccttcttc

SEQ ID NO: 262841 - DNA, 447 bp, Glycine max
cctaaacaactctttctcttcttccttcgctcggtgttctccctcgcgtagagcgacaatggcggagacagagacgtttgctttccaggctgagatcaaccagctcctcagtctcatcatcaacaccttctactccaacaaggagattttcctacgtgaactcatcagcaacgcctccgatgctttggacaagattcgatttgagagtttgacagataggagcaagctcgatgctcagccagagttgttcattcatattattccagacaagactaacattacactgaccattgttgacagttgtattggcattaccaatgctgatttggtgaacgacttgggtacaattgctagatctggtaccaaggaattcatggaagccttggctgctggtgctgatgttagtattgaatgacagtttggtgtggggttctactcagcatatct

SEQ ID NO: 262842 - DNA, 464 bp, Glycine max
attaccgggtcgacccactcgtacgtccacgcgtccggactgcccaagatgtatctttaatgttactgtgcgggctaaaaaccatggtctttttgatcaacaatggtggctacaccatcgaggttgaaattcatgatgggccgtacaatgtgattaagaactggaattacactgggttgattgatgcaatccacaatggtgaaggtaaatgctggactgccaaggtgttctgtgaagaggagctagttgaagcaatttccacagccacaggacccaagaaagactccttatgcttcattgatgtgattgttcataaggatgacacctgtaaagaattgcttgaatggtgctcaagggtttctgctgccaatatccgtccttccaatccttagtaatcttcaaaattttatactatgactaaattgctgcatttgccctttatctctattaaagtgagaatcatt

SEQ ID NO: 262843 - DNA, 386 bp, Glycine max
ctctgctgcgtttgcttctcctccacccatccacaaacgaacacacactgtgattgagaggggggcgtgatcgcacaatgacagtgaagaagtcctcgcgacaagtgatcgagaggtactactctcgcatgacgctggacttccacacgaacaagaatgttctggaagaggtgtgcatcattccctccaagaggctccgcaacaagatcgcgggattctccacccagatcatgaagcggatccagaagggtcccatacgtggaatctccctcaagctgcaagaggaggagcgcgagcgccgcatggacttcgtccccgattgctctgccatcagaaccggccagatcgaggtcgacaaggagacgctcgacatgcttgccgccctc

SEQ ID NO: 262844 - DNA, 317 bp, Glycine max
aagactgaaagaatggggtggaggctgcttcgaagcttgatgtcagatatgacagacatcatagttttggaacaacatactaacgaattactcatatgatataatgggatggacccggctatctcgcacgctaaacgtattggcggccttgatgctctgtctatatccctaattaccggtcatgggccaggatactcattggcatgcgatgaatctctaagagatggagtgcgtaatactgggcgaatgaatggaatccaggtaggtgtataagagaagcctgataccagagcaggtgctgaaggcttctcaactga

SEQ ID NO: 262845 - DNA, 413 bp, Glycine max
  unsure (1)..(413): unsure at all n locations
ctcgcgcgtccgtcaagcattgcatccctctttattcgtagcttgntttgtgctttagataaaacgtctaccaaatcaagaggggttgtacgatcatagtgtgtgttttgcaacaatggctaagttctctgctactatgatcttgacactctttgtcattttcatacttcatacagtgataatggctgctaatgaactatgactccacttgtttgacatcaagatcaaatacttaagattaagtgtcaagactgtccaatgcccatcactatgctcgactagatgtaaccataccctttaccacaagatctgcatgtttttctgtcataagtgctacaagacttgcctgttcattcttgccgtttattatagtcataaagctctattcccttgcttcaacaacttagaatacc

SEQ ID NO: 262846 - DNA, 339 bp, Glycine max
cccacgcgtccgcacgaaagccgggatctttcagataatggattcctattcgaagggtgcataacggcatggataagctcacactgacgcgtcaattcgggatccaattcggttccttaggaggtatcgggaaggaatcttggaatgtaataatatcgattcatacagatacagattaatgggttctctattgattcatacgctctacctattagatagggatatagaaagaggtaaataccgtggatttaacatagaactcttgatcgtaaaatcgatctgatattttgcggactttcagttcaatgacctaatggggcagattctatcatgtccata

SEQ ID NO: 262847 - DNA, 342 bp, Glycine max
ggctacttttgattgcttgatgaaaacctatggattcctgacaccagaattctggaaggagactcgcttgtgcaaatctccattccaagagtacacagatctactggcaaaaccaacaggaaagactctaatcttggaggaggaaagggtggatgcttgatttgctagttttgctttatggatgttttaggaactttattactttacatactttgttggttctgtgctttacttttggttttgatagacggtatgtctctgtatgcattttgattgtttccaagttttaattgactgcaaaaaaaaaaaaatatatatataatattaattattatattaatt

SEQ ID NO: 262848 - DNA, 356 bp, Glycine max
gttgtccaaaccaatcttgaacccttatgtccgcgagcatacagctgctcaggctggtgtcaaggccacgcgggagcaagcctgacacagttaccgttcacctcaacatctatgatctcacccgaatcaacggctatgcctattggcttggccttggagtctaccattctggggttcaagttcatggattggaatatggttcacgagcgcacgagcacgacacaacggggattttcggagtccaacccatacactgccctgggttcactttcagaaagtcaatgttcatcgtaacaacatatctgtgtccgaaggatgttcgagcatttatggataagctggctcatgattacttc

SEQ ID NO: 262849 - DNA, 475 bp, Glycine max
caaagacatccttctcctggatgtggctcccctcactctcggaattgaaactgttggtggagtcatgacggagttgattcccagaaacactggtatcccaaccaagaaatctcaggtgttcaccacctatcaggaccagcagactacagtctccattcaggttttcgaaggcgagaggagtctcacaaaggattgccgccttcttgggaaatttgatctgtctggaattcctccagccccaaggggtacgcctcaaattgaagtgaccttcgaagttgatgccaacggcattctaaatgtgaaggcagaagacaagggcactggtaaatcagaaaagatcaccattacaaacgaaaagggacgtcttagccaggaagaaattgagagaatggttcgcgaagcataggagtttgcagaggatgacatgaaggtgaatgagaggatcgatgctcgcaacagtcttgaaacctatgta

SEQ ID NO: 262850 - DNA, 457 bp, Glycine max
  unsure (1)..(457): unsure at all n locations
gttgatgaatctgaagatgatgatgattctagtgatgatggtgattctaatgatgatggtcctgtggagtgggcttcatattggaaaccaaatataacaataaacttggttgctgacttcactcagtacccaaagacaggtgtagcaccaaacattgctccttacttgaatgtcgatcctcttactgggaactactatccaattgtttatttcaatgagttctggttactcagggataagctgatacctttaaacgagacagtgactgaattatcacttaacctggaagttggtcccattagtatgacaaagtggcagttattcctgcagattgaccagtccttccagattcaccgtagttatggaagcatgcttgaaggcgaggctgatgaactcaagagggtattcttggaaaggaatccttacctnctggcaattaccattgggtgttctcttc

SEQ ID NO: 262851 - DNA, 321 bp, Glycine max
atggcgcatgctgtaaaacggcaggatccattcattgataacccacattatacggatgacctagacctctgtgagttcagcagcttgaagcacttgagcgtatgaatttacgctctggaactctcggactccgtatgaaactgtcttaattactgatgatcctgagtatgctaagtatatactctacgaaacatgtggtacgcacaagtgatctgactaggtagcatttgaagaggcacatgagactacggttgacgaggcattaaatgatgacccagttgactatgatgctgatgtggaacaggatgatgctgatgaatc

SEQ ID NO: 262852 - DNA, 351 bp, Glycine max
gattcggatgctaattatgttgatcagccagatatgcttggagagcccattgcaactctgcgttggctgcgctatgaaggtcacgtttcggatcccttgaaaggattatatggagctggagctcatactgactatggtttaattacactgttatcaacagatgatgtctaggctcttcaaatatgcatagatagggatgctaaacctcataaatggcaggatgtaacaccattgactggagcattcatacgagatattgattacatgctgaatcgctctagcaactgcgttcataagtccaaactagacagagttctagctgacgatcgacgaagatattcaaatgcatac

SEQ ID NO: 262853 - DNA, 202 bp, Glycine max
cgcatacatgctccgaaccagcctcactgcatatatttttgagaaaactctgtatacatatacgtggatggggacctctttacaggtgatgagcttatatcggactcaataagttacaatgaaactgacaatggaatgctgtgggacgtcgaggagtagtcagttgttaaggtagcagttaatgttgaaattgttgcaaatc

SEQ ID NO: 262854 - DNA, 444 bp, Glycine max
aaaaaacattcctaacacagaaaaactaattacatattactcgttccagcacacatagtctccgggaggggacgaatagaattgataatgataatttgcataacttcaaataatataactagtctgcatacaaacactcgattctataatccaaatccattccataacggtcaattactatctactaacaatatataatacttatagaatgattttatgtcactaacgacatcttaaaattttttaattcaaatatatctactataatatttagcttatataaatcgcaattggtacaatacccataacgtaagccgaaacattatattaaggatacatatgtattcgccactaaaagtatatttatccaaataattaacttaatttccatatatatctcttgcatctaatatctaataatatatatttcgacctatatagata

SEQ ID NO: 262855 - DNA, 472 bp, Glycine max
actaatcgtgcttatccttattgagagaaaaaatggccaaatcaatcaaattctttgagttgaagacaggggccaagattccttctcttgggttaaggacttgacaagctgaacctgttgttgtagctgaagctctcaccacaggcattcatgttggatacatgcatattgactgtgctagtgcgtatcagaatcaagcagagattggttgtgctcttaagaagctatatgatgatggtgtggtgaagcgtgaggactcatggatcactttcaaactctggtgttcagatcatgcaccacaagatgtgcctaaagcattggatgaaacattacaggaattgcaacttgactatcatgacctatatctgatccactggccataccgcatgaatagtggcacattcggactcaatagagaatatcttgagcaaccagtcattctcaattcatgcagagcaatagatgcactcta

SEQ ID NO: 262856 - DNA, 392 bp, Glycine max
ctctgctgcgtttgcttctcctccacccatccacaaacgaacacacactttgattgagaatggggcgtgttcgcacaaagacagtgaagaagtcctcgcggcaagtgatcgagaggtactactctcgcatgacgctggacttccacacgaacaagaaggttctggaagaggtggccatcattccctccaagaggctccgcaacaagatcgcgggattctccacccacctcatgaagcggatccagaagggtcccgtacgtggaatctccctcaagctgcaggaggaggagcgcgagcgccgcatggacttcgtccccgatgtctccgccatcagaaccgaccagatcgaggtcgacaaggagacgctcgacatgctcgccgccctcggaatg

SEQ ID NO: 262857 - DNA, 462 bp, Glycine max
gaagtttgcgaaccattctcctgatccaaattgctatgcaaaggttattatggttgccggagatcatagggtaggcatttttgccaaggaacggatttgtgccggggaggagctgttctatgattatcgttatgagccagatagggctcctgcgtgggctcggaagccagaggcatctggatcaaaaaaagaggacggtgctccttcaagtggtcgtgcaaagaagcttgcttaatgggagtttgttctttaaaagtcaattctttaggttattctttcacacgtaggggaagcaatctcattggtagcggaaagaagtattgcttttagcttttgttcgtagcaaggccgtgtaattgttgctgcataggtaactaactacatttaaacagttcattttgatattaacagactgtattcatcattccaaacggaaaatataagcttaatcaaaattgcgca

SEQ ID NO: 262858 - DNA, 424 bp, Glycine max
gaagtttgcgaaccattctcctgatccaaattgctatgcaaaggttattatggttgccggagatcataggggaggcatttttgccaaggaacggatttgtgccggggaggagctgttctatgattatcgttatgagccagatagggctcctgcgtgggctcggaagccagaggcatctggatcataaaaagaggacggtgctccttcaagtggtcgtgcaaagaagcttgcttaatgggagtttgttctttaaaagtcaattctctaggttattctttcacacgtagggcaagcaatctcattggtagcggaaagaagtattgcttttagcttttgctcgtagcaaggccgtgtaattgatgctgcatacgttactaactacatttaaacagttaattttgatttaacagactgtattcatcat

SEQ ID NO: 262859 - DNA, 501 bp, Glycine max
ttcaagaacaatttattgctcaaatattgacaggaagcttactcaagccgatgtcacacacttctgtgaatctatctgtggagaggttcaacggttgaggcttcttggagattaccatcattcaactccaattgcttttgttgagttcacagtggctgacagtgcaattgcagctctaatctgtagtggagtgattctgggttcactgcccataagggtaagtccatcgacgacaccagttcgatcacgtgctcctcgctctactatgcactgaatcaactttccatgtttctggagttgattgctgctgagatatctttacatatatatatatacatagaatcagctgtgttctaaagaacatgtggcatttagttggtactattgtcctcatgtcttacagtatggttactttgcttccccttggaggactattgtactgtggtctagcttgtagtcggatcgaactatgaggatcttgatgacttaattatgatgcac

SEQ ID NO: 262860 - DNA, 402 bp, Glycine max
cccacgcgtccgtcaagcattgcatccctattgatttgtaactcggttcgcgctttaaataaaaggtctgggaaatcaagatgggttttaagatcatagtgtgtgttttgcaacaatggctaagtcctttgctgctatgatctaggcactctttgccatttccatacttcaaacagtggtaatggctgctaatgaacaaggaggccacttgtatgacaacaatagctaatatgcacgtggaagtgtccatagttaccaatgcccattacaatgctcgacgagatctagcctgacccattaccacatgctctgcatgtttttctgtcagaagtgctctaagacatgcctgtgtgtgccctcggagtatgatggtaatatagctgtgtgctcttgctacaacaa

SEQ ID NO: 262861 - DNA, 391 bp, Glycine max
cgatccgcttttccgacctagacgtacgcgtgcctatactcaatcgcttagtaattcatgggatgattggacttcaaatgttcgttcccaataactctgtgttgtgtggactaccagcatctcccgacgctgctccaagtggtggttatataccaccacaggtgctcatttctgaggagcttccctatgtaaagcaagctttcaactatggaggagttatgctgagggacatgtaccatgatgttttaaattatcacagcgatcagataaaggattatgttccaaaatatgcaatgcggtttgtgaccgcaatttccgactctatttatgagagtgtctctgcagctactcaccgcattttacagaaaaaaccatattagaaatatgggga

SEQ ID NO: 262862 - DNA, 412 bp, Glycine max
cctggcaatactcaattgctttttaattcatgggatgattggacttcaaatgttcttcccaataactctggtttctttggactaccagcatctcccgacgctgctccaagtggtggttatataccaccacaggtgctcatttctgaggtgcttccctatgtaaagcaagcttccaactatggaggagttatgctgtgggacaggtaccatgatgttttaaattatcacagcgatcagataaaggattatgttccaaaatatgcaatgcggtttgtgaccgcagtttccgacgctatttatgagagtgtctctgcagctacgcaccgcatcttacagaagaaaccatattagaaatatggggagccgtacgtgcaaactatttatcagctatctatgcatgtgttcgtctttg

SEQ ID NO: 262863 - DNA, 436 bp, Glycine max
gatggcgggctctagcgtggttacaacatctgatgtgttgggatcatcgtgtatcgaggtctgcactcggggttgaatgattctgctaaaccaggtggcctcacagggtcatagcacgatagctcatatgacagctttgcccttggatggctcatcaccaatggtgcaacgtatagcatcatacccaatatacactgttagaagacgaatgacgatgacctctggtgaagctgtcaagtacaagatctgcttggatgcattcacacagatactaaagaatgatgctgccgagtccttgttcaaaggtgccggtgccaacattgtctgagcagatgccagtgctagtgtgcttgctggatatgacaagtagcaggttctcgcgttctgcaagatgacggctatggtggggcttaacttctaatgctgagtcagtact

SEQ ID NO: 262864 - DNA, 114 bp, Glycine max
gaaaaaaaaaaaagccttttactttttttcttttgcatgatttgaatcttgattggaaaagcttcgaattggggtgttttacccatcaattcaattttaagccgtgccttcttc

SEQ ID NO: 262865 - DNA, 507 bp, Glycine max
atggctcccaaaccgcctagtacgggtctgtttgttggactgaacaagggtcacgtcgtcaccaagaaggggttgcctccacgcccctcagatcgtaaggggaaaacaagcaagagggtgcactttgtgaggaacctcataagagaggtagccggttttgcaccctatgaaaagcgtataactgagttgctgaaggttgggaaggataagagggcactgaaggttgcaaagagaaagctcggaacacacaaacgcgcaaagaagaagcgtgaggaaatgtccagtgttctcaggaagatgagggctggtggtgctggagacaagaagaaataagtcttatttactgatttccagattcactagatggacctgtgtattgattgacgagctttcatattcttgctttgggtcaattagtttacttcaagattttggttgagaaatatgttttgcttaactgagacatgatttatggaaaaagctagaattgattattttctggtttac

SEQ ID NO: 262866 - DNA, 343 bp, Glycine max
gagaacactttcatcgactgctcagaccaccattgaaattgattctctatacgagggaattgatttctacgccactgttactcgtgccagatttgaggagctcaacatggatctcttcaggaaatgtatggagccggtggagaaatgtttgaaggatgctaagatggacaaaagaagtgttgatgatgttgtccattgtggtggttctaccagaattcccaaggttcaacaactgctgcaagacttctttaatggaaaagagctttgcaagagcattaatcccgatgaagcttgtgcatatggtgcggctggtcaggctgcaatcttaagtggtgaaggcaat

SEQ ID NO: 262867 - DNA, 532 bp, Glycine max
gaagacccttactgggaagaccattactttggaggtagagagctcagacacaattgacaatgtgaaggcaaagatccaagacaaggagggtattcctccagaccagcaaaggttgatttttgctggaaagcagcttgaagatggacgtacactggcagactacaacatccaaaaggagtccacccttcaccttgtccttcgtctcaggcgaggtatgcagatctttgtgaagactttgacaggcaagactattaccttggaagttgaaagctcagacacaatcgataatgtcaaagcaaaaatccaggacaaggagggtatcctaccagaccagcagaggttgatatttgctgggaagcaattggaggatggaaggactctagctgactacaacattcataaagagtctactcttcaccttgtgttgcgtcttcatggtgggtattaaagtctgagaatgttctgtaggtgtcttgaagtctaagcatgtggaagttcccgaaatctttgggtttttaatttaatgttcctg

SEQ ID NO: 262868 - DNA, 338 bp, Glycine max
atttgacaacatgcaaatatcctctggtagggtgtctctaccctgctggatgcctcatctagcgatggcggaaaatcagatgaagagcagaaggaggcagaactagcagcttctgaattttctggaaatggtgctgggatactatctgctgctagcacagttgccagtacttttctcttagtttttgttgctgaatggggcgacaagtcatttttctccacaattgcccttgcagcagcttcttctccccttggagtcatagctggagcactggctggtcatggtgttgcaactttgctagctgtacttgggggttctttacttgggacgtatttgtc

SEQ ID NO: 262869 - DNA, 503 bp, Glycine max
cgcaccagtttcaccgcacgaatatcttgatggttggagcgatccgagaaaaactctgtaaacatgttgggttaccaggacctccttacaggtgatgagcttctctctgactccttccgttacaaggaaattgagaatggaatgctgtgggaagttgaggggaagtgggttgttaaaggagcagctgatgtagacattggtgcaaacccttctgctgagggtggaggagaagatgagggagttgatgatgcatctgttaaggatgttgacattgttgacacattcagacttcaggagcaacccgcattcgataagaagcagtttgttaccttcatgaagaggtttatcaagaatttgactaccaagctcgatgcagagcaacaagagttgtttaagaagcacatcgagggagcaactaaatacctgctctctaagattaaagatttccaattttgttgtggtgagagcatgcgtgatgatgcttgctttggctttggctacta

SEQ ID NO: 262870 - DNA, 549 bp, Glycine max
cccggatattcccgggtcgacccgcgcgtccgggtctctaaggttcactatctctgcatagggcaacctcctttctctgtgactctgagtatcgtatcgcctgacgagcatttctaatacgctcgtatcaggtccattgaatatgtctccgtcgctggatcttcctcccaagggtggcttcagttttgatctatgccgaagaaacgcaatgcttcaaaacaagggcctcaaagccccaacctttctcaaaactggcaccactattgtccgtttagatttccaggatggaggcattcttggcgctgatactagggcaactgcaggacctatactggctgatagaaactgagagaaaattcattatatggcaccctacatatattgctgtggaacaggctcaagtgctgatacaggagctggaacagacctgggtagcttacagctgccattaccatcgctccatactggtccagaatcaagagttgctacagcgctgacccttcttaagaaacaccttttcaattatcaagggcatgtcttaactgcttt

SEQ ID NO: 262871 - DNA, 504 bp, Glycine max
ggtctctaagtatcactatctctgcatagggcatcctcctttctctgtgactctgagtatcgtatcgccgtattatcattgctaattctctcttatcaggtccattgaatatgtctccgtcgttggatcttcctcccaagggtggcttcagttttgatctatgccgaagaaacgcagtgcttcaaaacaagggcctcaaagccccaacctttctcacaactggcaccactattgtccgtttagatttccaggatggtgtcattcttggcgctgatactagggcaactgaaggacctatactggctgatagaaactgtgagaatattcattatatggcacccaacatatattgctcgggagcaggcacagctgctgatacagaggctgtcacagacatgggtagctcacagctgcaattacatcgctaccatactggtcgagaatcaagagttgctacagcgctgacccttcttaagaaacacctgttcattatcacggcatgtc

SEQ ID NO: 262872 - DNA, 225 bp, Glycine max
gaccaacgccaaagccgtccactatctctcttctgcatgatctgaatcctgaatgcatgagcgagatcttgcacggtcatacccgtcaatgcagttaccagccgggcctcatgcactgggaggtgatctgcgacgagcacggcatcgatcccacgggcgagcgcatctagggatgcaacattacgatcccactcgtgcggatcaatgtgtattacatcgaggcct

SEQ ID NO: 262873 - DNA, 233 bp, Glycine max
cccacgcgtccgtccacgcgtccgcccactcgtccgcccacgcgtacgactagctctatctgcgcactagctctgagcatacttctctcgctatctgccttccatcacactcggcattacctttcccaagatagtagaagatggcagacactgaggatattcaacctcttgtttgtgacaatggaacaggaatggttaaggctggaatagctggagatgatgccccacgtgct

SEQ ID NO: 262874 - DNA, 446 bp, Glycine max
cccacgcgtccggggttctcctctttgtccgctgtcgacggccggaaacaccacgttctggatttgcaggagatcgagacggttctcaccgacgttaaagctgacaacgttaaggttataccagttcccaagcactgcgattgggctgatttcatggtactcgccactggcaggtccacctggcacgtcaagaacatcgcccaagccctaatttacaaggctaagcagaaacagagaggagttgaacgaatgatgctaccaagtgtggaaggtcaagcaggaggaaagtggatcgtcattgactctggtaaagtgatagttcatgcacttgatgaaaaggctagagcttactacaatttggagggtctttggaccccagggacaattcataatgaacgtgaagaggatttacaaaaagcttttggtgaaggttcgtcggaaaaaca

SEQ ID NO: 262875 - DNA, 315 bp, Glycine max
ctcttctactttgagtcttcttgatccttcttatgctccttgaactcaaacatgtctgatgacgcgggtctactataattctggccaagatcatttgggatgacgtgtatgattgcacttgctgaaaagggtatcacatatgagttcaaagatataggacttgatgaacaagagtcctcttctcctacaaatgaacccggtacacaacaagatttacaatctcatccacaatggcaaacccattagagaatccctcattgctgctctttacatcgatgaagttctgaattgactgatatgtcttgttgccttttg

SEQ ID NO: 262876 - DNA, 347 bp, Glycine max
ggcaccgaagaaatcagttataggcatattgcgagacaggaggtgcacaaacggattatctggacatgttcatgaaaaccacatggtcactaatatgcgacaggttcaagggataagacagtgaaaatctgggctcatagagagggagtctgtcaagcatcttatgtctttacctcaattgacgagtagcagtgacaccattatctccgatcggtctccatcatcggaagaataatggacttctagctgttcgaatggaaaaaggccaaatagagatgcggaatctgcctgataacacatcagatgatgggagcatatgaggaccaggtatggctgctcatcttgct

SEQ ID NO: 262877 - DNA, 390 bp, Glycine max
cgcaatgctgctcctggcgctgcaaactttttgactgatatgatatttactggacaccatgataatgctgaatttgctctagcgatgttcccaactgaaccctatgttcttatcagaggataggacatatcattctagtagcgtagcattgtagaccatataacttctgctgtcacagacattaaatgttgatgatcaattatgacacttgtctctcaatctgtagaaagctgtgatcgaactgctgatgagcctactgttcgaccaccatggatttattgcacgcatgaagatacagttgcagatgcgacttattgcccatttagtgcacaggagttctagattgctgtatatgattcttgggttatattatggtatgcacgtgttggc

SEQ ID NO: 262878 - DNA, 362 bp, Glycine max
cccacgcgtccgcccacgcgtccgcccacgtgttcgtggacgcgtgggctttagcttggatgtaccaccctaactaccctgattctgatcagattccttactttgaggatggtgattctgtgacatacattaatgagaaggaggggatcattgagtgcttgaaaaggaatgtgggtggcgatttagatagtgaggattcttttctacgtgattggataccaaccaaagtgatgtgtcccacttggtttgctgatgcactttgagtatgaactgtgggtgtgatgtgatggttcctctgcttattgcatctattattctgatcattacctggtctattggcatggtgctcttttggatgaaag

SEQ ID NO: 262879 - DNA, 458 bp, Glycine max
cgcaccagtttcaccgcacgaatatcttgttgtttggagcgatccgagaaaaactctgtgaacatgttggtttaccaggacctccttacaggtgatgagcttctctctgactccttccgttacaaggaaattgagaatggaatgctgtgggaagttgaggggaagtgggttgttaaaggagcagttgatgtagacattggtgcaaacccttctgctgagggtggaggagaagatgagggagttgatgatgcagctgttaaggttgttgacattgttgacacattcagacttcaggagcaacccgcattcgataagaagcagtttgttaccttcatgaagaggtttatcaagaatttgactcccaagctcgatgcagagcaacaggagttgtttaagaagcacatcgagggagcaactaaatacctgctctctaagattaaagatttccaattttttgt

SEQ ID NO: 262880 - DNA, 377 bp, Glycine max
tcccgaatcgaccgacgcatccacgcgtccgcgcaccagtttcatcgcactaatatcttgctgtttggagcgatccgagaaaaactctgcaggcatgttggtttaccaggacctccatacaggtgatgagctaatgtctgactccttccgttacaaggaaattgagaatggaatgctgtggcaagttgaggggaaacgcgcagttaaaggaacagttgctgtatacattggtgcaaacccttatgctgagggtggatgagaacatgaaggagttgatgatgcatatgttcaggttgatgacattgttgacacatttagacttcatgagcaacccggattctataagaaacagtttgttaccttcatgaagaggttta

SEQ ID NO: 262881 - DNA, 431 bp, Glycine max
cgcaccagtttcaccgcacgaatatcttgttgtttggagcgatccgagaaaaactctgtaggcatgttggtttaccaggacctccttacaggtgatgagcttctctctgactccttccgttacaaggaaattgagaatggaatgctgtgggaagttgaggggaagtgggttgttaaaggagcagttgatgtagacattggtgcaaacccttctgctgagggtggaggagaagatgagggagttgatgatgcagctgttaaggttgttgacattgttgacacattcagacttcaggagcaacccgcattcgataagaagcagtttgttaccttcatgaaaaggtttatcaagaatttgactcccaagctcgatgcatagcaacaggagttgtttaagaagcacatcgagggagcaactaaatacctgctctc

SEQ ID NO: 262882 - DNA, 460 bp, Glycine max
cccacgcgtccgcgaaaggtgacgttagtaagtaacaatggtggagaaggccaagggtaggaaggaggaggttgtcactcgagagtacaccatcaaccttcacaaacgcttgcatggctgcacatttaagaagaaggctcctaaagcaattaaggagataaggaagtttgctcagaaagcgatggggacgaatgatgtaagagtggatgtgaagctcaacaaggctgtgtggagccaggggatccggagcgtcccaaggaggattagggttcgcattgctcgcatgaggaacgacgatgaggatgcacaggaagagctctattcccttgttactgtcgtcgaaatccccaaggaggagctcaaaggtttggaaaccaaggttattgatgatgaagattgattatgtgttggttatatatcatgtattgtttttagttgatgtggatttgcgaatatcttt

SEQ ID NO: 262883 - DNA, 427 bp, Glycine max
cgcaaattcaaaggaggatctctcttgcgttttctctaggttctcgctatggcgtcgaagcgaattttgaaggagcttaaggatttgcagaaggatcctccaacatcttgcagtgccggtcctgttgttgctgaagatatgttccattggcaagctacaattatgggtcctccagacagtccctatgcaagaggtgttttcctagtgaccattcatttccctgcagattatccctttaagccacccaaggttgcattcaggacataggttttccacccaggtatacatagcactggaagcattagccttgatatattgaaggagcagtggagccctgctctaaccatttccaaggtgttgctctcaatatgatccctattgacggatccaaatgctgatgatcctttggtccctgaaattgcacaca

SEQ ID NO: 262884 - DNA, 456 bp, Glycine max
caccgtcacttttccttaacggcgaagctatcgccgaagggcacaaccgtcattggcactccaaaccgtttggtctatcctccactctccccatcccaataacaaagagaggaatcgaagtctgttccgttctgatcagaaagggaataacggtaacggagatatggggcttctgtctaacagagtaactagagagagcctgaaaccagtggatcacatctactcttggaggactgcttacatatacgctcatcacggcatttatgtcggcgatgacaaagtcattcacttcactagacatgggcaagaagtaggaaccggtactgcactagatcttctcctcatcagttcatgaccagccaagcctcgagaaagttgcccaacttgtacagcaccccaagaggaacacggtgttatctcctcatgcatgaactgctttctagctggtggcgttct

SEQ ID NO: 262885 - DNA, 452 bp, Glycine max
aattcccggttcgaccgacgcgtacgtccacgcgtccgacaaatcttatccgccattgatctttcctcttccatttctcttactttggcatcctttttcgattgggcatttggttatttcgccctaatggctcttgctccatccaaagtttccaccttttctggtttttctcccaaacccagtgtttgtggtgctcataaaaacccaacttgctctgtttctctgatctttttgaatgataaacttgtaagcagaaaccttaaagtttgtgcctcaactgtgcctctcactggtgtgatttttgaaccgtttgatgatgttaataagagcgagcttgctgttccaactgctccccaagtcctcttgtctcctcagaactactcttattagtgtgaatctgctattaactagcttataaatgttttatacaatgcttcctactcttaccactc

SEQ ID NO: 262886 - DNA, 455 bp, Glycine max
aaaatgaagagcaccatcttctttgctctctgtctcttttgtgccttcaccacctcatacgtaccttcagccatcgctgatttcgtgctcgataatgaaggtaaccctattgaaaatggtggcacatattatatcttgtcagacataacagcatttggcggaataagagcagccccaacgggaaatgaaagatgccctctcactgtggtgcaatctcgcaatgagctcgacaaagggattggaacaatcatctcgttcccatatcgaatccgctttatcgacgaacgccatcctttgagccttaagtgcgattcatttgcagttataatgctgtgtgctggaattcctaccgagtggtctgttgtggaagatctaccagaatgacctgctgataaaattggtgagaacaaagatgcaatggatggttggtttagacttgagagagtttctgacga

SEQ ID NO: 262887 - DNA, 150 bp, Glycine max
ccggtcctgaattcccgggtcgacccactcgttctgaaaataaaaaaaagccttttactttctttcttttgcatgatttgaatcttgatgtgaaaagcttcgaattggggtgttttacccatcaattcaattttaagccgtgccttcttc

SEQ ID NO: 262888 - DNA, 295 bp, Glycine max
gaatcaccgggccgatcgcacgcgttcgttcgcctatcaacaatgagtgcttgttggattagaaggatgtccgttgcttcatgaatcgggatgagtttgagcaactaagtcttccaattctggaacgtgtgaagggacctctggataaggcacttgctgaagcaggtcttaccgttgaaaatgtacacacagatgaggatgttggttcatgttcttgggtaccgtccattaacaaaatattgacagtatttttcaaaattgagcctatgcagacaatgaatgctagtgaatgtgt

SEQ ID NO: 262889 - DNA, 437 bp, Glycine max
caaaacaatcaacaatagcttgctagctactcctgttgctgtgagaaccgttggggtagatgctttgcaagcgagatttagagactccaacaataaaagccatgcttaacacctaccatgcctccaaactctcatcaaaccagtgtggttctagccttgtgcaaacaatagatgcacctttacctctcgtatggtccctcataaggcgctttgagtatccacaagggtacaagctctttgtgaagaagtgcaaccttcttgatggggatggtggcattggaagcgtgcgtgaggtcatgatcacatctgggttacccgctggtgttagtgtggagaggttggacaagctcgatgatgacaagcatgtcttgaaagttatcatcattggtggtgatcacaggcttgtcaattatagttcaacgattactttgcatgat

SEQ ID NO: 262890 - DNA, 392 bp, Glycine max
caaagacatccttctcctggatgtggctcctctcactctcggaattgaaactgttggtggagtcatgacaaagttgattcccagaaacactgttatcccaaccaagaaatctcaggtgttcaccacctatcacgaccagcagactacagtctccattcaggttttcgaaggccagaggagtctcacaaaggattgccgccttcttgggaaatttgatctgactggaattcctccagccccaaggggtacgccttagattgaagtgaccttcgaagttgatgccaacggcattctaaatgtgaaggcagaagacaagggcactggtaaatcagaacagatcaccattatcaacgaaaagggacgtcttatccaggaagaaattgagagaatgg

SEQ ID NO: 262891 - DNA, 460 bp, Glycine max
gaggagatatatgtacctaaacgaagagatcttgaaagagaatccaaacatgtgtgcttacatggcaccttctttggatgctaggcaagacatggtggtggtagaggtaccaaagctagggaaagaggctgcagtaaaggccataaaggagtggggccagccaaagtcaaagattacccacttgatcttctgcaccaccagtggtgttgacatgcctggtgctgattaccaactgaccaaacaattgggccttcgcccctatgtgaagaggtatatgatgtaccaacaaggttgctttgcaggtggcacggttcttcgtttggccaaggatttggctgagaacaacaagggtgcacgtgtgcttgttgtctgttctgagatcactgcagtcacattccgtggaccaagtgacactcaccttgatagtcttgtgggccaaacattgtttggagatggagct

SEQ ID NO: 262892 - DNA, 461 bp, Glycine max
cgcaccagtttcaccgcacgaatatcttgttgtttggagcgatccgagaaaaagtctgtaaacatgttggtttaccaggacctccttacaggtgatgagcttctctctgactccttccgttacaaggaaattgagaatggaatgctgtgggaagttgaggggaagtgggttgttaaaggagcagttgatgtagacattggtgcaaacccttctgctgagggtggaggagaagatgagggagttgatgatgcagctgttaaggttgttgacattgttgacacattcagacttcaggagcaacccgcattcgataagaagcagtttgttaccttcatgaagaggtttatcaagaatttgactcccaagctcgatgcagagcaacaggagttgtttaagaagcacatcgagggagcaactaaatacctgctctctaagattaaagatttccaattttttgttgg

SEQ ID NO: 262893 - DNA, 466 bp, Glycine max
ttttatctttattccactgaatagaacatgagcatataaatggataccctttatattatggatctttatattatctataaagggtaaagatatccgatgtgaatctatttgtttagttttctatcggtatgtatataggtgaataatccaacatgcctttttgtgaagtaaaaaaactaccctcgatccatgcctcaaaagggttgataataagtaaaaaaaatcaatgaattcatgataaaacccttctgcgtttttttattataaatttttttgtcaataaagggatcaaggggttgggggatcaaatggtaaagttcttttgttggtaaattggaggattagaaacatgactattgctttccaattagctgtttttgcattaattgctatttcatttattttattgattagtgtacctgttgtatttgcttctcctgaaggttggtcgaataacataaatgtt

SEQ ID NO: 262894 - DNA, 387 bp, Glycine max
cttatacttctcgatcttgtacttgtatgttgtccaccataatgctgagcacgcttgcgtgggggccacgcaagaacaagagctgtcacagttgccgatcaccttaacgactatgatctcacctcaatcaacggctatgcctattggcttggacatggagtctaccattctggggttcaagtgcatggattggaatatggataaggcgcgcacgagcacgactcaacggcgattttcgaattacaaccgaatcactgctctgaggtcaatttcagaaagtcaatggtcctctgtacaacagatctgggtccgaaagatgttcgagcattcatggaaaagctggctcatgattactgcggacacagctatcatctcatttccaagaat

SEQ ID NO: 262895 - DNA, 467 bp, Glycine max
cccacgcgtccgagaaggcctgggcttagttgataagcataactgggtgaggaagaaagagagagagtgaagaagatggcgtcgagcggagcggtaccgttttggagggcggcggggatgacgtacataacatactcaaacatatgcgcgaatctgctcaggaattgcctcaaggaaccctacaaggccgaatccctctctcgtgagaagctccattttgttctctccaaatgggtcgacgccaagcctgaaaaacctactattcgttcagacaccccagagcagtgatctggaatagttggaagctataaatgcataaatctttgagatctggaagttcattgtcattttgaacctttctgtgatgtttaattcctttgtttttttctctccatgaaatggaacatgcactggattttgatttgcacggttaatcttggaataatacaagtttaaacgaatgattt

SEQ ID NO: 262896 - DNA, 446 bp, Glycine max
cccacgcgtccgcccacgcgtccgaaaaaaatgggttcttcttcttccatatgggccgtgtgtttgattttggcatcactggcctctgcagcactctgtgccaaccctcgtagaccagtggatgtacaatttggccgaaactacgtgcccacatgggcctttgatcacatcaaatacttcaatggaggttctgacattcagcttcatcttgacaagtacactggtactggcttccagtccaaagggtcatacttgtttggtcacttcagcatgtacataaagatggttcctggagattcagctggcacagtcactgctttctatttatcttcccaaaatgcggagcacgacgagatagactttgagttcttggggaacagaacaggacaaccttacattttgcaaacaaatgttttcacaggaggcaagggtgactgagagcaaag

SEQ ID NO: 262897 - DNA, 276 bp, Glycine max
gtctgacatactgtgccgaaactgacagttctttatgaataccatgttgcccatggatgagagatggtgccaaccattgcatggagcatgcccatcgaatacattgactgactgatgtacacaatcttaacatgaagaaagaatgctaccctgatgcatagggctcatatgaaccagctaatcctcaatggaaacgactctgtacaaattgttgataagatggccactgtagctgctgctctgctggcacgcagaactgctttcattgatgcattc

SEQ ID NO: 262898 - DNA, 447 bp, Glycine max
cccacgcgtccgcggacgcgtgggttgaaaacgacccgtttcctccctcgcacggatccagccgaaatctgagattccttcgaattgttaactctctttcagtttcaagttggaaactttttcgattttcgctttctggaggtgtgaattgttgtttgaaagtcacaagcaatggtgaaggacactgcgtattatgacatattaggtgtcaattatgatgcatctgctgcagagatcaagaaagcttattatgtcaaggctagaattgttcaccccgataaaaatcctgaggatcctaaggccgcagaaaactttcagaaacttggtgaggcttaccaggttttaagtgatcctgggaagcgtgcggcatatgatgagcatggaaaggagggagtaccacaagattccatgatggaccctacaactgtatttggaatgatttttgga

SEQ ID NO: 262899 - DNA, 455 bp, Glycine max
ctcactcgtccggactgctcatgatgtatcgacaatgttacggtgcggtcaggaaaccatgatctgtctgatgaacaatggtggatacaccatcgaggttgaaactcatgatgtgccgtacaatgtgattaacaactgcaattactctgggttgattgatgcaatccacaatggtgaacggaaatactggactgccaaagcgcactgtgaaaaggagctagttgaagcaattgccacagtcacaggacccaagacagactgcttatgcttcattgatgtgattgttcataacgatgacaccagtaatgaagtgctagaatggggctacagggtttctgctgtcaatatccgtgcgtcaaatcctgagtgatcatgagaatatattctatgactaagttgctgcagatgcccattagctctatgaaagggagaatcatgttgaatgatgcccttgt

SEQ ID NO: 262900 - DNA, 439 bp, Glycine max
gttgttttcgttcctctgaagtctggagtgtgtggagcttggttcgtttgaaatggtgcctgaagagcagggtgttgtggaaatggtcaggacagcatttggggaatccagtcctggacaggcaaaggtgtttccaaagatttttgggcatgagttaagcctgggggatacaaaatctcagtctataactattagtttctccccaaaggtggaagatgatccgggtttcacttcagactcctatgaagttcaagcactaggggtgaaccatgcttatggaaattcttccaatgggactttaggtgacggtaatgaaggaacattgtttcctcaattgaatcaaatgatggctgggaattttaatgctcaagcaagggtttcttgtctagatctcggtaatgaagactcatcatcaattcatgcagatgaacggaagccc

SEQ ID NO: 262901 - DNA, 410 bp, Glycine max
cgcaaattcaaaggaggatctctcttgcgttttctctagggtttcgctatggcgtctaagggaattttgaaggagcttaaggatttgcagaaggatcctccaacatcttgcagtgccggtcctgttgttgctgaagatatgttccattggcaagctacaattatgggtcctccagacagtccctatgcaggaggtgttttcctagtgaccattcatttccctccagattatccctttaagccacccaaggttgcattcaggacaaaggtttttcacccatatataaatagcaatggaagcatttgccttgatatattgaatgagcagtggaagccctgctctaaccatttccaaggtgttgctcttaaatttgtccctattgacggaaccaaattctgatgatcctttgg

SEQ ID NO: 262902 - DNA, 397 bp, Glycine max
  unsure (1)..(397): unsure at all n locations
aaaaacggctcatagttaatctctacagcggtacgatgaagtttgacgatttggcagagggatgcatggcaaatatactgggctacaccactcgtgcggatgtatgcaggctatctctggtttccaaagcctttcattccgcgattgatgccaacactgtgtggaacagctntctcccctctgagttggcctctatcatcttcccttgttcttccagcactccctttcgctctattaatgatctctatctctatatctacgatcgtaccaccatcatcgatcaaagcataaagagttttcaattgtagaagcgcacctgagacaagggctacatgctttccgcttgagaactgagcattatatggggtgacactactcattattgtgagtggacaac

SEQ ID NO: 262903 - DNA, 525 bp, Glycine max
cgcgtcgctgctccgtaccagtttcactgcataaatttgagagaaaactctgcaaacatgttgggttatcgggacctccttacaggtgatgagcttctctcggactccttccgttacaatgaaattgagaatggaatgctgtgggaagttgaggggaagtgggttgttaagggagcagttgatgttgacattggtgcaaacccttctgctgagggtggagaagatgagggagtcgatgacgcagctgttaaggttgttgacattgttgatacattcagacttcaggagcaacccgcttttgataagaaacagactgttaccttcatgaagaggtttatcaagaatttgactaccaagctcgatgcagagaaacaagagttgtttaagaagcacattgatggagcaactaaatacctgctctctaagattaaggatttccagttatctgttggggagagcatgaatgatgatgcttgcttgtactgtgcatactacaaggatggtgctgctgatcccacattctta

SEQ ID NO: 262904 - DNA, 432 bp, Glycine max
ggcagaatcactcccttatccatttacacaccacaccttggcctcaaccaacgctctctcttcagcctccattctacgctctcccaaccgccagtctctgacccgaagagcgaaccataatggaagagtaaattaccggaaaccgaataaccgtttctccgtgaaagcctccgccaaagagattgcctttgaccagcattcccgctctgctatgcatgccggcattgacaagctcgccgacgctgttgggctcactcttgggcccagagggaggaatgttgtgttggatgagtttggaagtcctaaagtggtcaacgatggtgtcaccattgctcgcgcaatcgagcttaccgatcctatggagaatgctggtgcagctcttatcagagaggttgctagcaagactaacgactctgcgggtgatgggactac

SEQ ID NO: 262905 - DNA, 518 bp, Glycine max
  unsure (1)..(518): unsure at all n locations
cccacgcgtccgtcaagcattgcatccctcttgatttgtagtttgttttgtgctttagataaaagttctgccaaatcaagaggggttttaagatcatagtgtgtgttttgcaacaatggctaagttctttgctgctatgatcttggcactctttgccatttccatacttcaaacagtggtaatggctgctaatgaacaaggaggccacttgtatgacaacaagagcaaatatggaagtggaagtgtcaagagttaccaatgcccatcacaatgctcgaggagatgtagccagacccaataccacaagccctgcatgtttttctgtcagaagtgctgcacgacatgcctgtgtgtgcccccggagtattatggtaataaagctgtgtgcccttgctacaacaactggaagaccaaggaaggaggacccaagtgcccttgagcttcaacttgttcaacttcaattggcgctttcctacatttntatggcttcctttcttgtgccaaattaatgcactagc

SEQ ID NO: 262906 - DNA, 469 bp, Glycine max
cccacgcgtccggcgagcaccgcctacttcttgctctgttcatcgtctaccgcgctatattttcgaccagacctatgattaagctttttaaagtcatggaaaagcatagagaacttgcactaaatgcaagtggcggaccacctgttaagaagcatagagctggatagctgcgtcttcacatagatattagtgagctgcatctaccacaatcatgtgccatgcaattccccaatggcaaagatgatctgatgaacttcgaaggttcaattcgacctgatgatggatattacttaagtggcacattcatgctctgcttgcaagtgtgtcccatgtattcacacgaatcaccaaaggttcagtgtaagacatatggctatcatgcaaatattgacttggaaagcaatgttagtatcaacgtcttacgagaagattggaaacctgctcttaatatatacactgtcatctatgg

SEQ ID NO: 262907 - DNA, 482 bp, Glycine max
tccacgcgtgcgggcataaccaagattgaaggctctttacggaaagtctattagccgcttcagaattatcatgggttgttaaaagtccgacctaatgctttgtacgtatgctgccaaattcaaactcaaaaacggaaaatcgcatattttttgtaatttagtttgatttttggatttatatatatatatatatatatatatatatatatatgtgtgtcagttgagttttaaaattatgatattctctgtcattggtctcattatgactttttaatgatgtaagttgacaaatgtcgaaatttgatgccgcgttataaactgctaaatttaagataaatcaatgagaaagcatattagaaaatagcattatttcacttatgaaagtatctaattttattgagaataataaatatctatgatataaatatctatgtttagttgttattacactatgtatcttatctcacttatcgtcctatata

SEQ ID NO: 262908 - DNA, 376 bp, Glycine max
ggcagacgcactcccttatccatttgcacactataccatggcctcaaccaacgctctctcttcagtgcatcatgctacgctctctcaaccgccagtctctgacccgaagagcgaaccatattggacgagtaaactaccgctaaccgaataaccggctcatcgtgaaagcctgcgacaaagagattgcactcgaccagcattcccgttctgatatgcatgcacggcattgacaagctcgacgacgctgctggtctcactcttgtgcccatatggaggaaagttgtgttggatgagtatggaagttctaaagcggtctacgatgacgtcaccattagtcacgcaatcgagcatgctgatcctatggagaatgctggtg

SEQ ID NO: 262909 - DNA, 480 bp, Glycine max
cccacgcgtccggcgagaaccgcttacttcaacctgtgttcatcgtctaccgcgctatattttcaaccagagctatgattaagctttgtaaggtaatggagaagctgagagaacttgcagaaaatgcaagtggtggaccacctgttaagaatcatagtgctggagagttgcgtcttcacaaatatatagctgagctgcatctacgacaatcatgtgccatgcaattccccaatggcaaagatgatctgatgaacttcgaagtctcaattcgacctgatgatggatgttacttaagtggcacatttatgctctgcttgcaagtgtgtcccatgtattgacacgaatcaccaaatgttaagtgtaagacataggtctatcatgcaaatatcgatttggaaggaaacgtgtgtatcaacgtcttacgagacgattgcatacctgtccttaatagaaacactgtcatcgatggcttgtatcatc

SEQ ID NO: 262910 - DNA, 114 bp, Glycine max; identical to SEQ ID NO: 262864

SEQ ID NO: 262911 - DNA, 271 bp, Glycine max
tccacacgttcgggctaagctcattctacatcagtgcaaacactctctctcatggcatgagataagaagattaggagcggcatcaacggatttgaaaggattgagcgctgggtggccactggtgcccttcaaaggaatgacgatgaacttgatgctgacaacaatcctttcatcaccactgattacatgacatacatgctcaagatcgacaccggtcatggccaggggaagcatttggatgggaatgtgaaggactctgagacccttctct

SEQ ID NO: 262912 - DNA, 390 bp, Glycine max
  unsure (1)..(390): unsure at all n locations
cttctccttctcaatcttgtaattctatttcctccaccataatgctgcgcaagcttgtgtgangggcacgcaagaacaagcctggcacagttcccgttcacctcaacgtctatgatctcaccccaatcaacggctatgcctattggcttggccttggagtctaccattctggggttcaagttcatggattggaatatgggtttggtgcgcacgagcacgacacaacggggattatcgaagtccaacccaaacactgccctgggttcactttcaagaaagtcaattttcatcggaacaacagatctggttcctaaggatggtcgagcattcatggagaagctggctcaagattactccggcaacacctatcatctcatttccaagaattgc

SEQ ID NO: 262913 - DNA, 355 bp, Glycine max
cgcaccagtttcaccgcacgaatatcttgttgtttggagcgatccgagaaaaagtctgtgaacatgttggtttaccaggacctccttacaggtgatgagcttctctctgactccttccgttacaaggaaattgagaatggaatgctgtgggaagttgaggggaagtgggttgttaaaggagcagttgatgtagacattggtgcaaacccttctgctgagggtggatgataatatgagggagttgatgatgcagctgttaaggttggtgacattgttgacacattcagacttcaggagcaatccgcattctattagaagcagtttgttaccttcatgaataggtttatcaagaatt

SEQ ID NO: 262914 - DNA, 436 bp, Glycine max
ctgagttgcaagattcacttcaaattatgcgtttcgctgatcggttcctcatcacatcagacgaggtcgcagatcatcgcaattccttgattatttccttttgttgatacgcggaatcgcgcacacggtgctggtgtgtgcactgaggtagaaagaagaagattgaattgtaaacagcgtgaattaccttcttggagctttcaagcctgcatgtaatgtcttgatcacgtttaatgatgggaagaaccggaagcaggttccgtttaaaaaagaaaatggtcaaatggtcacagtcccacttttccaaagtcaagaaaacattggtgggaagattacaatagaaccaatgcaagggaagaagattgatcacaatggtgtaaaagttgagctccttggacagatagagatgtattttgacagaggaaatttttatgac

SEQ ID NO: 262915 - DNA, 311 bp, Glycine max
  unsure (1)..(311): unsure at all n locations
cggaattcccggtatgacccacgcgtccgcgcaccagnnacaccgcacgaatatcttgttgtttggagcgatccgagaaaaactctgtgaacaggttgttttaccatgacctccttacaggtgatgagcttctctctgactgctgttgttacaaggaaattgagaatggaatgctgtgttaagttgatgggaagtgggttgttaatggagcagttgatgtagacattggtgcaaacccttctgcatagggtggaggagaagaagagggagttgatgattgcactgttaaggttggtgacattgttgacaca

SEQ ID NO: 262916 - DNA, 441 bp, Glycine max
  unsure (1)..(441): unsure at all n locations
cccacgcgtccgcggacgcgtgggggtttttgtggataagagtgagctataggggctgccaggagaccgggtttaattgctttgtttgatgttgacgggactcttacagctcccaggaaggtggtcacaccggaaatgttgacattcatgcaagaactacgaaaggttgtaacggttggagttgttgggggttctgaccttataaagatatcagagcaacttggcagcacagttaccaatgagtatgattacgtattttctgagaatggtcttgtggctcacaaggaaggaaagctcattggaactcagagcttgaagtcattccttggtgaagaaaagctcaaggagtttattaactttacacttcattatattgctgatttggacatccccattaagaggggaacatttatggagttccgtantgggatgctgaatgtc

SEQ ID NO: 262917 - DNA, 403 bp, Glycine max
gcaaatacctagaatccttttataccttacgcaagcctgtggcatccactatagatacggtggcatgagcactttacaaggttttttgcgcatcacctgatccagcaatgaaggatatgcgccaagcttgcttcgattatcttagtcttggaggtctattctcggaagggccaatctctttgctttcaggattaaaccctcggcccttgagcctggttctccatttctttgctgttgcaatatatggggttggccgtttactgctaccatttccttcacctaaacggatgtggattggagttcgattgatttctagtgcatctggaatcatcttgccaataattaaggcagaaggagtccgtcagatgttcttccctgcaactgttccaacttactatagaaa

SEQ ID NO: 262918 - DNA, 428 bp, Glycine max
  unsure (1)..(428): unsure at all n locations
cccacgcgtccgagaaggcctgggcttagttgataagcataactgggtgaggaagaaagaaagagagtgaagaagatggcgtcgagcggagcggtaccgttttggagggcggcgagtatgacgtacataacatactcaaacatatgcgcgaatctgctcaggaattgcctcaagtaaccctacaaggccgaatccgtctctcgtgagaagctccattttgttctcttcaaatgggtcgacgccaagcctgaaaaacctactattcgttcagacacctcatagcagtgatctggaatagttggaagctttaaatgcataaatcgttgagatctggaagttcattgtcattttgaacctttctgggatgtttaattcctttgttnttttctctccatgaaatggaacatgcacatggatttgatttgcac

SEQ ID NO: 262919 - DNA, 400 bp, Glycine max
ggaaaacgaccaaaacttcaactacaactcgcagcctcaggcttcgtacaaaggtgcaggtcttggtgctgctggagggataggtcagccactcgcgcttgtcatgaagatgtcgcctctagttgccgacctgcatctctatgatattgcgaatgtcaagggagttgctgctgatatcagtcactgcaacatcgcctcacaagtcagggattgcactggagcttctatgatggcgaattgttttgaggatgtgaatgttgttgtcataccctccggtgttccaaggaagcctggcatgactcgtgatgacctttgtaacatcaatgccggcgtagtcagggacttggtttctgctgttgcggataatagccctgatgcttttattcaaatcatcagtaac

SEQ ID NO: 262920 - DNA, 431 bp, Glycine max
  unsure (1)..(431): unsure at all n locations
cccttatctttctctattctctctccccgcccaaaccctaactccctaccctattccgcgttctctcatccatcatgaaaggaggaaagtccaagaccgaatctaatagagccgatgccaaacttgctgcgaataagaagggcgccgccaccaagactaggaaacccgccggaaaggggaaggcagcgaaagatcctaacaagccaaagaggcctcctagtgctttcttcgatttcatgtaattataatatattgttatctctacgattcatttgacttccgattcgctctcttatctttcctccgaataattgtatcgtcaaaacttttatccttggccaattgtaagtccacgcgttctttacctgttgttgtttggttacctcgattgctttattgttaaaattatgatntttgagtatgctagatct

SEQ ID NO: 262921 - DNA, 439 bp, Glycine max
cccacgcgtccgcccacgcgtccgcccacgcgtccgcccacgcgtccgtctggctctgtctcgtcactagctctgtgcattcttctctcgctctctgccttccatcacactcggcatttcctttcccaagatagtagaagatggcacacactgaggatattcaacctcttgtttgtgacaatggaacaggaatggttaacgctggatttgctggagatgatgccccacgtgctgtgtttcccagcattgtaagtcgtcctcgtcacactggtgtgatcgttggcatgggccaaaaagatgcatatgttggtgatgaggcacaatctaagacgggtattttgactctcaagtaccccattgaacatggaattgtgagcaattgacatgatatggaaaagatttggcatcataccttctataatgagcttcatgttgcccc

SEQ ID NO: 262922 - DNA, 445 bp, Glycine max
cggacgcgtgggctgagaaaccctccactctcgagtccaaactctcctcctagccaagatggatgcaagggcatcatcttcttcagcttcctcgattcttttccttgcagcaattgtagctgcttatttctattcatcagaagcagctgtgtccaaaggatcttttgaggacaatttcagcataatgtggtctgaggaccattttactacctctaaagatggacagatctggtatctctcactagacaaagacacaggatgtggatttcaaacaaaacaacgctacagatttgggtggttcagtatgaagctgaagttggtagcaggtgactctgctggtgttgtgacagcttattatatgtgctcagaaaatggtgcgggaccagaaagagatgagcttgattttgagtttttggggaacagaacaggagagccttatttgatt

SEQ ID NO: 262923 - DNA, 284 bp, Glycine max
acgcggccgctctgctgcggaggctgctgcttcacccatccacaaacgatcacacactttgagtgaggatggggcgtgttctcacaaagacagtgaagaagacctcgcgtgaagtgatggagaggtactactctcgcatgactctggacttccacacgaacaagaaggttctggaagaggttgccgtcattccctccaagaggcttcgcaacaagatcgcgggatattccacccacctgatgaatcggatccctaatgggtccgtacgtggaatctcccttaag

SEQ ID NO: 262924 - DNA, 442 bp, Glycine max
cattctcctctctgaattcctcttattcaggaatttggagagtattgatatatcaaggtaggataaaccagtagccaaggaagatatggagttttctatgattttcattgttagcaacattatgctgcttttcagttcagcatttgccaaaactgctagtcctccctctctgagcccaactccagcaccagccccggcaccagacttcgtgaacctcactgagttactcagtgttgctggtccgtttcacaccttccttggataccttgagtccactaaagtgattgacactttccaaaaccaagccaacaacactgaagaaggaattaccatctttgttcctaaggacagtgccttcaatgctataaagaaaactaccctatccaacctcacctctaaccagctaaagcaagtgatcctcttccatgccttgccacatttc

SEQ ID NO: 262925 - DNA, 397 bp, Glycine max
atttgttgctgcaggaattcacagcccggcctgatatagcagatgattgttttttgttggcctcaaggtgtattcgctactgtcctcaactgtttattccctcgtctgttaatccttcattagtggattgctctatgattgggatcacagtacagcataaggaggcttcgaattccatattgcatttcttggctgacatttttgatcttgcgaattcctctgtgggggagcaatttataccaataagagatagtgtaataattcctcgaggggccagtatcaccagaatgttaggtgcttcattaacgggagcacttgctaaatctcgagtggatgtggaatcttatacactcctggcattaactcgatcatatgggatgcaagcgctggaatgggc

SEQ ID NO: 262926 - DNA, 310 bp, Glycine max
  unsure (1)..(310): unsure at all n locations
cggaattcccgggtcgactccacgcgtccgggcggcgctgtggcggacgcgccggcggtggttgaggagaagacggagttcgacgtggggatcgaggaggtgccgagcaacgctcgaatcgcggtgattaaggcggtgatggcattgactaacctagcgctgatngaggctaaggagttgatcgaatggttgccgaagaagttcaaggaaggggatttcaaaggacgaagctgtagatgcgaagaagcaactctaagaagcttgtgccatggttaccattgcttaaacactgtttagctgcagcatatat

SEQ ID NO: 262927 - DNA, 365 bp, Glycine max
tgcaaacatcacaatgaggctctctaattaagactcttacgaacaaattagagcgccgtttaaaccgaacacagggggcatctaatcggaaattattaacaccactgaagatacaatggtctccaccacctttaaggtcgatactataccaaatgcatttacctcatacgctagaaatacccagaatattaacatgcagacacttgtctctcagtattacaacacgtggtgatacatcacaactaccaataacctgattacactcacagaccagatacataaaatactctggactgttatactataaactacattacacatgctaagctaccttgcatctgccctcaaacaaagaatgtcatact

SEQ ID NO: 262928 - DNA, 301 bp, Glycine max
gatggcggcgtcgcggcgtctccgggacctccaatcccaaccggcgaacaagatctgggtggactgttcccagaagaacccgcaatgggcctccgtatcgtacggcgtcttcatgtgcctagagtgctcaggcaagcaccgcggcctgggcgtgcacatctccttcgtgcgatccgtgacgatggattcgtggtccgaaatccagatcaagaaaatggaagccggaggcaacgacaaactcaacgccttcctcacgcaatacggcatccccaaggaaaccgacatcgtcggcaagtacaac

SEQ ID NO: 262929 - DNA, 317 bp, Glycine max
cggacgcgtgggttatcctaagtctttgggaatagtgctgcaatggcttcaagtcaggaggaggtgacccttttgggagctactggaagcccatttgtgtgcagggttcatattgccctcaagttgaagggagttcaatacaaatatgtcgaagaaaatttgaggaacaagagtgaactgcttctcaaatccaacccagttcacaagaaggttccagtgtttattcacaatgagaagcccatagcagagtctcttgtgattgttgaatacattgatgagacatggaagaacaaactcatcttgccttctgatcctta

SEQ ID NO: 262930 - DNA, 269 bp, Glycine max
gcgtccggtctcatacgctgaactgaaaaggaccgtcttttatgacttgcacgcagacaatggagaggagatggttccgttagatggatggagaatgccattccaatacgaggactcagattagagactgctgcccttagctgtaggagagaatggcagcacaatatgacgttgacgatatgagcggtctaatcctccaagggaacgactctgacacgatgattgcgaagctcagtatcgctgacgatgctagtcttgactctgtaact

SEQ ID NO: 262931 - DNA, 346 bp, Glycine max
cgcaaattcaaaggaggatctctcttgcgttttctctaggttttcgctatggcgtcgaagcgaattttgaaggagcttaaggatttgcagaaggatcctccaacatcttgcagtgccggtcctgttgttgctgaagatatgttccattggcaagctacaattatgggtcctccagacagtccctatgcaggaggtgttttcctagtgaccattcatttccctccagattatccctttaagccacccaaggttgcattcaggacaaaggttttccacccaaatataaatagcaatggaagcatttgccttgatatattgaaggagcagtggagccctgctctaacca

SEQ ID NO: 262932 - DNA, 400 bp, Glycine max
ctcggtctggaattcccgggtcgacccacgcgttccgcaccgcacgaatatcttgttgtttggagcgttccgagaaaaactctgtaaacatgttggttgaccaggacctccttacaggtgatgagcttctctctgactccttccgttacaaggaaattgagaatggaatgctgtgggaagttgaggggaagtgggttgttaaaggagcagttgatgtagacattggtgcaaacccttctgctgagggtggaggagaagatgagggagttgatgatgcagctgttaaggttgttgacattgttgacacattcagacttcaggagcaacccgcattcgataagaagcagtttgttaccttcatgaagaggtttatcaagaatttgactcccaagctcgatgc

SEQ ID NO: 262933 - DNA, 345 bp, Glycine max
cggaggcgtgcgcccgcgcgtccggtgatttcagtgagtgattggtgttcacttgatctcatcataatcgtgagggtgtattgaagaagatgccgatcagaaacatctacgtcggaaggcctgaagaggcgactcaccccaacacgttgaaggcggctttgactgagttcatctgaaccttcatcttcgcgttctgcgtctcatgctcccgcatctcctacaacaagctcaccgacaacggcgctgacacccctgccggactcatctcctgcttcatcgtccatgcattacgcctcttcgtcgccgtctacgtcagcgccaacatctccggcggccacgtcaacc

SEQ ID NO: 262934 - DNA, 205 bp, Glycine max
cgcgtccggctaggtctagctagcagtctcagtccaggatagagagaaaaaatggcagagggtctaatgcgtcggattttccatgcgcgcatagaccgacgtcgagacggcgattgccactcccatcgacaactacgacatgatcgtgacggcatcacgcgacagatccatcatactatggcacctgaccaggaagacaagacct

SEQ ID NO: 262935 - DNA, 406 bp, Glycine max
cggacgcgtgggctgagaaaccctccactcttgagtccaaactctcctcctacccaaaatggatgcaagggcatcatcttcttcagcttcctcgattcttttccttgcagcaattgtagctgcttatttctattcatcagaagcagctgtgtccaaaggatcttttgaggacaatttcagcataatgtggtctgaggaccattttactacctctaaagatggacagatctggtatctctcactagacaaagacacaggatgtggatttcaaacaaaacaacgctacagatttgggtggttcagtatgaagctgaagttggtagcaggtgactctgctggtgttgtgacagcttattatatgtgctcagaaaatggtgcgggaccagaaagagatgagcttgatttt

SEQ ID NO: 262936 - DNA, 294 bp, Glycine max
  unsure (1)..(294): unsure at all n locations
cttgatgatcccaacactttcggtaacaggtatcacaggatgctgaagcttggactgagcatggatgaagatgctggtgaagcagatgctgacatgcctcctgttgaggacgctgatgcagatgctgagggtagcacgatggaagaagctgatcaaagctgacttaattgcctgttacgtttatagaaacaatgattggagaaacagtctttntactatgtcttatgtgctttgaattttcgaaattttggaacgttggctagttatgagccgtatgtagtagtttctttatgg

SEQ ID NO: 262937 - DNA, 279 bp, Glycine max
gccacgcatacgggaggtctctggaaggatattaatggaattgatgataagacggatgccagcatggtttgagaagaccaagaagagataacggtagaacttacggaacatactgactgcaataaattgcgaatgatggcatgtcgacctgcaccgagtcaggtgacttggatggggtatgccactgcatcatgatagactacaagtgattatagaatcactgattcactggcagaccctactgaatcatatcacaagcatgtagaggagttcgctaga

SEQ ID NO: 262938 - DNA, 339 bp, Glycine max
cgtccgcccggacggactccctcacccatttacacatcatatccatggacttaaccaacgctctctgtaggtcctacatgctacgctctgccaaccgccagtctctgacccgacgagcgaaccataacgctagagttaataaccggaaaccgactaactcggctctccgcgaaagactacgccaaagagattgccatgagccagcatagccgctctgctatgcaagccggcattgacaatctcgccgacgctgctgggatcactcttgggctcagaggtaggaacgatgcgatggatgagtttggaagtactaaagtgagcaacgatggtgtcaccatt

SEQ ID NO: 262939 - DNA, 298 bp, Glycine max
ggcggcgctgtggcggacgcgccggcggtggtcgaggagaagacggagttcgacgtggtgagggaggatgtgccgagcaacgctcgaatcgcggtgattaaggcggtgagggcattgacgaacctagcgctgaaggacgcgaaggagttgatcgaagggttgccgaagaagttcaaggaagggatttcaaaggacgaagctgaagatgcgaagaagcaactcgaagaagctggtgccaaggttaccattgcttaaacactgtttagctgcagcatatatggtctgcttcttcttttgg

SEQ ID NO: 262940 - DNA, 354 bp, Glycine max
  unsure (1)..(354): unsure at all n locations
cccacgcgtccgtcaagcattgcatccctcttgatttgtagtttgttttgtgctttagataagagttctgccaaatcaagaggggttttaagatcatagtgtgtgttttgcaacaatggctaagttctttgctgctatgatcttggcactctttgccatttccatacttcaaacagtggtaatggctgctaatgaacaaggaggccacttgtatgacaacatgagcaaatatggaagtggaagtgtcaagagttaccaatgcccatcacaatgctcgaggagatgtagccagacccaataccacaagccctgcatgtttttctgtcagaagtgctgcangacatgcctgtgtgt

SEQ ID NO: 262941 - DNA, 291 bp, Glycine max
cgtccgcccgctcgtacgctcgaaagcactaccacatgcttctgacgactgctcatgagtatctgggcggggtgccttatgaagctaggtacttaaacgatgagctcaattctcatgataatgcgtataatagacatcatcgtgacatcggcgtacgagatcttgagtcaattcatcttctatggatactacttgatgtccatgagctttacgcactctaaacaaactttgggagaattcctacaggatgcagtcatgtacatcggtcatgacatgattacttaggccaag

SEQ ID NO: 262942 - DNA, 299 bp, Glycine max
cttggctctgaaaaaacatgttgagggttgcagctagaaggctctattattctctctcagcggatgctccgttgcggaccaatcacgccgatttcgctatgatctctcgaaacgacgtcgacgacgaggaccgcagatctgatgctgactacaatccgattgttcactttagaggacatgctactgaatgcctgatccacacataagataacagcattacatctgagattccgccaactgttactgctgttaagaaccctacttctaagattgtctatgatgatcacaaccatgaaaga

SEQ ID NO: 262943 - DNA, 426 bp, Glycine max
  unsure (1)..(426): unsure at all n locations
aattaccgggtcgaccgacgcgtccgcccaggcgtccgtccacgcgttcgaaaaaaattggttcttcttcttccatatggatccgtgtggtgattttggcatcactggcctctgcagcactctgtgccaaccctcgtagaccagtggatgtacaatttggccgaaactacgtgcccacatgggcctttgatcacatcaaatacttcaatggaggttctgacattcagcttcatcttgacaagtacactggtactggcttncagtccaaagggtcatacttgtttggtcacttcagcatgtacataaagatggttcctggagattcagctggcacagccactgctttctatttatcttcccaaaatgcggagcacgacgagatagactttgagttcttgggggaaccagacaggacaaccttacatt

SEQ ID NO: 262944 - DNA, 430 bp, Glycine max
cgcgtccgcgacggtctcgataagcacttggaacgattttttccttccacttctcgccccatcacctcgggctccaagaattccaacctccaagtggaggaatctgaaacggagagtgaagagtctgatgttagtggctctgatggggatgacacctcttggatctcgtggttctgtaatctcagagggaatgagttcttttgtgaggtggatgatgattacatacaggatgactttaacctatgtgggttgagcagtcaagtgccctactatgattatgcccttgatttgattctcgacgtcgagtcgtcccatggtgacatgttcacggaggaacagaatgagttgattgaatcagcggcggaaatgccttatggtctgattcatgccagatatgtgttgaccaagcaaagaatggctgccattgctg

SEQ ID NO: 262945 - DNA, 434 bp, Glycine max
cccgggtcgaccgaagccgtccgcccgggcgtccggagggctcagaggaactttgatgcgagtagggaccggtcgttgccggtggtgggtgttggagttgtgtttattgatgagagtgccgtgttgccgattccttctaatgaaatggaggaagcggttgaggttgttagtgaggttgtgtcgagtttggccccaccaaggaaggagttgcatattgttcctattgagaccgtttattcctcggattctggtgatgggaaggagaggataaccaaggtagtgaacacagtgattgatccaacgggaagggaggatgtattgctctgtctgcgaatgttggcgctacaaaaagttgcttcttgaattgggtataacaggatcattctggggtcatgcatttcgaggattgcttgccatgtcatttcagccactgt

SEQ ID NO: 262946 - DNA, 436 bp, Glycine max
  unsure (1)..(436): unsure at all n locations
cggacgcgtgggttatcctaagtctttggttttagtgctgcaatggcttcaagtcaggaggaggtgacccttttgggagctactggaagcccatttgtgtgcagggttcatattgccctcaagttgaagggagttcaatacaaatatgtcgaagaaaatttgaggaacaagagtgaactgcttctcaaatccaacccagttcacaagaaggttccagtgtttattcacaatgagaagcccatagcagagtctcttgtgattgatgaatacattgatgagacatggaagaacaaccccatcttgccttctgatccttaccaaagagccttggctcgtttctggtccaaattcattgatgataaggtttttggtgctgcatggaaatcncgtttcacagctgatgagaaagagcgtgagaagaatgtgaggaagcaat

SEQ ID NO: 262947 - DNA, 354 bp, Glycine max
  unsure (1)..(354): unsure at all n locations
agacagcagagcagagatctagcgtattctcttgctctttctttcactgtcacagagccacagtgcatgggcttcccagccaacggcgcctctgcggcccagcccctaaacttcctcatctacggccgcacgggctggattggcggcctnctcggctccctctgccgggcccagggcatctccttccattacggctcgggccgnctcgagaaccgggccttcctcgaaaccgacatagccctnctcaagccctnccacgtcttcaacgccgncggcgtcacgggccgncccaacgtcgactggtgcgagtcccacaaagtcgagaccatccgaaccaacgtcgtctgaaccctt

SEQ ID NO: 262948 - DNA, 403 bp, Glycine max
cggcccgaccaagcctccgtgttggcctcacagtgaggctggagaaggaattctcctacgatgaaattaaaaatgctatcggggaggaatcagagggcaagttgaagggaattcttggttacactgaagatgatgtggtctccaccgactttgtgggcgatagcagatcaagtatttttgatgcaaaggctggaattgcattgaataagaactttgtgaagcttgtctcttggtatgacaacgagtggggatacagctcacgtgtcattgacctgcttgtattcgttgccaagaagtctttttaaggctgtactgaaaaaaaagtagcttgtctagacattatgtgctggtgtctagctgcgatttagtgtcttcttgctcgggcagaaatgagaagcatgaa

SEQ ID NO: 262949 - DNA, 396 bp, Glycine max
  unsure (1)..(396): unsure at all n locations
tctgcctgtaagagtgaaaaaaccttctcttttccttctctcaagtctcaagagatttcatcagggctccaaagaaggacaaggctccaccaccttcctccaagcccgccaaatctggcggtggcaagcagaagaagaagaagtggagcaagggaaagcaaaaggagaaggtgaataacatggtgctgtttgatcagggcacctatgataagctcctttctgaagctcccaaattcaagctcatcactccttccattctttctgatcgtttgaggattaatggatcacttgcaaagaaagctataagagaattgatggctaggggttcaatcangatggtgtctgcccatgcaagccaacaaatttacaccaaggcaactaacacctangtgtgga

SEQ ID NO: 262950 - DNA, 283 bp, Glycine max
cggtcgacccacgcgttccggaatgataaggtatatgaacaatccttaacatatacttctacaagatgttctattttttcggagaaaaaaattcgctcaaaaaaaacgcgaaaatattttaatcgtaacttagaggatttgttacgtagaaaaagaaagatagattcatattcccatacatataaattatataggaacaaaaaaaatcttggattactttttgaaaaaaaagtagaaatccatttttttggagtaaaaatactattccaattataataataag

SEQ ID NO: 262951 - DNA, 447 bp, Glycine max
cacgcgtccgaccaatccttcgtaaacataccaatcctaattttatcttaatgcctttttcccatttcagtgcaaacttcaaccatggcttcaataataaccttggtgacatccaccttgctctttctttctttcactttgtcatgtgctattgacacctccaccatcaccaactacaccgacaatgaggtcatgaccatgtacgaggagtggttggtgaagcaccaaaaggtgtacaatgggttgagagagaaggacaagaggttccaagttttcaaagacaacttgtggttcatacaagagcacaacaacaaccagaacaacacttacaaacttgggttgaaccagtttgctgacatgacaaatgaggaataccgtgtcatgtattttggcaccaagagtgatgccaaacgcatgctcatgaaaaccaagagcaccggtcacccg

SEQ ID NO: 262952 - DNA, 462 bp, Glycine max
  unsure (1)..(462): unsure at all n locations
acgcacgcgtccgcccgcgcgtccgcccacgcgttcgctttgtatgtagcgatccgagaaaaactctgtagacatgttgttttaccaggacctccttacaggtgatgagcttctctctgactccttccgttacaaggaaattgagaatggaatgctgtgggaagttgaggggaagtgggttgttaaaggagcagttgatgtagacattggtgcaaacccttctgctgatggtggaggagaagatgagggagttgatgatgcagctgttaaggttgttgacattgttgacacattcagacttcangagcaacccgcattcgataagaagcagtttgttaccttcatgaataggtttatcaagaatttgactcccaagctcgatgcagatcaacatgaagtgtttaagaagcacatcgagggagcaacttaatacctgctctctaagattaaagatttccaatt

SEQ ID NO: 262953 - DNA, 404 bp, Glycine max
aagaaaattcatccttgtttatcttctacataatttctgagctggcggttgcaatgctgctctttcccagcagagaaagaagcgacagattcctccaactttggctcctgtcgaagctctagaggcatatacccagatatctagtcatccctttcacaaaacaaacaaacaaggcattatatctcttgatatcctttattctaaggacttaattgcaactggaggtattgatacaaatgctgttatttttgaccgcccatcaggacagatattatctacactcagtggtcactctaaaaaggtgaccagtgtaaaagttgtagcttaaggtgaatcattcctaactgcttcaacagataagacagttcgtctatggcaagggtcaaatgatggttactattact

SEQ ID NO: 262954 - DNA, 342 bp, Glycine max
  unsure (1)..(342): unsure at all n locations
ctcatggtcatcgaactacccacgttctgctccttcgcagatcatttcgcgtttagcttccgcgaaagatggcagacaatgaggatggaggggataagacatctcgtgggaatgaatgggaggttgtatctctcacagcatcaacatatgcagctgctcctggtcctgatgaagttgagatgaaggatgatgggaaagaagatgtatatgggcaggatgaaggagaaacgtcacatgctttattcatgtctagacactttgtctttccacccagtcagcatgaaaacttgcccgtggaacctgactatggtgagattcatgatgattttggagacanagatg

SEQ ID NO: 262955 - DNA, 306 bp, Glycine max
gcatgggttatcctaagtctctgggaatagcgctgcaatggcttcaagttaggaggaggtgacccttttgggagctactggaagcccatttgtgtgcagggttcatattgtcctcaagttgaacggagttcaatacaaatatgtcgaagaaaattcgacgaacatgagtgaactgattctcaaatccaacccagttcacaagaaggttccagtgtttattcacaatgagacgcccatagcagagtctcttgtgattgctgaatacattgatgagacatggaagaacaaccctatcttgccttctga

SEQ ID NO: 262956 - DNA, 441 bp, Glycine max
ccgggccgacgcacgcgtccgctgagttgcaagattcacttcaaattatgcttttcgctgatcggttcctcatcacatcaggcggcgtcgcagatcatcgcaattccttgattatttccttttgttgatacgcggaatcgcgcacacggtgctggtgtgtgcactgaggtagaaagaagaagattgaattgtaaacagcatgaattaccttcttggagctttcaagcctgcatgtaatgtcttgatcacgtttaatgatgggaagaaccggaagcaggttccgtttaaaaaagaaaatggtcaaatggtcacagtcccacttttccaaagtcaagaaaacattggtgggaagattacaatagaaccaatgcaagggaagaagattgatcacaatggtgtaaaagttgagctcctttgacagatagagatgtattttgacag

SEQ ID NO: 262957 - DNA, 393 bp, Glycine max
  unsure (1)..(393): unsure at all n locations
gcgtccgtttgatcgttattccactgaatagaacatgttcatataaatggataccctttatattatgtatgctttatattatctataaagggtaaagatatccgatgtgaatctatttgtttagttttctatcggtatgtatataggtgaataatccaacatgcctttttgtgaagtaaaaaaactaccctcgatccatgcctcanaagggttgataataagtaaaaaaaatcaatgaattcatgataaaacccttctgcgtttttttattataaatttttttgtcaataaagggatcaaggngttgggggatcaaatggtaaagttcttttgttggtaaattggaagattagaaacatgactatngctttccaattagctgnttttgcatta

SEQ ID NO: 262958 - DNA, 415 bp, Glycine max
  unsure (1)..(415): unsure at all n locations
gtccggggggaggagcctccagtttcactgtttatatttgagagaaaactctgcaaacatgttggtttatcaggacctccttacaggtgatgagcttctctcggactccttccgttacaatgaaattgagaatggaatgctgtgggaagttgaggggaagtgggttgttaagggagcagttgatgttgacattggtgcanacccttctgctgagggtggagaagatganggagtcgatgacgcagctgttaaggttgttgacattgttgatacattcagacttcaggagcaacccgcttttgataagaaacagtttgttaccttcatgaagaggtttatcaagaatttgactcccaagctcgatgcanagaaacanngagttgttaagaagcacattgagggagcaactaaatac

SEQ ID NO: 262959 - DNA, 413 bp, Glycine max
cgcgtccggttgaatgcttatgcaaagatttctgtccatcttctctggatgatattgccgagatgaggtgggcactatgtcaagaatcagctcccacttctcactccatgagattcactagaagtttgagtgggctttcggtcaggaggtctttagttggttcatttgaggagtctcttttatctggccggttcttatctggaaacaatagcaagaaaatcgatggttttcttgctgtgctaagcattactggtgggaacttttctcctaaatctcagaagcttccattctctgttactagcgtggatggagattgctatctactgtattatgcatcaatagatcttgctggaaattcctcttcaaacaagttaagaggccaattgctgaaacgagggtttggaaaagatgat

SEQ ID NO: 262960 - DNA, 369 bp, Glycine max
acgcgtccgcgggggcgtgggttatcctaagtctttgggtatagtgctgcaatggcttcaagtcatgaggaggttaccattttgggagctactggaagcccatttgtgtgcagggttcatattgccctcaagttgaagggagttcaatacaaatatgtcgaagaaaatttgaggaacaagagtgaactgcttctcaaatccaacccagttcacaagaaggttccagtgtttattcacaatgagaagcccatagcatagtcctcttgtgattgttgaatacattgatgagacatggaataacaaccccatcttgtcttgggaaccttaccaaatagccttggcttctttctgggaccaattcattgatga

SEQ ID NO: 262961 - DNA, 426 bp, Glycine max
gcgtccgttctaatctcattctccttctgttcaaacactctctctcatggcatcggataagaagattaggatcggcatcaacggatttggaaggattggccgtttggtggccagggttgcccttcaaaggaatgatgttgaacttgttgctgtcaacgatcctttcatcaccactgattacatgacatacatgttcaagtacgacaccgttcatggccagtggaagcattttgatgtgaaggtgaaggactctaagacccttctctttggtgagaagcccgtcaccgtttttggaatcaggaaccctgaggaaattccatggggtgaggttggtgctgattatgttgatgagtcaactggtgtattcactgacaaggacaaggctgctgctcacttgaagggtggtgccaagaaggttgtcatctc

SEQ ID NO: 262962 - DNA, 444 bp, Glycine max
cgcgtccgggagattctgatttgttctctcagatctgatcttaccgtcgccggaatccaactcaacgggggtcggattcttgggtatcatcgcatcgccattcgttttagcctctcaataagagattttagttcgcttcaaattcgaggtttgatttgaagttgaaagttggaatagcttaactgttgtgtaaaacaaccaacacacacgagcatgggaagccaagacaacaacgtagaattgtcatccaattcatttctagcttacaaatctgctaaggtgtttgttgctggtcaccggggtcttgttggctcggccattggtcgcaagctcacccaacttgggttcactaatctagtcttgcgctcccatgccgagcttgatctcactcgacaatctgatgttgaagccttctttgcttatgaaaaacctgaatttgtcatt

SEQ ID NO: 262963 - DNA, 331 bp, Glycine max
ggtctggaattccgggtcggacccaccgcgtccgctggatgatcccaacactttcggtaacaggattcacaggatgctgaagcttggactgaggagttgatgaagatgctggtgaagcagatgctgacatgcctcctcttgaggacgctgatgcagatgctgagggtagcaagatggaagaagttgattaaatctgacttaattgcctgttacgtttttagaaacaatgattggagaaacagtctttttactatgttttatgttttttgaattttcgaaattttggaacgttggctagttaggtgccgtatgtagtagtttctttatggta

SEQ ID NO: 262964 - DNA, 254 bp, Glycine max
tccaacacttttgtattggtctcacaggatgctgaagcttggacggatgattgatgaagatgctggtgaagcagatgctgacatgcctcctcttgaggacgctgatgcagatgctgagggtagcaagatggaagaagttgattaaatctgacttaattgcctgttacgtatttagaaacaatgattgtagaaacagtctttttactatgagatatgtcctttgaattatcgaaattttggaacgttggctaggt

SEQ ID NO: 262965 - DNA, 442 bp, Glycine max
  unsure (1)..(442): unsure at all n locations
cccacgcgtccgggacagagctctgcatgttgcattgtcaattgtcaagagaactctgcgatcaaatacggtggtagctggtggaggtgctgttgaggcagcattatcagtttatttagagtaccttgctacaactttaggatctcgggagcagttggctatagcagaatttgctgagtctctgttaattattccaaaggtgctttctgttaatgctgctaangatgccactgagctggtcgcaaaattacgggcctaccaccattcagcacaaactaaagccgataagaaacatttatcaagtatgggtttggacctttctgaagggaaaatcagaaacaacttggaggctggagtcattgagcctgcaatgagcaaagtaaaaattattcagtttgcaacttgagcttgcattactatccttcgaattgatgacatgatc

SEQ ID NO: 262966 - DNA, 255 bp, Glycine max
cccgggctttatttcactgattagaccatgtttatataaatcgatacacctttatattatcggtcatgatataatctatgaggggcatagacatacgatgtgaatctattagtcaagtggactatcgacatcaatatgagtgaagcatatcacatgacctcttgacgaataaaaatgctaccctcgatccatgcctcataaggcatgataattaccaaaatcatcacgaattcacgataaaccctcatgacatgg

SEQ ID NO: 262967 - DNA, 426 bp, Glycine max
cccgcgcgtccgggtcaattgaccgaggcttttcggcgtcgtccttacactgttgtactctgggatgagattgagaaagcccatcctgatgtgttcaacatgatgcttcagatcctggaagatggaagactaacagacagtaagggcagaacagtggatttcaagaacacacttcttataatgacatcaaatgttggaagcagtgtgattgagaaaggaggccgcaaaattggatttgatctggattacgatgagaaggatagcagttataacagaatcaagagcctggtaactgaggagctaaaacaatacttcaggccagaatttttgaatagattggatgaaatgattgtcttcaggcagctcacataactggaggtgaaagagattgctgacataatgctcaaagaggtgtttgatagactg

SEQ ID NO: 262968 - DNA, 413 bp, Glycine max
cccacgcgtccggtgatttcagtgagtgatcggtgttcacttgatctcatcataatcgtgagcgtcaattgaagaagatgccgatcagaaacatcgccgtcggaaggcctgaagaggcgactcaccccgacacgttgaaggcggctttggctgagttcatctcaaccttcatcttcgtgttcgccggctcaggctccggcatcgcctacaacaagctcaccgacaacggcgctgccacccctgccggcctcatctccgcctccatcgcccatgcattcgccctcttcgtcgccgtctccgtcggcgccaacatctccggcggccacgtcaaccccgccgtcaccttcggcgccttcgtcggcggcaacatcaccttactccgcggcatcgtctacgtcatcgcccagctcctc

SEQ ID NO: 262969 - DNA, 436 bp, Glycine max
  unsure (1)..(436): unsure at all n locations
cctgaacaactctttctcttcttccttcgttcgttgttctccctcgcgtagatcgacgagggcggagacagagacgtttgctttccaggctgagatcaaccagctcctcagtctcatcatcaacaccttctactccaacaaggagattttccttcgtgaactcatcagcaacgcctccgatgctttggacaagattcgatttgagagtttgacagataagagcaagctcgatgctcagccagagttgttcattcatattattccagacaagactaacaatacactgaccattgttgacagtggtattggcatgaccaaagctgatttggtgaacaacttgggtacaattgctagatctggtaccaaggaattcatggaagccttggctgctggtgctgatgttagtatgattggacangttggtgtggggttctac

SEQ ID NO: 262970 - DNA, 343 bp, Glycine max
acgcgtccgggcgactttagagtgcttgatgaaaacctatggattcctgacaccagaattctggagggggactcgcttctccaaatctccattccaagagtacacagatctactggcaaaaccaacaggaaagactctaatcttggaggaggaaagggtggatgctagatttgctagttatgctttatggatgtattatgaactctattactgtacatacttatgctggtactgtgcttgacttttggttacgatagacggtatgactctgtatgcatgttgatagtttccaagatctaattgactgcagaaaatacaaatttaagtcgatgtcattcgagtg

SEQ ID NO: 262971 - DNA, 238 bp, Glycine max
  unsure (1)..(238): unsure at all n locations
gcgtccgctgggggatctcaacacttacngtaacaggatacacaggatgctgaagcttggactgagcagtgatgtttatgctggtgaagcagatgctgacatgcctactcttgaggacgctgatgcagatgctgagggtagcaagatggaagaagttgattaaatctgacttaattgcctgttacgtttttagaaacaatgattggagaaacagtctttttactatgttttatgtttt

SEQ ID NO: 262972 - DNA, 434 bp, Glycine max
tgtgcttgtgttacaattcattcttcggtttttctctatttgcgttttctcattttgtggctttcgttctcttccgtggaacgagtagtagaaacttgaaatcaaaaggcagcgggggaaaaagaaaagagagaagtagggttcgaaaatggcagcagaatcatcagagggcgaagaagaaaccaagttaagcggaggtaaccaattgctcatagttgacgatgacttaacggaaatgggaaagaaagccgcttggagcgtgagttcctgcaaacccggtaacggcgtttcctctctacgtgacgacaatctcgaaacttattggcaatccgacggagggcaaccccatttagttaacattcagtttcagaagaaagttagacttcaattaattgtgctgtacgtggatttcaagcttgacgagagttacacgc

SEQ ID NO: 262973 - DNA, 390 bp, Glycine max
cgcgtccggtcggtcttcagagctaaaaatgttcttattcttccatctcagtatgtgttgacatgctggacaaggaatgctaaaaccggtacattgttagatgaacatgcatctgaattgccaagtacttctcgtgaatctgtaccagtttgttataacaatttacgacaagaagcaatcaaatatgttgaagaaggtgcaaaatcaatccaaatctatcatgttgccatgagagctctgaaagaagctgctaagaaggtttgcaccataaaaaatcagagttctggaacagcagagggagctacagcaaccaatggaagcaggggtgaattgcttgtagcagatgaagatgttccaagcaatcaatctgtggcggagaagcaaaagaaa

SEQ ID NO: 262974 - DNA, 336 bp, Glycine max
aattaccggctcgaccgcacgcgtccgcccgggcgttcgggtggagacatgacaaattctattcccagagacactgtcatcccaacggagatatcttaggagttcaccacctttcaagacctgcagactaccttcttcattcgagttttcgattgctaacggatgctcacaatgcatagccggcttctgtgcaaattggctcctcctgaactttttacacttcaagggcgtacgcctcatattgtagggaccttcgaagctgatctcaactgcattctggatgcgactgcagacgacatggtctctgggaaatcacactagatcaccattacatac

SEQ ID NO: 262975 - DNA, 152 bp, Glycine max
aaaatcaaaaaaaataaaaaaaacaaataaaaacaaaaaaaacacacacaaaaaaaaaaaaaaaaaaaacacaaaaaaaaaacaaaaaaataaacaaaaacaaaaaaaaaaaaacaataataaacaaaaaaaacaacaaaaaacaacatacc

SEQ ID NO: 262976 - DNA, 470 bp, Glycine max
ggtccggaattcccggctcgacgcacgcgtccgcccacgcgtccgattgaatatccatggttttcttagttcttttatccattaaaaaactcgagattaatatttctaagaagaactatagtagttgaaagatatcttttgcaaatatgcatatttaactgaggttgttataacttgttccttccctcaaaaaacaacacttgagaatgataaagaacctattagcctacttcattggatatattacatctataaggagtaaattctaccggttcatagaatagaaaaataatcaaaataaaagtcagcagtctcacatctctaattttggtgacagattcaaggggttaaatttgatccagaaggtgaatatgtgagacaatggctacctgagttggcaagaatgccaactgagtggatccatcatccttgggatgcaccgcttactgttcttagagcatcaagagttg

SEQ ID NO: 262977 - DNA, 426 bp, Glycine max
cgcgtccgcccgggcgtccgcttctctctctctctctcttctttacttgcttgaagcaatggccaaatgcttggcatcagtgctgctgtttctcctcgtagctgtgagtaatgtgtttgctgtagagcttgaacttgaaactcttccaccctcttaccctcaccctcaccctgttcactcccccacaccagcacctcttcacccaccagcaaatgctcctcacccacaccaccaccaccaccaccaccaccctccagcaccagcacctgttccttcaccttctcaccacaattaccctcctacccctgcccctgctaagcctcctactcaccaccattaccatcaccctcctgctcctgttaatccacctcctgttccggttcattctccagttaaaccttctgttccggttcacccttccagtta

SEQ ID NO: 262978 - DNA, 394 bp, Glycine max
cgcgtccggcgggcgtccgcccacgcgtccgctggtcagcagggaaaaagaaaaataaaatgggttgcgattttaccaacttggagttcttgaaagatatcggtttgggctcctccaacattggttcttacattaatggccaatggaaagccactggttcttctgtcacttctgttaatccttctaacaatcagagcatagctcaagtgactgaagcgactttgcaagattatgaggagggattgcaagcttgcagtgaaccagccatgacatggatgactattcctgcaccgaatagaggtgagattgtgagacagattgctgaagcattgaaggccatgttggatccttttgggagactggtgtctctttagatgggataaattctcccata

SEQ ID NO: 262979 - DNA, 365 bp, Glycine max
gaaaacgggtcgagccacgcgtccgggctagttttgattgcttgatgaaaacctatgtattcctgacaccagaattctggaaggagagtcgcttctccaaatctccattccaagagtacacagatctactggcaaaaccaacaggaaagactctaatcttggaggaggaaagggtggatgcttgatttgctagttttgctttatggatgttttaggaactttattactttacatactttgttggttctgtgctttacttttggttttgatagacggtatgtctctgtatgcattttgattgtttccaagttttaattgactgcaaaaaaaaaaaaaaaaaaaaaaaaaaataaaaaaaataaata

SEQ ID NO: 262980 - DNA, 406 bp, Glycine max
cccgcgcgtccgattgaatatccatggttttcttagttcttttatccattaaaaaagtgtagattaatatttctaagaagaactatagtagttgaaagatatcttttgcaaatatgcatatttaactgaggttgttataacttgttccttccctcaaaaaaaaaaaaaagagaaagaaaaggaacctattagcctccttcattggatatattacatctataaggagtaaattctaccggttcagagaatagaaaaataatcaacataaaagtcagcagtctcacatctctaattttggtgacagattcaaggggttaaatttgatccagaaggtgaatatgtgagacaatggctacctgagttggcaagaatgccaactgagtggatccatcattcttgggatgca

SEQ ID NO: 262981 - DNA, 396 bp, Glycine max
ccggccggacgcacgcgtccggccgcgcgttcgcgcgtcgctgctccttattagattcactgcataaatttgagagggaacgtctgcttacatgttggtttatcaggacctccttacaggtgatgagcttctctcggactccttccgttacaatgaaattgagaatggaatgctgtgggaagctgacgggaagtgggttgttaaaggagctgttgatgttgacattggtgcatacccttctgctgatggtggagaacatgacggagtcgatgactcagctgttaatgatgctgacattgctgatacatgcagacttcatgatcaacccgcttttgataacaaacagcatgttaccttcatgaagaggtttatcaagaatttgactcccaagctcga

SEQ ID NO: 262982 - DNA, 424 bp, Glycine max
  unsure (1)..(424): unsure at all n locations
cgcgtcgctgctccgtaccagtttcactgcttaaatttgagagaaaactctgcaaacatgggggtttatcaggacctccttacaggtgatgagcttctctcggactccttccgttacaatgaaattgagaatggaatgctgtgggaagttgaggggaagtgggttgttaagggagcagttgatgttgacattggtgcaaacccttctgctgagggtggagaagatgagggagtcgatgacgcagctgttaaggttgttgacattgttgatacattcagacttcaggagcaacccgcttttgataagaaacagtttgttaccttcatgaagaggtttatcaagaatttgactcccaagctcgatgcanagaaacaagagttgtttaagaagcacattgagggagcaactaaatacctgctctcta

SEQ ID NO: 262983 - DNA, 436 bp, Glycine max
aacgtcacccgctacctattcccgtgtgcgatcgaatccaatgcaccaaatcggctgagggggctacgatctgtctctaaaccacagatctgcggtggaaccgtcgactccgactatatacgattgatcttccggtaaagtggaccggagatgccggatgccagcttacgccatttacttcctcaacctgcgcagcgacgttctcatcaaccgcctctatcgcgacgatgtctggggaaatatcgaggatgcttttaggacgcatattatgcaaacgaaggagcttggtacttgcccagtgaggcacattggtggatgctctgtgttttacatgaggatcagtgatgtctacattgacattgttgtcagctacaacgtcaatgtcgcttgagctttcaagtgtgacgttgaggctgatgcattgttccgatcatac

SEQ ID NO: 262984 - DNA, 410 bp, Glycine max
acgccacgcgtccgcccacgcgtgcggagattgcagtgagtgatcggtgtgcacttgatctgatcataatcgtggaggtcaattgaagaagatgccgatcagaaacatcgccgtcggaaggcctgaagaggcgactcaccccgacacgttgaaggcggcttaggctgagttcatctcaaccttcatctacgtgttcgccggctcacgctccggcatcggctacaacaagctcaccgacaacggcgctgccacccatgccggcctcatctgcgactacatcggccatgcatacgccctctacgtcgccgtctccgtcggcgccaacatctccggcggccacgtcaaccccgacgacaccttcggcgccttcgtcggcggcaacatcaccttactccgcggcatcgtctacg

SEQ ID NO: 262985 - DNA, 408 bp, Glycine max
ttcatatgcaccgttatttcttacaggtgcattaaagagattggaagctgtgaaatttgggaagctcaacaagcctattcaatttcctgaaatacttaacttggcacctttcatgagcgggactagtgataaatcacccatatacagattgtatggtgtagttgttcacttagatatcatgaatgctgccttttcgggtcactatgtgagctatgtgaagaatatccaaatcaagtggttcaaagttgatgacagtgtggcgacagctgtagaattggatagagtcttgacaaggggagcttatatgcttttctatgcaaggtgctcgccaacggccctaagattaactatgaacagaatactgatcccagattcaaactttaagtcaatggaaagacttttacaacg

SEQ ID NO: 262986 - DNA, 409 bp, Glycine max
atcagttcttctttcctcaaccttctttcttcttatatatcgaacatggctaagtatcatgcgagtgggaaaagctcttccatgactgctatagccttcctgtttatccttctaatcacttatacaggcacaacagatgcacaatccggggtatgttatggaagacttggcaacaacttaccaacccctcaagaagttgtggccctgtacaatcaagccaacattcgcaggatgcgaatctacggtccaagcccagaagtactcgaagcactaagaggttccaacattgagcttttgctagacattccaaatgacaacctcagaaacctagcatctagccaagacaatgcaaacaaatgggtgcaagacaacatcaaaaactatgccaacaatgtcagattcagatacg

SEQ ID NO: 262987 - DNA, 390 bp, Glycine max
  unsure (1)..(390): unsure at all n locations
cccacgcgtccgtcaagccttgcgtccattttgacgcggactcgggtgggtgcattaggtgagacctctgccaactcgagaggtgttgtaacatcatcctgcgtgtggtgcatcaatggctaccgtctgagctgatctgatcttgccactctgtgccgtttccatacttagtacagtgatcatggctgctaatgaacaaggatgccgatagtatgacgtccctagcaatgatcgtactggaagcggacagagctaccaatgcccatcgccatgctcgaggtgatgtagccagacccaataccacaagccctgcatgtttttctgtcagaagtgctgcaggacatgcctgtgtgtgcccncggngtattatggtaataaagctgtgtgccc

SEQ ID NO: 262988 - DNA, 360 bp, Glycine max
cgacgccacgcgtccgattggaaggatggtgagtgcttatagatttaagtgctgccaaatcaagaggagtttggagatcatagtgtgagtgtgtgtgttcaacaatggctaagttctctgctgatatgatcttggcactcattgccatttccatgcttcaaacagtgtgctatggctgctaatgagcattgaggccactagtatgacaacaagagcaaatatgcgaaagtatagtgtcaagagataccaatgcccatgacaatgctcgaggagatgtagccagacctaataccacaagcggtgcatgtgagaatgtcagaagtgctgcatgaaatgccagtgtgtgccaccggaatatta

SEQ ID NO: 262989 - DNA, 406 bp, Glycine max
atcgaaacctgaaggctcggatcaggtctttgcaatctggtcggtagaaccttgggtcggagagagtcaagtcatatgtctgaattagacgatcaaattcctactgccttcgatccttttgctgatgcaaatgctgatgactcgaatgctgggtcaaaggagtatgtgcatattcgcgtacatgcagcgaaatggaaggaaaagcctgacaaccgttcatggattgaaaaaagaattcagctataacaagatacttaaagatgttacgaaagagttctgttgcaatggaacagttgttcaggacccagaactaggacaggttattcaacttcaaggtgatcagaggaagaatgtttctaccttcctggtccaggctggtatcgtgaagaaggagcatatcaagatt

SEQ ID NO: 262990 - DNA, 413 bp, Glycine max
cccacgcgtccggctctgcatctgcgcgtggacatgcctgggctcggcaaggaagacgtgaagatctccgtggagcagaacactctcattatcaaaggtgaaggtgctaaagaaggcgatgaagaagagagcgctcgtcgctacactagcaggattgacttgccggacaagctctacaagattgaccagatcagagctgagatgaagaacggtgtgctcaaggtcgttgtgccgaaaatgaaggaggaagagaggaaagacgtgatcagtgttaaagttgagtagaacaacccaagctgatttggccattttgcatcgacactactctgtagttttcttttattaggtggtgatgaatctagttagtagatataacagcttaataagattgttgctgtgtttggttttgaaac

SEQ ID NO: 262991 - DNA, 297 bp, Glycine max
cttgatgatcccaacactttcggtaacaggattcacaggatgctgaagcttggactgagcattgatgaagatgctggtgaagcagatgctgacatgcctactcttgaggacgctggtgcagatgcttgagggtagcaagatggaagaagttgattaaatctgacttaattgcctgttacgtttttagaaacaatgattggagaaacagtctttgtactatgttttatgttttttgaattttcgaaattttggaacgttggctagttaggtgccggatggtataagtttctttatggg

SEQ ID NO: 262992 - DNA, 459 bp, Glycine max
tgaagtggaacgacgtcgcagggttggagagcgccaaacaggccttgcaggaggctgtgattttgcctgtaaagttccctcagttctttactgggaaaagacgaccctggagagctttcttgttgtatggacctcctggaacgggaaaatcatatttagccaaggcagttgcaacggaagccgagtccacgtttttcagtgtttcttcatcagaccttgtttcaaagtggatgggtgaaagtgaaaagctggtttcaaaccttttcgaaatggctcgagaaagtgccccttctatcatatttattgacgaaattgattccctgtgtggtcagcgtggagaaggcaacgagagtgaagcttcaagacggattaaaacagagcttctggtgcagatgcagggtgtaggacacaatgatcagaaagttcttggtcttgcagcaacaaatacgccctatgcct

SEQ ID NO: 262993 - DNA, 366 bp, Glycine max
ctcaggaggagaataaggatgtctcacaggaagttcgagcacccaaggcacgggtcactgggatttctccccaggaagcgtgctgctcgtcacaggggaaaagtgaaggcattccccaaggatgacccatccaaggcacccaagctcactgcattcttgggttacaaggctggtatgactcacattgttagagaggtcgagaagccaggatcaaagcttcacaagaaggaaacatgtgagcctgttacaattattgagacccctccaatggttattgttggtgttgtgggttatgtgaaaactccccgtggtctccgaacattgaacactgtatgggctcagcacttgagtgaggaactgaaacgt

SEQ ID NO: 262994 - DNA, 321 bp, Glycine max
ctgagttgcaagattcacttcaaattatgcgtttcgctgatcggttcctcatcacatcaaacgacgtcgcagatcatcgcaattccttgattatttccttttgttgatacgcggaatcgcgcacacggtgctggtgtgtgcactgaggtagaaagaagaagattgaattgtaaacagcatgaattaccttcttggagctttcaagcctgcatgtaatgtcttgatcacgtttaatgatgggaagaaccggaagcaggttccgtttaaaaaagaaaatggtcaaatggtcacagtcccacttttccaaagtcaagaaaacat

SEQ ID NO: 262995 - DNA, 345 bp, Glycine max
  unsure (1)..(345): unsure at all n locations
agacagcagagcagagatctagcgtattctctcgctctttctttcactgtcacagagccgcgtccatgggctttccaagccaagggggcttttgcggcccagcccctaaatttcctaatctacggccgcacgggctggatgggcggcctcctcggctccctctgccgggcccagggcatctccttccattacggctcgggccgnctcgagaacccggcctnnctcgaaaccgacatagcccttctcaagccctcccacgtcttcaacgccggcggcgtcacgggccgncccaacgtcgactggtgcgagtcccacnaagtcgagaccatccgaaccaacgtcgtc

SEQ ID NO: 262996 - DNA, 445 bp, Glycine max
gtcagtcttcagagctaaaaatgttctcactcttccatctcagtatgtgttgacatgctggacaaggaatgctaaaaccggtacattgttagatgaacatgcatctgaattgccaagtacttctcgtgaatctgtaccagtttgttataacaatttacgacaagaagcaatcaaatatgttgaagaaggtgcaaaatcaatccaaatctatcatgttgccatgagagctctgaaagaagctgctaagaaggtttgcaccataaaaaatcagagttctggaacagcagagggagctacagcaaccaatggaagcaggggtgaattgcttgtagcagatgaagatgttccaagcaatcaatctgtggcggagaagcaaaagaaaataggagagttgactgctgagttagaagccacaaaataacgatgtgaagtttatagagcaaac

SEQ ID NO: 262997 - DNA, 176 bp, Glycine max
aagaatcaaagaaaggggtggtggctgcttctaaagcttaataatttgtttatttccagagcatcatagttttcgcagcagcaaactaacaaattactcatatcatataataagatggcccgttctctctcgcaagccaaacgtattggtgtccttgttgctcaatctatctccct

SEQ ID NO: 262998 - DNA, 430 bp, Glycine max
cctaaacaactctttctcttcttccttcgctcgttgttctccctcgcgtagatcgacaatggcggagacagagacgtttgctttccaggctgagatcaaccagctcctcagtctcatcatcaacaccttctactccaacaaggagattttccttcgtgaactcatcagcaacgcctccgatgctttggacaagattcgatttgagagtttgacagataagagcaagctcgatgctcagccagagttgttcattcatattattccagacaagactaacaatacactgaccattgttgacagtggtattggcatgaccaaagctgatttggtgaacaacttgggtacaattgctagatctggtaccaaggaattcatggaagccttggctgctggtgctgatgttagtatgattggacagtttggtgtgggg

SEQ ID NO: 262999 - DNA, 310 bp, Glycine max
gtcttcttctctaaaataaaaaaccctaacttctgaacctttcaccgcatcgccaccgaggccctatgtccactaatcaaagaaaagaaaatgagtagacgctcgagcagaactgtctacgttgggaatctacccggtgatatccgtgaaagagaagttgaagatttgtttctgaagtacggacacataacacacatcgacctaaaggttcccccaagaccacctggttatgcatttgtagagtttgaagatgctcaagatgctgaggatgcaattcgtggtcgtgatggctatgattttgatggccacc

SEQ ID NO: 263000 - DNA, 341 bp, Glycine max
  unsure (1)..(341): unsure at all n locations
nccacgcgtccgctttctttctttcttcttttttctgccgaggaaaagaaagaaatagaaagagaggagaaaaacacagcgtcctagatttnctcttctctgcttcggaagaaagagaaaacagacaaaacaatggcgttcgcttctttcctcggcagagtcctcttcgcttctggcttcatactctctgcttaccaacaatttaatgaatatggagttgatgggggacctgctacaaaagcactcagacctaagattgatgcctttacacatcggggtgcattctcaaaggggctttcaaattccagagattaatctgaaatttttaaatgctggggcta

SEQ ID NO: 263001 - DNA, 303 bp, Glycine max
  unsure (1)..(303): unsure at all n locations
cttttctactttgagtcttcttgatccttctttttctccttgaactcaaacatggcagatgaggtggttctgctagatttctggccaagtccatttgggatgagggtcaggattgcacttgctgaaaagggtatcaaatatgagtacaaagaagaggacttgaggaacaagagtcctcttctncttcaaatgaacccggttcacaagaagattccggttctcatccacaatggcaaacccatttgtgaatccctcattgctgttcagtacattgaggaggtttggaatgacagaaaatccttg

SEQ ID NO: 263002 - DNA, 360 bp, Glycine max
cccacgcgttcgtcaagcattgcatccctcttgatttgtagtttgttttgtgctttagatgaaaatggtgccaaatcaagaggggttttaagatcatagtgtgtgttttgcaacaatggctaagttctttgctgctatgatcttggcactctttgccatttccatacttcaaacagtggtaatggctgctaatgaacaaggaagccacttgtatgacaacaagagcaaatatggaaatggaaagtgtcaagagttaccaatgcccatcacaatgctcgaagagatgtagccagacccaataccacaagccctgcatgtttttctgtcagaagtgcttcaggacatgcctgtgtgtgcccc

SEQ ID NO: 263003 - DNA, 364 bp, Glycine max
  unsure (1)..(364): unsure at all n locations
cccacgcgtccgtcaagcattgcatccctcttgatttgtagtttgttttgtgctttagatgaaaggtcttgccaaatcaaaaggggttttaagaccatagtgggggtttggcaccaatggctaagttctttgctgctatgatcttggcactctttgccatttccatacttcaaacagtggtaatggctgctaatgaacaaggaggccacttgtatgacaacaagagcanatatggaagtggaagtgtcaagagttaccaatgcccatcacaatgctcgaggagatgtagccagacccaataccacaagccctgcatgtttttctgtcagaagtgctgcaagacatgcctgtgtgtgcccccggg

SEQ ID NO: 263004 - DNA, 339 bp, Glycine max
  unsure (1)..(339): unsure at all n locations
gggaaacctgctgttcttacacgtgttgtgtatagcatgactgacaacttgagaccaactcgtgctgaagcaacagatgtcgccaatgctgttttagatggaagtgatgccattcttctgggtgctgagactntacgtgggttgtaccctattgagactatatctactgttggcagaatttgttcagaggctgagaaagttttcaatcaagacctttattttaaaaggacagtcaagtatgttggagaacccatgactcacttggaatctattgcatcctctgcggtacgagctgcaattaaggtgaaagcatctattataatttggtttacttcatct

SEQ ID NO: 263005 - DNA, 314 bp, Glycine max
cccacgcgtccgagaaggcctgggcttagtttataagcataactgggtgaggaagaaagagagagagtgaagaagatggcgtcgagcggagcggtaccgttttggagggcggcggagatgacgtacataacatactcaaacatatgcgcgaatctgctcatgaattgcctcaaggaaccctacaaggccgaatccctctctcgtgagaagctccattttgttctctccaaatgggtcgacgccaagcctgaaaaacctactattcgatcagacaccccagagcagtgatctggaatagttggaagctataaatg

SEQ ID NO: 263006 - DNA, 394 bp, Glycine max
gaggagatatatgtacctaaacgaagagatcttgaaagagaatccaaacatgtgtgcttacatggcaccttctttggatgctaggcaagacatggtggtggtagaggtaccaaagctagggaaagaggctgcagtaaaggccataaaggagtggggccagccaaagtcaaagattacccacttgatcttctgcaccaccagtggtgttgacatgcctggtgctgattaccaactgaccaaacaattgggccttcgcccctatgtgaagaggtatatgatgtaccaacaaggttgctttgcaagtggcacggttcttcgtttggcaaggatttggctgagaacaacaagggtgcacgtgtgcttggtgtctgttctgagatcactgcagtcacat

SEQ ID NO: 263007 - DNA, 327 bp, Glycine max
cccacgcgtccgagaaggcctgggcttagttgataagcataactgggtgaggaagaaagagagagagtgaagaagatggcgtcgagcggagcggtaccgttttggagggcggcggggatgacgtacataacatactcaaacatatgcgcgaatctgctcaggaattgcctcaaggaaccctacaaggccgaatccctctctcgtgagaagctccattttgttctctccaaatgggtcgacgccaagcctgaaaaacctactattcggtcagacaccccagagcagtgatctggaatagttggaagctataaatgcataaaatctttg

SEQ ID NO: 263008 - DNA, 372 bp, Glycine max
gttaatctttccggccttgacctctctaaactggatttatcttatgttgatttcagctatgcttgtcttaaaaacgtgtttttttcccgagcaaaccttcaatgtgcaaagtttcgagatgttgatgccgagggctccatctttcacaatgcaactttgcgtgaatgtgaatttactgcggcaaatcttcgtggtgctttattggctggtgcatgccttcagagtgcaaatctacaagatgcttgcttagtagactctagcttctgtggagcagatctgcgtactgcacatctacagaatgcagatcttaccaatgccaatctagagggagccgtcctagaaagagctaatttgaaaggtgcaaaactgaac

SEQ ID NO: 263009 - DNA, 402 bp, Glycine max
cccacgcgtccgcccacgcgtccgcccacgcgtccgcccacgcgtccgtctccctgtttcgcgtcactagctctgtgcattcttctctcgctctctgccttccatcacactcggcatttcctttcccaagatagtagaagatggcagacactgaggatattcaacctcttgtttgtgacaatggaacaggaatggttaaggctggatttgctggagatgatgccccacgtgctgtgtttcccagcattgtaggtcgtcctcgtcacactggtgtgatggttggcatgggccataaagatgcatatgttggtgatgaggcacaatctaagaggggtattttgactctcaagtaccccattgaacatgggaatgtgagcaattgggatgatatggaaaagattt

SEQ ID NO: 263010 - DNA, 380 bp, Glycine max
  unsure (1)..(380): unsure at all n locations
cgcacgcgtccgttcaagaacaatttattgcacaaatattgacaagaagcttactcaagccgatgtcaaacagttctttgaatctatttgtggagaggttcaacggttgaggcttcttggagattaccatcattcaactcgaattgcttttgttgagttcacagtggctgagagtgcaattgcagctctaagctgtagtggggtgattctgggttcactgcccataagggtaagtccatcgaagacaccagttcgatcacgtgctcctcgccctactatgcactgaatcaactntccatgtttctggggttgattgctgctgagatatatttacatatatatatatacatagaaacagctgtgttctaggaacatgtggc

SEQ ID NO: 263011 - DNA, 399 bp, Glycine max
gaaatgtgaaagccttatcatacagtgtttgcaagatgccaaggtagaagttgaagaagtaaatgatgtgataattgtaggcggatgttcttacatcccgagggtgaaaaatcttgttactaacgtatgtaaaggcaaggaactttataaaggcatgaatcctttagaagctgctgtttgcggtgcagcagtggaaggagctattgcttcaggcgtcaatgatccctttgggaacttggacttgttaactatccaagctacacctcttgccattgggattcgagctgatgggaacaagtttgtccctgtaattccgagggatactacaatgccagcacggaaggagctagttttcacaactactcatgacaatcaaactgaggcgttgatccttgtcta

SEQ ID NO: 263012 - DNA, 480 bp, Glycine max
gtccggaattcccgggtcgaccgacgcgtccggaaatgtgaaagccttatcatacagtgtttgcaagatgccaaggtagaagttgaagaggtgggtgatgtgataattgtaggcggatgttcttacatcccgagggtgaaaaatcttgttactaacgtatgtaaaggcaaggaactttataaaggcatgaatcctttagaagctgctgtttgcggtgcagcagtggaaggagctattgcttcaggcgtcaatgatccctttgggaacttggacttgttaactatccaagctacacctcttgccattgggattcgagctgatgggaacaagtttgtccctgtaattccgagggatactacaatgccagcacggaaggagctagttttcacaactactcatgacaatcaaactgaggcgttgatccttgtctatgaaggagagggtgaaaaggcagaataaaaccacctattgggatatttt

SEQ ID NO: 263013 - DNA, 379 bp, Glycine max
  unsure (1)..(379): unsure at all n locations
tgtaagttacatgatgtgaagttgcaaatgctttggagatcaccaacttcaaaatgcagctactgctacttgtgtggcacttgttcttcgcaatttaggatggagtatttctgataaatctattaggtatggtttagaggatacataccttcttggaaggagtcaatttctaacatctgaagaagctgaggtattaggacttactggatcaacagtactgcttgatggagcccacaccaaagaatctgccaaagctctgatgaataccataaggatggcatttcccaaggctcaattggtttttgttgttgcaatggcaagtgacaaagatcatgtgggatttgctcgagagattctctcangtgtacatgtggagact

SEQ ID NO: 263014 - DNA, 378 bp, Glycine max
tcaaatagggatcactttatttatattttctttttctttctcaaataaaaataattttttaaattcctaatattcaattaaataatttatcccattttaactttttccatatttcaaatgattaatctaattccattttccctttttattctcttaataaaatttttaaataattttttttctctttacttatatacctctaacttattccactttaattttattccatctttccatatatattcattttctacatttaatctcttatatttttcatattttttagccatatttttttattccattaaattttcccaatacatttttttcctcttttatcaaattttttaattcctaccaatcatttttattttttaa

SEQ ID NO: 263015 - DNA, 430 bp, Glycine max
cccacgcgtccgccacgcgtccggtttctggtggaggatccaacttcagagcaattcatgaggcctccaaaaggggatcacttcatggagatgttcttgtgttggtcacaaataaaagtgattgtggaggtgcggagtatgcaagaaataatggtatcccagttatactgtaccatatatcaaaggatgaatctaatccaagtgaccttgttgatacactaaggaaatttgaggttgattttattcttttagctggatacctcaaacttataccagtggaattgatccgagcttacaaaagatctatattcaacattcatccatcacttcttccagcttttggaggcaagggattctatggcatgaaagtgcacaaagcagtaattgcttctggagcaaggttttcaggtcctaccattcattttgttga

SEQ ID NO: 263016 - DNA, 447 bp, Glycine max
cgtccggatttccggtcgaccacgcgtccgctttctactttgagtcttctggatccttctttttctccttgaactcaaacatggcagatgaggtggttctgctagatttctggccaagtccatttgggatgagggtcaggattgcacttgctgaaaagggtatcaaatatgagtacaaagaagaggacttgaggaacaagagtcctcttctcctccaaatgaacccggttcacaagaagattccggttctcatccacaatggcaaacccatttgtgaatccctcattgctgttcagtacattgaggaggtttggaatgacagaaatcccttgttgccttctgacccttaccagagagctcaggctagattctgggctgattatgttgataagaagatatatgatcttggaaggaagatttggacatcaaaaggaagagaaaaagaag

SEQ ID NO: 263017 - DNA, 394 bp, Glycine max
tcgaccggcgcgtccgctttttactttgagtctactcgatccgtctttttctccttgtactcatacattgcatatgaggtggttctgctagatggctggccaattccatttttgatgatggtcacgattgcacttgctgaaaagggtatcaaatatgtacacaatgaagaggacttgatgaacatgattcctcttctcctccaaattaacccttttcacatgaaaattcctattctcatccacaattgcaaacccatttttgaatccctcattgcatgcccactacattatactagtttttggattgacataaacttccttgttgccttgtgacccttaccagagatctcattctttattctggtctgattatttttatattaatatatattat

SEQ ID NO: 263018 - DNA, 453 bp, Glycine max
agaaaacctaagcttagaattagaaacaaagaaaagaagaaaggaaagaattgatcgttgaaaatgcagggaggaaagaaagcgggagagtccattaaggaaacagctacaaacattggtgcttctgccaaggctggcatggagaagaccaaggccactgtccaagagaaggcagaaagaatgacagcacgtgatccggtgcaaaaggagttggcaacccaaaagaaagaggcaaagatgaaccaggcggagctggacaagcaggcggcgcgtcagcataacacggcggccaaacagtccgccaccacggctgggcacatgggacatggccaccacaccaccggaaccgggactggaaccgccacgtattccaccaccggggaatatggtcagcccatgggggcccaccagacgtcggcaatgcctggccatggaaccgggcagcccacgggc

SEQ ID NO: 263019 - DNA, 443 bp, Glycine max
cccacgcgtccgtcaagcattgcatccctcttgatttgtagtttgttttgtgctttagataaaagttctgccaaatcaagaggggttttaagatcatagtgtgtgttttgcaacaatggctaagttctttgctgctatgatcttggcactctttgccatttccatacttcaaacagtggtaatggctgctaatgaacaaggaggccacttgtatgacaacaagagcaaatatggaagtggaagtgtcaagagttaccaatgcccatcacaatgctcgaggagatgtagccagacccaataccacaagccctgcatgtttttctgtcaaaagtgctgcaagacatgcctgtgtgtgcccccggggtattatggtaataaagctgtgtgcccttgcttcaacaactggaagaccaaggaggaggacccaagtgcccttgagcttc

SEQ ID NO: 263020 - DNA, 423 bp, Glycine max
cccacgcgtccgcccacgcgtccgcccacgcgtccgcccacgcgtccgtctccctctttctcgtcactagctctgtgcattcttctctcgctctctgccttccatcacactcggcatttcctttcccaagatagtagaagatggcagacactgaggatattcaacctcttgtttgtgacaatggaacaggaatggttaaggctggatttgctggagatgatgccccacgtgctgtgtttcccagcattgtaggtcgtcctcgtcacactggtgtgatggttggcatgggccaaaaagatgcatatgttggtgatgaggcacaatctaagaggggtattttgactctcaagtaccccattgaacatggaattgtgagcaattgggatgatatggaaaagatttggcatcataccttctataatg

SEQ ID NO: 263021 - DNA, 363 bp, Glycine max
cccacgcgtccgccacgcgtccggtttctggtggaggatccaacttcagagcaattcatgaggcctccaaaaggggatcacttcatggagatgttcttgtgttggtcacaaataaaagtgattgtggaggtgcggagtatgcaagaaataatggtatcccagttatactgtaccatatatcaaaggatgaatctaatccaagtgaccttgttgatacactaaggaaatttgaggttgattttattcttttagctggatacctcaaacttataccagtggaattgatccgagcttacaaaagatctatattcaacattcatccatcacttcttccagcttttggaggcaagggattctatggca

SEQ ID NO: 263022 - DNA, 114 bp, Glycine max; identical to SEQ ID NO: 262864

SEQ ID NO: 263023 - DNA, 444 bp, Glycine max
  unsure (1)..(444): unsure at all n locations
atttatctcaaggtggaaacacatcagtaatggctcaattgggttaaatccatacagcctctatgcatatgattctgtttggatgattgctgangcactcaaattgttttttgatcggaatggtaccattttattctctaacaatacaaatttaagtggtacgagatttcaaggacacagggtgggaatgggacttcaagtggcagagaccattatttgacagtgagatagatatggcggtctcatttatacaagaagttgaggggtacaaaatccagtctcatattggtgatcagtgggtgtgggcggcagatcctagtggccagtattcgattaggagtgcctatagtgtgcttagagaggacatatcagaggaggcccaggatggagagttcaaggaattatggaagcttaaggtcccacctaaagtggctgtgtttgcat

SEQ ID NO: 263024 - DNA, 418 bp, Glycine max
cccacgcgtccgcccacgcgtccgcccacgcgtccgaggaaatcttcgtgtacttgcatatgagtttgctactatgggctctcttcatgacatattgcacggtagaaagggagttcaaggtgctcaaccaggaccaactcttgattggatacagcgagttagaattgcagttgatgctgctcggggattggaatatttacatgagaaagttcaaccaccgattatacacagggatatcagatcaagtaatgtgctaatctttgaagattacaaggccaagatagccgactttaacctttctaatcaggcccctgacatggctgcacgccttcattcaactcgtgtattgggaacttttgggtatcatgctccaaaatatgcaatgactgggcagttgactcaaaaaagtgatgtctat

SEQ ID NO: 263025 - DNA, 454 bp, Glycine max
cccacgcgtccggactggcccaaaattattcgccattgttccggtgcggccaaaaaaccataatctttctgatcaaaaatggtggatacaccatcgaggtggaaattcatgatgggccgtacaatgtgattaagaactggaattacactgggttgattgatgcaatccacaatggtgaagggaaatgctggactgccaaggtgttctgtgaagaggagctagttgaagcaattgccacagccacaggacccaagaaagactccttatgcttcattgaagtgattgttcataaggatgacaccagtaaagaattgcttgaatggggctcaagggtttctgctgccaatagccgtcctcccaatcctcagtaatcttcagaatttatcctatgactaaattgctgcagttgccctttagctctatgaaagtgagaatcatttgagatgatgccctt

SEQ ID NO: 263026 - DNA, 369 bp, Glycine max
ctgtccaatatgtatcttctctgttacggtgcggtctaaaaaccatcggctggtctgatcaacagtggtggatacaccatctatgtttaaattcataataggccgtacaatgtgattaaaaactgcaattacacttaatcgattgattcaatccacactcgtgaatggaattgctcaactgccaatgttttctgttaagagtagctatatcaatcaattgccacatccacatttcccaaaataaactccttatccttcattgaagttattgttcataaagattacaccactcaagattttgcttgaatagtgctcatagatttcttcttccaatatccaaccctccaatccctcataatcttcaaaatt

SEQ ID NO: 263027 - DNA, 397 bp, Glycine max
cccacgcgtccggtgatttcagtgagtgatcggtgttcacttgatctcatcataatcgtcagcgtcaattgaagaagatgccgatcagaaacatcgccgtcggaaggcctgaagaggcgactcaccccgacacgttgaaggcggctttggctgagttcatctcaaccttcatcttcgtgttcgccggctcaggctccggcatcgcctacaacaagctcaccgacaacggcgctgccacccctgccggcctcatctccgcctccatcgcccatgcattcgccctcttcgtcgccgtctccgtcggcgccaacatctccggcggccacgtcaaccccgccgtcaccttcggcgccttcgtcggcggcaacatcaccttcctccgcggcatcgtctacgt

SEQ ID NO: 263028 - DNA, 337 bp, Glycine max
  unsure (1)..(337): unsure at all n locations
cccacgcgtccggtgaagctggatcattcctccgcggaatcgatgtgaaccgtttaccttctgtggttgattgcgaagaggaagcangtgtttcatctccaaacagcacggtttctagcgtcagtggaaagcgcatcgagagggaaaccaatggagaagaaaacgacccagacagagcttgttccagaggcatcatcagcgacgaagaagatgctgaaacctctagaaaggaacttaaactctccaaagatcagtcaattgtcctggaagagagcttcaaagaacacaacactcttaaccccgtaaggtaacctacacatgccaattaatttttttt

SEQ ID NO: 263029 - DNA, 369 bp, Glycine max
  unsure (1)..(369): unsure at all n locations
gccaaaatcaaaatgaaaagcaaaaggaggcaaactagcaggttctgaattttctggaaatggtgctgggatactatctgctgctagcacagttgccagnacttttctcttagtttttgttgctgaatggggcgacaagtcatttttcttcacaattgcccttgcagcagcttcttctccccttggagtcatagctggagcactggctggtcatggtgttgcaactttgctagctgtacttgggggttctttacttgggacgtatttgtcagagaaggttattgcctacatcggaggtgttctctttctcgtctttgccgcaataaccttatttgaaattgtgcaataggggttaaaagaaatgcaata

SEQ ID NO: 263030 - DNA, 463 bp, Glycine max
ttcccgggtcgaccgacgcgtccgattgctgctgtttgcctattggtgtactttggggtctctaccctgctggatgcctcatctagcgagggccaaaaatcagatgaagagcataaggaggcagaactagcagtttctgaattttctggaaatggtgctgggatactatctgctgctagcacagttgccagtacttttctcttagtttttgttgctgaatggggcgacaagtcatttttctccacaattgcccttgcagcagcttcttctccccttggagtcatagctggagcactggctggtcatggtgttgcaactttgctagctgtacttgggggttctttacttgggacgtatttgtcagagaaggttattgcctacatcggaggtgttctctttctcgtctttgccgcaataaccttatttgatattgtgcaatatggggtaaaagaaatgcattata

SEQ ID NO: 263031 - DNA, 389 bp, Glycine max
attatttctcttttcctatctttttaccgttttatctttaccctactgtattcctcatctagcggggtcctaataagtgatgaagagcataaccttccttatctttcattttcttaattttctgaaaattattcttctatactatctgcttctatcacaatttccaattcttttctcttatctttttttactaaatttatccactagtcatttttcttcacaatttcccttgcatcttctttattctcctttataatctatacttaatcacattcttttcattttttttcaacatttctaatctttcttattatgtctttactttctacatatttttctaaaaaatttatttatctaacattaaagttttctcttttcttattttttcc

SEQ ID NO: 263032 - DNA, 446 bp, Glycine max
  unsure (1)..(446): unsure at all n locations
cggacgcgtgggcggacgcgtgggttatcatccgcagctgcttttattcgcaccgcaaacagtgagccatggccgtcggaaagaacaagcgcatctccaaggggaagaagggtggcaagaagaaggcagctgatccctttgccaagaaggattggtatgacattaaggctccttctgtttttcaagtgaaaaatgttggcaaaaccctcgtctctcgtactcagggtaccaagattgcttctgaaagactcaagcatagagtgtttgaggtctccttggctgatcttcaaggggatgaggatcatgcattcaagaagattangttgagagctgaagatgtgcaagggaagaatgttctgacaaatttctggggaatggatttcacaacagacaagctgaggtcattggtacgaaaatggcaaactcttattgaagcccatgtggat

SEQ ID NO: 263033 - DNA, 299 bp, Glycine max
cgcttgatgatcccaacaactttcggtaacaggattaacaggatgctgaagcttggactgagcattgatgaaaatgctggtgaagcagatgctgacatgcctcctcttgaggacgctgatgcagatgctgagggtagcaagatggaagaagttgattaaatctgacttaattgcctgttacgtttttagaaacaatgattggagaaacagtctttttactatgttttatgttttttgaattttcgaaattttggaacgttggctagttaggtgccgtatgtagtagtttctttatggta

SEQ ID NO: 263034 - DNA, 419 bp, Glycine max
cccacgcgtccgggacagagctctgcatgatgcattgtcaattgtcaagagaactcttgaatcaaatacggtggtagctggtggaggtgctgttgaggcagcattatcagtttatttagagtaccttgctacaactttaggatctcgggagcagttggctatagcagaatttgctgagtctctgttaattattccaaaggtgctttctgttaatgctgctaaggatgccactgagctggtcgcaaaattacgggcctaccaccattcagcacaaactaaagccgataagaaacatttatcaagtatgggtttggacctttctgaagggaaaatcagaaacaacttggaggctggagtcattgagcctgcaatgagcaaagtaaaaattattcagtttgcaactgaagctgccattacta

SEQ ID NO: 263035 - DNA, 465 bp, Glycine max
gaattcccgggtcgaccgacgcgtccgcccacgcgtccgggacagagctctgcatgatgcattgtcaattgtcaagagaactctggaatcaaatacggtggtggctggtggaggtgctgttgaggcaacattatcagtttatttagagtaccttgctacaactttatgatctcgggagcagttggctatagcagaatttgctgagtctctgttaattattccaaaggtgctttctgttaatgctgctaaggatgccactgagctggtcgcaaaattacgggcctaccaccattcagcacaaactaaagccgataagaaacatttatcaagtatgggtttggacctttctgaaaggaaaatcagaaacaacttgtaggctggagtcattgaacctgcaatgagcaaagtaaaaattattcaatttgcaacttaagctggcattactatccttcgaattgatgacat

SEQ ID NO: 263036 - DNA, 367 bp, Glycine max
tgaatttccgggtcgaccgacgcgttcgtccacgcatcccttacataactctgtatgatgcattgtcaattgtcaacacaactctgaagtcaaatacgggggtggctggtagatgtgctgttgacgcatcattatcagtttatttaaagtaccttgctacaactttatgatctcgggagcagtcggctatagcagaatttgctgattctctgttaattattccaaaagtactctctgttaatgctgctaaggatgccactgatctggtcgcaaaattacaggcctaccaccattcagcacaaactaaagcccgttagaaacatttatcaaatatgggttgggacctttttgaatggaaaatcacaaa

SEQ ID NO: 263037 - DNA, 433 bp, Glycine max
  unsure (1)..(433): unsure at all n locations
gttcttctaccttattttctttccctagtcaaggagattcatctctgcagcaggttgttttagaaaagacaaaatgctgaagatttgctgcattggggctggatatgtggggggtccaacaatggcagtcattgcactgaaatgcccctcaattgaagtggctgttgttgacatctctaaatccaggattgcagcatggaacagtgaccagctccctatctatgagccaggccttgatgatgtggtgaagcaatgtcgtggcaagaaccttttcttcagcactgatgttgagaaacatgtctatgaggccgacatagtgttcgtctncgtcaacaccccgacaaaaactcgtggtcttggagccggaaaggctgcagatttgacttactgggagagtgcaacacgcatgattgctgatgtcttcaagagtgac

SEQ ID NO: 263038 - DNA, 297 bp, Glycine max
  unsure (1)..(297): unsure at all n locations
ggaaagccagggaaaacaangagcaccgaacgacgcggaagacggaggaacacacggaagggaaacaagcaaggacggaagagcgaagcgcggacgcaagcaaggacagcaagacgaaaaccagcacagcggacgaagangccaaagaaaaacagggaccagaagcaacagaagcaggagaagagagcgaccaaagccgggagcaggaaaaggcaacccagcgacgagcaaagccccgacaagaacagaagggacaaccaaccacaaagaccccaaagcaagcaggaaacacgaaca

SEQ ID NO: 263039 - DNA, 353 bp, Glycine max
gaaattccagggaaaacaattttctctttttgatgctgaatactttgtatttcactctcctgataacaagcttgtacagaagagttttgctcggttgtttttcaatgacttcttgatgaattccagctcttgcgattaaggtggccaagaaaaaactgggaccttttgcaactttatctggtgatgagagctaccaaagtcgggatcttgaaaaggcatcccagctacttgcaaagcctctatatgatcagaaggtccaaccaactactttgattccaaagcaggttggaaacatgtccactgggtctttttatgcagcattggcctccttcattcacaacaaacatagcaca

SEQ ID NO: 263040 - DNA, 477 bp, Glycine max
atcgaaaccttaagtttcggatcaggtctgagcaatctggttggtagaacctttggtcttagagagtcaaggtttatgtctgaattagacgatcaaattcctactgccttcgatccttttgctgatgcaaatgctgatgactcgggtgctgggtcaaaggagtatgtgcatattcgcgtacagcagcgaaatggaaggaaaagcctgacaaccgttcagggattgaaaaaagaattcagctataacaagatacttaaagatgttaagaaagagttctgttgcaatggaacagttgttcaggacccagaactaggacaggttattcaacttcaaggtgatcagaggaagaatgtttctaccttcctggtccatgctggtatcgtgaagaaggagcatatcaagattcatggtttctgagcggttggagtctcaagtgtcaagtcttacgtgcctgcctatgtgttgggcatatataat

SEQ ID NO: 263041 - DNA, 479 bp, Glycine max
cggatttcccgggtcgacccagcgcgtgcgatcgaaaccttaagtttcggatcaggtctgagcaatcttgttggtagaacctttggtcttagagagtcgaggtttatgtctgaattagagcgaggaattcctactgccttcgatccttttgctgatgcaaatgctgatgactcgggtgctgggtcaaatgagtatgtgcatattcgcgtacagcagcgaaatggaaggaaaagcctgacaaccgttcatggattgaaaaaagaattcagctataacacgatacttaaagatgttaagaaagagttctgttgcaatgtgaacagatgttcatgacccagaactatgacaggttattcaacttcaaggtgatcagagtaagaatgtttctaccttcctggtccattctggtatcgataataacgagcatattcaagattcatggtttctaagcggactgagtctcaagtgtcaagtcttac

SEQ ID NO: 263042 - DNA, 293 bp, Glycine max
gttgttttcgttcctctgaagtctgtagtggtggagcttggttcgtttgaaatggtgcctgaagagcagtgtgttgtgtaaatggtcaggacagcatttggtgaatccagtcctgtacaggcaaaggtgtttctcaaagatttttgtgcattagttaagcctttgggatacaaaatctcagtctataactattagtttctccctaaatgtggtatatgattcttgtttcacttcatactcctattaaattcaagcactaagggtgaaccatgcttatggaaattctttcaatg

SEQ ID NO: 263043 - DNA, 330 bp, Glycine max
cgcgtcgctgctccgtaccagtttcactgcataaatttgagagataactctgcaaacatcgtggtttatcatgacctgctggatgtgataagcttctttcgtacttctttcgttacaatgttatttttaatttaatgctgttactttgtttatttttattcaattttatttttatttttttttttattcattcttttattttcttttattatttttttttttttttttttttatttatatttttttttatttatttattattttttcttttatttttattctttttttttttatattttattcttttctatttttatatttttttatttt

SEQ ID NO: 263044 - DNA, 463 bp, Glycine max
  unsure (1)..(463): unsure at all n locations
cttttctactttgagtcttcttgatccttctttttctccttgaactcaaacatggcagatgaggtggttctgctagatttctggccaagtccatttgggatgagggtcaggattgcacttgctgaaaagggtatcaaatatgagtacaaagaagaggacttgaggaacaagagtcctcttctcctccaaatgaacccggttcacaagaagattccggttctcatccacaatggcaaacccatttgtgaatccctcattgctgttcagtacattgaggaggtttggaatgacagaaatcccttgttgccttctgacccttaccagagagctcaggctagattctgggctgattatgtngataagaagatatatgatcttggaaggaagatttggacatcaaaaggagaaagaaaagaagctgccaagaaagagttcatagaagccccttaaatgttggaggaac

SEQ ID NO: 263045 - DNA, 410 bp, Glycine max
cgcgtccgcttttctactttgagtcttcttgatccttctttatctccttgaactcaaacatggcatatgaggtggttctgctagagttggggccaagtccatttgggatgagggtcatgattgcacttgctgaaaagggtatcaaatatgagtacaaagaataggacttgatgaacaagagtcctcttcttctacaaatgaacccggttcacaagaagattcctgttctcatccacaatggcttacccatttgtgaattcctcattgctgttcagtacattgatgatgtttggaatgacagaaattccttgttgtcttctgacccttaccagatagctcatgcttgattctgggctgattattgttataataatatttatgattttggaatgaagatttggacattaata

SEQ ID NO: 263046 - DNA, 520 bp, Glycine max
ctcaaaacttgtcttccccctctctcctcctcggaactccattcgcatgcagttctcgcacaacacactgggcagtgatatttcaaagcgcagcggcatttcaacatttcatcatttttctcgtgtaaccatcccctcacccacgaacccatcccatgaatttcccaaaatgccctcaacccagaaccccctcttctccttcctcctacattccaccccaccgtacccaactgcaccctcgcatgatctccctctactcttcttcttcttcttccctaaaatatccaaatcccaacaacaaaccccacaactccaaatgcctcttgttcttcttcgccctcctcttcttcaccgtccccttcctcttctacctcttctccaccgccctccaactctactccttccccaaattcgccgactcccgcccctactcctttgccctcgccctccgcgccggcccctacgcccttcgtctcttcgtctttcacttccttggccccttccctaacccccttacttt

SEQ ID NO: 263047 - DNA, 447 bp, Glycine max
cccacgcgtccgggtggagtcatgacaaagttgattcccagaaacactgttatcccaaccaagaaatctcaggtgttcaccacctatcaggaccagcagactacagtctccattcaggttttcgaaggcgagaggagtctcacaaaggattgccgccttcttgggaaatttgatctgtctggaattcctccagccccaaggggtacgcctcaaattgaagtgaccttcgaagttgatgccaacggcattctaaatgtgaaggcagaagacaagggcactggtaaatcagaaaagatcaccattacaaacgaaaagggacgtcttagccaggaagaaattgagagaatggttcgcgaagcagaggagtttgcagaggaagacaagaaagtgaaggagaggatcgatgctcgcaacagtcttgaaacctatgtatacaacatgaagaac

SEQ ID NO: 263048 - DNA, 234 bp, Glycine max
cgtacctcacgcgttccgttgagtcattcatatttgtttctagaacactgtttcccaactgggaaggctcatgtttcaccacgtaggagaccagcatactacagtcttcattcatgttttcgaatgctataggagattcacaaaggattgcctccttcttgtcaaatttgatctgtctggaatttcttcatccctaatgtgtactccttatatttaagttaccttctaatttta

SEQ ID NO: 263049 - DNA, 454 bp, Glycine max
cccacgcgtccgcttctctctctctctctctgctttacttgcttgaagcaatggccaaagccttggcatcagtgctgctgtttctcctcgtagctgtgagtaatgtgtttgctgtagagcttgaacttgaaactcttccaccctcttaccctcaccctcaccctgttcactcccccacaccagcacctcttcacccaccagcaaatgctcctcacccacaccaccaccaccaccaccaccaccctccagcaccagcacctgttccttcaccttctcaccacaattaccctcctacccctgcccctgctaagcctcctactcaccaccatcaccatcaccctcctgctcctgttaatccaccttctgttccggttcatccttcagttaaacctcctgttccggttcaccctccagttaaaccttctgttcctgctcaccctcctgttaaaccttc

SEQ ID NO: 263050 - DNA, 446 bp, Glycine max
cttcctctctctcttctcttctgctttacttgctctgaaccaaatggccaaagcccttagcatcgagtgctggctctttctccttcgagcgtgtgagtaatagttattgcttgtacatcttgatacttgaacactcttccacctctcttactcctcactcctcaaccctgattcacgtcccaccacactcaaccaccatcttcatcccacacaccaacatgcatactcatcccacatccaccactcaccaccatccaccaccactacatcacccagcaccatgtatccttcaccttcatcaccacaatcacacctactactcctacccctgctaatcctactactcaccatcatcaccatcaccctcctgctcctgctaatgcaactcctgctcctgttcatcctccatctaaacctactgtttctgttcaccctccaactaaacc

SEQ ID NO: 263051 - DNA, 369 bp, Glycine max
ggcaccggtgaaatcagttatagtcttcttgtgagacaggaggggcacaaacggattatcgggtcgtgttcttggaatccacatggtcacgaatttgcgacaggttcaagggataagacagtgaaaatctgggccatagagagggagtctgtcaagcagcttatgtctttacctcaatttacgagtagtgtaacagcattatcttgggttggtctccatcatcggaagaataatggacttctagctgttggaatggaaaatggccaaatagagttgtggaatctgtcttataacagagcagatgatgggagcatagcatcaccaggtttggctgcttctcttgctggacgtatagatccttttatatgc

SEQ ID NO: 263052 - DNA, 366 bp, Glycine max
  unsure (1)..(366): unsure at all n locations
gttgttttcgttcctctgaagtctggagtggtggagcttggttcgtttgaaatggtgcctgaagagcagggtgttgtggaaatggtcaggacagcatttggggaatccagtcctggacaggcaaaggtgtttccaaagatttttgggcatgagttaagcctgggggatacaaaatctcagtctataactattagtttctccccaaaggtggaagatgatccgggtttcacttcagactcctatgaagttcaagcactaggggtgaaccatgcttatggaaattcttccaatgggactntaggtgacggtaatgaaggaacattgtttcctcaattgaatcaaatgatggctgggaattttaatgct

SEQ ID NO: 263053 - DNA, 386 bp, Glycine max
ggctgaagcacaactacgagaccagcatggcaaccctgtcccactcaccgatcaatacgggaatccggttatcttaactgacgagcgcggtaatcccgtccaactcactggtgtcgctaccaccgctaccggcacagcaggttctgggtttgggtcctatggtaccggtgcttacggtggtggtgcaagtgcaaccaccgttgcagatcttttggcaacccaaccaaggagtggcagggaggctagagagcttcgtcgttcctccagttcaagctctagctcgtctgaagatgatgggcaaggtgggaggaggaagaagggagtgaaggataaaataaaagagaaactaccaggggtaggaggagggaataataataaggagcatg

SEQ ID NO: 263054 - DNA, 571 bp, Glycine max
  unsure (1)..(571): unsure at all n locations
cccggatttcccgggtcgacccagcgcgtccggcaaacatgtccaccgcaacaactcacgtgctcgcttatcccttccctacctccggtcacgtgatccctcgcttagacttcaccaaaacgcctagtctctcgcggcgtccatgtcaccgttctggtcacaccctacaacgaagccttacttccaaaaaactattcccctcttctccaaacgcttctcctccccgaacctcagttcccgaacccgaagcaaaacaggctcgtatccatggtaaccttcatgcggcaccaccactacccgatcattatggactgggcccaggcccagcccattcctcctgcggctattatatcagatttcttcctcggttggacccacctcctcgcacgtgacctccacgtgccgcgcgtagtcttctccccctccggcgccttcgcgctctccgtctnctactccctctggcgcgacgcccnccaaaacgacaacccggaagacccaaacggcgttgttttcgttcccaaatctcccaaattccccaattctacccccctggggggtttttggggggggg

SEQ ID NO: 263055 - DNA, 450 bp, Glycine max
tttgaatacattccttgtagtttatactgaaagatgggtttgaagattgcgttactgatgcgtaggcctttccctcatgctcgttttggtctcctctgaggtggcatccactaatacaaaagaggaggcaaatggagtggatgatgccaaatatcccggtggaagctatggatgttgttacccaggtcatgtctgttgctgttattctgtttattgcagtttcatttattttttttattgattttttttttttatattttttttttatttattattttttattttttttcttttatttttttttttttatttttatttatattttttttttttttttttttttttttttttttttttttatttttttttaattttttatttttttttttttattttttttttatttttttttatttttttttatttttttttttttattttttttttttt

SEQ ID NO: 263056 - DNA, 456 bp, Glycine max
  unsure (1)..(456): unsure at all n locations
agacagcagagcagagatctagcgtattctctcgctctttctttcactgtcacagagccacatccatgggcttcccagccaacggcgcctctgcggcccagcccctaaacttcctcatctacggccgcacgggctggattggcggcctcctcggctccctctgccgggcccagggcatctccttccattacggctcgggccgcctcgagaaccgggcctccctcgaaaccgacatagccctcctcaagccctcccacgtcttcaacgccgccggcgtcacgggccgccccaacgtcgactggtgcgagtcccacaaagtcgagaccatccgaaccaacgtcgtcggaaccctcactctcgccgacgtctgccgcgaccacggcctcattctcatcaactacgccaccggttgcattttcgagtacgactccgatcanccccctcggatccggtatc

SEQ ID NO: 263057 - DNA, 400 bp, Glycine max
cccttctctctctctccgacgtacatttccatcttattagggtttctttccatggattccgattcttggatttccacgcgcatgtcgtcctcttcacgccgctatcattcgcgatctgatctgtacgtggaggagagtgaagggagcgatgatttcagggcggagtttctgtgccctttctgcgccgaggattacgacgtcgtttccctctgttgccacattgacgaccaccaccctatccaagccaaaaacggggtgtgtcccatttgtgggaagaaggtgggattggatctcgttggacatattactacgcaacatgggaacttcttgagggtgcagcgtaaaaagagggtcaggaaagtatgctctgggtcaacaatggctatattgagaaaagagt

SEQ ID NO: 263058 - DNA, 445 bp, Glycine max
acccacgcgtacgcccttctctctctctccgacgtacatttccttcttattagggtttctttccatggattccgggtctgggatttccacgcgcatgtcgggctcttcacgccgctatcattcgcgatctgatctgtacgtgtaggagagtgaagggagcgatgatttcagggcggagtttctgtgcccttttctgcgcccaggattacgacgtcgtttccctctgttgccacattgacgaccaccaccctatctaagccaaaaacggggtgtgtcccatttgtgggaagaaggtgggattggatctcgttggacatattactacgcaacatgggaacattttctagggtgcatcgttaaaagagggtcatgaaagtaaggctttgtttaacaacgtctattttgtgaaaagagttacctgtaggagccttgcactccctttttg

SEQ ID NO: 263059 - DNA, 423 bp, Glycine max
ctcttttcgcactccaagcagctacactttttactaccataatggcggctgctatgacggggtgtggttacgcaatcgccggcgcgggcgaaaccatagccaaacctgcttccaccagaaccttctccgccaccaacctcgctcttgaatcgtcgtcttccaagctcggtttcaaatccctaagacttcgccgatgcgccgccgcctccggctccgccctcggcgcgcgcatggtgtcagtgccggcggtcaaggcccccgcgctactcgatttcgacacgaaggttttcaagaaggagaagattaacctagccggacacgacgagtacatcgtaaaaggatgcagggatatgtttcacttgttgcccgatgctttcaaggtgatcaagcagattggtgttatcggttgaggaacttagggac

SEQ ID NO: 263060 - DNA, 477 bp, Glycine max
cgactcacgcgttctaaaaaaagtcagaataaaattaatttgatttttaagttaagggttgcccatctatctatatgcttgggtcattcttcatatatggaatggttcttcataattcctattacccctatttttatgtgccactttcacattttgcatatttatatttttcttttaacattttttatctattattgtttctattttatatctatttttcttttctcaaattcactttctcttttcttttacttatcttttcttcttcctatttataatcatatttctcttatttttattatttcttctattttctttctttatctattattattatttcttttttttttatttcttctattttttattttttttcttattctttttacttttttttttttttttttactttttatttttttttttttatttatttctttttcatttactcttttatttttatttattttttttttt

SEQ ID NO: 263061 - DNA, 391 bp, Glycine max
gttgccgggctctaccgtggtttcaacatctcatgtgttggaatcatcgtgtatcgtgggctgtactttggattgtatgattctgttaaaccagttgtcctcacagggtcattgcaggatagcttttttgccagctttgcccttggatggctcatcaccaatggtgcaggtcttgcatcatacccaatagacactgttagaagaagaatgatgatgacctctggtgaagctgtcaagtacaagagctccttggatgcattcacacagatcctcaagaatgagggtgccaagtccttgttcaagggtgccggtgccaacatcctccgtgccgttgccggtgctggtgcgcttgctggttatgacaagttgcaggttcttgtgttcggcaaga

SEQ ID NO: 263062 - DNA, 80 bp, Glycine max
aaaaaaaaaaaaaaaaaaaaaaaaaaaaaattaaaaaaaaaaaaaaaaaaagaaaaaaaaagaaaaaaaaaaaaaaaaaa

SEQ ID NO: 263063 - DNA, 263 bp, Glycine max
gaatgataaggtatatgaacaatccttaacagatacttctacaagatgttgtattttttgatagaaaaaaattcgctcaaaaaaaacgcgaaaatattttaatcgtaacttagaggatttgttacgtagaaaaagaaagatagattcatattcccatacatataaattatataggaacaaaaaaaatcttggattactttttgaaaaaaaagtagaaatccatttttttggagtaaaaatactattccaattataataataag

SEQ ID NO: 263064 - DNA, 229 bp, Glycine max
actactacaacatgtagtattttttgatagaataaaaatctctcaaaaaaaactcgaaaatattttaatcataacttaaaggatttgttacgtacaaaaataaagatagattcatattcccatacatataaattatatatgaacaaaaaaaatcttatattactttttgaaaaaaaagtataaatccattttttttgagtaaaaatactattccaattataataataat

SEQ ID NO: 263065 - DNA, 428 bp, Glycine max
ctttgaaaccctccaaccttagtttcaattttaaacttgttcaccctttattctctcctggtccaaacagcaaccatggcttcaataataaccttggtgacatccaccttgctctttctttctttcactttgtcatgtgctattgacacctccaccatcaccaactacaccgacaatgaggtcatgaccatgtacgaggagtggttggtgaagcaccaaaaggtgtacaatgggttgagagagaaggacaagaggttccaagttttcaaagacaacttggggttcatacaagagcacaacaacaaccagaacaacacttacaaacttgggttgaaccagtttgctgacatgacaaatgaggaataccgttgggtgttttcccaaatttttggggttttaaaattttttttttttggcaccaagagtga

SEQ ID NO: 263066 - DNA, 301 bp, Glycine max
  unsure (1)..(301): unsure at all n locations
cctaaacaactctttctcttcttccttcgctcgttgttcttcctcgcgtagatcgacaatggcngagacagagacgtttgctttccaggctgagatcaaccagctcctcagtctcatcatcaacaccttctactccaacaaggagattttccttcgtgaactcatcagcaacgcctccgatgctttggacaagattcgatttgagagtttgacagataagagcaagctcgatgctcatccagagttgttcattcatattattccagacaagactaacaatacactgaccattgttgacagt

SEQ ID NO: 263067 - DNA, 429 bp, Glycine max
cccacgcgtccgcccacgcgtccgcccacgcttccggcggctagggttttagcgcagcttcttctagatgtaaggaagatgggtaaggaaaaggttcacatcagtattgtggtcattggccatgtcgactctgggaaatccactaccactggtcacctgatttacaagcttggaggcattgacaagcgtgttattgagaggtttgagaaggaagctgctgagatgaacaagaggtctttcaagtatgcctgggtgctggacaaacttaaggctgagcgtgaaagaggaatcaccattgatattgctttgtggaagtttgaaacaacaaagtattattgcacagttattgatgcgcctggacatagggatttcaaaattttttaaaaaaagggggaaaaaaaattttttaaaattttgattactgggaca

SEQ ID NO: 263068 - DNA, 263 bp, Glycine max
gaatgataaggtatatgaacaatccttaactgatacttctacaagatgttctattttttcatagaaaaagattcgctcaaaaaaaacgcgaaaatattttaatcgtaacttagaggatttgttacgtagaaaaagaaagatagattcatattcccatacatataaattatataggaacaaaaaaaatcttggattactttttgaaaaaaaagtagaaatccatttttttggagtaaaaatactattccaattataataataag

SEQ ID NO: 263069 - DNA, 183 bp, Glycine max
aaaaaaacaccacaagacccaaaacccaacacacacaaaaccaaacacacaaaaaaaaaaaccacaacacatacccacacacacaacaaacatacaaacaaaaaaaagctaacaataccattaaaaaaaaaatataaaaccacattttcaaaatcaaaataccattcccactataacaatacc

SEQ ID NO: 263070 - DNA, 432 bp, Glycine max
  unsure (1)..(432): unsure at all n locations
cccacgcgtccgctcaactttgccccttatggacccctttctgcagactagaaatggctgcaatttctgggtttgggctgaaacccctgagggctgtgagtgtttcttcttcatcttctgcatcaagtgatgatggatttgtcacactgacagagtatgtggggaaggaaggaatgaatgtgaaagatgatttggtggtgttgcttgatcatattcagtatgcttgcaagaaaattgcagcacttgtggcttctcctttcaattacagccttggcaaacaaactgctcttggttctgttggttctgatagggatgctccaaagcctcttgatattgtctcgaatgaaattatcttgtcatttttcccaaaaaccctttttttccccccccggnnaaaaaaaaaaaacatcccggaagagttgctgtcatggc

SEQ ID NO: 263071 - DNA, 454 bp, Glycine max
  unsure (1)..(454): unsure at all n locations
gcaaacatgtccaccgcaacaactcacgtgctcgcttatcccttccctacctccggtcacgggatcccgctcttagacttcaccaaaaccctagtctctcgcggcgtccatgtcaccgttctggtcacaccctacaacgaagccttacttccaaaaaactattcccctcttctccaaacgcttctcctccccgaacctcagttcccgaacccgaagcaaaacaggctcgtatccatggtaaccttcatgcggcaccaccactacccgatcattatggactgggcccaggcccagcccattcctcctgcggctattatatcagatttcttcctcggttggacccacctnctcgcacgtgacctncacgtgccgcgcgtagtcttctccccctccggcgccttcgcgctctccgtctnctactccctctggcgcgacgccccccaaaacgacaacc

SEQ ID NO: 263072 - DNA, 80 bp, Glycine max
aaaagaaaaaaaaaaaaaaaaaaaaaaaaatttaaaaaaaaaaaaaaaaaaaaaaaaaaaaaagaaaaaagaaaaaaaaa

SEQ ID NO: 263073 - DNA, 399 bp, Glycine max
cccacgcgtccgcccacgcgtccggtgattgaagctagttagaacaagatgttgcagctacgctacactgcgattttctccgaaatgcttttgattctcacgctcgtcttcaaaaccccactgagaaaactcgtcatcgtttccctcgatagtgtgaagcgcggtcgcggtcccgtggtggtttccaccgtgggcgccacattgatggtggttctcgcttcgagcctctacagcatggccaagatccagcaacgcaccctcgaggccggcatagtcaaccccaccgaccaagtcctcatgtccaagcacatgctcgaagcttctctcatggggtttctgctgttcctctctctgatgattgatagattgcaccattacataagagagcttcggtcactc

SEQ ID NO: 263074 - DNA, 369 bp, Glycine max
gggatgcaaatgcttccacacaggggttttctgctgggtgacttctagatcaacatgtctaatcatgagttcaagtccaagtacggcgagcacatgaagcgcgaggacctggtcatcaacaagtccaagaaggacaactcctgcgaccagatctacgtcttctttcccgactagcccaatgtcggcgtcaagaccatgaagacctacaccaaccgtatgaactccgaaaacgtctatagagccattcttctcacccataccaaccttaccctcttcgtccgcacctgcatcagctaaaatcttcttcccctcaaaaaaaaaaaattttttttttcctccccaaaaaactcctcccttcgagggtctttc

SEQ ID NO: 263075 - DNA, 267 bp, Glycine max
cacaaccaagaagaaaaaacacaaagcaaaagagacccaaccaacccaaaaacaagaaacaacaaaaccagcaaaacacaaaccaaaaaaaaccaacaaacaacccaaaaaagaacccaaaaaaacagacacaaacccaaccgaccaaaaaaaaacaccaaacaacccaaaaaccaaagaaaaccacaacccccacagaccaaaaaaaggacacccaaaaacacaaaccaaacacagaaaaaaacccaacaaaaaaaacaaagcaaa

SEQ ID NO: 263076 - DNA, 369 bp, Glycine max
ttacacatctataaataaaatttacaaatataaatattctaatccaacttaatttaatgaatcaattttacattcatctttttatctataaaataccaacaattaactcaaaatctatcttaaatatttattcataaactcaactatccaaattgatctttcttacaacctaatatcttttattatccattttccctacatactaattaaaatattccttaatattcattttatactttttatataactttataaaaaatttaatttaaaatatctaatctttaattaccaccaatttattaataacttttttaaaaatttttaatatttttttttttaattaatgttcaccaaataaattttcttcta

SEQ ID NO: 263077 - DNA, 397 bp, Glycine max
  unsure (1)..(397): unsure at all n locations
cccacgcgtccgggaagatggtgctttctgttgaggaaatgggtcgtctgtaccgaatagggaagacggtgatgcaaatgcttcgggacaggggttttctggtgggtgacttcgagatcaacatgtcgaagcatgagttcaagtccaagtacggcgagcacatgaagcgcgaggacctggtcatcaacaagtccaagaaggacaactccggcgaccagatctacgtcttcttccccgacgagcccaaggtcggcgtcaagaccatgaagacctacaccaaccgcatgaactccgaaaacgtctatagagccatcctcgtcacccagaccaacctcacccccttcgcccgcacctgcatcagcgaaatctccttnnccccaaaaaaaaaaattttttt

SEQ ID NO: 263078 - DNA, 419 bp, Glycine max
  unsure (1)..(419): unsure at all n locations
aattaccgggtcgacccacgcgtgccgtctgtgcattattatgtgcagtcttacantttaattaatgaatatcgngagcggtaatcgggccttcttcatcagggaagcaggggcgacctattaccacttgtataaaggttttagacatgactggtctgaagttatcagccctgaatcagattaagttgctaactattatatcatccattgatgatcttaactacccttagaagacaaatacttattacattgtaaatgcttcatacatattttctgcttgttggaaaggtttgaagccccttttaccaagagaggaccagaaagaaaaaatccangtgttacccaggtttgtggacgaagatgaagctattgaccctatcatggattactttcgtctctaaccacattttcttgtcgaa

SEQ ID NO: 263079 - DNA, 461 bp, Glycine max
  unsure (1)..(461): unsure at all n locations
attgctgctgtttgcctattggtgtactttgtggtctctaccctgctggatgcctcatctagcgatggccaaaaatcagatgaagagcagaaggaggcagaactagcagtttctgaattttctggaaatggtgctgggatactatctgctgctagcacagttgccagtacttttctcttagtttttgttgctgaatggggcgacaagtcatttttctccacaattgcccttgcagcagcttcttctccccttggagtcatagctggagcactggctggtcatggtgttgcaactttgctagctgtacttgggggttctttacttgggacgtatttgtcagagaaggttattgcctacatcggaggtgttctctntctcgtctttgccgcaataaccttatttgaaattgtgcaataggggttaaaagaaatgcaatataatctccgtgcaaagggttcaag

SEQ ID NO: 263080 - DNA, 342 bp, Glycine max
cgcacatcctctataaggagggaaactgatctcagtaagaagcctcctcgccaatcttgagatggatacaagcacgtggttgatgtggaatactgtcccccagttccttctgatggccctaaatttcctccaaaagcagtaaaagcaaaagaggcagcacaaaatgcgcccaatacacagaatactgtggaatatcatgaaattgtagaagatgagatgattcgaggattacagcagttgggatggaaaaaagttgatgtcagctttcactcagcattctggcctttctttgctcataacaacattcatgtgaaaaatgaatggtttcacaatgctggtgta

SEQ ID NO: 263081 - DNA, 369 bp, Glycine max
ttctagattgttttgttctgtatatttgtgaactttcaaatgaataagggttttaagatcatattgtgtgttttgcaacaatggctaatttctttgctgctatgatcttgtcactctatgccatttccatacttcaaacaattgtaatggcttctaatgaacaaagatgccacttgtatgacaacaatatcaaatatctaagttcaactgtcaagaattaccaatgcccatcacaatactctacgagatgtatccagacccaataccacaatccctgcatgcttttctgtcataaattcttcattacatgcctatatcttccccacctgtattattgccataaaacttttttccctttttacaacaact

SEQ ID NO: 263082 - DNA, 220 bp, Glycine max
atgtctagcacggagggccagaccatcaggagcgaggagtgagattgcatgagggggggggaagccgctggtggttgaagaagtggaggttgcgccaccgcaagcaggtgaagtgcgtttgaagatcctctacacctgtctttgccagactagtgtgtacttctggagtgcgaaaggccaagctccatagtagcctcgcatagtttggccatagaagctt

SEQ ID NO: 263083 - DNA, 235 bp, Glycine max
ttctatcattcattcatcttcgttctagagccatgtctagcaccgttggccagaccatcaagtgcaaagctgcgattgcatgggaggctgggaagccgctggtgattgaagaaatggaggttgcgccaccgcaagcccgtgaagtccgtttgaagatcctctacacctctctttgccacactgatgtttacttctgggatgcgaagggccagactccattggttcctcgcatttt

SEQ ID NO: 263084 - DNA, 515 bp, Glycine max
tcccggtcgaccaggcgtacgatcgaaaccttaagtttcggatcaggtctgagcaatctggttggtagaacctttggtcttagagagtcaagggttatgtctgaattagacgatcagattcctactgccttcgatccttttgctgatgcaaatgctgatgactcgggtgctgggtcaaaggagtatgtgcatattcgcgtacagcagcgaaatggaaggaaaagcctgacaaccgttcagggattgaaaaaagaattcagctataacaagatacttaaagatgttaagaaagagttctgttgcaatggaacagttgttcaggacccagaactaggacaggttattcaacttcaaggtgatcagaggaagaatgtctctaccttcctggtccaagctggtatcgtgaagaaggagcatatcaagattcatggtttctgagcggttggagtctcaagtgtcaagtcttacgtgcctgcctatgtgttgggcatatataatctgagttgtgtatgtga

SEQ ID NO: 263085 - DNA, 409 bp, Glycine max
tccggaattcccggctcgaccgacgcgtccgctttctccgagaacaaataaaaaaacgtgattcgctcttctcttcgaataaaccacatataccaactgacgagatgagtagtgagagaagggggggttgtcgttcacgaagctgttcagcaggttgtttgctaagaatgaaatgaggattctgatggtaggtctcgatgctgctggtaagacaaccatcttgtacaagctcatgctttgagaaatcgtcaccaccattcccaccatcggatgtaatgttgagactgtggagtacattaacatcagtttcactgtgtgggatgttggtggtcaggacaagatccgttctcttttgaatgcatatttccagaacacttatggtctcattttttgtgggtgatatcaattg

SEQ ID NO: 263086 - DNA, 366 bp, Glycine max
aagaatcaaagaaaggggtggtggctgcttcgaaagcttaataatttgtttatttccagaacatcatagttttcgcagcagcaaactaacaaattactcatatcatataataagatggcccgttctctctcgcaagccaaacgtattggtgtccttgttgctcaatctatctccctaattcccgttcatcggcgaggttacgcagtggcatccgatgtatcggtaagagttggattgggtaatattgggctgaggaatggaatcgtgtgaggtgtagaagagaagcctgatacaagagatggttcaaaagcctacttaactgattgggccccagacccagtaacagggtgctatggtgccattaac

SEQ ID NO: 263087 - DNA, 423 bp, Glycine max
gttgttttcgttcctctgaagtctggagtggtggagcttggttcgtttgaaatggtgcctgaagagcagggtgttgtggaaatggtcaggacagcatttggggaatccagtcctggacaggcaaaggtgtttccaaagatttttgggcatgagttaagcctgggggatacaaaatctcagtctataactattagtttctccccaaaggtggaagatgatccgggtttcacttcagactcctatgaagttcaagcactaggggtgaaccatgcttatggaaattcttccaatgggactttaggtgacggtaatgaaggaacattgtttcctcaattgaatcaaatgattgctgggaattttaatgctcaagcaagggttccttgtctagatctcggtaatgaagactcatcatcaattcatgca

SEQ ID NO: 263088 - DNA, 297 bp, Glycine max
ccggtccggaattcccggagggacccacgcgtccgcccacgcgtccggtgatttcagtgagtgatcggtgttcacttgatctcatcagaatcgtcagcgtcaattgattgagattccgatcagaaacagcggcggcggaaggcctggagaggcgactcaccccgacacgttgaaggcggctgtggctgagtgcatctcaacctgcatcttcgtgttcgccagctcaagctccggcatcgcctacaacaagctgacgggcaacgtggctgccacccatgccggcctggtctccgcctc

SEQ ID NO: 263089 - DNA, 482 bp, Glycine max
  unsure (1)..(482): unsure at all n locations
ctcaaaacttgtcttccccctctctcctcctcggaacgccattcgcatgcagttctcgcacaacacactggacaattatatttcaaagcgcaacccatttcaacatttcatcatttttctcgtgtaaccatcccctcacccacgaacccatcccatgaatttcccaaaatgccctcaacccagaaccccctcttctccttcctcctacattccaccccaccgtacccaactgcaccctcgcatgatctccctctactcttcttcttcttcttccctaaaatatccaaatcccaacaacaaaccccacaacgccaaatgcctcttgttcttcttcgccctcctcttcttcaccgcccccttcctcttctacctcttctccaccgncctccaactctactcctcccccaaattcgccgactcccgcccctactcctttgccctcgccctccgcgccggcccccacgccctccgtctctccgtct

SEQ ID NO: 263090 - DNA, 466 bp, Glycine max
attcgaaatctgatctccaacgattgatctcggtagaggctagtgcactctccaatctgcaaaaatgcctgtcagactcgaaatcaagcgcaagcttgcgcaaagatcagagagagtgaaatgtgtggatctgcatccaacagagccatggattctggcgagtttatactctggaactgtctgcatctggaactaccaatctcagaccatggccaaatcttttgaggttaccgagttaccagttagatcggccaagtttattgcacgcaaacagtgggttgttgctggagcagatgatatgtttattcgtgtatataattacaacacaatggataaagtcaaagtatttgaagcacatactgattacattaggtgtgtggcagttcatcctacccttccttatgtgctttcatcatctgatgatatgctcataaagctctgggatggggaaaaaggctggatctgt

SEQ ID NO: 263091 - DNA, 268 bp, Glycine max
cccacgcgtccgcgagcttcagcaatggtgtacgtcaaggctcagaaatcaaaagcctacttcaagagatatcaagtcaagttcaagagaagaagagagggaaaaaccgattaccgtgccaggattcggttgattaatcaggacaagaacaaatataacactccgaaataccgatttgtggttcgctttagcaacaaggacattgttgcacaaataatatctgctagcattgccggcgatttagttcttgctacagcatattcacatg

SEQ ID NO: 263092 - DNA, 340 bp, Glycine max
cccacgcgtccgcttctctctctctctctctgctttacttgcttgaagcaatggccaaagccttggcatcagtgctgctgtttctcctcgtagctgtgagtaatgtgtttgctgtagagcttgaacttgaaactcttccaccctcttaccctcaccctcaccctgttcactcccccacaccagcacctcttcacccaccagcaaatgctcctcacccacaccaccaccaccaccaccaccaccctccagcaccagcacctgttccttcaccttctcaccacaattaccctcctacccctgcccctgctaagcctcctactcaccaccatcaccatcaccc

SEQ ID NO: 263093 - DNA, 447 bp, Glycine max
ctccttcttctctctcttctctaacttcttaatcatgccaaaccttacatcagtgctctttaactctggagcggtactaatatttactatcatcttaacttctactctttcaccctcttaccctaccctaccctgtcactcctccacaccacacatcttactcaccatcaaattctctacccacactacaccataccaccaccacccttcacacctcacctataccttaccttctaccacattaccctttacccctcccatctaatcctcctactaccatcataccatcaccctacttctcctataatccacctcctctttcgaatcatcctccatataaacctcctgtttcatatcaccctccagttaaacctcctatttcatcttaccctccttttaaacctccttttattacggttcaccctccttttaaacctcctaattttc

SEQ ID NO: 263094 - DNA, 472 bp, Glycine max
gcaaacatgtccaccgcaacaactcacgtgctcgcttatcccttccctacctccggtcacgtgatccctcggttagacttcaccaaaaccctagtctctcgcggcgtccatgtcaccgttctggtcacaccctacaacgaagccttacttccaaaaaactattcccctcttctccaaacgcttctcctccccgaacctcagttcccgaacccgaagcaaaacaggctcgtatccatggtaaccttcatgcggcaccaccactacccgatcattatggactgggcccaggcccagcccattcctcctgcggctattatatcagatttcttcctcggttggacccacctcctcgcacgtgacctccacgtgccgcgcgtagtcttctccccctccggcgccttcgcgctctccgtctcctactccctctggcgcgacgccccccaaaacgacaacccggaagacccaaacggcg

SEQ ID NO: 263095 - DNA, 477 bp, Glycine max
cccacgcgtccgtcaagcattgcatccctcttgatttgtagtttgttttgtgctttagataaaagttctgcgaaatcaagaggggttttaagagcatagtgtgtgttttgcaacaatggctaagttctttgctgctatgatcttggcactctttgccatttccatacttcaaacagtggtaatggctgctaatgaacaaggaggccacttgtatgacaacaagagcaaatatggaagtggaagtgtcaagagttaccaatgcccatcacaatgctcgaggagatgtagccagacccaataccacaagccctgcatgtttttctgtcagaagtgctgcaggacatgcctgtgtgtgcccccggggtattatggtaataaagctgtgtgcccttgctacaacaactggaagaccaaggaaggaggacccaagtgcccttgagcttcaacttgttcaacttcaattgtcgctttcctaca

SEQ ID NO: 263096 - DNA, 428 bp, Glycine max
caaaacaatcaacaatagcttgctagctactcctgttgctgtgagaaccgttgatgtagatgctttgcaagcaagatttagagactccaacaataaaagccatgcttaacacctaccatgcctccaaactctcatcaaaccagtgtggttctagccttgtgcaaacaatagatgcacctttacctctcgtatggtccctcataaggcgctttgagtatccacaagggtacaagctctttgtgaagaagtgcaaccttcttgatagggatggtgtgattggaagcgtgcgtgaggtcatgatcacatgtgggttacccgcttggagtagtgtggagaggattggacagcgtgatgatgacaagcatgtctttgagttgagcatcattggtggtgatcacaggcttggcaattatagttaacgattactt

SEQ ID NO: 263097 - DNA, 495 bp, Glycine max
  unsure (1)..(495): unsure at all n locations
agacagcagagcagagatctagcgtattctctcgctctttctttcactgtcacagagccacatccatgggcttcccagccaacggcgcgtctgcggcccagcccctaaacttcctcatctacggccgcacgggctggattggcggcctcctcggctccctctgccgggcccagggcatctccttccattacggctcgggccgcctcgagaaccgggcctccctcgaaaccgacatagccctcctcaagccctcccacgtcttcaacgccgccggcgtcacgggccgccccaacgtcgactggtgcgagtcccacaaagtcgagaccatccgaaccaacgtcgtcggaaccctcactctcgccgacgtctgccgcgaccacggcctcattctcatcaactacgccaccggttgcattttcgagtacgactccgatcacccnctcggatccggtatcggcttcaaagaaaccgactcttcccaattcaccggttctt

SEQ ID NO: 263098 - DNA, 237 bp, Glycine max
aattcccgggaggacccacgcgtccgcccacgcgtcctgtgaagctgggtcattcctccgcggtatggatgtgaaccgggtaccttctgtggttgggggcgatgagtaagcaggtggttcatcgtcaaacagcacggattctatcgtcagtggaaggcgcagcgagagggaaaccactggagaagaaaacgacacagacagagcttgtgccatgtgcatcatcagcgacgaagaaga

SEQ ID NO: 263099 - DNA, 473 bp, Glycine max
  unsure (1)..(473): unsure at all n locations
gttgttttcgttcctctgaagtctggagtggtggagcttggttcgtttgaaatggtgcctgaagagcagggtgttgtggaaatggtcaggacagcatttggggaatccagtcctggacaggcaaaggtgtttccaaagatttttgggcatgagttaagcctgggggatacaaaatctcagtctataactattagtttctccccaaaggtggaagatgatccgggtttcacttcagactcctatgaagttcaagcactaggggtgaaccatgcttatggaaattcttccaatgggactttaggtgacggtaatgaaggaacattgtttcctcaattgaatcaaatgatggctgggaattttaatgctcaagcaagggttccttgtctagatctcggtaatgaagactcatcatcaattcatgcagatgagcggaagcccaaaataagaggtaggaaacctgccaatgngagaga

SEQ ID NO: 263100 - DNA, 428 bp, Glycine max
  unsure (1)..(428): unsure at all n locations
atgaagagcattggaacttcatattccacaactaccttaggccttggtaacttcatcagttcctttcttctctcaacagtgtcaaatatcaccaagaaaaatggtcacaaggggtggattttgaacaatctgaatgagtctcatcttgactactactatgcattttttgcaatattaaacttcctcaacctcatcttcttcgcgtatgttactaggtactatgtatatagggttgaagtttcagattccatagacaagcttgcaaaagaactgaaggaaaagaccgtgtccaacgttgtgaatccaaaagactagttgattggggtatctaaggggagaaagaggattaagaccgtgaaaagtttcaaaactactntatgtaccaaattggatggccaaagaactagatatgtgtgtgtctgttgggg

SEQ ID NO: 263101 - DNA, 380 bp, Glycine max
  unsure (1)..(380): unsure at all n locations
gaaatgtgaaagccttatcatacagtgtttgcaagatgccaaggtagaagttgaagaagtaaatgatgtgataattgtaggcggatgttcttacatcccgagggtgaaaaatcttgttactaacgtatgtaaaggcaaggaactttataaaggcatgaatcctttagaagctgctgtttgcggtgcagcagtggaaggagctattgcttcaggcgtcaatgatccctttgggaacttggacttgttaactatccaagctacacctcttgccattgggattcgagctgatgggaacaagtttgtccctgtaattccgagggatactacaatgccagcacggaaagagctangtttcacaactactcatgaccatcaaactg

SEQ ID NO: 263102 - DNA, 268 bp, Glycine max
cggtccgaattaggggtcgaccacgcgtccgcccacgcgtccgggagaagcagaaggagcaaaagcaatggcgccgaagaagccgagaaccacgacaaggaaccctgatttggttagggggattggcaagtattcgaggtcgcagatgtaccacaagaggggcatctgggccatcaaggccaaaaacggtggcgttttgccccgccacgatcccaaacccaagcccgaggccccggcccagatagccgccgagttctaccccgcggac

SEQ ID NO: 263103 - DNA, 331 bp, Glycine max
cttctccttctcaatcttgtaattctatttcctccaccataatgctgcgcaagcttgtgtcagggccacgcaagaacaagcctggcacagttcccgttcacctcaacgtctatgatctcaccccaatcaacggctatgcctattggcttggccttggagtctaccattctggggttcaagttcatggattggaatatggttttggtgcgcacgagcacgacacaacggggattttcgaagtccaacccaaacactgccctgggttcactttcagaaagtcaattttcatcggaacaacagatctgggtccgaaagatgttcgagcattcat

SEQ ID NO: 263104 - DNA, 383 bp, Glycine max
cccacgcgtccgtcaagcattgcatccctcttgatttgtagttggttttgtgctttagataaaagttctgccagatcaagaggggttctaagatcatagtgcgtgtcttgcatcaatggctaagttctttgctgctatgatcttggcactctctgccattttcatacttcaaacagaggtaatgtgctgctaatgaacaaggaggccacttgtatgacaacacgagcaaatatggaagtggaagtgtcaagagttaccaatgcccatcacaatgctcgaggagatgtatccagacccaataccacaagccctgcatgtgtttctgtcagaagtgctgcacgacatgcctgtgtgtgcccccggagtattatggtaataaagct

SEQ ID NO: 263105 - DNA, 412 bp, Glycine max
cggacccctgggtttcagaggccccgaatgttcttacagttgcattaaagagatttcagtctgggaaatttgggaagctcaacaagcctattcaatttcctgaaatacttaacttggcacctttcatgagcgggactagtgataaatcacccatatacagattgtatggggtagttgctcacttagatatcatgaatgctgccttttcgggtcactatgtgtgctatgtgaagaatatccaaaacaagtggttcaaggttgatgacagtgtggtgacagctgttgaattggatagagtcttgacaaaaggagcatatatgcttttctatgcaaggtgctcgccaagggccccaagattaattatgaacagaatactgtccccagattcaaaacgtaaagtcagtggaaagac

SEQ ID NO: 263106 - DNA, 435 bp, Glycine max
ctgagttgcaagattcacttcaaattatgcgtttcgctgatcggttcctcatcacatcaaacgacgtcgcagatcatcgcaattccttgattatttccttttgttgatacgcggaatcgcgcacacggtgctggtgtgtgcactgaggtagaaagaagaagattgaattgtaaacagcatgaattaccttcttggagctttcaagcctgcatgtaatgtcttgatcacgtttaatgatgggaagaaccggaagcaggttccgtttaaaaaagaaaatggtcaaatggtcacagtcccacttttccaaagtcaagaaaacattggtgggaagattacaatagaaccaatgcaagggaagaagattgatcacaatggtgtaaaagttgagctccttggacagattgagatgtattttgacagatgaaatttttatga

SEQ ID NO: 263107 - DNA, 399 bp, Glycine max
gcgccatatcgcgtatctttctctgttctattcctacgatggagttttggggtgccgaggttaaggttggtgagtctgttaaggtagatccagccgaattcgaggcatgcatacacctttctcaggctgctcttggtgaggcaaagaaagacaaatcatatgaaccagttgttctctacttgaaagttggtcaacacaaatttgtcttgggaaccctctccagggagaaaattcctcaaatacctctggaattggttttggaaaaggagtttgagctttaccacaactcatagaatgccagagttcattcctgtggatacaaggcattctatgatgctggcgatgatagcgagtaggatgaatatactgactgcgaagtggatgttccattgcttaaag

SEQ ID NO: 263108 - DNA, 467 bp, Glycine max
gaattcccgggtcgacccacgcgtgcgcggaacgatgaccggcggcggatccacggggaggttgccgacgtggaaggagagagagaacaacgggaggagagagagaagacgaagagcgattgcagctaagatctacactggccttcgagcccaggggaactacaagcttccaaagcactgcgacaacaacgaggtcctgaaagctctctgcgccgaagctggctggatcgtggaagaagatggcacaacttatcgaaagggatgtaagagacccacgagtgagattggaggaacaccactgaacttaagcgcgtgttcttccattcaggcaagtccacaatcctcgtcatacccgagtcctgtaccatcctaccatgctagcccaacctcttcctcgttcccaagccccacgcgcattgacggaaaccacccttcttcctttctcatcccattcatccgcaacataa

SEQ ID NO: 263109 - DNA, 430 bp, Glycine max
aattctcgggtcgacccacgcgtacgcggaacgatgaccgtcggcggatccacggttaggtttcctacatgcaacgagagagagaacaacggggggatatagagaagacgactagctattgcagctaatatctacactggccttcgaacccattggaactacaagctttcaaagcactgcgacaacaacgaggtcctgaaagctctcttctcctaagctggctggatcgcggaagtaagatggcacaacttatcgaaagggatgtaagagacccacgagtgagattggaggaacaccactgaacttaatcgcgtgttcttacacttacgcaagatcacaatcctcgatataccctagatctgtaccatcctaccatgctagcccaacctatttctcgttaccaaactccactctcattgactgaaaccac

SEQ ID NO: 263110 - DNA, 337 bp, Glycine max
cggtccggaattcgagggtcgacgtcacgcgtccagccacgcgttcgtccacgcgtcctctccatttagaagatgaaacttaatcgatcatcactgggacttactaatacatgagggcatacgagacccagaacaagtatgagagctctgaggttgaggtccaggatcgtggtgtttttgactttctcggtaagataaaggatgaagaagacaagcctcatcctcaggaggaggtcattgccaccgagttttaaaaagtcactgtctcagaccaatgagagaacatgcacatgccttttagaaaagcttcaccgatcttacagcttctttagctctt

SEQ ID NO: 263111 - DNA, 462 bp, Glycine max
attgctgctgtttgcctattggtgtactttggggtctctaccctgctggatgcctcatcgagcgatggccaaaaatcagatgaagagcagaaggaggcagaactagcagtttctgaattttctggaaatggtgctgggatactatctgctgctagcacagttgccagtacttttctcttagtttttgttgctgaatggggcgacaagtcatttttctccacaattgcccttgcagcagcttcttctccccttggagtcatagctggagcactggctggtcatggtgttgcaactttgctagctgtacttgggggttctttacttgggacgtatttgtcagagaaggttattgcctacatcggaggtgttctctttctcgtctttgccgcaataaccttatttgaaattgtgcaataggggttaaaagaaatgcaatataatcttcgtgcaaagggttcaaga

SEQ ID NO: 263112 - DNA, 403 bp, Glycine max
attgctgctgtttgcctattggtgtactttggggtctctaccctgctggatgcctcatcgggcgatggccaaaaatcggatgaagagcagaatgaggcagaactagcagtttctgaattttctggaaatggtgctgggatactatctgctgctagcacagatgccagtacttttctcttagtttttgttgctgaatggggcgacaagtcatttttcttcacaattgcccttgcagcaacttcttcttcccttggagtcatagctggagcactggctggtcatggtgttgcaactttgctagctgttcttggggggtctttacttgggacgtatttgtcagataaagttattgcctacatcggaagtggtctctttcttgcttttgcccaataaccctatttga

SEQ ID NO: 263113 - DNA, 388 bp, Glycine max
gaaatgtgaaggccttatcatacagtgattgcaagatgccaaggttgaaggtgaagaagggaatgatgtgataattgtacgcggatgttcttacatcccgagggtgaaaaatcttgctactaacgtatgtagaggcaatgaactttataaaggcatgaattctttagaagctgctgatcgcggcgcatcagtggaaggagctattgcttcaagcttcaatgatccctttgggaacttggacttgttaactatccaagctacacatgtagccattgggattcgagctgatgggaacaagtgtggccctgtaattccgagggatactacaatgccagcactgatagaactagttttgacagctactcatgacaataaaactgaagcgttg

SEQ ID NO: 263114 - DNA, 462 bp, Glycine max
gaaatgtgaaagccttatcatacagtgtttgcaagatgccaaggtagaagttgaagaagtggatgatgtgataattgtgggcggatgttcttacatcccgagggtgaaaaatcttgttactaacgtatgtaaaggcaaggaactttataaaggcatgaatcctttagaagctgctgtttgcggtgcagcagtggaaggagctattgcttcaggcgtcaatgatccctttgggaacttggacttgttaactatccaagctacacctcttgccattgggattcgagctgatgggaacaagtttgtccctgtaattccgagggatactacaatgccagcacggaaggagctagttttcacaactactcatgacaatcaaactgaggcgttgatccttgtctatgaaggagagggtgaaaaggcagaagaaaaccacctattgggatatttcaagataatgggaat

SEQ ID NO: 263115 - DNA, 450 bp, Glycine max
cccacgcgtccggactgcccaagatgtatcgacaatgttacggtgcgggcaaaaaaccatcatctttctgatcaacaatggtggatacaccatcgaggttgaaattcatgatgggccgtacaatgtgattaagaactggaattacactgggttgattgatgcaatccacaatggtgaagggaaatgctggactgccaaggtgttctgtgaagaggagctagttgaagcaattgccacagccacaggacccaagaaagactccttatgcttcattgaagtgattgttcataaggatgacaccagtaaagaattgcttgaatggggctcaagggtttctgctgccaatagccgtctctccaatcctcagtaatcttcagaatttatcctatgactaaattgctgcaattgccctttagctctatgaaagtgagaatcatttgagatgatgcc

SEQ ID NO: 263116 - DNA, 277 bp, Glycine max
caaggaagggaaggaccccagtgattataggtacttcctgtataagcacattgacttcgacgtgttctacaacaaggacagggtcatcgagatcaacgtgcgcaccgatcccaatgcgctcgtggatctcaccaaggattctgaggttgatgccgagtttttgtacacggtgaagtggaaggagacgaacacgccgttcgagaagaggatggacaggtactctcagtcctcgtcgctgccgcatcatttggaaatccactgggtctcgattatcaac

SEQ ID NO: 263117 - DNA, 446 bp, Glycine max
cttttctactttgagtcttcttgatccttctttctctccttgaactcaaacatggcagatgaggtggttctgctagatttctggccaagtccatttgggatgagggtcaggattgcacttgctgaaaagggtatcaaatatgagtacaaagaagaggacttgaggaacaagagtcctcttctcctccaaatgaacccggttcacaagaagattccggttctcatccacaatggcaaacccatttgtgaatccctcattgctgttcagtacattgaggaggtttggaatgacagaaatcccttgttgccttctgacccttaccagagagctcaggctagattctgggctgattatgttgataagaagatatatgatcttggaaggaagatttggacatcaaaaggagaagaaaaagaagctgccaagaaggagttcatagaagccct

SEQ ID NO: 263118 - DNA, 455 bp, Glycine max
gaaatgtgaaagccttatcatacagtgtttgcaagatgccaaggtagaagttgaagaagtgaatgatgtgatgattgtaggcggatgttcttacatcccgagggtgaaaaatcttgttactaacgtatgtaaaggcaaggaactttataaaggcatgaatcctttagaagctgctgtttgcggtgcagcagtggaaggagctattgcttcaggcgtcaatgatccctttgggaacttggacttgttaactatccaagctacacctcttgccattgggattcgagctgatgggaacaagtttgtccctgtaattccgagggatactacaatgccagcacggaaggagctagttttcacaactactcatgacaatcaaactgaagcgttgatccttgtctatgaaggagagggtgaaaaggcagaagaaaaccacctattgtgatatttcaagataa

SEQ ID NO: 263119 - DNA, 296 bp, Glycine max
cttgatgatcccaacactttcggtaacaggattcacaggatgctgaagcttggactgagcattgatgaagatgctggtgaagcagatgctgacatgcctcctcttgaggacgctgatgcagatgctgagggtagcaagatggaagaagttgattaaatctgacttaattgcctgttacgtttttagaaacaatgattggagaaacagtctttttactatgttttatgttttttgaattttcgaaattttggaacgttggctagttaggtgccgtatgtagtagtttctttatggta

SEQ ID NO: 263120 - DNA, 332 bp, Glycine max
gaattcccgggtcgacccacgcgtgcgcccacgcgtccgcggacgcgtgggggtttttgtggataagagtgagctataatggctgccattagaccgggtttaattgctttgtttgatgttgacggtactcttacagatgctagtaaggtggttacaccggaaatgatgacattcatgcaagaactacgaatggttgtaacggttggagttgataagcgttctgaccttatacagattttagaccaactttgatgtacagttaccaatgagtatgattacgtattttctgataatggtcttgatgcttacaatgaatgaaagctcattggaac

SEQ ID NO: 263121 - DNA, 412 bp, Glycine max
cggtccggaattccgggggggacccacgcgtacgcttcttctctggttgattccgatctttagtcttcaggttctcctcgttgttcttggcttggctgttttcaatgtcgagtctttcgttaatataattagatgtttgggagggcacccaataagaacgataattctatgtactactaaatccttggcgtcttcaataacgcttcgcaggatgatctgaagaaggcttacaagatagccgccattaagaatcacccctacaagggcggtgatccccacaagtttaaagagcttgcgcaagcttattatgttcttagtgacccttataagcgtgagaaatattatcagtattgggtatatgccctttatgtatgaaatggttttggccttttgcattatccatttttatatc

SEQ ID NO: 263122 - DNA, 390 bp, Glycine max
tgaatgtgtgatgatttattaatttctttcctgtgacttggtttgttgtcattctgaatgctgttgctaatacatgcattgttggagttcaattggttgctttgctggctctttttttgcacttagtttttatttttatttccatcaacttgatttgtagttttctctttgagtttaattcccctcaaggtttgaattgtatttgcttttagagtttaattcaaattcactaactatgattaaaatctgatcataaattatcaattatgataagagtattgatttttattataattatttaaaaatcgtatctaaaataatttttagaaaataatattcttagtaaataatttatgcactgaattttattaaaaacttttacacttttaa

SEQ ID NO: 263123 - DNA, 498 bp, Glycine max
tactcgctctggaattcccgggtcgaccgacgcgtccgtgaatgtgtgatgatttattaatttctttcctgtgacttggtttgttgtcattctgaatggtgttgctaatacatgcggtgttggagttcaattggttgctttgctggctctttttttgcacttagtttttatttttatttccatcaacttgatttgtagttttctctttgagtttaattcccctcaaggtttgaattgtatttgcttttagagtttaattcaaattcactaactatgataaaaatctgatcataaattatcaattatgataagagtattgatttttataataattatttaaaaatcgtatctaaaataattttttagaataaattatacatagtaaataatttatgcactgaaattttataaaaactttttacacttttatttaaatattaaataatcatatatatttagactggtaacttttattaataattaattaataatttttta

SEQ ID NO: 263124 - DNA, 354 bp, Glycine max
cccacgcgtccgcccacgcgtccggtgattgaagctagttagaacaagatgttgcagctgctctacactgcgattttctccgaaatgcttttgattctcacgctcgtcttcaaaaccccactgagaaaactcgtcatcgtttccctcgatagtgtgaagcgcggtcgcggtcccgtggtggtttccaccgtgggcgccacattgatggtggttctcgcttcgagcctctacagcatggccaagatccagcaacgcaccctcgaggccggcatagtcaaccccaccgaccaagtcctcatgtccaagcacatgctcgaagcttctctcatgggggttctgcttgtcctctctctg

SEQ ID NO: 263125 - DNA, 450 bp, Glycine max
  unsure (1)..(450): unsure at all n locations
atttgttgctgcaggaattcacagcccggcctgatatagcagatgattgttttttgttggcctcaaggtgtattcgctactgtcctcaactgtttattccctcgtctgtttttccttcattagtggattgctctatgattgggatcacagtacagcatagggaggcttcgaattccatattgcatttcttggctgacatttttgatcttgcgaattcctctgtgggggagcaatttataccaataagagatagtgtaataattcctcgaggtgccagcatcaccagaattttggttgcttcattaacgggagcacttcctaaatctcgagtggatgtggtatcttatacactcctggcattaactcgatcatatgggatgcaagcgctggaatgggcaaaanagagtgttntgttaattccatcaacagcttgtacagatgtagagcgat

SEQ ID NO: 263126 - DNA, 434 bp, Glycine max
cccacgcgtccgcgagcttcagcaatggtgtacgtcaaggctcagaaatcaaaagcctacttcaagagatatcaagtcaagttcaagagaagaagagagggaaaaaccgattaccgtgccaggattcggttgattaatcaggacaagaacaaatataacactccgaaataccgatttgtggttcgctttagcaacaaggacattgttgcacaaataatatctgctagcattgccggcgatttagttcttgctacagcatattcacatgagctgccacgatatggtcttgaagtaggacttacaaattatgcagcagcttattgcactggtctcctgttggcccgaagagtcctcaaaacacttgaaatggatgaggagtatgaaggaaatgttgaggctactggagaggattattcaatggaacctgccgagag

SEQ ID NO: 263127 - DNA, 318 bp, Glycine max
cccacgcgtccgccagccgtacggtttctggtcgaggatgctacttcatagcaatccatgtggcctacatatggggatcacttcatgaaaatattattgggatggtcccattatccgagccattattcaggtgactgatatgcacaggaacaatggtatcactgctatactgcaccatatatcataggtttactccaatgccattgaccctcatgatacacttaggaacattgacggcgatttaattcttgctgctggatacctacatcatctgccactataatggatccaagcttgccttacatctatttccaacat

SEQ ID NO: 263128 - DNA, 365 bp, Glycine max
cccacgcgttcgccacccttacagtttctgttcgagtatcctactacataacaattcatcgtgcctacataaagggatgacttcatgaaaatattcttgtgttgatcacatttccaagccattattcatttgcttaattatgcacataaacaaatatatcactgctatactccacatatatatcatagtatgaatccaatcccattgaccctcatgatacactaatctaactttgccgttgattcaattcttacatctggatactttcatcttataccactataattaatccaagcttacctaacaactatattcaacatcttattcatcatcttcttctagtcttttctatcattcgaattcta

SEQ ID NO: 263129 - DNA, 387 bp, Glycine max
cccacgcgtccgccaactttacggtttctgttcgacgatcctactacatagcaattcatgaggcctacatatggggatcacttcatgaaaatattattgtgttggtcacatatccgagccattatccaggtgactagtatgcacagaaataatatgtatcactgctatactgccccatatatcataggttgactccaatgccattgaccttcatgatacactatggaacattgacggcgattcaattcttgcatctggatacctacatcatataccactgtattggatccaagcttgccttacatctatatccaacattcattcatcatttcttccagctttcgcaagagtggcattctatctcatgatagatcacgaagctgaaat

SEQ ID NO: 263130 - DNA, 422 bp, Glycine max
attgtatcttgttattttttataaaagggaggccaatgccttatattgtaattatacgtgggaatgttgctccagcaaaatcaccccacaacaaatgtttacattcataaggtggttcatcaaaccaatgtattattccccaggataactgtcatcaacatttaatcagcagcataattgtcttaaaataaaatcttctttgtcttcaaagatacactccaagtttaaactattcatttaaagacaatccaaatggtgacattctcgtctgggtggtgtagttggttatcacgctagtctcacacactagaggtccccggttcgaaccccggctcagacatttcaatattttgtagcccatgtctgtaaattactttgagatatgtttttagggttttttttaatgctttggaataaaattt

SEQ ID NO: 263131 - DNA, 330 bp, Glycine max
cttctccttctcaatcttgtaattctatttcctccaccataatgctgcgcaagcttgtgtgagggccacgcaagaacaagcctggcacagttcccgttcacctcaacgtctatgatctcaccccaatcaacggctatgcctattggcttggccttggagtctaccattctggggttcaagttcatggattggaatatggttttggtgcgcacgagcacgacacaacggggattttcgaagtccaacccaaacactgccctgggttcactttcagaaagtcaattttcatcggaacaacagatctgggtccgaaagatgttcgagcattca

SEQ ID NO: 263132 - DNA, 423 bp, Glycine max
attgtatcttgttattttttataaaagggatgccaatgccttatattgtaattatacgtggtaatgttgctccagcagaatcaccccacaacaaatgtttacattcataaggtggttcatcaaaccaatgtattattccccaggataactgtcatcaacatttaatcagcagcataattgtcttaaaataaaatcttctttgtcttcaaagatacactccaggtttaaactattcatttaaagacaatccaaatggtgacattctcgtctgggtggtgtagttggttatcacgctagtctcacacactagaggtccccggttcgaacccgggctcagacatttcaatattttgtagcccatgtctgtaaattactttgagatatgtttttaggtttttttttaatgctttgtaataaaatttt

SEQ ID NO: 263133 - DNA, 121 bp, Glycine max
cccacgcgtccgccacgcgtccggtttctggtggaggatccaacttcagagcaattcatggggccttcaaaaggggatcacttcatggagatgttcttgtgttggtcacaaattaaaatga

SEQ ID NO: 263134 - DNA, 432 bp, Glycine max
cagagtttgagtggacctgtctcagctaccctttaccttggttattcactactcatggccattgcaatcatgttgtcaaccggcaccattggcttccttatgtcattctactttgtgcactacttgttctcatcagtaaagatagattgaggttcttgttgtcattgcatattaactatgaaaaaggttgattgatataacttgatcacattgcatagtagggcaacggatgtttaattcattgtctgattttatattgcgatgggatctgcagtttgttctccttctgcctgtttcccaaagtagtgtactcattcaagtattcaactaagtgttgagatcatgtttcaagtattttggtcaaagttctttagaagggttgtattcaaactctcatctcaattccatactttagaaaaatggtggtagatt

SEQ ID NO: 263135 - DNA, 435 bp, Glycine max
cccacgcgtccgcccacgcgtccgctccagagagaagaagaaacttaatcgatcatcactgcacttcactaatacatcatggcagacgagacccagaacaagtatgagagctctgaggttgaggtccaggatcgtggtgtttttgactttctcggtaagaaaaaggatgaagaagacaagcctcatcctcaggaggaggtcatcgccaccgagtttcaaaaagtcactgtctcagaccaaggagagaacaagcacagcctcttagaaaagcttcaccgatctgacagcagctctagctcttcaagtgaggaggaaggagaagatggagagaaaaggaagaagaagaagaaggaaaagaaagggctgaaagagaagatcgaggagaaaatagagggtgatcatcatcatcacaaggatgaggacacaagtgtccct

SEQ ID NO: 263136 - DNA, 456 bp, Glycine max
cccacgcgtccgcccacgcgtccggtgattgaagctagttagaacaagatgttgcagctactctacactgcgattttctccgaaatgcttttgattctcacgctcgtcttcaaaaccccactgagaaaactcgtcatcgtttccctcgatagtgtgaagcgcggtcgcggtcccgtggtggtttccaccgtgggcgccacattgatggtggttctcgcttcgagcctgtacagcatggccaagatccagcaacgcaccctcgaggccggcatagtcaaccccaccgaccaagtcctcatgtccaagcacatgctcgaagcttctctcatggggtttctgctgttcctctctctgatgattgatagattgcaccattacataagagagcttcggtcactcatgaagaccatggaagctattaagaaacatagccgaagttttgaagatggtaaaaat

SEQ ID NO: 263137 - DNA, 399 bp, Glycine max
cccacgcgtccgttctaatctcattctccttctgttcaaacactctctctcatggcatcagataagaagattaggatcggcatcaacggatttggaaggattggccgtttggtggccagggttgcccttcaaaggaatgatgttgaacttgttgctgtcaacgatcctttcatcaccactgattacatgacatacatgttcaagtacgacaccgttcatggccagtggaagcattttgatgtgaaggtgaaggactctaagacccttctctttggtgagaagcccgtcaccgtttttggaatcaggaaccctgaggaaattccatggggtgaggttggtgctgattatgttgttgagtcaactggtgtattcactgacaaggacaaggctgctgctcac

SEQ ID NO: 263138 - DNA, 442 bp, Glycine max
attgctgctgtttgcctattggtgtactttggggtctctaccctgctggatgcctcatcgagcgatggccaaaaatcagatgaagagcagaaggaggcagaactagcagtttctgaattttctggaaatggtgctgggatactatctgctgctagcacagttgccagtacttttctcttagtttttgttgctgaatggggcgacaagtcatttttctccacaattgcccttgcagcagcttcttctccccttggagtcatagctggagcactggctggtcatggtgttgcaactttgctagctgtacttgggggttctttacttgggacgtatttgtcagagaaggttattgcctacatcggaggtgttctctttctcgtctttgccgcaataaccttatttgaaattgtgcaataggggttaaaagaaatgcaatataatc

SEQ ID NO: 263139 - DNA, 409 bp, Glycine max
attgctgctgtttgcctattggtgtactttggggtctctaccctgctggatgcctcatcgggcgatggccaaaaatcagatgaagagcagaaggaggcagaactagcagtttctgaattttctggaaatggtgctgggatactatctgctgctagcacagttgccagtacttttctcttagtttttgttgctgaatggggcgacaagtcatttttctccacaattgcccttgcagcagcttcttctccccttggagtcatagctggagcactggctggtcatggtgttgcaactttgctagctgtacttgggggttctttacttgggacgtatttgtcagagaaggttattgcctacatcggaggtgttctctatctcgtctttgccgcaataaccttatttgaaattg

SEQ ID NO: 263140 - DNA, 346 bp, Glycine max
cccacgcgtccgggagaagcagaaggagcaaaagcaatggcgccgaagaagccgagaaccacgacaaggaaccctgatttggttagggggattggcaagtattcgaggtcgcagatgtaccacaagaggggcatctgggccatcaaggccaaaaacggtggcgttttgccccgccacgatcccaagcccaagcccgaggccccggcccagaagccgcccaagttctaccccgcggacgatgttaagaagcccctcgtcaacaagcacaagcccaaacccgcgaaactcagggctagcattactccagggactgtgttgatcctgcttgctgggaggttcaagggaa

SEQ ID NO: 263141 - DNA, 395 bp, Glycine max
ctcgctccggaattcccgggtcgaccgacgcgtccgcccacgcgtccgggagaagcagaaggagcaaaagcaatggcgccgaagaagccgagaacggcgacaaggaaccctgaggtggttagggggattggcaagtattcgaggtcgcagatgtaccacaagaggggcatctgggccatcaaggccaaaaacggtggcgttttgccccgccacgatcccaagcccaagcccgaggccccggcccagaagccgcccaagttctaccccgcggacgatgttaagaagcccctcgtcaacaagcacaagcccaaacccgcgaaactcatggctagcattactccagggactgtgttgatcctgcttgctgggaggttcaagggaaagaaggttgtttt

SEQ ID NO: 263142 - DNA, 397 bp, Glycine max
ccaattcactctttttcttctcgccctctgccgtgggaggagtttgtaacatggctgctctaccaacggcggagcttagtgacgcaaatgcaacacatgtagcaagttgtgatgtgagggtgttgcatccagtgttcaaggtttacggtggggccaccgcgttctccggccccgttgtcaccgtgaaggtgtttgaagacaacgtgttggtgaaggagcttcttgagacgaaaggcgaaagaagagtattggttggtgatggaagaagaagcttgaagtgtgcattggttggaaggaatttggcactgattgcacataacatgggttgggctgggattgtggtgaatggctgcatcagagatgtggatgagatcaatgcaagtgatattggcgtcag

SEQ ID NO: 263143 - DNA, 458 bp, Glycine max
gaaatgtgaaagccttatcatacagtgtttgcaagatgccaaggtagaagttgaagaagtaaatgatgtgataattgtaggcggatgttcttacatcccgagggtgaaaaatcttgttactaacgtatgtaaaggcaaggaactttataaaggcatgaatcctttagaagctgctgtttgcggtgcagcagtggaaggagctattgcttcaggcgtcaatgatccctttgggaacttggacttgttaactatccaagctacacctcttgccattgggattcgagctgatgggaacaagtttgtccctgtaattccgagggatactacaatgccagcacggaaagagctagttttcacaactactcatgacaatcaaactgaggcgttgatccttgtctatgaaggagagggtgaaaaggcagaagaaaccacctattgggatatttcaagataatggg

SEQ ID NO: 263144 - DNA, 349 bp, Glycine max
gaaattttggttgagatgggaaagaagaacaaagtgaaggaaaatggaggcaaagagcattgctcctcgactctttttgtctccaacttgccctattccttttccaattctcagttggaggagacgttcagtcaggttgggcctgtcaggcgttgcttcatggtcacacagaaaggatcagctcaacatcgtggtttcggttatgtccaatttgccgttgaggaagacgctaaccgtgctattgagctgaagaatggtacatctgttgaaagccggaaaattgtagtgaagcatgcaatgcctcgtccctcccgttgagaacggcaatcaaaaccaaatcaaggccaga

SEQ ID NO: 263145 - DNA, 431 bp, Glycine max
cagagtttgagtggacctgtctcagctaccctttaccttggttattcactactcatggccattgcaatcatgttgtcaaccggcaccattggcttccttatgtcattctactttgtgcactacttgttctcatcagtaaagatagattgaggttcttgttgtcattgcatattaactatgaaaaaggttgattgatataacttgatcacattgcatagtagggcaacggatgtttaattcattgtctgattttatattgcgatgggatctgcagtttgttctccttctgcctgtttcccaaagtagtgtactcattcaagtattcaactagtgtttgagatcatgtttcaagtattttgttcaagtttctttagaaggttgtaattcaaactctcatctcatttcaatactttagaaaaatgatgtaggat

SEQ ID NO: 263146 - DNA, 449 bp, Glycine max
  unsure (1)..(449): unsure at all n locations
cccacgcgtccggactgcccaagatgtatcgacaatgttacggtgcgggcaaaaaaccatcatctttctgatcaacaatggtggatacaccatcgaggttgaaattcatgatgggccgtacaatgtgattaagaactggaattacactgggttgattgatgcaatccacaatggtgaagggaaatgctggactgccaaggtgttctgtgaagaggagctagttgaagcaattgccacagccacaggacccaagaaagactccttatgcttcattgaggtgattgttcataaggatgacaccagtaaagaattgcttgaatggggctcaagggtttctgctgccaatagccgtccttccaatcctcagtaatcttcagaatttatcctatgactaaatngctgcagttgccctttagctctatgaaagtgaggatcatttgagatgatgc

SEQ ID NO: 263147 - DNA, 359 bp, Glycine max
caaagacatccttctcctggatgtggctcccctcactctcggaattgaaactgttggtggagtcatgacaaagttgattcccagaaacactgttatcccaaccaagaaatctcaggtgttcaccacctatcaggaccagcagactacagtctccattcaggttttcgaaggcgagaggagtctcacaaaggattgccgccttcttgggaaatttgatctgtctggaattccttcagccccaaggggtacgcctcaaattgaagtgaccttcgaagttgatgccaacggcattctaaatgtgaaagcagaagacaagggcactggttaatcagaaaagatcaccattaccaaccaaaagg

SEQ ID NO: 263148 - DNA, 489 bp, Glycine max
gaattctccgggtcgaccgcacgcgtccgtgaatgtgtgatgatttattaatttctttcctgtgacttggtttgttgtcattctgaatggtgttgctaatacatgcgttgttggagttcaattggttgctttgctggctctttttttgcacttagtttttatttttatttccatcaacttgatttgtagttttctctttgagtttaattcccctcaaggtttgaattgtatttgcttttagagtttaattcaaattcactaactatgataaaaatctgatcataaattatcaattatgattagagtattgatttttataataattatttaaaaatcgtatctaaaataattttttagaataattattccataataattatttattcacttgaaatttattaaaaacttttacacctgtatttaatttttaattattctatttttttagacttgttacttttttaataattaatttattaatttttattt

SEQ ID NO: 263149 - DNA, 382 bp, Glycine max
cttcttctctggttgattcggatctagagtcttcagtttctcctcgttgttcttcgctttcctgttttcaatttcgattctttcgttaatttaataagatgtttgggagggcaccgaagaagagcgataatacgaggtactacgaaatcctcggcgtctccaagaacgcttcgcaggatgatctgaagaaggcttacaagaaagccgccattaagaatcaccccgacaagggcggtgatcccgagaagtttaaagagctggcgcaagcttatgaggttctgagtgaccctgagaagcgtgagatatatgatcagtatggtgaagatgcgcttaaggaaggaatgggtggtggccgtggccatgatccatttgatatcttttc

SEQ ID NO: 263150 - DNA, 340 bp, Glycine max
cgcttggcttcccatcaccgagtctcgcaatggaaatgctcactaaccttcattggacaaacttgaatctcggtgttgggtgggaggccctcttttttcccatttcttttgcttaattttggctggaattgggggaaatcttcctttaccctatcatatttgtagcaactttacaccgtatcgaattttggttaacttcaccaaacacctccaggtaaaagataccacagatattttgagctagcacaagcagcatttggggaaagattatgagtctggcttgctctcttcccaacttgtttatttgtcaacaggaactgcaacagctttgaatcttatt

SEQ ID NO: 263151 - DNA, 313 bp, Glycine max
  unsure (1)..(313): unsure at all n locations
ggccggccgacgcgtacncttgattatcccaacactttctcttacagtattcacatnatgcttaatcttgggctgagcggtgattatgatgctggtgaaacacattcttacatgcctcctcttgaggactcttatgcaaattctgatggtaccaagatggaataaattgattaaatctgacttaattgcctgttacttttttataaacaatgattgtataaacactctttttactnatgtttatgttttatgaattttccaaattttgaactttggctaattatgtgccgtaatttaatactttctttattgg

SEQ ID NO: 263152 - DNA, 128 bp, Glycine max
cggacgcgtgggggagtcttacatgtgtgccagtcaaccggcgaataaacccctaaagggcaaggaagcttattggtgggatccccctgtgggttggacccgccaccgacccttatcttttgtgaaag

SEQ ID NO: 263153 - DNA, 360 bp, Glycine max
  unsure (1)..(360): unsure at all n locations
cccacgcgnttcgccacccgtccggtgattgaagctagttagaacaagatgttgcagctactctacacttgcgatttcttccgaaatgctcttgattctcacgctcgtcttcaaacccccctgagagaactcgtcatcgcttccctcgatagtgtgaagcgcggtcgcggtcccgtggtggtttccaccgtgggcgccacattgatggtggttctcgcttcgagcctctacagcatggccaagatccagcaacgcaccctcgaggccggcatagtcaaccccaccgaccaagtcctcatgtccaagcacatgctcgaagcttctctcatggggtttctgctgttcctctctctgatgatt

SEQ ID NO: 263154 - DNA, 397 bp, Glycine max
cccacgcgtccgcccacgcgtccggtgattgaagctagttagaacaagatgttgcagctactctacactgcgattttctccgaaatgcttttgattctcacgctcgtcttcaaaaccccactgagaaaactcgtcatcgtttccctcgatagtgtgaagcgcggtcgcggtcccgtggtggtttccaccgtgggcgccacattgatggtggttctcgcttcgagcctctacagcatggccaagatccagcaacgcaccctcgaggccggcatagtcaaccccaccgaccaagtcctcatgtccaagcacatgctcgaagcttctctcatggggtttctgctgttcctctctctgatgattgatagattgcaccattacataagagagcttcggtcac

SEQ ID NO: 263155 - DNA, 334 bp, Glycine max
cccacgcgtccgcgttgatctgattggaattcaggatcaatggcaggggcagcctctgctctgttcctcctcgacatcaaaggccgcgtcctcatctggcgcgactaccgcggcgacgtcttcgccctcgacgccgaacgcttcttcaccaaactcatcgaaaaacaagccgatccgcaagctcaagatccggttgtgcacgacaacggcgtgacctacatgttcattcagcacagcaacgtctacctcatgatagccaccagacataactgcaatgccgccagcctcctcttttttctgcaccgcatcgtcgatgtgtttaagcactactttg

SEQ ID NO: 263156 - DNA, 376 bp, Glycine max
gcatgcgtccggccacgcatactgtgattgaagctagttagaacaaaataattcacctacggtgcgcggcaattttctgcgagatgctattgattctaacgctcgtcttcaaaaccccactgagaaaactcgtcatcggttccctcgatagtgtgaagcgcggacgcagtcccgaggtggattccaccgtgggcgccacattgatggtggttctcgcttccagcctctacagcatggccaagatccaacaactcaccctcgaggccggcattatctaccccaccgaccaagtcctcatgtttcagcacatgctcgaagcttcgctcaatggggttctgctgttcctctctctgatgattgatagaatgcaccatta

SEQ ID NO: 263157 - DNA, 394 bp, Glycine max
ccttgctaccaacactgagcttaaccgagcttcgcaaagatgaatcgggaaaagttaatgaagatggccggttcggttagaactggaggaaagggtactgtgagaagaaagaagaaggctgtccacaagacaacaaccacagatgacaaaaggcttcagagcaccctgaagagaataggggtgaatgccatccctgctattgaagaggtcaatatctttaaggatgacgtagttatccagtttctaaatcccaaagttcaagcatccattgctgctaatacttgggttgtcagtggttcaccgcatacaaagaagttgcaggatatactccctagcattatccaccaattaggaccagataactttgaaaacctgaagaagctagccgagcaat

SEQ ID NO: 263158 - DNA, 388 bp, Glycine max
  unsure (1)..(388): unsure at all n locations
cacacgtcctcccactcttccggtgatataagctagttataacaagatgttacanctactggacactgcgattttctgcgaagatgctttttattctcacactcatcttcaaaaccccactgagaaaactcttcatcgtttccctctatagtgttaatcgcggtcgcggtcccttggtggtttctaccgtgtgcgccacattgatggttgttctcgcttctagcctctacagcatgtccaatatccatcaactcacccctgatgccttcataattcaacctcaccttaccaattctctcatttttcaaactcatgcttgaagctttttttcattgtagtttcctgcatgtttcctctttcttgattattgatttatttgcaccctttc

SEQ ID NO: 263159 - DNA, 312 bp, Glycine max
  unsure (1)..(312): unsure at all n locations
cgaccacgcgttcccttgctaccaacactgancttattcgagcttcgcaaaaataaatcttnaaaacgtaatggagatagccgggtgggttagaactggatgaaagggtactgtgagaagaaagaagaaggctgtccacaagacaacaaccacagatgacaaaaggcttcagagcacccttgaaagaatatgggagaatgccatccctgctattgaagaggtcaatatctttaaggatgacatatttatccagtttctaaattccaaagtttaagcattcattgcttgtaatacttgggttgacaagtggtt

SEQ ID NO: 263160 - DNA, 415 bp, Glycine max
ggcggcgctgtggcggacgcgccggcggtggttgaggagaagacggagttcgacgtggtgatcgaggaggtgccgagcaacgctcgaatcgcggtgattaaggcggtgagggcattgacgaacctagcgctgaaggaggcgaaggagttgatcgaagggttgccgaagaagttcaaggaagggatttcaaaggacgaagctgaagatgcgaagaagcaactcgaagaagctggtgccaaggttaccattgcttaaacactgtttagctgcagcatatatgttctgcttcttcttttgttggctggagttgagttcaccagtacactgtaatttcatttccattttgtctggatttcaatcttttatttgtaatgaggaaatatgagctcctaattttagtataatttttttaatg

SEQ ID NO: 263161 - DNA, 312 bp, Glycine max
cccacgcgtccggtgatttcagtgagtgatcggtgttcacttgatctcatcataatcgtcagcgtcaattgaagaagatgccgatcagaaacatcgccgtcggaaggcctgaagaggcgactcaccccgacacgttgaaggcggctttggctgagttcatctcaaccttcatcttcgtgttcgccggctcaggctccggcatcgcctacaacaagctcaccgacaacggcgctgccacccctgccggcctcatctccgcctccatcgcccatgcattcgccctcttcgtcgccgtctccgtcggcgccaaca

SEQ ID NO: 263162 - DNA, 329 bp, Glycine max
cccacgcgtccggactgcccaagatgtatcgacaatgttacggtgcgggcaaaaaaccatcatctttctgatcaacaatggtggatacaccatcgaggttgaaattcatgatgggccgtacaatgtgattaagaactggaattacactgggttgattgatgcaatccacaatggtgaagggaaatgctggactgccaaggtgttctgtgaagaggagctagttgaagcaattgccacagccacaggacccaagaaagactccttatgcttcattgaggtgattgttcataaggatgacaccagtaaagaattgcttgaatggggctcaa

SEQ ID NO: 263163 - DNA, 279 bp, Glycine max
agaaaatgagaatctccagattcttgatgttcggacttttgaacacacagaagtttgcaggagtgaatttatgacaccatctgcatttatttttctatatgagaaccaattgttcctgacatttcgaaatcgaactgtggctgtgtggaactttcgtggagagctggtaacttcttttgaggatcacctcttgtggcattctgactgccacaccaaccatatatatattacccgggaccaggatcttatcatatcctactggaaagctgattctgatga

SEQ ID NO: 263164 - DNA, 407 bp, Glycine max
atggctcccaaaccgcctagtacgggtctgtttgttggactgaacaagggtcacgtcgtcaccaagaaggaattgcctccacgcccctcagatcgtaaggggaaaacaagcaagagggtgcactttgtgaggaacctcataagagaggtagccggttttgcaccctatgaaaagcgtataactgagttgctgaaggttgggaaggataagagggcactgaaggttgcaaagagaaagctcggaacacacaaacgcgcaaagaagaagcgtgaggaaatgtccagtgttctcaggaagatgaaggctggtggtgctggagacaagaagaaataagtcttatttactgttttccaagatcactagatggacctgtgtattgatggacgagctttcatatttttgctttg

SEQ ID NO: 263165 - DNA, 420 bp, Glycine max
  unsure (1)..(420): unsure at all n locations
ggcggcgctgtggcggacgcgccggcggtggttgaggagaagacggagttcgacgtggtgatcgaggaggtgccgagcaacgctcgaatcgcggtgattaaggcggtgagggcattgacgaacctagcgctgaaggaggcgaaggagttgatcgaagggttgccgaagaagttcaaggaagggatttcaaaggacgaagctgaagatgcgaagaagcaactcgaagaagctggtgccaaggttaccattgcttaaacactgtttagctgcagcatatatgttctgcttcttcttttggtggttggagttgagttcaccagtacactgtaatttcatttccattttgtctggatttcaatcttttatttgtaatgaggaaatatgagnnnctatttttatattaatttttttaatgcgtat

SEQ ID NO: 263166 - DNA, 379 bp, Glycine max
  unsure (1)..(379): unsure at all n locations
tgtaagttacatgatgtgaagttgcaaatgctttggagatcaccaacttcaaaatgcagctactgctacttgtgtggcacttgttcttcgcaatttaggatggagtatttctgataaatctattangtatggtttagaggatacataccttcttggaaggagtcaatttctaacatctgaagaagctgaggtattaggacttactggatcaacagtactgcttgatggagcccacaccaaagaatctgccaaagctctgatgaataccataaggatggcatttcccaaggctcaattggtttttgttgttgcaatggcaagtgacaaagatcatgtgggatttgctcgagagattctctcangtgtacatgtggagact

SEQ ID NO: 263167 - DNA, 336 bp, Glycine max
cccacgcgtccgattttaactgtgtgtgtgtgacaaacgtgaaaagtacttttttttatgattttaactcaactttgctatttataatctactatgcagctgagaagctaaacttgccatacttaagtgcttatctgaattcccttggaaccaattaccggcatggggcaaattttgccactgggggatccaccattaggaagcagaatgaaaccatatttcaatatggaataagtcctttctctcttgacattcagattgtgcaatttaaccagtttaaagcacgcaccaaacaactctatgaagaagccaaggccccacatgaaaagagcaagc

SEQ ID NO: 263168 - DNA, 370 bp, Glycine max
cttctccttctcaatcttgtaattctatttcctccaccataatgctgcgcaagcttgtgtcagggccacgcaagaacaagcctggcacagttcccgttcacctcaacgtctatgatctcaccccaatcaacggctatgcctattggcttggccttggagtctaccattctggggttcaagttcatggattggaatatggttttggtgcgcacgagcacgacacaacggggattttcgaagtccaacccaaacactgccctgggttcactttcagaaagtcaattttcatcggaacaacagatctgggtccgaaagatgttcgagcattcatggagaagctggctcaggattactccggcaacacctatca

SEQ ID NO: 263169 - DNA, 431 bp, Glycine max
  unsure (1)..(431): unsure at all n locations
ccggnccggaattcccgggtcgaccgacgcgtccgcccacgcgtccgattttaactgtgtgtgtgtgacaaacgtgaaaagtactttttgttatgagtgtaactcaactttgctatttataatctactatgcagctgagaagctaaacttgccatacttaagtgcttatctgaattcccttggaaccaattaccggcatggggcaaattttgccactgggggatccaccattaggaagcagaatgaaaccatatttcaatatggaataagtcctttctctcttgacattcagattgtgcaatttaaccagtttaaagcacgcaccaaacaactctatgaagaagccaaggccccacatgaaaagagcaagcttccagtgcctgaggagttctctaaggctctctacacatttgacattggtcaaaatgatc

SEQ ID NO: 263170 - DNA, 354 bp, Glycine max
ctctctgctcctagggtttctccttcgagtgagggaaatggctcccaaaccgcctagtacgggtctgtttgttggactgaacaagggtcacgtcgtcaccaagaaggaattgcccccacgcccctcagatcgtaaggggaaaacaagcaagagggtgcactttgtgaggaacctcataagagaggttgctggttttgcaccctatgaaaagcgtataactgagttgctgaaggttgggaaggataagagggcactgaaggttgcaaagagaaagcttggaacccacaaacgtgcaaagaagaagcgtgaggaaatgtccagtgttctcaggaagatgagggctggtggtgctgg

SEQ ID NO: 263171 - DNA, 211 bp, Glycine max
cgggtcgacccacgcgctcgatggctcccaaaccgcctaatacgggtctgcttgctggaccgaacaacggtcacggttttggctagaaggaattggcttcacaccccttacatcgtatggggaaaacaagcactagggagcactttgcgaggaaccacataagagaggttgccggcattgcaccctatgaaaagcgtataactgagtttgc

SEQ ID NO: 263172 - DNA, 296 bp, Glycine max; identical to SEQ ID NO: 263119

SEQ ID NO: 263173 - DNA, 383 bp, Glycine max
  unsure (1)..(383): unsure at all n locations
gcgtccngaggagatatatttacctaaactaagagatcttgaaagagaatccaaacatgtgggcttacgtggcaccttctttggatgctaagcaaaacattgtggtggtatatgtaccaaaactagggaaaaaagcttcatatatagccataaaagaattgggccagccaaaatcaaaaaatacccactttatccttttcaccaccaacggtgtttacattccttgtgcttattaccaacttaccaaacaaattgggctttttccctatttttaaaagtattttaatttcccaccaagtttctttttaagtggaccggtttttttttgcccaaaatttttttttaacaacaaaggggccccctttcctttttttttgttttta

SEQ ID NO: 263174 - DNA, 319 bp, Glycine max
atggctcccaaaccgcctagtacgggtctgtttgttggactgaacaagggtcacgtcgtcaccaagaaggaattgcctccacgcccctcagatcgtaaggggaaaacaagcaagagggtgcactttgtgaggaacctcataagagaggtagccggttttgcaccctatgaaaagcgtataactgagttgctgaaggttgggaaggataagaaggcactgaaggttgcaaagagaaagctcggaacacacaaacgcgcaaagaagaagcgtgaggaaatgtccagtgttctcaagaagatgagggctggtggtgctggag

SEQ ID NO: 263175 - DNA, 358 bp, Glycine max
gaggagatatatgtacctaaacgaagagatcttgaaagagaatccaaacatgtgtgcttacatggcaccttctttggatgctaggcaagacatggtggtggtagaggtaccaaagctagggaaagaggctgcagtaaaggccataaaggagtggggccagccaaagtcaaagattacccacttgatcttctgcaccaccagtggtgttgacatgcctggtgctgattaccaactgaccaaacaattgggccttcgcccctatgtgaagaggtatatgatgtaccaacaaggttgctttgcaggtggcacggttcttcgtttggccaaggatttggctgagaacaacaagggtgcacgt

SEQ ID NO: 263176 - DNA, 432 bp, Glycine max
cagagtttgagtggacctgtctcagctaccctttaccttggttattcactactcatggccattgcaatcatgttgtcaaccggcaccattggcttccttatgtcattctactttgtgcactacttgttctcatcagtaaagatagattgaggttcttgttgtcattgcatattaactatgaaaaaggttgattgatataacttgatcacattgcatagtagggcaacggatgtttaattcattgtctgattttatattgcgatgggatctgcagtttgttctccttctgcctgtttcccaaagtagtgtactcattcaagtattcaactagtgtttgagatcatgtttcaagtattttgttcaagtttctttagaaggttgtaattcaaactctcatctcatttcaatactttaagaaaatgatgttagatt

SEQ ID NO: 263177 - DNA, 358 bp, Glycine max
  unsure (1)..(358): unsure at all n locations
ccgggncgacccacgcgtgcgcccacgcgtccggtgaagctggatcattcctccgcggaatcgatgtgaaccgtttaccttctgtggttgattgcgaagaggaagcaggtgtttcatctccaaacagcacggtttctagcgtcagtggaaagcgcagcgagagggaaaccaatggagaagaaaacgacacagacagagcttgttccagaggcatcatcagcgacgaagaagatgctgaaacctctagaaagaaacttagactctccaaagatcagtcaattgtcctggaagagagcttcaaagaacacaacactcttaaccccgtaggtaaacgtacacatgcccaataatttttttt

SEQ ID NO: 263178 - DNA, 373 bp, Glycine max
cagagtttgagtggacctgtctcaactaccctttaccttggctattcactactcatggccagggcaatcatgttgtcaaccggcaccattggcttccttatgtcattctactttgtgcactacttgttctcatcagtaaagatagattgaggttcttgttgtcattgcatattaactatgaaaaaggatgattgatataacttgatcacattgcatagtagggcaaccgatgtttaattcattgcctgattttatattgcgatgggatctgcacgttgttctccttctgcctgattcccaaagtatcgtactcattcaagtattcaactagtgtttgagatcatgttccatgtattttggtcaagtttcttta

SEQ ID NO: 263179 - DNA, 446 bp, Glycine max
  unsure (1)..(446): unsure at all n locations
gcgtccgcanagnttgagtggacctgnctcatctactctttaccttggttattcactactcatggccagtgcaatcatgttggcaaccggcaccattggcttccttatgtcattctactttgtgcactacttgttctcatcagtaaagatagattgaggttcttgttgtcattgcatattaactatgaaaaaggttgattgatataacttgatcacattgcatagtagggcaacggatgtttaattcattgtctgattttatatttgctatgggatcttcaattttgtctccttctgccttttttccaaaataatgtacttcattcaagattttaacctatggttgatatcatgtttcaagaattattggtcaaggttctttaaaaatgttttaatcaaaacctcatctcatttcatatcctttataaaaaatgattttttataat

SEQ ID NO: 263180 - DNA, 321 bp, Glycine max
aaatgggtcgtctagaccgattagggaagactgtgatgcaaatgcttcgggacaggggttttctggtgggtgacttcgagatcaacatgtcgaagcatgagttcaagtccaagtacggcgagcacatgaagcgcgaagacctggtcatcaacaagtccaagaaggacaactccggcgaccagatctacctcttcttccccgacgagcccaaggtcggcgtcaagaccatgaagacctacaccaaccgcatgaactccgaaaacgtctatagagccatcctcgtcacccaaaccaacctcacccccttcgcccccacctgca

SEQ ID NO: 263181 - DNA, 366 bp, Glycine max
  unsure (1)..(366): unsure at all n locations
cccacgcgtccgtcaagcattgcatccctcttgatttgtagtttgttttgtgctttaaatgaaagttctgccaaatcaagaggggttttaagatcatagtgtgtgttttgcaacaatggctaagttctttgctgctatgatcttggcactctttgccatttccatacttcaaacagtggtaatggctgctaatgaacaaggaggccacttgtatgacaacaagagcaaatatggaagtggaagtgtcaagagttaccaatgcccatcacaatgctcgaggagatgtatccagacccaataccacaagccctgcatgtttttctgtcagaagtgctgcangacatgcctgtgtgtgcccccggggta

SEQ ID NO: 263182 - DNA, 431 bp, Glycine max
cccacgcgtccgggaagatggtgctttcggaggaggaaatgggtcgtctgtaccgaataaggaagacggtgatgcaaatgcttcgggacaggggttttctggtgggtgacttcgagatcaacatgtcgaagcatgagttcaagtccaagtacggcgagcacatgaagcgcgaggacctggtcatcaacaagtccaagaaggacaactccggcgaccagatctacgtcttcttccccgacgagcccaaggtcggcgtcaagaccatgaagacctacaccaaccgcatgaactccgaaaacgtctatagagccatcctcgtcacccagaccaacctcacccccttcgcccgcacctgcatcagcgaaatctccttcaaattccacctcgaggtctttcaggaggccgaacttctcgtaacattaaagagcatg

SEQ ID NO: 263183 - DNA, 429 bp, Glycine max
gttgccgggctctaccgtggtttcaacatctcatgtgttggaatcatcgggtatcgtggggtgtactttggattgtatgattctgttaaaccagttgtcctcacagggtcattgcaggatagcttttttgccagctttgcccttggatggctcatcaccaatggtgcaggtcttgcatcatacccaatagacactgttagaagaagaatgatgatgacctctggtgaagctgtcaagtacaagagctccttggatgcattcacacagatcctcaagaatgagggtgccaagtccttgttcaagggtgccggtgccaacatcctccgtgccgttgccggtgctggtgtgcttgctggttatgacaagttgcaggttcttgtgttcggcaagaagtacggctctggtggggcttaagttctaatgctgagt

SEQ ID NO: 263184 - DNA, 263 bp, Glycine max
gaatgataaggtatatgaacaatccttaacagatacttctacaagatgttctatgttttcggagaaaaaaattcgctcaaaaaaaacgcgaaaatattttaatcgtaacttagaggatttgttacgtagaaaaagaaagatagattcatattcccatacatataaattatataggaacaaaaaaaatcttggattactttttgaaaaaaaagtagaaatccatttttttggagtaaaaatactattccaattataataataag

SEQ ID NO: 263185 - DNA, 447 bp, Glycine max
cgcaaattcaaaggaggatctctcttgcgttttctctaggttttcgctatggcgtggaagcgaattttgaaggagcttaaggatttgcagaaggatcctccaacatcttgcagtgccggtcctgttgttgctgaagatatgttccattggcaagctacaattatgggtcctccagacagtccctatgcaggaggtgttttcctagtgaccattcatttccctccagattatccctttaagccacccaaggttgcattcaggacaaaggttttccacccaaatataaatagcaatggaagcatttgccttgatatattgaaggagcagtggagccctgctctaaccatttccaaggtgttgctctcaatttgttccctattgacggatccaaatcctgatgatcctttggtccctgaaattgcacacatgtacaagacagataggaac

SEQ ID NO: 263186 - DNA, 349 bp, Glycine max
tcagattcataatattatctctttttcgttttctctacgttttcactatttctgctaatcgtaaaattaaaaaactcaatggcctacacaattatcctccaacatcttacattacctttcctattttttcttaaaatatattccatttacaatctacaaatatatcttttccatacataccctattcaaaataatttcattctaattaccattcattatccttcacattattcctttaatccacccaatatttcattcaacacaatattttttcacccatatatatatatcaattttatcattttcctttatatatttaactatcaattctatcctctctataaccatt

SEQ ID NO: 263187 - DNA, 372 bp, Glycine max
ggcaaagatggggatgtggctctcttctttggactctcaggtaccggaaggaccactctggcgaccgatcacaataggtatctaatcggagatgatgaacactgttggggtgacaatggtgtctccaacattgaaggtggttgctatgccaaatgcattgacctctcacgggagaaagagccagatatttggaatgcaatcaggtttggcacagtgttggaaaacgtggtgtttgatgagcacgaccgataagttgattactctgacaaaataattacagaaaatactcttgctgcttatcctatagagtacattccaaatgcaaagttaccttgctttggccctcattcaaagaatgtcatacttttggca

SEQ ID NO: 263188 - DNA, 433 bp, Glycine max
caagtggcgagtgaggaatgcagagaaatgagaattcgtcattggctgaggccttctgaggcaggtggccctgccaaacgcagaagctccggcagaaattgccaccgcaaacacgtcgaagacgggtagtaatagcactcgctttcattctcccacattcccaattctgagcgttaagatgagtgagaaagagaaaggcaataatagtgagggacagtcgacgttgctgcacggcaagtacgagcttggtcgtgtgctggggcacggaacgttcgccaaggtgtaccacgcgcggaacctgaatacagggcagcacgtggccatgaaggtggtgggaaaagaaaaggtgataaaggtcggaatgatggatcaggtgaagagggagatctcggtgatgaagatggtgaagcaccaaaacatcgtctaactccac

SEQ ID NO: 263189 - DNA, 361 bp, Glycine max
cgggccgacgcacgcgtccgtctgcctctaaaccctaaacaactctggcttttcttccttcgctcgttgtgctccctcaggtagatctacaatggcggagacagagacgtttgctttccaggctgagatcaaccagctcctcagtctcatcatcaacaccttctactccaacaaggagattttccttcgtgaactcatcagcaacgccttcgatgctttggacaagattcgatttgagagtttgacagataagagcaagctcgatgctcagccagagttgttcattcatattattccaaacaagactaacaatacactgaccattgttgacagtggtattggcatgacccaaactgatttg

SEQ ID NO: 263190 - DNA, 392 bp, Glycine max
  unsure (1)..(392): unsure at all n locations
gcaaacatgtccaccgcaacaactcacgtgctcgcttatcccttccctacctccggtcacgtgatccctctcttagacttcaccaaaaccctagtctctcgcggcgtccatgtcaccgttctggtcacaccctacaacgaagccttacttccaaaaaactattcccctcttctccaaacgcttctcctccccgaacctcagttcccgaacccgaagcaaaacaggctcgtatccatggtaaccttcatgcggcaccaccactacccgatcattatggactgggcccaggcccagcccattcctcctgcggctattatatcagatttcttcctcggttggacccacctcctcgcacgtgacctncacgtgccgcgcgtagtcttctccccttc

SEQ ID NO: 263191 - DNA, 393 bp, Glycine max
cccacgcgtccggactgcccaagatgtatcgacaatgttacggtgcgggcaaaagaccatgagtctttctgatcaacaatggtggatacaccatcgaggttgaaattcatgatgggccgtacaatgtgattaagaactggaattacactgggttgattgatgcaatccacaatggtgaagggaaatgctggactgccaaggtgttctgtgaagaggagctagttgaagcaattgccacagccacaggacccaagaaagactccttatgcttcattgaggtgattgttcataaggatgacaccagtaaagaattgcttgaatggggctcaagggtttctgctgccaatagccgtccttccaatcctcagtaatcttcagaaattatcctatgac

SEQ ID NO: 263192 - DNA, 451 bp, Glycine max
aattaccgggccgaccgacgcgtacgcccaggcgttcggactgaccaatttttatcttcaatgttacggtgcgtacaaaagaccatcgtctttctgatcaacaatggtggatacaccatctatgttgaaattcatgatgggccgtacaatgtgattaagaactggaattacactgggttgattgatgcaatccacaatggtgaagggaaatgctggactgccaaggtgttctgtgaagaggagctagttgaagcaattgccacatccacaggacccaagaaagactccttatgcttcattgaggtgattgttcataatgatgacaccagtaaagaattgcttgaatggggctcaagggtttctgctgccaatagccgtccttccaatcctcagtaatcttcataatttatcctatgactaaattgctgcagttgccctttatctctatgaa

SEQ ID NO: 263193 - DNA, 399 bp, Glycine max
cccaggcttcccactcactctaaaccctaatttactctttctcttcttccttcactctatgggctcccttgggtagatctacaatcgctcatacagacacatttgctttccacgctgatatcaaccatctcctcattctcatcatcaacaccttctactccaacaaggacattttccttcgtgaactcatcagcaacgcctcctattcttttgacaatattctatttgatagtttgacagataacatcaagctcaatgctcatccatagttgttcattcatattattccagacaagactaacaatacactgaccattgttgacagtggtattgtcatgaccaaaactgatttggtgaacaacttgtgtacaattgctatatcttgtaccaatgaattca

SEQ ID NO: 263194 - DNA, 320 bp, Glycine max
caacttcttctaaattgggggaatatgagttattaaaaggttcacatgactattgtagtcattggccatgtccactcttggaaatccactaccactggtcacctgatttacaagcttggatgcattgacaagcctgttattgaaaagtttgagaaggaagcttctgaaatgaacaagaagtctttcaagtattcctgggtgcttgacaaacttaaggcttaacgtgaaagacgaatcaccattgatattgctttgtggaaatttgaaacaacaaaatattattgcacatttattgatgcccctggacataaggatttcat

SEQ ID NO: 263195 - DNA, 428 bp, Glycine max
cacctttgttcactcttcttctcttgcggctagggttttagcgcagcttcttctagattgaaggaagatgggtaaggaaaaggttcacatcagtattgtggtcattggccatgtcgactctgggaaatccactaccactggtcacctgatttacaagcttggaggcattgacaagcgtgttattgagaggtttgagaaggaagctgctgagatgaacaagaggtctttcaagtatgcctgggtgctggacaaacttaaggctgagcgtgaaagaggaatcaccattgatattgctttgtggaagtttgaaacaacaaagtattattgcacagttattgatgcgcctggacatagggatttcattaagaatatgattactgggacatcccaagctgactgtgctgttcttatcattgattcgaccactg

SEQ ID NO: 263196 - DNA, 445 bp, Glycine max
  unsure (1)..(445): unsure at all n locations
ctttctccgagaacaaaaaataaaacgtgattcgctcttctcttcgaataggccacaaagcgaacaaacgagaagaggagtgagagaagatggggttgtcgttcacgaagctgttcagcaggttgtttgcgaagaaggaaatgaggattctgatggtaggtctcgatgctgctggtaagacaaccatcttgtacaagctcaagcttggagaaatcgtcaccaccatccccaccatcggatttaatgttgagactgtggagtacaagaacatcagcttcactgtgtgggatgttggtggtcaggacaagatccgtcctctgtggaggcattatttccagaacactcagggtctcatttttgtggttgatagcaatgatagggatcgagtggttgaggcaagggatgagtngcacaggatgttgaatgaggatgaacttagagatgc

SEQ ID NO: 263197 - DNA, 381 bp, Glycine max
ctactattggagaatcaaaacgattttacccactgttcggactcggggccaatggggcccttatgttctctttccagacagtcaaatacttttctaatctgaagcagaatttaagtcctggagttgatggttgggccatctctctgaaaacaatgatgagcataattgtgggtatggggtttgcaatctgtttcctgtacttgtgggtgaacaattatgttcctcttcctactcgtaacaagaagaagaatgagaagcccaaaatgggaacaatggatagcttgaagttcttggtgtcttcaaagtacatcagagatcttgccactttaatggttgcttatggaatcagcatcaatcttgtttaagttacctggaaatcta

SEQ ID NO: 263198 - DNA, 386 bp, Glycine max
gataactactattgaagaagcaaaacgattctacccactgttcggactcggggccaatgtggcccttatgttctctggccggacagtcaaatacttttctaatctgaggcagaatttaggtcctggagttgatggttgggccatctctctgaaagcaatgatgagcatagttgtgggtatggggtttgcaatctgtttcctgtactggtgggtgaacaattatgttcctcttcctactcgtagcaagaagaagaaggagaagcccaaaatgggaacaatggagagcttgaagttcttggtgtcttcaaagtacatcagagatcttgccactttagtggttgcttatggaatcagcatcaatctttgtgaggttacctggaagtcta

SEQ ID NO: 263199 - DNA, 433 bp, Glycine max
cccacgcgtccggcgaaaacccccaactccaacctctgttcatcgtctaccgcgctttctggttaaccagaactatgattaagctttttaaagtaaaggaaaagcagagagaacttgcagaaaatgcaagtggcggaccacctgttaagaagcaaagtgctggagagttgcgtcttcacaaagatataagtgagctgaatctaccaaaatcatgtaccatgcaattccccaatggcaaagatgatctgatgaactttgaagtttcaattcgacctgatgatggatattacttaggtggcacatttttgttttcctttcaagtgtctcccatctatccacacgaagcaccaaaggttaagtgtaagacaaaggtctatcatccaaatattgacttggaaggaaatgtttgtctcaacatcttacgagaagattg

SEQ ID NO: 263200 - DNA, 406 bp, Glycine max
aacgattttacccacttttcccactcaaccccaatgtagcccttatgaactctttccagacattcaaatacttttctaatccgaagcagaatttacgtcctcaaattcataatcagcccatctctctgaaaccactgatgatcataattatgcgtatgtccaataccatctgctttctctactggtccatcaacaattatctacctcttactactcgcaacaagaagaataacgacaaacccaaaatcctaacaatgcagaactttaaattcttggaatcttcaaagtacattagatatcttgccactttactagttgcttatggaatcagcatcaatctttttgacgttacctttaagtctaagctcaaatctcaatttcctaaacccaacaaatactcttcttt

SEQ ID NO: 263201 - DNA, 379 bp, Glycine max
tctgtgtcattattatgtgcagtcacacattcaaattaatgaatatcgtgagcgtataatcgggccttctgcatcaaagaagcaggggcgacctattaccacttgtataaaggttttagacatgactggtctgaagttatcagccctgaatcagattaagttgctaactattatatcatccattgatgatctgaactaccctgagaagacaaatacttattacattgtaaatgctccatacatattttctgcttgttggaaggttgtgaagccacttttacaagagaggacaagaagaaaaatacaggtgttaccaggttgtggacgagatgagctattgactatcatggattactcgtctctaccacatttctgtcga

SEQ ID NO: 263202 - DNA, 419 bp, Glycine max
  unsure (1)..(419): unsure at all n locations
ttttgactctcangtaccgaaaggaccattttgaaaacctatcagactatntatctaatccgagatgatgaacactgttggggtgacaatggtgtctccaacattgaatgttgttgctatgccaaatgcatttacctctcacgggagaaagaaccagatatttggaatgcaatcaagtttgtcacaatgttttaaaacctggtgtttgattagcactacctaaaaatttattactcttacaaatcaattacagaaaatactcgtgctgcttatcctatagagtacattccaaattcaaaattaccttgccttggccctcatccaaagaatgtcatacttttgtcatgtgactcatttttagtacttccacccgttatccatcttaacctttcacataccatttaccatatcatttattg

SEQ ID NO: 263203 - DNA, 455 bp, Glycine max
ggcaaagatggggatgtggcactcttctttggactctcaggtaccggagagaccactctgtcgaccgatcacaataggtatctaatcggagatgatgaacactgttggggtgacaatggtgtctccaacattgaaggtggttgctatgccaaatgcattgacctctcacgggagaaagagccagatatttggaatgcaatcaggtttggcacagtgttggaaaacgtggtgtttgatgagcacgaccgagaagttgattactctgacaaatcagttacagaaaatactcgtgctgcttatcctatagagtacattccaaatgcaaagttaccttgcgttggccctcatccaaagaatgtcatacttttggcatgtgacgcatttggggtactcccacccgttagcaagctaaacctggcacagaccatgtaccatttcattagtggatatactgg

SEQ ID NO: 263204 - DNA, 455 bp, Glycine max
  unsure (1)..(455): unsure at all n locations
cccgtatctttctctcttctctctccccgcccaaaccctaactccctaccctattccgcgttctctcatccatcatgaaaggaggaaagtccaagaccgaatctaagagagccgatgccaaacttgctgtgaataagaagggcgccgccaccaagactaggaaacccgccggaaaggggaaggcagcgaaagatcctaacaagccaaagaggcctccaagtgctttcttcgttttcatgtaattataatatattgttatctctacgattcatttgacttccgatgcgctctcttatctttcctccgaataattttatcgtcaaaacttttatccttgtccaattgtaagtccacgcgttctttacctgttgttgtttggttacctcgattgctttattggtaaaattatgtnttttgagtatgctagatctagcttatgcttcgtgaaacttgat

SEQ ID NO: 263205 - DNA, 428 bp, Glycine max
cccacgcgtccgagaaggcctgggcttagttgataagcataactgggtgaggaagaaagagagagagtgaagaagatggcgtcgagcggagcggtaccgttttggagggcggcggggatgacgtacataacatactcaaacatatgcgcgaatctgctcaagaattgcctcaaggaaccctacaaggccgaatccctctctcgtgagaagctccattttgttctctccaaatgggtcgacgccaagcctgaaaaacctactattcgttcagacaccccagagcagtgatctggaatagttggaagctattaatgcataaatctttgagatctggaagttcattgtcattttgaacctttctgtgatgtttaattcctttgtttttttctctccatgaaatggaacatgcactggattttgatttgcac

SEQ ID NO: 263206 - DNA, 366 bp, Glycine max
ctctgctgcgtttgcttctcctccacccattcacaaacgaacacacactgtgattgagaatggggcgtgttcgcacaaagacagtgaagaagtcctcgcggcaagtgatcgagaggtactactctcgcatgacgctggacttccacacgaacaagaaggttctggaagaggtggccatcattccctccaagaggctccgcaacaagatcgcgggattctccacccacctcatgaagcggatccagaagggtcccgtacgtggaatctccctcaagctgcaagaggaagagcgcgagcgccgcatggacttcgtccccgatgtcttcggcatcagaaccgaccagatcgaggtcgacaaggagacgc

SEQ ID NO: 263207 - DNA, 458 bp, Glycine max
cccacgcgtccgtcaagcattgcatccctcttgatttgtagtttgttttgtgcttgagataagaagttctgccaaatcaagaggggttttaagatcatagtgtgtgttttgcaacaatggctaagttctttgctgctatgatcttggcactctttgccatttccatacttcaaacagtggtaatggctgctaatgaacaaggaggccacttgtatgacaacaagagcaaatatggaagtggaagtgtcaagagttaccaatgcccatcacaatgctcgaggagatgtagccagacccaataccacaagccctgcatgtttttctgtcagaagtgctgcaggacatgcctgtgtgtgcccccggggtattatggtaataaagctgtgtgcccttgctacaacaactggaagaccaaggaaggaggacccaagtgcccttgagcttcaacttgttcaact

SEQ ID NO: 263208 - DNA, 429 bp, Glycine max
  unsure (1)..(429): unsure at all n locations
cccacgcgtccgcccacgcgtccgtccacgcgtccgcccacgcgtccgtctccgtctttctcgtcactagctctgtgcattcttctctcgctctctgccttccatcacactcggcatttcctttcccaagatagtagaagatggcagacactgaggatattcaacctcttgtttgtgacaatggaacaggaatggttaaggctggatttgctggagatgatgccccacgtgctgtgtttcccagcattgtaggtcgtcctcgtcacactggtgtgatggttggcatgggccaaaaagatgcatatgttggtgatgaggcacaatctaagaggggtattttgactctcaagtaccccattgaacatggaattgtgagcaattgngatgatatggaaaagatttggcatcataccttctataatgagcttc

SEQ ID NO: 263209 - DNA, 456 bp, Glycine max
gttgaattcttatgcaaagatttctgtccatcttctctggatgatattgccgagatgagttggccactatgtcaagaatcagctcccacttctcactccatgagattcactagaagtttgagtgggctttcggtcaggaggtctttagttggttcatttgaggagtctcttttatctggccggttcttatctggaaacaatagcaagaaaatcgatggttttcttgctgtgctaagcattactggtgggaacttttctcctaaatctcagaagcttccattctctgttactagcgtggatggagattgctatctactgtattatgcatcaatagatcttgctggaaattcctcttcaaacaagttaagaggccaattgctgaaacgagggtttggaaaagatgattcccaaattgtaaaaagccgtctgcgtataccaatgaagggacggattcaa

SEQ ID NO: 263210 - DNA, 393 bp, Glycine max
ccggccgacccacgcgtgcgctgagctcttatgcacagattttgtccatttctctggagatattgccgaggtgagttgtccactatgtcaagaatcaggtcccacttctcactccatgagattcactagaagtttgagtgggctttcggtcaggaggtctttagttggttcatttgaggagtctcttttatctggccggttcttatctggaaacaatagcaagaaaatcgatggttttcttgctgtgctaagcattactggtgggaacttttctcctaaatctcagaagcttccattctctgttactagcgtggatggagattgctatctactgtattatgcatcaatagatcttgctggaaattcctcttcaaacaagttaaaaggccaatt

SEQ ID NO: 263211 - DNA, 377 bp, Glycine max
gacccacgcgtacgcccacgcgtccgcccacgcgtccggtgattgaagctagttagaacaagatgtggcagctacgctacactgcgattttctccgaaatgcttttgattctcacgctcgtcttcaaaaccccactgagaaaactcgtcatcgattccctcgatagtgtgaagcgcggtcgcggtcccgtggaggtttccaccgtgggcgccacattgatggtggatctcgcttcgagcctatacagcatggccaagatccagcaacgcaccctcgaggccggcatagtcaaccgcaccgaccaagtcctcatgtgcaagcacatgctcgaagcttctctcatggggtttctgctggcactctctctgatgattgat

SEQ ID NO: 263212 - DNA, 365 bp, Glycine max
cccacgcgtccggacagaagagagcgtcctagtcgcaaccctaataagaagaaccacagctgcaagcgagtgacatccaccagccatgggtcgtatgcacagccgcggtaagggtatatcctcttctgctttgccctacaaaaggacaccccctagctggctcaagatctcttcgcaagatgtggaagaaaatatctgcaagtttgcgaagaagggtttgaccccgtctcagattggtgtcattcttcgagattctcacggtattgctcaggtcaacagcgtcactggcagcaaaatccttcgcatcctcaaagctcacgggcttgcgcctgaaattccagaggatctttaccatttgattaaga

SEQ ID NO: 263213 - DNA, 457 bp, Glycine max
tttgaatacattccttgtagtttatactgaaagatgggtttgaagatggcgttactgatccgaggcctttccctcatgctccttttggtctcctctgaggtggcatccacgaatacaaaagaggaggcaaatggagtggatgatgccaaatatcccggtggaagctatggagggggttacccaggtcatggcggtggcggttatcctggccatggcggtggcggttatcctggccatggcggtggtggtggctatcctggtcatggtggtggccaccctggtcatggtggcggctaccctggccgtggtggtggatactgtaggcatggctgttgcggtggccggacatacaacggaggttgcagaaggtgctgctataacgctggcgaagctgttgctgcacaaactcaagataagactcacgattaagacgatgcagttctactttaatagtact

SEQ ID NO: 263214 - DNA, 455 bp, Glycine max
cccacgcgtccgcccacgcgtccggtgattgaagctagttagaacaagatgttgcagctactctacactgcgattttctccgaaatgcttttgattctcacgctcgtcttcaaaaccccactgagaaaactcgtcatcgtttccctcgatagtgtgaagcgcggtcgcggtcccgtggtggtttccaccgtgggcgccacattgatggtggttctcgcttcgagcctctacagcatggccaagatccagcaacgcaccctcgaggccggcatagtcaaccccaccgaccaagtcctcatgtccaagcacatgctcgaagcttctctcatggggtttctgctgatcctctctctgatgattgatagattgcaccattacataagagagcttcggtcactcaggaagaccatggaagctattaagaaacaaagccgaagttttgaagatggtaaaat

SEQ ID NO: 263215 - DNA, 471 bp, Glycine max
attgctgctgtttgcctattggtgtactttggggtctctaccctgctggatgcctcatctagcgatggccaaaaatcagatgaagagcacaaggaggcagaactagcagtttctgaattttctggaaatggtgctgggatactatctgctgctagcacagttgccagtacttttctcttagtttttgttgctgaatggggcgacaagtcatttttctccacaattgcccttgcagcagcttcttctccccttggagtcatagctggagcactggctggtcatggtgttgcaactttgctagctgtacttgggggttctttacttgggacgtatttgtcagaaaaggttattgcctacatcggaggtgttctctttctcgtctttgccgcaataaccttatttgaaattgtgcaatatgggttaaaagaaatgcaatataatctccctgcaaagggttcaagaacgtgatga

SEQ ID NO: 263216 - DNA, 453 bp, Glycine max
cgccatgctgttcttggagctacaaactctcgtcctgatttgatattgactggacaccaagagtaatgcagaatttgctcttgcaatgtgcccaactgaaccctatgttctttcaggaggaaaggacaaaacagtggtgttgtggagtattgaagaccatataacatctgctgccacagactccaaatctggtgggtcaattatcaaacaaaactctaaatctggagaaggcaatgataaaactgctgatggccctactgctggaccacgaggcatttattgtgggcatgaggatacagttgaagatgtgactttctgcccatctagtgcacacgagttctgtagtgttggagatgattcttgtctcatcttatgggatgcacgtgttggctctagccctgtggataacgttgagaaagctcataatgctgatcttcactgtgtggactggaa

SEQ ID NO: 263217 - DNA, 446 bp, Glycine max
gaaatgtgaaagccttatcatacagtgtttgcaagatgccaaggtagaagttgaagaagtggatgatgtgataattgtaggcggatgttcttacatcccgagggtgaaaaatcttgttactaacgtatgtaaaggcaaggaactttataaaggcatgaatcctttagaagctgctgtttgcggtgcagcagtggaaggagctattgcttcaggcgtcaatgatccctttgggaacttggacttgttaactatccaagctacacctcttgccattgggattcgagctgatgggaacaagtttgtccctgtaattccgagggatactacaatgccagcacggaaggagctagttttcacaactactcatgacaatcaaactgaggcgttgatccttgtctatgaaggagagggtgaaaaggcagaagaaaaccacctattgggatatt

SEQ ID NO: 263218 - DNA, 453 bp, Glycine max
tttgaatacattccttgtagtttatactgaaagatgggtttgaagatggcgtgactgatcgtaggcctttccctcatgctccttttggtctcctctgaggtggcatccacgaatacaaaagaggaggcaaatggagtggatgatgccaaatatcccggtggaagctatggagggggttacccaggtcatggcggtggcggttatcctggccatggcggtggcggttatcctggccatggcggtggtggtggctatcctggtcatggtggtggccaccctggtcatggtggcggctaccctggccgtggtggtggatactgtaggcatggctgttgcggtggccggacatacaacggaggttgcagaaggtgctgctataacgctggcgaagctgttgctgcacaaactcaagataagactcacgattaagacgatgcagttctacttaattag

SEQ ID NO: 263219 - DNA, 456 bp, Glycine max
cccacgcgtccgtcaagcattgcatccctcttgatttgtagtttgttttgtgctttagatagaagttctggcaaatcaagaggggttttaagatcatagtgtgtgttttgcaacaatggctaagttctttgctgctatgatcttggcactctttgccatttccatacttcaaacagtggtaatggctgctaatgaacaaggaggccacttgtatgacaacaagagcaaatatggaagtggaagtgtcaagagttaccaatgcccatcacaatgctcgaggagatgtagccagacccaataccacaagccctgcatgtttttctgtcagaagtgctgcaggacatgcctgtgtgtgccctcggtgtattatggtaataaagctgtgtgcccttgctacaacaactggaagaccaaggtaggaggacccaagtgcccttgagcttcaacttgttcaac

SEQ ID NO: 263220 - DNA, 476 bp, Glycine max
aattaccggtcgagcacgcgtccgcttctgatcattcattcatcttcgttctaatatccatgtctagcaccgttggccagaccatgaagtgcagagctgcgattgcatgggaggctgggaagccgctggtgattgaagaagtggaggttgcgccaccgcaagccggtgaagtccgtttgaagatcctctacacctctctttgccacactgatgtttacttctgggatgcgaagggccagactccattgtttcctcgcatttttggccatgaagcttcggggattgtggagagcgtatgcgagggtgtgactcatctgaaaccaggtgaccatgccctccctgtgttcacaggagagtgtggagattgcgcccattgcaagtcagaggagagcaacatgtgtgagctactcaagatcaacaccgataggggtgtcatgatccatgatggccaatcaaggttctttaaaaatggacaa

SEQ ID NO: 263221 - DNA, 333 bp, Glycine max
gcgtccgcttctcatcattcattcatcttcgttctaatttccatgtctagcaccgttggccataccatggagttcgtagctgcgattgcatggcaggctaataagccgctggtgattgaagaaatgtacgttgcgccaccgcaagcctgtgaattccgtttgaagatcctctacacctctctttgccacactgatgtttacttctgggatgcgaatggccagactccattgtttcctctcatttttgaccatgaagcttctgagattgtggagagcgtaggctaagatgttactcatctgaaaccatttgaccatgcccttcctgtgttcaca

SEQ ID NO: 263222 - DNA, 470 bp, Glycine max
ttcaagaacaatttattgcacaaatattgactagaagcttactcaagccgatgtcaaacactgctttgaatctatttgtggagaggttcaacggttgaggcttcttggagattaccatcattcaactcgaattgcttttgttgagttcacagtggctgagagtgcaattgcagctctaagctgtagtggggtgattctgggttcactgcccataagggtaagtccatcgaagacaccagttcgatcacgtgctcctcgccctactatgcactgaatcaactttccatgtttctggggttgattgctgctgagatatatttacatatatatatatacatagaaacagctgtgttctaaggaacatgtggcatttagttggtacttttgtcctcatgtcttacagtatggttactttgcttccccttgggggattatggttctctggtttagcttgtaatcggatcgaactt

SEQ ID NO: 263223 - DNA, 405 bp, Glycine max
  unsure (1)..(405): unsure at all n locations
ttcaagaacaatttattgcacaaatattgactttaaccttactcaanccnatatcaaacacggctttttatcaatttctaaacaccctcaacactttaaacttctattatattaccatcattcaactctaattgcttttatttaattcacactttctcacatttcaattacatctctaatctgtattataatcattctgcgttcacttcccataattctaattccatccaatacaccacttctatcacatacttcctcccctactatgcactgaatcaactttccatgtttcttatattaattactccttacatatatttacatatatatatatacatataaacaactcttttctaattaacattttccatctacttcatacttttatcctcatatcttacaata

SEQ ID NO: 263224 - DNA, 420 bp, Glycine max
cccacgcgtccgcgagcttcagcaatggtgtacgtcaaggctcagaaatcaaaagcctacttcaagagagatcaagtcaagttcaagagaagaagagagggaaaaaccgattaccgtgccaggattcggttgattaatcaggacaagaacaaatataacactccgaaataccgatttgtggttcgctttagcaacaaggacattgttgcacaaataatatctgctagcattgccggcgatttagttcttgctacagcatattcacatgagctgccacgatatggtcttgaagtaggacttacaaattatgcagcagcttattgcactggtctcctgttggcccgaagagtcctcaaaacacttgaaatggatgaggagtatgaaggaaatgttgaggctactggagaggattattcagtg

SEQ ID NO: 263225 - DNA, 226 bp, Glycine max
caagtgggggagaacaatagagggataaaccgattaccgagccaggattctcgttgattaatcaggacatgaacaaatgtatcactccgaaattccgatttgtggttcgctttagcaacaaggacattgatgtacaattaatatctgctaacattgcccgccatttagatcttgctactgcatattcacatgagctgtcacgatattgtcttgaagtaagactttc

SEQ ID NO: 263226 - DNA, 447 bp, Glycine max
cgcgtcgctgctccgtaccagtttcactgcataaatttgagagaaaactctggaaacatgggggtttatcaggacctccttacaggtgatgagcttctctcggactccttccgttacaatgaaattgagaatggaatgctgtgggaagttgaggggaagtgggttgttaagggagcagttgatgttgacattggtgcaaacccttctgctgagggtggagaagatgagggagtcgatgacgcagctgttaaggttgttgacattgttgatacattcagacttcaggagcaacccgcttttgataagaaacagtttgttaccttcatgaagaggtttatcaagaatttgactcccaagctcgatgcagagaaacaagagttgtttaagaagcacattgagggagcaactaaatacctgctctctaagattaaggatttccagtttttt

SEQ ID NO: 263227 - DNA, 450 bp, Glycine max
cgcagattcaaaggaggatctctcttgcgttttctctaggttttcgctatggcgtcgaagcgaattttgaaggagcttaaggatttgcagaaggatcctccaacatcttgcagtgccggtcctgttgttgctgaagatatgttccattggcaagctacaattatgggtcctccagacagtccctatgcaggaggtgttttcctagtgaccattcatttccctccagattatccctttaagccacccaaggttgcattcaggacaaaggttttccacccaaatataaatagcaatggaagcatttgccttgatatattgaaggagcagtggagccctgctctaaccatttccaaggtgttgctctcaatttgttccctattgacggatccaaatcctgatgatcctttggtccctgaaattgcacacatgtacaagacagataggaacaag

SEQ ID NO: 263228 - DNA, 399 bp, Glycine max
attaccggtcgaccacgcgtccgcccaggcatcctcagggctcacatgaacttctatgcgactagggacctgtcgtttcctgtcgccgatgtgtaagttacgttcattgatgatactgccgcgttaccgataccttctaatcaaatccaagattcatctccatgcgcacatgacgcttttccagtttgcctcatcccaagaagactgcatatagcgcctattgaaacacgtcatcacctcggattctgataatgacacgcacatgatcaccacattaatcaacacagttattgatccaacgcgcagggaggatgtatcgctctgtatgccaatattgccgcttcataacgctgcttctcaatccgggtataacacgatcattctcttgtcatgcatatc

SEQ ID NO: 263229 - DNA, 425 bp, Glycine max
cccacgcgtccgcccacgcgtccgcccacgcgtccgcccacgcgtccgtctccctctttctgtcactagctctgtgcattcttctctcgctctctgccttccatcacactcggcatttcctttcccaagatagtagaagatggcagacactgaggatattcaacctcttgtttgtgacaatggaacaggaatggttaaggctggatttgctggagatgatgccccacgtgctgtgtttcccagcattgtaggtcgtcctcgtcacactggtgtgatggttggcatgggccaaaaagatgcatatgttggtgatgaggcacaatctaagaggggtattttgactctcaagtaccccattgaacatggaattgtgagcaattgggatgatatggaaaagatttggcatcataccttctataatgagc

SEQ ID NO: 263230 - DNA, 284 bp, Glycine max
gaccgacgcgtacggaaaggctaccaaaccttcaactacaactcttatcctcaatcttcgtacaaagttgcactcggttgattttggtagatgtatagctcagacactctcgcttatcatcaagatgtcaactctagtttccgacctgcatctatataatattgctaatgtcaaggcacttgcatgctgatatcactcactgcatcacccactcacaagacatgaataacacttcatcttcttaattacctaattgtttgaatgatttaaatcttgttgacata

SEQ ID NO: 263231 - DNA, 455 bp, Glycine max
ggaaaacgaccaaaacttcaactacaactcgcagcctcaggcttcgtacaaagttgcagtggttggtgctgctggagggataggtcagccactcgcgcttctcatcaagatgtcgcctctagtttccgacctgcatctctatgatattgcgaatgtcaagggagttgctgctgatatcagtcactgcaacaccccctcacaagtcagggatttcactggagcttctgagttggcgaattgtttgaaggatgtgaatgttgttgtcatacccgccggtgttccaaggaagcctggcatgactcgtgatgaccttttcaacatcaatgccggcatagtcagggacttggtttctgctgttgcggataatagccctgatgcttttattcaaatcatcagtaaccctgtgaactctaccgtgcctattgccgcagaagttttgaaacagaagggtgtgt

SEQ ID NO: 263232 - DNA, 439 bp, Glycine max
tgtacttgtgtttcaattcattcttcggttgttctctatttgcgttttctcaggttctttggttcgttctcttccgtggaacgagtagtagaaacttgaaatcaaaaggcagcgggggaaaaagaaaagagagaagtagggttcgaaaatggcagcagaatcatcagagggcgaagaagaaaccaagttaagcggaggtaaccaattgctcatagttgacgatgacttaacggaaatgggaaagaaagccgcttggagcgtgagttcctgcaaacccggtaacggcgtttcctctctccgtgacgacaatctcgaaacttattggcaatccgacggagggcaaccccatttagttaacattcagtttcagaagaaagttagacttcaattaattgtgctgtacgtggatttcaagcttgacgagagttacacgccgagc

SEQ ID NO: 263233 - DNA, 216 bp, Glycine max
atggctcccaaaccgcctagtacgggtctgtttgttggactgaacaagggtcacgtcgtcaggaataagggattgcctccacgcccctcagatcgtaaggggaaaacaagcaagagggtgcactttgtgaggaacctcataagagaggtagccggttttgcaccctatgaaaagcgtataactgagttgctgaaagttgggaaggataagaggcac

SEQ ID NO: 263234 - DNA, 167 bp, Glycine max
gaattctcgggtcgaccgacgcgtccggaaaaaaaaaaaagcctttaactttttttctttggcatgattggaatcttgattggaaaaggttcaaattgaggtgtttaacccatcaattcaattttaagccgtgccttcttcaaaaaaaaataaaaaagaaaaataat

SEQ ID NO: 263235 - DNA, 477 bp, Glycine max
attccctggtcgacccactgcgtccgcggtcacatggggtcactattcctccacctccacctgctatatgaaactcctaattgtcagttgttgtgaagaatttaactgagaacactaacactgttattctctgaattttctcaccatctacaactgaagttttaaccaatatggaaactgaaaagtctaatgtttcaaaggctgaagaatttaaactccttgccaatgaagtgttcaatgctcgaaaatactcccaagccattgatctatatacacaagcaattgagctgaacagtcaaaatgcagtttacttttctaatcgtgcctttgcccatcttcggcttgaggaatatggtagtgcaatacaagatgccacaaaggctattgaaattgatcctaaatattcgaagggttattacaggcgaggcgctgctcatcttggactggggaaattcaaggaagcactgaaagattttc

SEQ ID NO: 263236 - DNA, 440 bp, Glycine max
cgaaccacgcctgcgcccacgcgtccggactgtccaagatgtatcgacaatggtttggtgcgggcaaaaaaccatggtctttctagtcaacttttgtggatacaccatcgatgttgaaattcatgatgtggccgtacaatgcgattaagaactggaattacactgggttgattgatgcaatccacaatggtgatgggaaatgctggactgtcaaagtgttctgtgaagaggagctagttgaatcaattgccacagccacatgacccaagaaagactccttatgcttcattgatgcgattgactcataatgatgacaccagttaagaattgcttgaatggggcttcaagggttctgctgaccatagcccgactgccaatcctcaggaatcttcagaatttaatctatgactcaaatgctgcacttgccctttagctctatg

SEQ ID NO: 263237 - DNA, 457 bp, Glycine max
  unsure (1)..(457): unsure at all n locations
gctgccgaaacccttccggaaccctaaggtaagtgagtaatcagtggttgagaatggtggagaaggcgaagggtagaaaggaggaggtggttacacgtgagtacaccattaacctccacaagcgcctccatggctgcacatttaagaagaaagctcctaaagctattaaggagataaggaaatttgcccaaaaggccatggggaccaatgatgtgagggtggatgtgaagttgaacaagtttgtctggagccagggaatcaggagtgttccaaggaggattagagtaagaattgctcgcaagagaaatgatgatgaagatgccaaggaagagctgtactctcttgttaccgttgttgagatccctaaggacgagctcaaagggttaggcactaaggttattgatgacgaggattgatttatatctggntgaaacccggagacatacatgtagctttt

SEQ ID NO: 263238 - DNA, 458 bp, Glycine max
gctgccgaaacccttccggaaccctaaggtaagtgagtaatcagtggttgagaatggtggggagggcgaagggtagaaaggaggaggtggttacacgtgagtacaccattaacctccacaagcgcctccatggctgcacatttaagaagaaagctcctaaagctattaaggagataaggaaatttgcccaaaaggccatggggaccaatgatgtgagggtggatgtgaagttgaacaagtttgtctggagccagggaatcaggagtgttccaaggaggattagagtaagaattgctcgcaagagaaatgatgatgaagatgccaaggaagagctgtactctcttgttaccgttgttgagatccctaaggacgagctcaaagggttaggcactaaggttattgatgacgaggattgatttatatctgtttgaaacccggagacatacatgtagcttttt

SEQ ID NO: 263239 - DNA, 417 bp, Glycine max
ggcaccggtgaaatcagttatagtcttcttgtgagacaggaggggcacaaacggatgatgtggtcatgttcttggaatccacatggtcacgaatttgcgacaggttcaagggataagacagtgaaaatctgggccatagagagggagtctgtcaagcagcttatgtctttacctcaatttacgagtagtgtaacagcattatcttgggttggtctccatcatcggaagaataatggacttctagctgttggaatggaaaatggccaaatagagttgtggaatctgtcttataacagagcagatgatgggagcatagcagcaccaggtttggctgcttctcttgctgtacgtatagatccttttatatgccatgcgtctaccgtaaaccgtctagcatggaagaaaaatgaggatgat

SEQ ID NO: 263240 - DNA, 402 bp, Glycine max
ggctgaagcacaactacgagaccagcatggctatccctgtcccactcaccgatcaataccggggggccgtttatctaaactgacgagcgcggtattcccgtccaactcactggtgtcgctaccaccgctaccggcacagcaggttctgggtttgggtcctatggtaccggtgcttacggtggtggtgcaagtgcaaccaccgttgcagatcttttggcaacccaaccaaggagtggcagggaggctagagagcttcgtcgttcctccagttcaagctctagctcgtctgaggatgatgggcaaggtgggaggaggaagaaaggagtgaaggataaaataaaagagaaactaccaggggtaggaggagggaataattataaggagcatgcacacacaacaact

SEQ ID NO: 263241 - DNA, 460 bp, Glycine max
gctgccgaaacccttccggaaccctaaggtaagtgagtaatcagtggttgagaatggtggggagggcgaagggtagaaaggaggaggtggttacacgtgagtacaccattaacctccacaagcgcctccatggctgcacatttaagaagaaagctcctaaagctattaaggagataaggaaatttgcccaaaaggccatggggaccaatgatgtgagggtggatgtgaagttgaacaagtttgtctggagccagggaatcaggagtgttccaaggaggattagagtaagaattgctcgcaagagaaatgatgatgaagatgccaaggaagagctgtactctcttgttaccgttgttgagatccctaaggacgagctcaaagggttaggcactaaggttattgatgacgaggattgatttatatctgtttgaaacccggagacatacatgtagctttttgg

SEQ ID NO: 263242 - DNA, 401 bp, Glycine max
gggccgacgcacgcgtccgggcagcgcttaaatcagttatagtcttcttgtgagacaggaggggcacaaacggatgatcgtgtcatgttcttggaatccacatggtcacgaatttgcgacaggttcaagggataagacagtgaaaatgttggccattaaaagggagtccggcaaagcactttatgcgttaacctgaatttacaagtaggggaccagcattccattgggttgagctccatcatcgaaagaataatggacttctagctgctggaatggaaaatggccaaatagagttgtggaatctgtcttattacaaagcaaatgatgggagcatatcaccaccaggtctggccgcttctgttgctgtacgtatagatccttttgtatgccatgcgtgtacc

SEQ ID NO: 263243 - DNA, 405 bp, Glycine max
gtggtggacccgggtcgacgcacgcgtccgcccacgcgtccgtatcactgtgtaagcagtgatcgattctgcgaactgcgattcgcatcggcagttcaaaagcgttcgttcgtcggagatggagacgctaccgacgacgacgacaaagcgaggaggagcgagatcgaagcccgttcagacctcgaaatcgtctctcgttatggccttcttctcctgcgtcgcgtggctctacgtcgccggaaggttatggcaagacgcagagaatcgcaatttactcgctagtcttctgaaaaagaattcagctcagaggcctaaggttcttacagtggaagataagttaatggtgcttgggtgcagggatctggagaggaagattgtggaagctgagatggaattgacattggc

SEQ ID NO: 263244 - DNA, 265 bp, Glycine max
gaattcccggtcgatcgacgccgccgtgccgctactgatctcaatctctcgtctctccgcgtccaaacccttacttcctaccctatggggctttctctcatccatcatgaaaggaggaaagtccatgaccgcttctaaaacagccgatgcccaacatcgctagtgaataagaagggcaccgccccaacaccaggaaacccgtcggaaaggggcggccaccgatggacctaacaagccaaagaggcctccgaatgcctaatgcgac

SEQ ID NO: 263245 - DNA, 447 bp, Glycine max
cctaaacaactctttctcttcttccttcgctcgttgttctccctcgcgtagatcgacaatggcggagacagagacgtttgctttccaggctgagatcaaccagctcctcagtctcatcatcaacaccttctactccaacaaggagattttccttcgtgaactcatcagcaacgcctccgatgctttggacaagattcgatttgagagtttgacagataagagcaagctcgatgctcagccagagttgttcattcatattattccagacaagactaacaatacactgaccattgttgacagtggtattggcatgaccaaagctgatttggtgaacaacttgggtacaattgctagatctggtaccaaggaattcatggaagccttggctgctggtgctgatgttagtatgattggacagtttggtgtggggttctactctgcatatct

SEQ ID NO: 263246 - DNA, 404 bp, Glycine max
  unsure (1)..(404): unsure at all n locations
cccacgcgtccgtcaagcattgcatccctcttgatttgtagtttgttttgtgctttagataaaagttctgccaaatcaagaggggttttaagatcatagtgtgtgttttgcaacaatggctaagttctttgctgctatgatcttggcactctttgccatttccatacttcaaacagtggtaatggctgctaatgaacaaggaggccacttgtatgacaacaagagcaaatatggaagtggaagtgtcaagagttaccaatgcccatcacaatgctcgaggagatgtagccagacccaataccacaagccctgcatgtttttctgtcagaagtgctgcangacatgcctgtgtgtgcccccggggtattatggtaataaagctgtgtgcccttgctacaacaact

SEQ ID NO: 263247 - DNA, 475 bp, Glycine max
ccgggccgaccgacgcgtccgcctagacgactctttctcttcttccttcgctcgttgttctccctcgcgtagatcgacaagttgttggactgagacgtttgctttccaggctgagatcaaccagctcctcagtctcatcatcaacaccttctactccaacaaggagattttccttcgtgaactcatcagcaacgcctccgatgctttggacaagattcgatttgagagtttgacagataagagcaagctcgatgctcagccagagttgttcattcatattattccagacaagactaacaatacactgaccattgttgacagtggtattggcatgaccaaagctgatttggtgaacaacttgggtacaattgctagatctggtaccaaggaattcatggaagccttggctgctggtgctgatgttagtatgattggacagtttggtgtggggttctactctgcatatcttgttgct

SEQ ID NO: 263248 - DNA, 431 bp, Glycine max
  unsure (1)..(431): unsure at all n locations
caccgtcacttttccttaacggcgaagctatcgccgaagggcacaaccgtcattccgactgcaaaccgtttcttctatcctccactctccccatcccaataacaaagagaggaatcgaagtctgttccgttctgatcagaaagggaataacggtaacggagatatggggcttctgtctaacagagtaactagagagagcctgaaaccaggggatcacatctactcttggaggactgcttacatatacgctcatcacggcatttatgtcggcgatgacaaagtcattcacttcactagacatgggcaagaagtaggaaccggtactgcactagatcttctcctcatcagttcaggaccagccaagcctcgagaaagttgcccaacttgtacagcaccccaagaggaacacggngttatctnctcatgcatga

SEQ ID NO: 263249 - DNA, 346 bp, Glycine max
gttgcttttcttgcagtgtatgcttttggaatgtacttttctggacattttggtgagaggggtaatttgaggatatttctaacagtggggatgctaggaactggcttgtttacttcactgtttggggtagggtactggggaaacatccacaacttctactattatttagtagttcaaatgattgctggattgtttcaatccactggatggccgtccgtagttgctgttgtgggtaactggtttgggaagagcaagagaagggtgatcatgggaatttggaatgctcacacttcaattgggaacattgctggttctttgattgcttctgccatgttgagctatggat

SEQ ID NO: 263250 - DNA, 432 bp, Glycine max
  unsure (1)..(432): unsure at all n locations
ggcggcgctgtggcggacgcgccggcggtggttgaggagaagacggagttcgacgtggtgatcgaggaggtgccgagcaacgctcgaatcgcggtgattaaggcggtgagggcattgacgaacctagcgctgaaggaggcgaaggagttgatcgaagggttgccgaagaagttcaaggaagggatttcaaaggacgaagctgaagatgcgaagaagcaactcgaagaagctggtgccaaggttaccattgcttaaacactgtttagctgcagcatatatgttctgcttcttcttttggtggttgtagttgagttcaccagtacactgtaatttcatttccattttgtctggatttcaatcttttatttgtaatgaggaaatatgagntcttatttttatattattttttttaatgcgtatgaggtgttgttg

SEQ ID NO: 263251 - DNA, 445 bp, Glycine max
gagaacactttcatcgactgctcagaccaccattgaaattgattctctatacgagggagagtgatttctactccactgttactcgtgccagatttgaggagctcaacatggatctcttcaggaaatgtatggagccggtggagaaatgtttgagggatgctaagatggacaaaagaagtgttgatgatgttgtccttgttggtggttctaccagaattcccaaggttcaacaactgctgcaggacttctttaatggaaaagagctttgcaagagcattaatcccgatgaggctgttgcatatggtgcggctgttcaggctgcaatcttaagtggtgagggcaatgagaaggttcaggatcttctcctcctggatgtcacccctctgtctcttggtttggagactgccggtggtgtgatgactgtcctgatccctatgaacactac

SEQ ID NO: 263252 - DNA, 327 bp, Glycine max
  unsure (1)..(327): unsure at all n locations
ctttatcgactgctcaaacctcatttaaatgattctctaaccaggaaagatatttttacaacactggtacgccccccanatttgaggagctcaacatggatctcttcaggaaatgtatggagccggtggagaaatgtttgagggatgctaagatggacaaaagaagtgttgatgatgttgtccttgttgttggttctaccagaatccccaaggttcaacaactgctgcatgacttctttaatggaaaagagcttcgcaagaacattaatcccgattaggctgtagcatatggagcggctgttcacgcttcaaccttaaatggttatt

SEQ ID NO: 263253 - DNA, 435 bp, Glycine max
cccacgcgtccgcgagcttcagcaatggtgtacgtcaaggctcagaaatcaaaagcgtggggcaagagatatcaagtcaagttcaagagaagaagagagggaaaaaccgattaccgtgccaggattcggttgattaatcaggacaagaacaaatataacactccgaaataccgatttgtggttcgctttagcaacaaggacattgttgcacaaataatatctgctagcattgccggcgatttagttcttgctacagcatattcacatgagctgccacgatatggtcttgaagtaggacttacaaattatgcagcagcttattgcactggtctcctgttggcccgaagagtcctcaaaacacttggaaatggatgaggagtatgaaggaaatggtggaggctctggagagggatattcagtggaacctgccgagag

SEQ ID NO: 263254 - DNA, 371 bp, Glycine max
gttgccgggctctaaccctggtttcaacatctaatgtgttggaatcatcgtgtatcgtgggggggactttggattgtatgattctgttaaaccagttgtcctcacagggtcattgcaggatagcttttttgccagctttgcccttggatggctcatcaccaatggtgcaggtcttgcatcatacccaatagacactgttagaagaagaatgatgatgacctctggtgaagctgtcaagtacaagagctccttggatgcattcacacagatcctcaagaatgagggtgccaagtccttgttcaagggtgccggtgccaacatcctccgtgccgttgccggtgctggtgtgcttgctggttatgacaagttgc

SEQ ID NO: 263255 - DNA, 262 bp, Glycine max
ctcaggaggagaataaggatgtctcacaggaagttcgagcacccaaggcacgggtcactgggatttctccccaggaagcgtgctgctcgtcacaggggaaaagtgaaggcattccccaaggatgacccatccaaggcacccaagctcactgcattcttgggttacaaggctggtatgactcacattgttagagaggtcgagaagccaggatcaaagcttcacaagaaggaaacatgtgagcctgttacaattattgagaccc

SEQ ID NO: 263256 - DNA, 298 bp, Glycine max
  unsure (1)..(298): unsure at all n locations
acaatttgtcctaaactacnttcccacataaaccttatatcacatcaaatatttcaataattgttcttacattcagcttcatcttaacaaaaacacttttactttcttccattccaaaaattcttactttttttttcacttcatcatatacataaagatatttcctttatattcttcttacacaatcacttctttctattaatcttcccaaaactcttatcattattatatatactttctattctttttaaacataacaatacaaccttacattctacaaacaaattttttcacccaa

SEQ ID NO: 263257 - DNA, 333 bp, Glycine max
aaaaaatgggttcttctttttttaagggggacggtgggggggattttggcatcactggccgggggagcactctgtgccaacccacgcaggccagtggatgtacaatttggccgaaactacgtgcccacatgggcctttgatcacatcaaatatttcaatggtggttctgacattcagcttcatcttgacaagtacactggtactggcttccagtccaaagggtcttacttgtttggtcacttcagcatgtacataaagatggttcctggagattctgctggcacagtcactgctttctatttatcttcccaaaaccgcggagcatgatgagat

SEQ ID NO: 263258 - DNA, 374 bp, Glycine max
  unsure (1)..(374): unsure at all n locations
aaccaggacgcccccacanntnatnatcttctctctgactccttccgttacaaggaaattgagaatggaatgctgtgggaagttgaggggaagtgggttgttaaaggagcagttgatgtatacattggtgcaaacccttctgctgacggtggaggagaagataagggagctgatgatgcacctgttaaggtggttgacattgttgacacattcaaacttcatgagcaaccggggtgcgataagaagcaatttgttaccttcatgaagaggtttatcaagaatttgactcccaagctcgatgcagatcaacaggagttgtttaataagcacatctagggagcaactaattacctgctctctaatattaaagattt

SEQ ID NO: 263259 - DNA, 408 bp, Glycine max
  unsure (1)..(408): unsure at all n locations
ctttnantcttcttnatctccttttttctccttcaactcaaacattaaggaggggtgtttataatanatgtctccccaantccattnttnatntatctcaatattgcactttctnaaaatggtatcaaatatgagtacaaagaagaggacttgaggaacaagagtcctcttctcctccaaatgaacccggttcacaagaagattccggttctcatccacaatggcaaacccatttgtgaatccctcattgctgttcagtacattgaggaggtttggaatgacagaaatcccttgttgccttctgacccttaccagaaagctcatgctagattctgggctgattatgttgataagaagatatatgatcttggaaggaagatttggacatcaaaagggaataaaaaaaga

SEQ ID NO: 263260 - DNA, 373 bp, Glycine max
cgcaccagtttcaccgcacgaatatcttgttgtttggagcgatccgagaaaaactctgggacatgttggtttaccaggacctccttacaggtgatgagcttctctctgactccttccgttacaaggaaattgagaatggaatgctgtgggaagttgaggggaagtgggttgttaaaggagcagttgatgtagacattggtgcaaacccttctgctgagggtggaggagaagatgagggagttgatgatgcagctggttaaggttgttgacattgttgacacattcagacttcaggagcaacccgcattcgataagaagcaagttggtaacctcatggagagggttatcaagaatttgactcccaagctcgatg

SEQ ID NO: 263261 - DNA, 438 bp, Glycine max
  unsure (1)..(438): unsure at all n locations
cttttctactttgaatccttttgaatccttctttttctccttgaactcaaacatggcagagggggtggttctgctagatttctggccaagtccatttgggatgagggtcangattgcacttgctganaagggtatcaaatatgagtacaaagaagaggacttgaggaacaagagtcctcttctcctccaaatgaacccggttcacaagaagattccggttctcatccacaatggcaaacccatttgtgaatccctcattgctgttcagtacattgaggaggtttggaatgacagaaatcccttgttgccttctgacccttaccagagagctcangctagattctgggctgattatgttgataagaagatatatgatcttggaaagaagatttggacatcaaaaggagaagaaaaagaagctgccaagaaggagttcat

SEQ ID NO: 263262 - DNA, 433 bp, Glycine max
cccacgcgtccgcggacgcgtgggggtttttgtggataagagtgagctataatggctgcgcgggagaccgggtttaattgctttgtttgatgttgacgggactcttacagctcccaggaaggtggtcacaccggaaatgttgacattcatgcaagaactacgaaaggttgtaacggttggagttgttgggggttctgaccttataaagatatcagagcaacttggcagcacagttaccaatgagtatgattacgtattttctgagaatggtcttgtggctcacaaggaaggaaagctcattggaactcagagcttgaagtcattccttggtgaagaaaagctcaaggagtttattaactttacacttcattatattgctgatttggacatccccattaagaggggaacatttatggagttccgtagtgggatg

SEQ ID NO: 263263 - DNA, 361 bp, Glycine max
  unsure (1)..(361): unsure at all n locations
cccacgcgtccgcccacgcgtccggtgattgatgctagttagaacaagatgttgcagctaggctacactgcgattttctccgaaatgcttttgattctcacgctcgtcttcaaaaccccactgagaaaactcgtcatcgtttccctcgatagtgtgaagcgcggtcgcggtcnccgtggtggtttccaccgtgggcgccacattgatggtggttctcgcttcgagcctctacagcatggccaagatccagcaacgcaccctcgaggccggcatagtcaaccccaccgaccaagtcctcatgtccaagcacatgctcgaagcttctctcatgggggttctgctggtcctctctctgatgatt

SEQ ID NO: 263264 - DNA, 187 bp, Glycine max
  unsure (1)..(187): unsure at all n locations
tctatgtgttgaacatcggatcggggggagcttgatagatgattctgtaaaaccaagtgtcctcacagggtcattgcaggatangcttttgccagcttgcccttggatggctcatcaccaatggtgcaggtcttgcatcatacccaatagacactgttaggaagaagaatgatgatgacctctggtg

SEQ ID NO: 263265 - DNA, 248 bp, Glycine max
taaaaccccactgataaaactcgtcatcgtttccctctatagtgtgaaagcgcggtctcggtcccgtggtggtttccaccgtgagcgccacattgatggtggttctcgcttctagcctctacaccatgtccaatatccaacaacgcaccctctatgccggcatattcaaccccaccgaccaaatcctcatttccaaacacattctcgaaacttctctcattgggttttctccttttcctctcttttat

SEQ ID NO: 263266 - DNA, 429 bp, Glycine max
atacccgggtcggccgacgcgtccgcaccaacgccaaacaagccctaaatctctcttctctttcttcttcttcctttaaccatgagagagatcttgcacgttcagggaggccaatgcggtaaccaaatcggttccaagttctgggaggtgatctgcgacgagcacggcatcgatcccaccggaaagtacaacgaggaaggcaacagcagcatccaactcgaaaggatcaatgtgtattacaacgaggcctctggcggaaggtacgttccccgtgccgtgcttatggatctcgaacctggaaccatggacagcatcagatctggcccctactgcaagatcttccgccccgacaacttcgtcttcggccagtccggcgccggtaacaattgggccaaaggtcattatactgaaggcgccgagctgatcgac

SEQ ID NO: 263267 - DNA, 375 bp, Glycine max
  unsure (1)..(375): unsure at all n locations
cgaacaanccctaaataacacttttatttcttctacaacacanaaccataaggtacctgtttcattttaaaggaccccaccccacnaaccaaatcgattccaagttctgtaaagtgatctacgacgagcacatcatctatcccaccggaaagtacaactattaattcaacagcagcatccaactctaaaggatcaatgtttattacaactaatcctcttacaaaaggtacgttccccataccctgcttattcatctccaacctgcaaccatggacagcatcatatacttcccctactgcaagatcttcctccccgacaactttctcttcggccaatcctgccccattaacaattttaccaaaaatcattatactt

SEQ ID NO: 263268 - DNA, 299 bp, Glycine max
cccacgcgtgcgcccacccgtccgttccaaaaagaaaaaaaaactaaatcgatcatcactgggcttggctaatacataatggcagacgagacccaaaacaagtataagagctctgaggttgaggtccaggatcgtggtgtttttgactttctcggtaagaaaaaggatgaagaagacaagcctcatactcaggaggaggtcatcgccaccgagtttcaaaaagtcactgtctcagaccaaggagagaacaagcacagcctcttagaaaagcttcaccgatctgacagcagctctatctc

SEQ ID NO: 263269 - DNA, 313 bp, Glycine max
cccaaaacaaatatgagaactctgaggttgaagtccaaaatcgtggtgttttttactttctcggtaagaaaaaggatgaataatacaagcctcatcctcaagaggaggtcatcgccaccgagtttcaaaaagtcactgtctcataccaatgatagaacaagcacagcctcttagaaaaacttcacctatctgacagcagctctatctcttcaaattaggaggaatgataagattgatacaaaatgaataacaataataatgaaaagaaaagccttaaagacaacatcgatcagaaaataaaaggttatcatca

SEQ ID NO: 263270 - DNA, 438 bp, Glycine max
ctacctctcaagtttttgaagtatagagatggcagagacattcctatttacctcagagtcagtgaacgagggacaccctgacaagctctgtgaccaaatctctgatgctgtcctcgacgcttgcctcgaacaggacccagacagcaaggttgcctgcgaaacatgcaccaaaaccaacttggtcatggtcttcggagaaatcacgaccaaggccaatgttgactacgagaagatagtgcgtgacacctgcaagaacatcggctttgtctcaaacgatgtgggactggatgccgaccacctgcaaggtcctcgtcaacattgagcagcagagccctgatattgctcaaggtgtacacggccacctcaccaaaaaacctgaaaaaattggtgctggtgaccagggtcacatgtttggctatgccactgatgaaacccctg

SEQ ID NO: 263271 - DNA, 251 bp, Glycine max
  unsure (1)..(251): unsure at all n locations
taaaaatgtttgtttcattcctatttacctcaaaatctggggtgcttttttaccatgacgggctggtcnaccaaatctatgatgctgtcctcgacgcttgcctcgaacaggacccaaacagcaaggttgcctgcgaaacatgcaccaaaaccaacttggtcatggtcttcggagaaattaccaccaaagccaatgttgactacgaaaagatagtgcgtgacacctgcaagaacatcggctttgtcttaaac

SEQ ID NO: 263272 - DNA, 393 bp, Glycine max
ctctgctgcgtttgcttctcctccacccatccacaaacgaacacacactttgattgagaatggggcgtgttcgcacaaagacagtgaagaagtcctcgcggcaagtgatcgagaggtactactctcgcatgacgctggacttccacacgaacaagaaggttctggaagaggtggccatcattccctccaagaggctccgcaacaagatcgcgggattctccacccacctcatgaagcggatccagaagggtcccgtacgtggaatctccctcaagctgcaagaggaggagcgcgagcgccgcatggacttcgtccccgatgtctccgccatcagaaccgaccagatcgaagtcgacaaggagacgctcgacatgctcgccgccctcggaatgt

SEQ ID NO: 263273 - DNA, 369 bp, Glycine max
  unsure (1)..(369): unsure at all n locations
cacgcgtccgcttttctactttgagtcttcttgatccttctttttttccttgaactcaaacatggcaaatgggggggtctgctaaaattctggcccaatcccattggggataagggtcaggattgcacttgctgaaaagggtatcaaatatgagtacaaagagaggactngaggaacaagagtcctcttctcctccaaatgaacccggttcacaagaagattccggttctcatccacaatggcaaacccatttgtgaatccctcattgctgttcaatacattgaggaagtttggaatgacagaaatcccttgttgccttctgacccttaccagagagctcangctagattctgggctgattatgttgat

SEQ ID NO: 263274 - DNA, 369 bp, Glycine max
  unsure (1)..(369): unsure at all n locations
actttnaatcttcttgatccttcttttttttcttgaactcaaacatgacanatcgcgcggttcttatagatttctggccaactccatttgggatgagggtcaagattgcacttgctgaaaaaggtatcaaatatgagtacaaagaagaggacttgaagaacaagagtcctcttctcctccaaatgaacccggttcacaagaagattccggttctcatccacaatggcaaacccatttgtgaatccctcattgctgttcaatacattgaagaagtttggaattacaaaaatcccttgttgccttctgacccttaccagagagctcangctagattctgggctgattattttgataaaaaaatatattatc

SEQ ID NO: 263275 - DNA, 411 bp, Glycine max
  unsure (1)..(411): unsure at all n locations
aaaaaaaaaaaaaaaaaaattttgtttttttttttanaaaaactcctccacaaaaaaaaanannannaaaaaaaaaaaaacaaaaanaaaacncnaaaaacaaaaaaaaaaaaaaacacactcaacaaaaaaaatttttttttttattatttaataataaaatttaaattatttttttttttttatttatttttttatcttttatttatttttttattttttcatatttttattatactcttttatttatatatttattattttatttttttattaatttcttttttcttttttcatttattttatatttattttatatttttaataatattttatttatttttttttttttttttatttatataattttaatttatattttttttattctttattttaatatttttatta

SEQ ID NO: 263276 - DNA, 378 bp, Glycine max
  unsure (1)..(378): unsure at all n locations
gatggcggcgtcgcggcgtctccgggaccttcaatcccaaccggcgaacaagatctgcgtggactggtcccagaagaacccgcaatgggcctccgtatcgtacggcgtcttcatgtgcctagagtgctcangcaagcaccgcggcctgggcgtgcacatctccttcgtgcgatccgtgacgatggattcgtggtccgaaatccagatcaagaaaatggaagccggaggcaacgacaaactcaacgccttcctcacgcaatacggcatccccaaggaaaccgacatcgtcgccaagtacaactccaatgccgcagccgtctaccgcgaccgcatccaggccctcgccgacgggcgtccctggcgggatcccccagtcgt

SEQ ID NO: 263277 - DNA, 291 bp, Glycine max
cccacgcgtccgcccacgcgtccgctccagagagaagaagaaacttaatcgatcatgagttggcttcactaatacatcatggcagacgagacccagaacaagtatgagagctctgaggttgaggtccaggatcgtggtgtttttgactttctcggtaagaaaaaggatgaagaagacaagcctcatcctcaggaggaggtcatcgccaccgagtttcaaaaagtcactgtctcagaccaaggagagaacaagcacagcctcttagaaaagcttcaccgatctgacagcagc

SEQ ID NO: 263278 - DNA, 310 bp, Glycine max
  unsure (1)..(310): unsure at all n locations
accacncatccgctttattttgaagaacaaacttaatcatcatggctgggntcattaatacagcggggcggccnanacccanaacaagtatgagagctctgaggttgaggtccaggatcgtggtgtttttgactttctcggtaagaaaaaggatgaagaagacaagcctcatcctcaggaggaggtcatcgccaccgagtttcaaaaagtcactgtctcagaccaaggagagaacaagcacagcctcttagaaaagcttcaccgatctgacagcagctctaactcttcaagtgaggaggaaggagaagat

SEQ ID NO: 263279 - DNA, 363 bp, Glycine max
  unsure (1)..(363): unsure at all n locations
aaaagaaagaaaaaaaaaaaaattattaaaaaaaaaaaaaaaaattagcttttttaaaaagccccccaaaaaaaaaaaaaaaaaaaaanaaaaaaacaaaacaaaaaaaaaacaacccccaaaaacaattttttcctagcaaaataaattcttcatttttttttttttttttttttttttataaatcttatttttttaattttattttttatttttttatttttttttattttttattctaattactttattttattttttttttttttaattttttttttttttttttatttatattattttttttaaattttatttttttttttttataatataaaatcattttttttttattatattttt

SEQ ID NO: 263280 - DNA, 306 bp, Glycine max
aattaattaaaactgaatctaaattaattgtttatcttatcaatttatgatctaatttccaattttatattttttatattattctatatatttttttttaaatttttttcatttattaatttatttcttttttttcattaccatatttcattattttccacccttattttttttctcctttttttttattaatttttatcatatatatatctttcttttctttaatttttctattttttttttttttattttattaatttatttacttttattatctaatttttttttttcttttttattttattt

SEQ ID NO: 263281 - DNA, 400 bp, Glycine max
  unsure (1)..(400): unsure at all n locations
aaaaaaaaaaaaaaaatttattataaaaaacaaaaaaataaaaatttagtttttattttnaaaagttctcccaaaaaaanaaaaaaaaaaaaaaaaattttttttattatttttattttatttttattattttttttaaaataattttttttttattttattatttttaaaatattttttatttattttatacttttttttaaatttttttttttaatttttttatattttataatttatttttttttaaattttttttttttttttttttttttatttttttttaaatttatcacctatataatttttttattattttttttaattttataatttttttaatttttttttattattttatttttttttaaatatatttatttatttttatttttcatta

SEQ ID NO: 263282 - DNA, 357 bp, Glycine max
  unsure (1)..(357): unsure at all n locations
cgtccgcccacgcgtccggataaattgtctaactcctccttgattgctgtcctctggaaaatgatttgtagggggaccgacacggtggcggttttgattgagtggatactggcaaggatggtgcttcatccggaggtgcaaaggaaggtacaagaggagttggacgcggtggttaggggtggcgctttgacggangaggtcgtggcggcgaccgcgtatcttgcggcggtggtgaaagaagttctgaggctgcacccgccgggcccgcttctctcgtgggcccgcttggccatcactgatacgaccattgatgggtatcacgttccttgcgggggacaaccgctatggttaatatgt

SEQ ID NO: 263283 - DNA, 363 bp, Glycine max
cccacgcgtccgcccacgcgtccgcccacgcgtccgcggacgcgtgggcttcaacttggatgaccggcctaactaccctgattctgatcagattccttactttgaggatggtgattctgtgacatacaataatgagaaggaggggatcattgagtgcttgaaaaggaatgtgggtggtgatttagatagtgaggtttcttctctccctgattggataccaaccaaagtgatggccaccacttggcttgctgatgcacttgagtatgaactgtgggtgggatgtgatggttcctctgcttatagcatctattattctgatcttccctggcctatcggcaaggttctcttttggaagaaagctta

SEQ ID NO: 263284 - DNA, 423 bp, Glycine max
  unsure (1)..(423): unsure at all n locations
gaaaaagaagaaaaaaaaaaaaaaatttatttaanncaaanccaaanacaatattgttgtttttttttaaaatgtttctccccaaaaaaacaaaatnaagaaaaattgtaatggtacaaagtttttttccaataatgtttatctgtcttgctttttagaatattttttttcttttaattaattttacatatttaattaattttttattttatatttattactaattgaaatgccatttattcttttttttaaatatataaactattcttttacaaccccccatctataaacccatttattcttttttatttctttttatttcacacctattttatatttctattttcatatattttactttattatttttatttatatttttttttttatatttattctttttatatttattttatttaatat

SEQ ID NO: 263285 - DNA, 460 bp, Glycine max
  unsure (1)..(460): unsure at all n locations
aaaaaaaaaaaaaaaaaattttattanaaaaaaaaaaaaaaaaaaaaaaaatttagttttttaattttnanaaaagcccccccccaaaaaaaaaaaaaaaaaaanaannnnnaaaaaaaaaaaacaacaancacaacaaaanaattaaggacaccgccccccttttttttttttaaaaaaacaaaaaataaatccaaatattatttttttttttttataaaattaaataaaaaaaaaaataaattttttaaataaaacaaaagataattttaatatattaaatactataacaaaatttaattttttttattattttttttttatacacttttccaaaaaaaaaaataaaatatcttttttaaaatatataaataattaaatatttattatttttaaatttttaattttttttttaattttttctttttttatattttttattttattatttttttttttt

SEQ ID NO: 263286 - DNA, 425 bp, Glycine max
  unsure (1)..(425): unsure at all n locations
gaccacgcgtccgaaaggaaaaaaaanaaaaaaaaaaaaaatttaattaaaaaaaaaaaaaaaaaaaaaaacccgtccgcgttaataaaaaaaaagccccccccaaaaaaaaaaaaaaaanttttttttggtttggaaaaaaaaaaaaaaaaaaaaaaaaaaaaaaaaaaaaaaaaggccccccctttaaaaaaaccaaaattaaccaccccctccttccaaaaaaaaaactttttaatagggcccccaaaaaaaaaaaccccccccccgtttaaaaaccccggaactggaaaaaaccccgggttcccccaaataaaaccccttacaaaaaacccccttttcccccagtgggaaaaaaaaaaaaaacccccccccaaacccctttccaaaaaatttccccccctaaatggcaaatggcccccccc

SEQ ID NO: 263287 - DNA, 312 bp, Glycine max
cccacgcgtccgggaagatggtgctttcggaggaggaaatgggtcgtctgtaccgggtaaggaagacggtgatgcaaatgcttcgggacaggggttttctggtgggtgacttcgagatcaacatgtcgaagcatgagttcaagtccaagtacggcgagcacatgaagcgcgaggacctggtcatcaacaagtccaagaaggacaactccggcgaccagatctacgtcttcttccccgacgagcccaaggtcggcgtcaagaccatgaagacctacaccaaccgcatgaactccgaaaacgtctatagagcca

SEQ ID NO: 263288 - DNA, 507 bp, Glycine max
  unsure (1)..(507): unsure at all n locations
aaaaaaaanaaaaaaatttanattaacaaaaaaaaaaaaaaaaaaaaaaattcttagtttttgtattttaaaaaaaaccctcccaccacaaaaaaaaaaaaaannaaaaaanaanatatttatacaattttattaanataaaaaattattaatattatatttatattattttttaattttttttttttttatatatttttaaataatttatttatttttttttattttatattataatttttttttttttaattaattttattttttttttataaatattttatattaatatttttttttttattttaataattttaatttattttatatttaaattatatttaatttatttctatattattttttctcatattattttttttttatattatatttaataattttatttttaataatttcattttattttattattaaatttattatttaaatttttttaattattatattttataattatttatttatatattaaatttttttatt

SEQ ID NO: 263289 - DNA, 320 bp, Glycine max
cccacgcgtccgagaaggcctgggcttagttgataagcataactgggtgaggaagaaagagagagagtgaagaagatggcgtcgagcggagcggtaccgttttggagggcggcggggatgacgtacataacatactcaaacatatgcgcgaatctgctcaagaattgcctcaaggaaccctacaaggccgaatccctctctcgtgagaagctccattttgttctctccaaatgggtcgacgccaagcctgaaaaacctactattcgttcagacaccccagagcagtgatctggaatagttggaagctataaatgcataaa

SEQ ID NO: 263290 - DNA, 343 bp, Glycine max
atttgaaggttgttttgtgcttatagataaaagttctgccaaatcaagaggggtttgcagagcatagtgtgtgtgtgtgtgttaaacaatggctaagttctttgctgctatgatcttggcactcattgccatttccatgcttcaaacagtggttatggctgctaatgagcaaggaggccacttgtatgacaacaagagcaaatatggaagtgggagtgtcaagagataccaatgcccatcacaatgctcgaggagatgtagccagacccaataccacaagccctgcatgtttttctgtcagaagtgctgcaagaaatgcctgtgtgtgcccccggggtattat

SEQ ID NO: 263291 - DNA, 427 bp, Glycine max
  unsure (1)..(427): unsure at all n locations
cgcaggttcaaangangatctctcttgcgttttctctatgaattcgctatggcgtcnaagcgcagggtgtaggagcttaagggtttgcacaacgatcctccaacatcttgcagtgccggtcctgttgttgctgaagatatgttccattggcaagctacaattatgggtcctacagacagcccctatgcacgacgtgttttcctagtgaccattcattgccctgcagattatccctttaagccacccaaggttgcattcacgacaaacgttttccacccaaatataaatagcaatggaagcatttgccttgatatattgaatgaacagtggagccctgctctaaccatnttcaaagtgttgctctcaatttgatccctattgacggatccaaatgctgatgatcctctggtcccttgaattgcacaca

SEQ ID NO: 263292 - DNA, 449 bp, Glycine max
  unsure (1)..(449): unsure at all n locations
aaaaagaangaaaaaaaaaaaaaaaaattttataataaaaaaaaaaaaaaaaaaatttagtctttattttnaaaacggcccccccaaaaaaaaaannannannnaanaaaacacaacaaaacaaaccacaacaaaaaaaaaaaaacaacaacaccaaaaattttttataaanaaaccaaaaaaataaaaaacatttttttccttatttttatttaattattttttatacatacttttttttaattattctatttttttactttttttttatttttttaatttaattttattttttttaaaaatatattattttttttatatttttttttttttattttttattatttatatatatatcacttttattttttcatttactatttttttaatatttatttatctttttattattattttttttatttttttatttttatttttatttttta

SEQ ID NO: 263293 - DNA, 414 bp, Glycine max
cccacgcgtccgaaaaagtttatggaactgtctaaggtgtatgatggatttgttgactcttcagacaatctaataataaaagctcaagttcaagtcataagggaaaaatcagacaggcctttccgttgccttgattgccagtataggagggaacttgttagagtatatttgacaaatgtagagcaaatttgtcggcgttttgtggaggagagaagaagcaagcttggaaagttgatagaggataaagctaggtggtcaagcttctttactttctggcgagaagttgatcaaacttccaggcgccgcatgtctagggagaagacagatgtaattttgaaagtagttgtaaaacacttctttatagagaaagaagtcacttctactttggtaatggattccttgtatagtggattg

SEQ ID NO: 263294 - DNA, 159 bp, Glycine max
  unsure (1)..(159): unsure at all n locations
cccanaacaagtatgagaactctcaagttcagctccaggatcgtggtgtttttgactttctcactaagaaaaacgattaaaaagacaaacctcatcctcagcaggaggtcatccccacctaatttcaaaaagtcactgtctcagaccaatgataaaaca

SEQ ID NO: 263295 - DNA, 434 bp, Glycine max
  unsure (1)..(434): unsure at all n locations
ggcggcgctgtggcggacgcgccggcggtggttgatgagaagacggagttcgacgtggtgggcgagggttgtgccgagcaacgctcgaatcgcggtgattaaagcggtgagggcattgacgaacctagcgctgaangaggcgaangagttgatcgaagggttgccgaagaagttcaaggaagggatttcaaaagacgaagctgaagatgcgaagaagcaactcgaagaagctggtgccaaagttaccattgcttaaacactgtttagctgcaacatatatgttctgcttcttcttttgttgggttgaattgagttcaccaatacactttaatttcatttccattttgtctggatttcaaacttttattttgaatgaggaaatatgagttcctatttgtatattaatttttttaaatcctaataagtgttttgtg

SEQ ID NO: 263296 - DNA, 330 bp, Glycine max
  unsure (1)..(330): unsure at all n locations
aaaaaaaaaaaaaaaaaaatttaattttaaaaaaaaaaaaaaaaaaaaatttgatgttttttttttaaaaacctccgcccaaaaaaaaaaaaannnnaaaaaaactaaaccaaacaaacctattatttactattataatttttttatactttttatttttttttttatttacttaaaataaaaaattatttttttttttatattaaatttatctttttaattatttttttaattttacaattaaattattaacatttatttttttttttatttttatattaatatttattatttaattttttatacttttaatttttatttttttttttt

SEQ ID NO: 263297 - DNA, 355 bp, Glycine max
cccacgcgtccgtcaagcattgcatccctcttgatttgtagtttgttttgtgctttagataaaagttctgccaaatcaagaggggttttaagatcatagtgtgtgttttgcaacaatggctaagttctttgctgctatgatcttggcactctgtgccatttccatacttcaaacagtggtaatggctgctaatgaacaaggaggccacttgtatgacaacaagagcaaatatggaagtggaagtgtcaagagttaccaatgcccatcacaatgctcgaggagatgtagccagacccaataccacaagccctgcatgtttttctgtcagaagtgctgcaagacatgcctgtgtgtg

SEQ ID NO: 263298 - DNA, 294 bp, Glycine max
ccatcaaaaacatccccttccaaaaacctaaaaaagccactcacccctacaccttaaaagctgctttagcttaattcatctcaaccttcatcttcatattccccagctcaagctccagcatcgcctacaacaaactcaccaacaactgctcctccaccccttccaacctcatctcctcctccatcacccatacattctccctcttcatccccatctccctcagctccaacatcttcctcagccacctcaacccctccatcaccttcagcaccttcctccgcagcaacatcacct

SEQ ID NO: 263299 - DNA, 449 bp, Glycine max
cttgtccttctcaatcttgtaattctatttcctccaccataatgctgcgcaagcttgtgtgagggccacgcaagaacaagcctggcacagttcccgttcacctcaacgtctatgatctcaccccaatcaacggctatgcctattggcttggccttggagtctaccattctggggttcaagttcatggattggaatatggttttggtgcgcacgagcacgacacaacggggattttcgaagtccaacccaaacactgccctgggttcactttcagaaagtcaattttcatcggaacaacagatctgggtccgaaagatgttcgagcattcatggagaagctggctcaggattactccggcaacacctatcatctcatttccaagaattgcaaccatttctgtaacgatgtttgtctcaaattgaccggaaagtcaatccctcgttgggtc

SEQ ID NO: 263300 - DNA, 463 bp, Glycine max
  unsure (1)..(463): unsure at all n locations
cccacgcgtccggtgatttcagtgagtgatcggtgttcacttgatctcatcataatcgggagcgtcaattgaagaagatgccgatcagaaacatcgccgtcggaaggcctgaagaggcgactcaccccgacacgttgaaggcggctttggctgagttcatctcaaccttcatcttcgtgttcgccggctcaggctccggcatcgcctacaacaagctcaccgacaacggcgctgccacccctgccggcctcatctccgcctccatcgcccatgcattcgccctcttcgtcgccgtctccgtcggcgccaacatctccggcggccacgtcaaccccgccgtcaccttcggcgccttcgtcggcggcaacatcaccttcctccgcggcatcgtctacgtcatcgcccagctcctcggctccatcgtcgcctccctcctcctggccttcgtcaccgncttcactgt

SEQ ID NO: 263301 - DNA, 307 bp, Glycine max
cccccccaccccccaccccccccccccccccccccccacccccaccccccccccccccccccccccccccccccccccccccccccccccccccccccccccccccccccccccccccccccccccccccccccccccccccccccccccccccctccccccccccccccccccccccccccccccccccccccccccccccccccccccccccccccccccccccccccccccccccccccctccccccccccccccctccccccccccccccccccccccccccccccaccctcctccccctccc

SEQ ID NO: 263302 - DNA, 333 bp, Glycine max
tgcctgtaccgtgctccagaattcccgggtcgacccactcgtacggagtttcataggatcaaccatacttgtgttataccgttaacatccgaactgtttactctcctacagacataatggttcgcattctgacggataatggcggtgtggaacgcatggaggagatcatcagggaccatttggaccccattttaaagcaagtgttggggatctggttggatcattgtgcttgtgccaagcgacaagttggagaggcagaaagagcttatcttaagaaaagggatggtctcattagaaacaagaccattgagattgatcttggttcaagctttc

SEQ ID NO: 263303 - DNA, 459 bp, Glycine max
  unsure (1)..(459): unsure at all n locations
tttgattttccctcactttctcgctcgcctaacgcctttctctctcctccaatggccgagcagctgaccgacgaccagatcgccgagttcaaggaggccttcagcctcttcgacaaggacggcgatggttgtattactactaaggaacttgggactgtgatgcggtcactagggcaaaacccaactgaggcagaactgcaggatatgattaatgaggttgatgctgatggcaatggaaccatcgacttcccagagttcctcaacctgatggctcgcaagatgaaagacaccgactccgaggaggagcttaaggaggctttccgtgtgttcgacaaggatcagaatggtttcatctctgcagctgagctccgccatgtcatgacaaatcttggggagaagctgaccgatgaggaggttgatgagatgatccgcgaggccgacgtcnatggtgatggacag

SEQ ID NO: 263304 - DNA, 404 bp, Glycine max
acccgtccgtttggtcttccggcactttctcgctcgctttacgcctttttctctcctccaatggccgagcagctttgcgacgtccaaatcgccgagttcaaggaggccttcagcctcttcgacaaggactgcgatggttgtattactactaaggaacttgggactgtgatgcggtcactagggcaaaacccaactgatgcagaactgcacgatatgattaatgatgttgatgctgatggcaatggaaccatcgacttcccagagttcctcaacctgatggctcgcaagatgaaagacaccgactcctaagaggagcttaaagaggctttccatgtgttcgacaaggatcagaatggtttcatctctgcatctgaactacttcatgtcatgacaaatcttcgtga

SEQ ID NO: 263305 - DNA, 467 bp, Glycine max
tctgtctctctctcactttgtcctccaaactcaagtgtcggaaagtttgcttcttttccgctctgagtcaccctatttattttgggtctctcatctttcttcttccttccaagttgtttttggtgttggtgttggtgttgaattgagttgagaagaaaagaagaggtcatagacacacacacaagacatgtctgctgttgagtcagctgaacacaacaacatcagaggagtaccaactcatggtggacgctatgttcagtacaatatctatggcaatctcttcgaagtttccagaaagtatgtccctcctattcgccctgtcggtagaggtgcttatggtattgtttgcgctgctgtaaatgcagagacaggcgaggaagttgccattaagaagattggcaatgcattcgacaacagaatagatgccaaaaggaccttacgggaaattaaacttctttcgcacatgg

SEQ ID NO: 263306 - DNA, 308 bp, Glycine max
gacccactcgtcctttcggcgctgtggcggacgctctctgcggttgttgacgagaagacggagttcgacgtgtgtatcatattaaagccgagcaacgctcgaatcgcggtgattaaagctgtgagggcattgaccaacctagcgctgaatgaggcgaatgagttgatcaaagggttgccgaagaagttcaaggaacggatttcaaaggactaagctgaagatgctaagaagcaactcgaagaagcttgtgccaaagttaccattgcttaaacactgattagctgcagcatatatgttctgcttcttct

SEQ ID NO: 263307 - DNA, 469 bp, Glycine max
ccggccggacgcacgcgtccgcccagataagagagatagctttttggttttctgagtaccatatggattccaggtgcttcgttacatttaacttgtctgatgcatggttcccatcggctctttctctgggtgatgttgattgtggaatggcatcagttagagtaactgcaaaagacgtagtattttggtttcagtcacacactgctgcacaaatccgatggggtggcgcaaagcatgaagctggagaaaaagatgatggtacgaggatgcatccaagatcatcattcaaggttttccttgatgttgagaaggcaaggagcttaccatggaacgaatatgaaatagatgctatgcattccttgcacttaatactgagaaatgcattcaaagataccgacagtatggatttaaacacaaaagcatttaatacaagactaatcgatttgaacattgaggggatgcaagaact

SEQ ID NO: 263308 - DNA, 457 bp, Glycine max
cccgcgcgtccgcccacgcgtccgctccttagagattaagaaacttaatcgatcatcacgtcacttgactaatacatcatggcagacgagacccagaacaagtatgagagctctgaggttgaggtccaggatcgtggtgtttttgactttctcggtaagaaaaaggatgaagaagacaagcctcatcctcaggaggaggtcatcgccaccgagtttcaaaaagtcactgtctcagaccaaggagagaacaagcacagcctcttagaaaagcttcaccgatctgacagcagctctagctcttcaagtgaagaggaaggagaagatggagagaaaaggaagaagaagaagaaggaaaagaaagggctgaaagagaagatcgaggagaaaatagagggtgatcatcatcatcacaaggatgaggacacaagtgtccctgttgacaaagttgacgttgttg

SEQ ID NO: 263309 - DNA, 296 bp, Glycine max
ctggatgatcccaacactttcggtaacattattcacaggatgctgaagcttggactgagcattgatgaagatgctggtgaagcagatgctgacatgcctcctcttgaggacgctgatgcagatgctgagggtagcaagatggaagaagttgattaaatctgacttaattgcctgttacgtttttagaaacaatgattggagaaacagtctttttactatgttttatgttttttgaattttcgaaattttggaacgttggctagttaggtgccgtatgtagtagtttctttatggta

SEQ ID NO: 263310 - DNA, 434 bp, Glycine max
cccacgcgtccggtgatttcagtgagtgatcggtgttcacttgatctcatcataagggtcagcgtcaattgaagaagatgccgatcagaaacatcgccgtcggaaggcctgaagaggcgactcaccccgacacgttgaaggcggctttggctgagttcatctcaaccttcatcttcgtgttcgccggctcaggctccggcatcgcctacaacaagctcaccgacaacggcgctgccacccctgccggcctcatctccgcctccatcgcccatgcattcgccctcttcgtcgccgtctccgtcggcgccaacatctccggcggccacgtcaaccccgccgtcaccttcggcgccttcgtcggcggcaacatcaccttcctccgcggcatcggctacgtcatcggccagcttctcgggtccatcggtcgctccttc

SEQ ID NO: 263311 - DNA, 302 bp, Glycine max
ttctctttctctctcatccagatcttgcaaaaaaaaaaaaaacacaatggcagcgagcgctcccactccacgcgaagagttcgtgtacatggcgaagctggcggagcaggccgagcgctacgaggagatggtggagttcatggagaaggtctccgcctccgccgagagcgaggagctgaccgtggaggagcgcaacctgctctccgtcgcctacaagaacgtaatcggcgctcgccgcgccttctggcgcatcatctcctccattgagcagaaggaggagagccgcggcaacgaggaccacg

SEQ ID NO: 263312 - DNA, 457 bp, Glycine max
gttgccgggctctaccgtggtttcaacatttcatgtgttggaatcatcgtgtgtcgtggtctgtactttggattgtatgattctgttaaaccagttgtcctcacagggtcattgcaggatagcttttttgccagctttgcccttggatggctcatcaccaatggtgcaggtcttgcatcatacccaatagacactgttagaagaagaatgatgatgacctctggtgaagctgtcaagtacaagagctccttggatgcattcacacagatcctcaagaatgagggtgccaagtccttgttcaagggtgccggtgccaacatcctccgtgccgttgccggtgctggtgtgcttgctggttatgacaagttgcaggttcttgtgttcggcaagaagtacggctctggtggggcttaagttctaatgctgagtcagtactattatttgtttttagatggcg

SEQ ID NO: 263313 - DNA, 267 bp, Glycine max
tttcaattaatattctcccttttcttcatctcatataatcaagatcttgttaatttaaaatgcccatcacaaacatctccttcataaaacctcaataatctactcacccctacacttttataacttctttttctcatttcatctcaaccttcatctttctcttctcctcctcatactccttcatctcctacaacaatctcacccacaacttctctttcaccccttccttcctcatctcctcctccatctcccattcattctccctct

SEQ ID NO: 263314 - DNA, 150 bp, Glycine max
accgcttcggaattcccggctcgacccacgcgttcggaaaaaaaaaaaagccttttactttttttcttttgcatgatttgaatcttgattgggaaagcttcgaattggggtgttttacccatcaattcaattttaagccgtgccttcttc

SEQ ID NO: 263315 - DNA, 438 bp, Glycine max
agaaaatgggttcttcttcttctatgtggacggtgtgtgtgattttggcatcactggcctctgcagcactctgtgccaacccacgcaggccagtggatgtacaatttggccgaaactacgtgcccacatgggcctttgatcacatcaaatatttcaatggtggttctgacattcagcttcatcttgacaagtacactggtactggcttccagtccaaagggtcttacttgtttggtcacttcagcatgtacataaagatggttcctggagattctgctggcacagtcactgctttctatttatcttcccaaaacgcggagcatgatgagatagactctgagttcttggggaacagaacaggacaaccttacattctgcaaacaaatgtgttcaccggaggcaatggtgatagagagcaaagaatctatctttggtttg

SEQ ID NO: 263316 - DNA, 304 bp, Glycine max
tcgggctcttgctctctcatccagatctttcaacagagagagagacacagtggcagcgggcgctcgcactccacgcgaagagttcgcgtacatggcgaagctggcggagcaggccgagcgctacgaggagatggtggagttcatggagaaggtctccgactgcgccgagagcgaggagctgaccgtggaggagcgcaacctgctcttggtcgcctacaagaacgtaatcggcgctcgccgcgcttcctgacgcattatctgctgcattgagcagaaggaggagagccgcggcatcgaggaccac

SEQ ID NO: 263317 - DNA, 396 bp, Glycine max
taggagtgtaaaaaccttcttttttccttctctcaagtctcaagagatttcgtcatgggtccaattaaagacaaggctccaccaccttcctccaagcccgccaaatctgtcggtttcaagcataacaagaagaagtggatcaagggaaatcaaaatgagaatgtgaataacatggtgctgtttgatcaaggcacctatgataagctcctttctgaagctcccaaattcaagctcatcactccttccattctttcttatcgtttgatgattaatggatcacttgcaacgaatgctataagacaatatattgctatgggttcaatcatgatggtgtcttcccatgcaagccatcaaatttacaccattgcaactaacacctatgtttttaactgatct

SEQ ID NO: 263318 - DNA, 465 bp, Glycine max
  unsure (1)..(465): unsure at all n locations
cccgcgcgtccggtgatttcagtgagtgatcggtgttcacttgatctcatcataatcgggagcgtgaattgaagaagatgccgatcagaaacatcgccgtcggaaggcctgaagaggcgactcaccccgacacgttgaaggcggctttggctgagttcatctcaaccttcatcttcgtgttcgccggctcaggctccggcatcgcctacaacaagctcaccgacaacggcgctgccacccctgccggcctcatctccgcctccatcgcccatgcattcgccctcttcgtcgccgtctccgtcggcgccaacatctccggcggccacgtcaaccccgccgtcaccttcggcgccttcgtcggcggcaacatcaccttcctccgcggcatcgtctacgtcatcgcccagctcctcggctccatcgtcgccttcctccttctggccttcgtcaccgncttcactgttc

SEQ ID NO: 263319 - DNA, 469 bp, Glycine max
tctgcctgtaagagtgaaaaaaccttctcttttccttctctcaagtctcaagagatttgagtcatggctccaaagaaggacaaggctccaccaccttcctccaagcccgccaaatctggcggtggcaagcagaagaagaagaagtggagcaagggaaagcaaaaggagaaggtgaataacatggtgctgtttgatcagggcacctatgataagctcctttctgaagctcccaaattcaagctcatcactccttccattctttctgatcgtttgaggattaatggatcacttgcaaggaaggctataagagaattgatggctaggggttcaatcaggatggtgtctgcccatgcaagccagcaaatttacaccagggcaacaaacacctaggtgtggaactgatcttagcttacggagtattggtaggaatagtaatgaagtattggtcttttgcactttgggaagcatc

SEQ ID NO: 263320 - DNA, 463 bp, Glycine max
cggacgcgtgggctgagaaaccctccactctcgagtccaaactctcctcctacccaaaggggatgcaagggcatcatcttcttcagcttcctcgattcttttccttgcagcaattgtagctgcttatttctattcatcagaagcagctgtgtccaaaggatcttttgaggacaatttcagcataatgtggtctgaggaccattttactacctctaaagatggacagatctggtatctctcactagacaaagacacaggatgtggatttcaaacaaaacaacgctacagatttgggtggttcagtatgaagctgaagttggtagcaggtgactctgctggtgttgtgacagcttattatatgtgctcagaaaatggtgcgggaccagaaagagatgagcttgattttgagtttttggggaacagaacaggagagccttatttgattcagactaatgtatacaag

SEQ ID NO: 263321 - DNA, 449 bp, Glycine max
cttgtccttctcaatcttgtaattctatttcctccaccataatgctgcgcaagcttgtgtcagggccacgcaagaacaagcctggcacagttcccgttcacctcaacgtctatgatctcaccccaatcaacggctatgcctattggcttggccttggagtctaccattctggggttcaagttcatggattggaatatggttttggtgcgcacgagcacgacacaacggggattttcgaagtccaacccaaacactgccctgggttcactttcagaaagtcaattttcatcggaacaacagatctgggtccgaaggatgttcgagcattcatggagaagctggctcaggattactccggcaacacctatcatctcatttccaagaattgcaaccatttctgtaacgatgtttgtctcaaattgaccggaaagtcaatccctcgttgggtc

SEQ ID NO: 263322 - DNA, 290 bp, Glycine max
gattcccgggctcgacccactcgtccgaagaatcaaagaaaggggtggtggctgcttcgaaagcttaataatttgtttggttccatgacatcatagttatcgcagcagcaaactaacaaattactcatatcatataataagatggcccgttctctctcgcaagccaaacgtattggtgtccttgttgctcaatctatctccctaattcccgttcatcggctaggttacgcagtggcatccgatgtatcggtaagagttggattgggtaatattgtgcgaacgaatggaat

SEQ ID NO: 263323 - DNA, 450 bp, Glycine max
acgcacgcgtccgtcggcctgtaagagtgaaaaaaccttcttttttccttctctcaagtctcaagagatttggtcatgggtccaaagaaggacaaggctccaccaccttcctccaagcccgccaaatctggcggtggcaagcagaagaagaagaagtggagcaagggaaagcaaaaggagaaggtgaataacatggtgctgtttgatcagggcacctatgataagctcctttctgaagctcccaaattcaagctcatcactccttccattctttctgatcgtttgaggattaatggatcacttgcaaggaaggctataagagaattgatggctaggggttcaatcaggatggtgtctgcccatgcaagccagccaaattacaccagggcaacatacacctaggtgtggaactgatcttaagctacggaatattgttaggaatagtaatga

SEQ ID NO: 263324 - DNA, 456 bp, Glycine max
cctaaacaactctttctcttcttccttcgctcgttgttctccctcgcgtagatcgacaatggcggagacagagacgtttgctttccaggctgagatcaaccagctcctcagtctcatcatcaacaccttctactccaacaaggagattttccttcgtgaactcatcagcaacgcctccgatgctttggacaagattcgatttgagagtttgacagataagagcaagctcgatgctcagccagagttgttcattcatattattccagacaagactaacaatacactgaccattgttgacagtggtattggcatgaccaaagctgatttggtgaacaacttgggtacaattgctagatctggtaccaaggaattcatggaagccttggctgctggtgctgatgttagtatgattggacagtttggtgtggggttctactctgcatatctggctgctga

SEQ ID NO: 263325 - DNA, 394 bp, Glycine max
ctcgtccttctcaatcttgtttttctatttccttcaccataatgctgcacaggcttcttgaaagtctacccaagaacaagcctgtcacacataccgttcacctcaacacctatgatctcacccaaatcaactgctatacctattgactagaccacatagtctaccattctgaggttcaagttcatggattggactatgagccttgacgcgcacaagcacaactcaaccaagatttctcactttcaacacatacactgcacctgcatcacttatacaaactcaattttcatcgccacatcagatctcgataacaaagatgcttgaccattcatcgaaaaacttcctctaaattacttcatcaacacctatcatctcatttccaacaatttccacc

SEQ ID NO: 263326 - DNA, 249 bp, Glycine max
acaaaaacgtttgctttccaagctgatatcaaccaactttctcattctcatcatcaacaccttctactccaacaaggaaattttccttcaagaacttatcaacaacacctcctattctttgtacaatattcaattttatagtttgacatataataacaatcttttatcttaaccacatctgttcattcatataattccatacaagactaacaatacacttaccattgtttacagtaatattggcattac

SEQ ID NO: 263327 - DNA, 402 bp, Glycine max
cccacgcgtccggtgaagttggatcattcctccgcggaatcgatgtgggccgtttgccttctgtggttgattgcgaaaaggaagcaggtgtttaatttccaaccagcacggttcttaccttcagtgaaaaccccaccaggggggaacccatggaggaggaaaccgccccaaccgaacctggttcacaaggcttattcacggccaaaaaaatatcctgaaacctctagaaagaaccttacactctccaaagatcagtcaattgccctggaagagagcttcaaagaacacaacactcttaaccccgtaagtaaacgtacacatgccaattaattttttttgtcctgtatcagagacatagtatcctctgatctactggatcatatattaatctcactcacgatg

SEQ ID NO: 263328 - DNA, 390 bp, Glycine max
cccacgcgtccggttgaggattgagtaacggagatgtagcagagtcacccggctagtcaacaggactttccgttttattcatttcacttttgaatcttcgaatcacatccgatgggtagcagagggcacactctcttggaggttggacccgacgacggggttgccgtcatcaccatcgtcaaccctcccgttaattcactctcatttgacgtattgcgcagtttaaaggagagttttgatcaggcgatacagagagatgatgtcaaggcaattgttgttacaggtgcaaagggaaaattttctggaggtttggatatttctgcatttggtggtattcaagaggcaaaagagcgtccaaaacctggttgggtatcagtagaaatcatcact

SEQ ID NO: 263329 - DNA, 421 bp, Glycine max
  unsure (1)..(421): unsure at all n locations
cgcgtcgctgctccgtaccagtttcactgcataaatttgagagaaaactctgcaaacatgttggtttatcaggacctccttacaggtgatgagcttctctcggactccttccgttacaatgaaattgagaatggaatgctgtgggaagttgaggggaagtgggttgttaagggagcagttgatgttgacattggtgcaaacccttctgctgagggtggagaagatgagggagtcgatgacgcagctgttaaggttgttgacattgttgatacattcagacttcaggagcaacccgcttttgataagaaacagtttgttaccttcatgaagaggtttatcaagaatttgactcccaagctcgatgcagagaaacangagttgtttaagaagcacattgagggagcaacttaatacctgctct

SEQ ID NO: 263330 - DNA, 418 bp, Glycine max
gttcttctaccttattttctttccctagtcaaggagattcatctctgcagcaggttgttttagaaaagaaaaaatgctgaagatttgctgcattggggctggatatgtggggggtccaacaatggcagtcattgcactgaaatgcccctcaattgaagtggctgttgttgacatctctaaatccaggattgcagcatggaacagtgaccagctccctatctatgagccaggccttgatgatgtggtgaagcaatgtcgtggcaagaaccttttcttcagcactgatgttgagaaacatgtctatgaggccgacatagtgttcgtctccgtcaacaccccgacaaaaactcgtggtcttggagccggaaaggctgcagatttgacttactgggagagtgcaacacgcatgattgctgat

SEQ ID NO: 263331 - DNA, 371 bp, Glycine max
ttttatctttattccactgtaatagaacatgagcatataaatggataccctttatatgatctatctttatattatctataaagggtaaagatatccgatgtgaatctatttgtttagttttctatcggtatgtatataggtgaataatccaacatgcctttttgtgaagtaaaaaaactaccctcgatccatgcctcaaaagggttgataataagtaaaaaaaatcaatgaattcatgataaaacccttctgcgtttgtttattataaatttttttgtcaataaagggatcaaggggttgggggatcaaatggtgaagttcttttgttggtaaattggaggattagaaacatgactattgctttccaatta

SEQ ID NO: 263332 - DNA, 382 bp, Glycine max
  unsure (1)..(382): unsure at all n locations
cctaaacaactctttctcttcttccttcgctcgttgttctccctcgcgtagatcgacaatggcggagacagagacgtttgctttccaggctgagatcaaccagctcctcagtctcatcatcaacaccttctactccaacaaggagattttccttcgtgaactcatcagcaacgcctccgatgctttggacaagattcgatttgagagtttgacagataagagcaagctcgatgctcagccagagttgttcattcatattattccagacaagactaacaatacactgaccattgttgacagtggtattggcatgaccaaagctgatttggtgaacaacttgggtacatttgctagatctggtaccaangatttcatggaagcc

SEQ ID NO: 263333 - DNA, 403 bp, Glycine max
  unsure (1)..(403): unsure at all n locations
cccacgcgtccgtcaagcattgcatccctcttgatttgtagtttgttttgtgcttgagataaaagttctgccaaatcaagaggggttttaagatcatagtgtgtgttttgcaacaatggctaagttctttgctgctatgatcttggcactctttgccatttccatacttcaaacagtggtaatggctgctaatgaacaaggaggccacttgtatgacaacaagagcaaatatggaagtggaagtgtcaagagttaccaatgcccatcacaatgctcgaggagatgtagccagacccaataccacaagccctgcatgtttttctgtcagaagtgctgcangacatgcctgtgtgtgcccccggggtattatggtaataaagctgtgtgcccttgctacaacaac

SEQ ID NO: 263334 - DNA, 381 bp, Glycine max
  unsure (1)..(381): unsure at all n locations
cgccatgctgttcttggagctacaaactctcgtcctgatttgatattgactggacaccaagatgatggagaatttgctcttgcaatgtgcccaactgaaccctatgttctttcaggaggaaaggacaaaacagtggtgttgtggagtattgaagaccatataacatctgctgccacagactccaaatctggtgggtcaattatcaaacaaaactctaaatctggagaaggcaatgataaaactgctgatggccctactgttggaccacgaggcatttattgtgggcatgaggatacagttgaagatgtgactttctgcccatctagtgcacaggagttctgtagtgttggagatgattctngtctcatcttatgggatgca

SEQ ID NO: 263335 - DNA, 449 bp, Glycine max
cttctccttctcaatcttgtaattctatttcctccaccataatgctgcgcaagcttgtgtgagggccacgcaagaacaagcctggcacagttcccgttcacctcaacgtctatgatctcaccccaatcaacggctatgcctattggcttggccttggagtctaccattctggggttcaagttcatggattggaatatggttttggtgcgcacgagcacgacacaacggggattttcgaagtccaacccaaacactgccctgggttcactttcagaaagtcaattttcatcggaacaacagatctgggtccgaaggatgttcgagcattcatggagaagctggctcaggattactccggcaacacctatcatctcatttccaagaattgcaaccatttctgtaacgatgtttgtctcaaattgaccggaaagtcaatccctcgttgggtc

SEQ ID NO: 263336 - DNA, 459 bp, Glycine max
cggacgcgtgggctgagaaaccctccactctctagtccaaactctcctcctacccaaaatggatgcaagggcatcatcttcttcagcttcctcgattcttttccttgcagcaattgtagctgcttatttctattcatcagaagcagctgtgtccaaaggatcttttgaggacaatttcagcataatgtggtctgaggaccattttactacctctaaagatggacagatctggtatctctcactagacaaagacacaggatgtggatttcaaacaaaacaacgctacagatttgggtggttcagtatgaagctgaagttggtagcaggtgactctgctggtgttgtgacagcttattatatgtgctcagaaaatggtgcgggaccagaaagagatgagcttgattttgagtttttggggaacagaacaggagagccttatttgattcagactaatgtata

SEQ ID NO: 263337 - DNA, 399 bp, Glycine max
  unsure (1)..(399): unsure at all n locations
tatttcttcctatctctgtctcattaccccttcattgagtccactttactcacgaatcttctaaacttcaacaacaccctccaaccatatttaatgatgatttttcatatntacctcccattttatttatataaaatataattttatatataattttttttttcatatatcctctcctatatttaaatacatactaccccaattcctctatttttaaaatctcttttttcttaaatatattaaaatcacctaaatttaatttttctttatatcttttcattccatacctatcacactcctcaatttttccccattccacccattttttttttcacaataaacccaaatcttaatattattccaaactatctttattatctccatattatatacaaattt

SEQ ID NO: 263338 - DNA, 437 bp, Glycine max
ggtcctgaattcccgggtcgaccgacgcgtccgacgcttgcatgctattgcttcctatctcttgctcatgaccccttcatggagtccactttgctcaggagctactagtcttcaacaacaccctccaaccagagttaatgaggagtgtgcatgtgtaccgccgaggggatggagagaaaagggaagttgagagagagtttgtgttttcagagagcggctcctatggggaaatgcaggctaccccaattcctggattggtaaaatctcgtgtttcttaaatgtgtgaagggcaccgaaatggagtgtggctttgtgtctttgcgttccatgccgatcacactcctcaattttgccgcattccaccggttttgttggtcacaagaaacccaaagcttaagatgattccaaacttgcttgatgatctccatgtgatatac

SEQ ID NO: 263339 - DNA, 461 bp, Glycine max
caaagacatccttctcctggatgtggctcccctcactctcggaattgaaactgttggtggagtgatgacaaagttgattcccagaaacactgttatcccaaccaagaaatctcaggtgttcaccacctatcaggaccagcagactacagtctccattcaggttttcgaaggcgagaggagtctcacaaaggattgccgccttcttgggaaatttgatctgtctggaattcctccagccccaaggggtacgcctcaaattgaagtgaccttcgaagttgatgccaacggcattctaaatgtgaaggcagaagacaagggcactggtaaatcagaaaagatcaccattacaaacgaaaagggacgtcttagccaggaagaaattgagagaatggttcgcgaagcagaggagtttgcagaggaagacaagaaggtgaaggagaggatcgatgctcgcaacagtc

SEQ ID NO: 263340 - DNA, 340 bp, Glycine max
ggctagttttgattgcttgatgaaaacctatttattcctgacaccagaattctggaaggatagtcgcttctccaaatctccattccaagagtacacagatctactggcaaaaccaacaggaaagactctaatcttggaggaggaaagggtggatgcttgatttgctagttttgctttatggatgttttaggaactttattactttacatactttgttggttctgtgctttacttttggttttgatagacggtatgtctctgtatgcattttgattgtttccaagttttaattgactgcaaaaaaaaaaaaccaaaaacaaattataaaataacatctaac

SEQ ID NO: 263341 - DNA, 204 bp, Glycine max
attaacgggtcgaccacgcgtccgaaaaatgtaattttcagcactgtccaggaaatttaaggattgtaattctttatgcctcattttagtattaaaaaaaaaaaaaaaaaaaaaaaaaaaaaaaaaaaaaaaaaaaaaaaaaaaaaaaaaaaattaaaaaaaaaaataaaaaataaaaaaaaaaaaaaaaaaagcctcccattt

SEQ ID NO: 263342 - DNA, 213 bp, Glycine max
aaaaaaaacaacaaccccaaaccaccaaaaaaaaaacaaaaaaaaaaaaaaaaaaaaacacaacacacactaaaaaaaccaaacaaaaaatacacatacatcccaccacaaaacaccacaaaaaacacacacaaaatcaaaacaacaaaccaccaaaaacaacaaccaaaaaacaaaaacccaaacaaaacccaacaaaaacaccaaacaaaa

SEQ ID NO: 263343 - DNA, 488 bp, Glycine max
  unsure (1)..(488): unsure at all n locations
aattcccgggtcgagccacgcgtccgattgtatcttgttattttttataaaagggaggccaatgccttatattgtaattatacgtgnggatgttgctccagcaaaatcaccccacaacaaatgtttacattcataaggtggttcatcaaaccaatgtattattccccaggataactgtcatcaacatttaatcagcagcataattgtcttaaaataaaatcttctttgtcttcaaagatacactccaggtttaaactattcatttaaagacaatccaaatggtgacattctcgtctgggtggtgtagttggttatcacgctagtctcacacactagaggtccccggttcgaacccgggctcagacatttcaatattttgtagcccatgtctgtaaattactttgagatatgtttttaggtttttttttaatgctttgtaataaaattttacagattccacaatcaangaggacatgggttgagtatgt

SEQ ID NO: 263344 - DNA, 469 bp, Glycine max
  unsure (1)..(469): unsure at all n locations
acgaacagatcaatgtggagtacaatgtttcgtacgtttatcatgcgatgtttgcctactgggagagggacaatgttgcgctcaagggtcttgccaagtttttcaaggagtcaagcgaggaggaaagggagcatgctgagaaattgatggaatatcagaacaagcgaggtggaaaggtgaagttacaatctatagtgatgcctcttactgaanttgaccatgaggaaaagggagatgcgctatatgcaatggaacttgccctgtcgttggagaagctgacaaatgaaaagctgcttaacttgcacagtgttgcctcaaagaacaatgatgtgcaattggcagattttattgaaagcgagtttttgggtgaacaggtggaagccataaaaaaaatctctgaatacgttgctcaactcagaagagttggcaaaggacatggtgtgtggcactttgatcagatgctactcca

SEQ ID NO: 263345 - DNA, 461 bp, Glycine max
  unsure (1)..(461): unsure at all n locations
gttgtgtgcaacccattggggaagtctggagtgtgccctcatccagcaatttatgatattggctgttgggtcactagctaattcaaccccatacttgggaggagtgcttctgctgattgtttctgcctggctagcagcggcaaaatccttggatacccaatttactgcattgcgtaaagaggaagaactcgagaaagagatggaacgagcagccgccgtcaagataccagtggtggctgagactgagagtggaaatggttctcttgcaactggttcaccactgaatccatcctcaggtgactcctcaagcagtccatctgaagcctcaactcctcgcaattaaaatgtgccttctttctgtgagaaattgcctcacagaatgagcaaatagagctcttttgagagcagtgttaggtgaaactatnntgtgtaggtttatatataagctcttataggataag

SEQ ID NO: 263346 - DNA, 474 bp, Glycine max
tctgcctgtaagagtgaaaaaaccttctcttttccttctctcaagtctcaagagatttcatcagggctccaaagaaggacaaggctccaccaccttcctccaagcccgccaaatctggcggtggcaagcagaagaagaagaagtggagcaagggaaagcaaaaggagaaggtgaataacatggtgctgtttgatcagggcacctatgataagctcctttctgaagctcccaaattcaagctcatcactccttccattctttctgatcgtttgaggattaatggatcacttgcaaggaaggctataagagaattgatggctaggggttcaatcaggatggtgtctgcccatgcaagccagcaaatttacaccagggcaacaaacacctaggtgtggaactgatcttagcttacggagtattggtaggaatagtaatgaagtattggtcttttgcactttgggaagcatctcatat

SEQ ID NO: 263347 - DNA, 414 bp, Glycine max
gaggagatatatgtacctaaacgaagagatcttgaaagagaatccaaacatgtgtgcttacatggcaccttctttggatgctaggcaagacatggtggtggtagaggtaccaaagctagggaaagaggctgcagtaaaggccataaaggagtggggccagccaaagtcaaagattacccacttgatcttctgcaccaccagtggtgttgacatgcctggtgctgattaccaactgaccaaacaattgggccttcgcccctatgtgaagaggtatatgatgtaccaacaaggttgctttgcaggtggcacggttcttcgtttggccaaagatttggctgagaacaacaaaggtgcacgtgtgcttgttgtctgttctgagatcactgcagtcacatttcgtggaccaagtgacac

SEQ ID NO: 263348 - DNA, 442 bp, Glycine max
  unsure (1)..(442): unsure at all n locations
attgctgctgtttgcctattggtgtactttgttgtctctaccctgctggatgcctcatctagcagtngccaaaaatcagatgaagagcagaaggaggcagaactagcagtttctgaattttctggaaatggtgctgggatactatctgctgctagcacagttgccagtacttttctcttagtttttgttgctgaatggggcgacaagtcatttttctccacaattgcccttgcagcagcttcttctccccttggagtcatagctggagcactggctggtcatggtgttgcaactttgctagctgtacttgggggttctttacttgggacgtatttgtcagagaaggttattgcctacatcggaggtgttctctttctcgtctttgccgcaataaccttatttgaaattgtgcaatangggttaaaagaaatgcaatataatc

SEQ ID NO: 263349 - DNA, 453 bp, Glycine max
cgcaccagtttcaccgcacgaatatcttgttttttggagcgatccgagaaaaactctgtaagatgttggtttaccaggacctccttacaggtgatgagcttctctctgactccttccgttacaaggaaattgagaatggaatgctgtgggaagttgaggggaagtgggttgttaaaggagcagttgatgtagacattggtgcaaacccttctgctgagggtggaggagaagatgagggagttgatgatgcagctgttaaggttgttgacattgttgacacattcagacttcaggagcaacccgcattcgataagaagcagtttgttaccttcatgaagaggtttatcaagaatttgactcccaagctcgatgcagagcaacaggagttgtttaagaagcacatcgagggagcaactaaatacctgctctctaagattaaagatttccaatttt

SEQ ID NO: 263350 - DNA, 321 bp, Glycine max
attaccgggtcgaggcgggcgtccgcttgaggatcccaacactttcggtaacaggtgtcacaggatgctgaagcttggactgagcattgatgaatattctagtgaagcagatgctgacatgcctcctcttgaggacgctgatgcagatgctgagggtagcaagatggaagaagttgattaaatctgacttaattgcctgttacgtttttagaaacaatgattggagaaacagtctttttactatgttctatgttttttgaattttcgaaattttggaacgttggctagttaggtgccgtatgtagtagtttctttatggta

SEQ ID NO: 263351 - DNA, 437 bp, Glycine max
ggaactttggatatctatagcgaaagcgtgactctcaccaaaaaccgaactgttcccagatctctgtcgcactcttccaacaatcgaaatccaaaaccctaccgacaccacactcaatcgaaattcttcattctcttctcatcgatggggcagaagtctctgatctacgcgttcgtgtcgcggtgaacagtgattctcgcggagtacaccgaattcagcggaaacttcaactccatcgccttccagtgccttcagaagctccctgccaccaacaacaagttcacctacaattgcgacgcacacaccttcaattacctcgtcgacaatggctacacatattgtgttgttgcagatgaatcaattggaagacagttacccattgcttttctagagcgtgtcaaagatgaatctgtgtcaaaatatggtggtggaaaggc

SEQ ID NO: 263352 - DNA, 408 bp, Glycine max
cctggcaatactcaattgctttttaattcatgtgatgattggacttcaaatgttcttcccaatggctgtgttttctttggactaccagcatctcccgacgctgctccaagtggtggttatataccaccacaggtgctcatttctgaggtgcttccctatgtaaagcaagcttccaactatggaggagttatgctgtgggacaggtaccatgatgttttaaattatcacagcgatcagataaaggattatgttccaaaatatgcaatgcggtttgtgaccgcagtttccgacgctatttatgagagtgtctctgcagctacgcaccgcatcttacagaagaaaccatattagaaatatggggagccgtacgtgcaaactatttatcagctatctatgcatgtgtccgtc

SEQ ID NO: 263353 - DNA, 453 bp, Glycine max
atttacaacaacaatggcttctgtgcctcaaccaaaaatctcccttctaaccttattcttcttctcttccttcaccatcattgcgcatgcaattgttcctcaaaacgaaaccttcaaatttgagaactcaggtgaacttggaccctacatcgttgagtacggtgcagattacagaatgataagcatcttcaactctccattccaagttggtttctacaacaccaccccaaatgccttcactctagctttgcgtgtagggctccaacgctcggagcagctatttcgttgggtttgggaggccaacagggccaacccagttggagaaaatgccactttttcacttggcactgatgggaaccttgtgttggcagatgctgatggcagaattgcatggcaaactaacactgccaacaagggtgttgtggccttcaggcttctttcaaatggtaacat

SEQ ID NO: 263354 - DNA, 404 bp, Glycine max
cccacgcgtccggtgatttcagtgagtgatcgtgtgttcacttgatctcatcataatcgtcagcgggcgttgaagaagatgccgatcagaaacatcgccgtcggaaggcctgaagaggcgactcaccccgacacgttgaaggcggctttggctgagttcatctcaaccttcatcttcgtgttcgccggctcaggctccggcatcgcctacaacaagctcaccgacaacggcgctgccacccctgccggcctcatctccgcctacatcgcccatgcattcgccctcttcgtcgccgtcttcgtcggcgccaacatctccggcggccacgtcaaccctcgccgtaccttcggcgccttcgtcggcggcaacaacacctttctccgcggcatcgtctacgtcatcgc

SEQ ID NO: 263355 - DNA, 438 bp, Glycine max
gccagactgggttaagcaaattgctttaaaatttttgaagccagataagaaaactgctgacgtggttggaaatacaaaaatgaaggccagcaccaatgttaggcatattgttcttccttgtactagttctgccagggcccaacttatcccagatattattcgctgttatagcagtggaggccggacaattgtatttaccgagacaaaagaatgtgcttctcagcttgcagggatcttgaatggagcaaaagctctccatggtgacatacagcaatcaacacgtgaggttactctgtctggctttaagtctgggaaattcatgacattagttgccacaaatgtggcagctcgaggtcttgatatcaatgatgttcagttaattatccagtgtgaacccccacgagatgtagaagcctatatccatcgttctggacgcac

SEQ ID NO: 263356 - DNA, 478 bp, Glycine max
aaaaaatgggttcttcttcttctatgtggacggtgtgtgtgattttggcatcactggcctctgcagcactctgtgccaacccacgcaggccagtggatgtacaatttggccgaaactacgtgcccacatgggcctttgatcacatcaaatatttcaatggtggttctgacattcagcttcatcttgacaagtacactggtactggcttccagtccaaagggtcttacttgtttggtcacttcagcatgtacataaagatggttcctggagattctgctggcacagtcactgctttctatttatcttcccaaaacgcggagcatgatgagatagactttgagttcttggggaacagaacaggacaaccttacattctgcaaacaaatgtgttcaccggaggcaagggtgatagagagcaaagaatctatctctggtttgatcccacgaaagaataccacagatacttcattctctggaa

SEQ ID NO: 263357 - DNA, 445 bp, Glycine max
  unsure (1)..(445): unsure at all n locations
cccacgcgtccggataaattgtctcactccgacatgattgctgtcctctgggaaatgatagttanggggaccgacacggtggcggttttgattgagtggatactggcgaggatggtgcttcatccggaggtgcaaaggaaggtacaagaggagttggacgcggtggttaggggtggcgctttgacggaggaggtcgtggcggcgacggcgtatcttgcggcggtggtgaaagaggttctgaggctgcacccgccgggcccgcttctctcgtgggcccgcttggccatcactgatacgaccattgatgggtatcacgtgcctgcggngaccaccgctatggttaatatgtgggccatatcaagggacccggaagtgtggctggacccacttgagttcaaacccgaaaggttcatgggtctggaaaaacaggtttctggtttcgggt

SEQ ID NO: 263358 - DNA, 332 bp, Glycine max
gtccgcccaggcgtccggactgcccaagatgtatttacaatgttacggtgcgggcaaaaaaccatgatctttgtgatcaacaatggtggatacaccatcgaggttgaaattcatgatgggccgtacaatgtgattaagaactggaattacactgggttgattgatgcaatccacaatggtgaagggaaatgctggactgccaaagtgttctgtgaagaggagctagttgaagcaattgccacagccacaggacccaagaaagactccttatgcttcattgaggtgattgttcataaggatgacaccagtaaagaattgcttgaatggggctc

SEQ ID NO: 263359 - DNA, 456 bp, Glycine max
tgttgacctcacagtgaggctggagaaggaagcctcctacgatgaaattaaaaatgctatgaaggaggaatcagagggcaagttgaagggaattcttggttacactgaagatgatgtggtctccaccgactttgtgggcgatagcagatcaagtatttttgatgcaaaggctggaattgcattgaataagaactttgtgaagcttgtctcttggtatgacaacgagtggggatacagctcacgtgtcattgacctgcttgtattcgttgccaagaagtctttttaaggttgtactgaaaaaaaagtagcttgtctagacattatgtgctggtgtctagctgcgatttagtgtcttcttgcttgggcagaaatgagaagtatgaataaatcggtttcgggaaccggtgttgttaccctgttaagagcattaagcttttttttggtgtctcttctgtg

SEQ ID NO: 263360 - DNA, 358 bp, Glycine max
cgacgcacgcgtccgcccaggcctccggacttcccaagatgtatcttcaatgtttcagtgcgggcaaaaaacctgatctttgtgatcaacaatgggggatacaccatccatgtttaaactcatgatgatccgtacaatatgatttataactgcaattacactgcgttgattgatgcaatccacactggtgtagggaaatgctagactgccaagaagttcttttaagaggatctcattgaatcaattgccacatccacaggacccaatatagactccttatgcttcattgaggttattgttcataatgatgacacccagtaagaatttcttgaatggatctcaaggttttctgcttcca

SEQ ID NO: 263361 - DNA, 254 bp, Glycine max
gggcaaaaaaccatgatctttgtgatcatcaatggtggatacaccatctaggttgaaattcatgatgggccgtacaatgtgattaagaactggaattacacttggtttattgatgcaatccacaattgtgaatggaaatgctggacttccaaagtgttctgtgaaaaggagctagtttaaacaattgccacagccacaagacccaataaagactccttatgcttcattgaagttattgttcataaagatgacac

SEQ ID NO: 263362 - DNA, 446 bp, Glycine max
cccacgcgtccggactgcccaagatgtatcgacaatgttacggtgcgggcaaaaaaccatgatctttgtgatcaacaatggtggatacaccatcgaggttgaaattcatgatgggccgtacaatgtgattaagaactggaattacactgggttgattgatgcaatccacaatggtgaagggaaatgctggactgccaaggtgttctgtgaagaggagctagttgaagcaattgccacagccacaggacccaagaaagactccttatgcttcattgaggtgattgttcataaggatgacaccagtaaagaattgcttgaatggggctcaagggtttctgctgccaatagccgtccttccaatcctcagtaatcttcaaaatttatcctatgactaaattgctgcaattgccctttaactttatgaaagtgagaatcatttgagatga

SEQ ID NO: 263363 - DNA, 440 bp, Glycine max
cgcagattcaaaggaggatctctcttgcgttttctctaggttttcgctatggcgtcgaagggaattttgaaggagcttaaggatttgcagaaggatcctccaacatcttgcagtgccggtcctgttgttgctgaagatatgttccattggcaagctacaattatgggtcctccagacagtccctatgcaggaggtgttttcctagtgaccattcatttccctccagattatccctttaagccacccaaggttgcattcaggacaaaggttttccacccaaatataaatagcaatggaagcatttgccttgatatattgaaggagcagtggagccctgctctaaccatttccaaagtgttgctctcaatttggtccctattgacggatccaaatcctgatgatcctttggtccctgaaattgcacacatgtacaagacaga

SEQ ID NO: 263364 - DNA, 243 bp, Glycine max
ggcaaaaaaccatgatctttgtgatcaacaatggtggatacaccatcgatgttgaaattcatgatgggccgtacaatgtgattaataactggaattacactgggttgattgatgcaatccacaatggttaaaggaaatgcttgactgccaaggtgttctgttaaaaggagctagttgaagcaatttccacatccacaagacccaataaagactccttatgcttcattgaagtgattgttcata

SEQ ID NO: 263365 - DNA, 376 bp, Glycine max
  unsure (1)..(376): unsure at all n locations
atacccgggccgacgcacgcgtccgagacggcagagcanagatctagcgnannctttcgctctttctttcactgtcagagagccagatccattggcttcccagccaacggcgcctctgcggcccagcccctaaacttcctcatctacggccgcacgggctggattggcggcctcctcggctccctctgccgggcccagggcatctccttccattacggctcgggccgcctcgagaaccgggcctccctcgaaaccgacatagccctcctcaagccctcccacgtcttcaacgccgccggcgtcacgggccgccccaacgtcgactggtgcgagtcccacaaagtccagaccatccgaaccaacgtcgtcggaaccc

SEQ ID NO: 263366 - DNA, 466 bp, Glycine max
cttgaatcttcgttatccttctttttttctccttgaactcgaatattcactatggcagatgagggggttctgctagatttctggccaagtccatttgggatgagggtcaggattgcacttgctgaaaagggtatcaaatatgagtccaaagaagaggacttgcagaacaagagccctttgctcctcaaaatgaacccggttcacaagaaaatcccggttctcatccacaatggcaaacccatttgtgaatctctcgttgctgttcagtacattgaggaggtctggaatgacagaaatcccttgttgccttctgacccttaccagagagctcaggctagattctgggctgactttgttgacaataagatatttgatcttggaagaaagatttggacatcaaagggagaagaaaaagaagctgccaaaaaggagttcatagaggcccttaaattattggaggaacagc

SEQ ID NO: 263367 - DNA, 289 bp, Glycine max
  unsure (1)..(289): unsure at all n locations
acccacgcctccaatttaatcttctttatccttctttttttctcctataactcaaatattcactataacagaaaaccgacaatttttataaaatcttnccacccccatttatcatcattttcattattacactttcttaaaattctatcaaatattattccaaataacattacttccacaacaaaatcccttttctcctcaaaatcaaccctcttcacaataaaatcccatatctcatccacaatctcaaacccatttcttaatctctcttttcttttcacttcattca

SEQ ID NO: 263368 - DNA, 387 bp, Glycine max
gatttggatgctaatttttttgatcagccagaaatgcttggagagcccattgcaactctgggtttgctgcactatgaaggtcaagtttcggatcccttgaaaggattatatggagctggagctcatactgactatggtttaattacactgttagcaacagatgatgtctcgggtcttcaaatatgcaaagatagggatgctaaacctcagaaatgggaggatgtagcaccattgaagggagcattcatagtgaatcttggtgacatgctggagcgctggagcaactgcgtttttaagtccacactgcacagagttctaagaaacggtcaaggaagatattctattgcatacttcttggagcccaatcatgattgtctagtggagtgc

SEQ ID NO: 263369 - DNA, 294 bp, Glycine max
  unsure (1)..(294): unsure at all n locations
aagtactgaagatggcaanttgaaacttttaaatgaacagcagacaactatttataagagagctgttgacaagagctatcacttgaagatgaaagcatctaagttcattttcagtgaaataagccaaaagtttcccatcatgcccttctctgcaaggtctttagaagagaaaagagctcgtttgggtttagtggaatgtgtgaatcatgatctcctgcaaccttattctgttctgcatgaaaagccttgtgattatgtatcacatatcaaattcactgtcttgctaatgcccaa

SEQ ID NO: 263370 - DNA, 462 bp, Glycine max
ctacctgtcaagtttttgaagtatagagatgttatagacattcctatttacctcagagtcagttgacgatggacaccctgacaagctctgtgaccaaatctctgatgctgtcctcgacgcttgcctcgaacaggacccagacagcaaggttgcctgcgaaacatgcaccaaaaccaacttggtcatggtcttcggagaaatcacgaccaaggccaatgttgactacgagaagatagtgcgtgacacctgcaggaacatcggctttgtctcaaacgatgtgggactggatgccgacaactgcaaggtcctcgtcaacattgagcagcagagccctgatattgctcagggtgtacacggccacctcaccaaaaaacctgaagaaattggtgctggtgaccaaggtcacatgtttggctatgccactgatgaaacccctgaattgataccattgagccatgttct

SEQ ID NO: 263371 - DNA, 466 bp, Glycine max
cccacgcgtccgcgcgtcgctgctccgtaccagtttcactgcataaatttgagagaaaactctggaaacatgttggtttatcaggacctccttacaggtgatgagcttctctcggactccttccgttacaatgaaattgagaatggaatgctgtgggaagttgaggggaagtgggttgttaagggagcagttgatgttgacattggtgcaaacccttctgctgagggtggagaagatgagggagtcgatgacgcagctgttaaggttgttgacattgttgatacattcagacttcaggagcaacccgcttttgataagaaacagtttgttaccttcatgaagaggtttatcaagaatttgactcccaagctcgatgcagagaaacaagagttgtttaagaagcacattgagggagcaactaaatacctgctctctaagattaaggatttccagttttttgttgggg

SEQ ID NO: 263372 - DNA, 329 bp, Glycine max
  unsure (1)..(329): unsure at all n locations
cgcggcagtttcgccgcacgaatatcttgttttttggatcgatccgagaaaaactcttagacatgtgggtttaccaggacctccttacaggtgatgagcttctctctgactccttccgttacaaggaaattgagaatggaatgctgtgggaagttgaggggaagtgggttgttaaaggagcagttgatgtagacattggtgcaaacccttctgctgaaggtggaggagaagatgagggagttgatgatgcagctgttaaggttgttgacattgttgacacattcagacttcangagcaacccgcattcgataagaagcagtttgttacc

SEQ ID NO: 263373 - DNA, 385 bp, Glycine max
  unsure (1)..(385): unsure at all n locations
tcatcgctaactcgttcatatcaaatatagttttancctttttgctaaaaccctctagatagtatatttttaataataacaaaccataccccaaatcacatttttaccattttattccttatcccaacatcattatttactatctttctattaataataatgtcgttaattaatttcctttctatatccatcttatttactttaaacaatgaaaacttttctaaatattccctacaatcttctcctatttctttcaacaagtacatttcctaattttcttgaaataattcttttcacttttaaatcatatttcacccattccatatttctaatatcaacaaaattcttttatattattttaataatattttttttacttttaatt

SEQ ID NO: 263374 - DNA, 114 bp, Glycine max
gaaaaaaaaaaaagccttttactttttttcttttgcatgatttgaatcttgaggggaaaagcttcgaattgaggtgttttacccatcaattcaattttaagccgtgccttcttc

SEQ ID NO: 263375 - DNA, 293 bp, Glycine max
caacggtaacgcgtgcatagcacagagagactcagccattgggcgaatacccagagccgggataggggattaagaacaaaccataccccaagtcacggttttgccgacgtgttcctgatcccaacatcaggatttacgatgttggcttgaagaataactgtgtcgatcaatttcctttcttgtccatctggtagtccgacaggaaacgttctagtaggccctgaaaactgctcgtattgcttgcaacaagtacatagccaaatttgctggaaaggatgctttacacttaatag

SEQ ID NO: 263376 - DNA, 458 bp, Glycine max
cccacgcgtccgcggacgcgtgggttgaaaactacccgtttcctccctcgcacggatccaccctgaatctgagattccttcgaattgttaactctctttcagtttcaagttggaaactttttcgattttcgctttctggaggtgtgaattgttgtttgaaagtcacaagcaatggtgaaggacactgcgtattatgacatattaggtgtcaattatgatgcatctgctgcagagatcaagaaagcttattatgtcaaggctagaattgttcaccccgataaaaatcctgaggatcctaaggccgcagaaaactttcagaaacttggtgaggcttaccaggttttaagtgatcctgggaagcgtgcggcatatgatgagcatggaaaggaaggagtaccacaagattccatgatggaccctacaactgtatttggaatgatttttggaagtgaattttt

SEQ ID NO: 263377 - DNA, 464 bp, Glycine max
cccacgcgtccgcccacgcgtccggtgattgattctagttagaacaagatgttgcagctactctgcactgcgattttctccgaaatgcttttgattctcacgctcgtcttcaaaaccccactgagaaaactcgtcatcgtttccctcgatagtgtgaagcgcggtcgcggtcccgtggtggtttccaccgtgggcgccacattgatggtggttctcgcttcgagcctctacagcatggccaagatccagcaacgcaccctcgaggccggcatagtcaaccccaccgaccaagtcctcatgtccaagcacatgctcgaagcttctctcatggggtttctgctgttcctctctctgatgattgatagattgcaccattacataagagagcttcggtcactcaggaagaccatggaagctattaagaaacaaagccgaagttttgaagatggtaaaaatggaaattc

SEQ ID NO: 263378 - DNA, 347 bp, Glycine max
caaccgtaacgcgtgcatagcacagagagactcagtcatggggcgaatacccgagaggtgtgataggcggattaagaacaaaccatacctcaagtcacggttttgccgaggtgttcctgatcccaacatcaggatttacgatgttggcatgaagaataagggtgttgatgacatttcctttctgtgtcacatctggttagttgcgacaaggaaaacgtttctagtgaggccctggatgctgctcgtattgcttgcaacaagttcataggcaaatttgctggaaaggatgctttacacttgatagtccgagtgcaaccatttcatgttcttacgatcaaacagatgct

SEQ ID NO: 263379 - DNA, 366 bp, Glycine max
attgatctcaaggtggaaacacatcagtaatggctcaattgggttaaatccatacagccgctatgcagatgattctgtttggatgattgctgaggcactcaaattgttttttgatcggaatggtaccattttattctctaacaatacaaatttaagtggtacgagatttcaaggacacagggtgggaatgggacttcaagtggcagagaccattatttgacagtgagatagatatggcggtctcatttatacaagaagttgaggggtacaaaatccagtctcatattggtgatcagtgggtgtgggcggcagatcctagtggccagtattcgattaggagtgcctatagtgtgcttagagaggaca

SEQ ID NO: 263380 - DNA, 417 bp, Glycine max
gcgtccgaacgccaacgcgtgcagagcagagagagactcagccatggggcgaagaccggcgagggggtataggcaaattaagaacaaaccataccccaagtcacggttttgccgtggtgttcctgatcccaagatcaggatttacgatgttggtatgaagaagaagggtgttgatgaatttcctttctgtgtccatctggttagttgggagaaggaaaacgtttctagtgaggccctggaagctgctcgtattgcttgcaacaagtacatggccaaatttgctggaaaggatgctttccacttgagagtcaaggtgcacccattccatgttcttaggatcaacaagatgctttcgtgtgcccgaactgataagctccaaactggaataagatgtgcttttggaaagccacagggtac

SEQ ID NO: 263381 - DNA, 278 bp, Glycine max
attacaacaaaatatttcaaatacactcgactacttttaaaaccgaaataccccacatactcacactcatcttcaaaacccctcttaaaaaactcctcatcatcctccctctaaaatctacaatcactcttcaacttccctctcccatcttccacctttcactaccacattcatctttcatctcccttctatcctctacatcatttccaatctccatctactcaccctctaaccccccataatcaaccacacccaccaaatcctcatttccaaacaca

SEQ ID NO: 263382 - DNA, 440 bp, Glycine max
agacagcagagcagagatctagcgtattctctcgctctttctttcactgtcacagagccagatccatgggcttcccagccaacggcgcctctgcggcccagcccctaaacttcctcatctacggccgcacgggctggattggcggcctcctcggctccctctgccgggcccagggcatctccttccattacggctcgggccgcctcgagaaccgggcctacctcgaaaccgacatagccctcctcaagccctcccacgtcttcaacgccgccggcgtcacgggcccgcccaacgtcgactggtgcgagtcccacaaagtcgagaccatccgaaccaacgtcgtcggaaccctcactctcgccgacgtctgccgcgaccacggcctcattctcatcaactacgccaccggttgcattttcgagtacgactccgatcacccc

SEQ ID NO: 263383 - DNA, 452 bp, Glycine max
cccacgcgtccgcccacgcgtccgcccacgcgtccgctgacctaaaggcagcaaaggaaggagcagactacataggaactgtacatcatgaatttcactacactgttcaggatggcatagatgccattgaggatgtgatctatcacattgaaacatatgatgtgacaacaattagagcaagcattcccatgtttcttatgtctcgtaagatcaagtcattgggagtcaaatgggttatatctggagaaggatctgatgagatctttggagggtatctatatttccacaaggcaccaaacaaagaagagtttcatcaagaaacatgccgcaagattaaagcactccacaaatatgattgcttgcgagccaataaatcgacctttgcctggggtctagaagccagagtgccatttttggacaaagattttatcagagttgcaatgaacattgat

SEQ ID NO: 263384 - DNA, 179 bp, Glycine max
  unsure (1)..(179): unsure at all n locations
aaggcaggaaaggaaagaacatactacaaangaactggccatcatgaattacactacactgatcaggatggcatagatgccattgaggatgagatctatcacattgaaacatatgatgtgacaacaattagagcaagcattcccatgtttcttatgtctcgaaagaacaagtcattggg

SEQ ID NO: 263385 - DNA, 466 bp, Glycine max
agaaaacctaagcttagaattagaaacaaagattatgtaagaaaggaaagaattgatcgttgaaaatgcgggtaggaaagaaagcgggagagtccattaaggaaacagctacaaacattggtgcttctgccaaggctggcatggagaagaccaaggccactgtccaagataaggcagaaagaatgacagcacgtgatccggtgcaaaaggagttggcaacccaaaagaaagaggcatagatcaaccactctgagctggacaagcacgcggcgcgtcagcataacacggccgccaaacagtccgccatcacggctgggcacatgggacatggccaccacaccatcggtacctggactggaaccgtcacgtatttcaccaccggggaatatggtcagcccattggtgcccaccagacgtctgcaatgcctggccatggaaccgggcagaccacgggccatgttaccga

SEQ ID NO: 263386 - DNA, 431 bp, Glycine max
cagagtttgagtggacctgtctcagctacgctttaccttggttattcactactcatggccattggaatcatgttgtcaaccggcaccattggcttccttatgtcattctactttgtgcactacttgttctcatcagtaaagatagattgaggttcttgttgtcattgcatattaactatgaaaaaggttgattgatataacttgatcacattgcatagtagggcaacggatgtttaattcattgtctgattttatattgcgatgggatctgcagtttgttctccttctgcctgtttcccaaagtagtgtactcattcaagtattcaactagtgtttgagatcatgtttcaagtattttgttcaagtttctttagaaggttgtaattcaaactctcatctcatttcaatactttagaaaaatgatgttagat

SEQ ID NO: 263387 - DNA, 372 bp, Glycine max
attaccgggtcgagcgacgcgtccgcaaaggcatccttctcctggatgtggctcctttcactctcggaattgaaactgtgggtggaaggatgacttagaagattcccaggaacactgttatcccaaccaagaaatctcaggtgttcaccacctatcaggaccagcagactacagtctccattcaggttttcgaaggctagaggagtcttacaaaggattgccgccttcttgggaaatttgatctgtctggaatttcttcagccccaaggggtacgcctcaaattgaagtgaccttcgaagttgatgccaacggcattctatatgtgaaggcataagacaagggcactggtaaatcataaaagatcaccatta

SEQ ID NO: 263388 - DNA, 423 bp, Glycine max
caaagacatccttctcctggatgtggctcccttcactctcggaattgaaactgtgggtggagtgatgacaaagttgattcccagaaacactgttatcccaaccaagaaatctcaggtgttcaccacctatcaggaccagcagactacagtctccattcaggttttcgaaggcgagaggagtctcacaaaggattgccgccttcttggaaaattgatctgtctgaaattcctcagccccaaaggggtccccctaaaatggaattgaccttcaaagttaatcccaccggattcttaaatttaaagccgaagaacagggcccttggtaaatcaaaaagatccacatttccaaccaaaagggacctcttaacccagaagaaattgaaaaaattgttccccaaaccaaaggattttgcagaggaagac

SEQ ID NO: 263389 - DNA, 354 bp, Glycine max
caaaggcatccttctcctggatttttctccttttactctcggaattgaaactgggggtgtatgataacttgtagattcccaggaacactgttatcccaaccaagaaatctcaggtgttcaccacctatcatgaccagcagactacagtctccattcatgttttcgaaggctataagagtctcacaaaggatttccgccttctttggaaatttgatctgtctggaattccttcaaccccaaagggtactcctcaaattgaagtgaccttctaaatttattccaactgcattctaaatgttaaggcataatacaagggcacttgttaatcaaaaaatatcaccattacaaaccaaa

SEQ ID NO: 263390 - DNA, 226 bp, Glycine max
  unsure (1)..(226): unsure at all n locations
attactattcatgatatnttggactctttagaaactttttaaagccaaacaagacctaccattgaaatccatttttattgaccaattagaattccccaccattaccaatacttgtctcaaaaaatccaattttcatacattataaaaactttcaaataacattcaaaaacaccttctcaaaattgaacattttcgcgtagaatatgtcaaatatatattgtacttt

SEQ ID NO: 263391 - DNA, 472 bp, Glycine max
aattcccggttcgagccactcgtccgctttaagttataaaacaatcaacacatagattctatgcaccttattactattcatgatatattgtctaatgagaaactaatgaaaaagaaacaagaaatagcattgaaatccatttttattgaccaattagaattgtctaccaggatctataattgtctcaaaagatccaatattcatacattattagaacttttgaataacagtcatgaagaccttctgaaaattgaacattttcgcgtagaagatgtcaaatatatattggactttttagaaatagaaaagcattttgcataaatttgaaatccattgtcatatgattttttcagatttcttctttctatttttctaaacttacgatagggatgaaaatatgtaatttagatctttaaaaaaaaatccatatgttcggaatagacctaaaatggaatagatgtatctagggatt

SEQ ID NO: 263392 - DNA, 443 bp, Glycine max
gacgcacgcgtccgtctgcctgtaagagtgaaaataccttctcttttccttctctcaagtctcaggagatttcatcatggctccaaagaaggacaaggctccaccaccttcctccaagcccgccaaatctggcggtggcaagcagaagaagaagaagtggagcaagggaaagcaaaaggagaaggtgaataacatggtgctgtttgatcagggcacctatgataagctcctttctgaagctcccaaattcaagctcatcactccttccattctttctgatcgtttgaagattaatggatcacttgcaaggaaggctataagagaattgatggctaggggttcaatcaggatggtgtctgcccatgcaagccagcaaatttacaccaaggcaacaaacacctaggtgtggaactgatcttagcttaccgagtatttgtaggaat

SEQ ID NO: 263393 - DNA, 374 bp, Glycine max
  unsure (1)..(374): unsure at all n locations
tccttctgctgnatgtagctccttttactctcttttattgaaactgttgctgcagagatgacttagataattcccaaagacactgttatcccaaccaagaaatctcaggtgttcaccacctatcacgaccagcagactacagtctccattcacgttttccaacgctatacgagtctcacaaaagattgccgccttcttggcaaatttgatctgtctcaaattcctccagccccaagacgtacacctcaaattgaaatgaccttctaagttgatgccaactacattctaaatgttaacgcataatacaaaggcactagttaatcataaaatatcaccattacaaacgaaaatgtacgtcttatccattaataaat

SEQ ID NO: 263394 - DNA, 170 bp, Glycine max
cccacgcgtccgcaaagacatccttctcctggatgtggctcccctcactctcggaattgaaactgttggtggagtcatgacaaaggtgattcccagaaacactgttatcccaaccacaaaatatcaagggtttaccacctatttcggcccgcggactacagagtccattt

SEQ ID NO: 263395 - DNA, 344 bp, Glycine max
  unsure (1)..(344): unsure at all n locations
ctctctctctctctgtattactatttttaancaatgaccaaaaccagggcatttagacaactttttatactcatatctaccattaatatgtttactgtataacttgaacttcaaactcttccaccctcttacccttaccatcacccttttcactctttcacaccatcacctcttcacccaccatcaaattctcctcacccacaccaccaccaccaccaccaccaccctccatcaccatcacctattccttcaccttctcaccacaattaccctactaccccttcccctactaatccttctactcaccaccatcaccatcaccctccttctccttttaatccacc

SEQ ID NO: 263396 - DNA, 281 bp, Glycine max
accaaccttttcactcctttttcttctcttcctcttccatgacactttagaataccttcaaaggtccacccctcccatatcgtccacctcttcgtacgcctcaccttctgttacttctactctgctagttccctcgcccctaacatcggtcccctcagtctctcccccaagaagatcagaaaatatatcaccaaggaaacccccaatgacttgaaacgcctccccgtcaccatcaaactcaccttgcagaaccttcaatccaaggtcactattgtcccatc

SEQ ID NO: 263397 - DNA, 424 bp, Glycine max
cgacccacgcgtgcggccacgcgtccgcttgtctctctctctctcttctttacttgcttgaagcaatggccaaagcctgggcatcaagtctgctgtttctcctcgtagctgtgagtaatgtgtttgctgtagagcttgaacttgaaactcttccaccctcttaccctcaccctcaccctgttcactcccccacaccagcacctcttcacccaccagcaaatgctcctcacccacaccaccaccaccaccaccaccaccctccagcaccagcacctgttccttcaccttctcaccacaattaccctcctacccctgcccctgctaagcctcctactcaccaccatcaccatcaccctcctgctcctgttaatccacctcctgttccggttcatcctccagttaaacctcctgttccggttcaccc

SEQ ID NO: 263398 - DNA, 415 bp, Glycine max
cattggctggctaaccaaccctgacactccttcttctccgcttcctcttcgatggtcgcttcggaatgcctccgaagttcgacccctcccagatcgtcgacgtcttcgtacgcgtcaccggcggtgaggtcggcgcggcgagttccctcgccccgaagatcggtcccctcggtctctcccccaagaagatcggagaagatatctccaaggaaaccgccaaggactggaagggcctccgcgtcaccgtcaagctcaccgtgcagaaccgtcaggccaaggtcacggtggtcccatccgccgacgcgctcgtcatcaaggccctcaaggagcccgagcgtgaccgcaagataacgaagaacatcaagcacaactggcacatctcgctagacgacttcatcaagatcgctagggttat

SEQ ID NO: 263399 - DNA, 433 bp, Glycine max
  unsure (1)..(433): unsure at all n locations
ctctctctctcttttttactggtttgaagcaatggccaaagcctgggcatctcagtctctttttatgctcntanctgcgagtaatgtgtttgctgtagagcttgaacttgaaactcttccaccctcttaccctcaccctcaccctgttcactcccccacaccatcacctcttcacccaccagcaaatgctcctcacccacaccaccaccaccaccaccaccaccctccagcaccagcacctgttccttcaccttctcaccacaattaccctcctacccctgcccctgctaagcctcctactcaccaccatcaccatcaccctcctgctcctgttaatccacctcctgttccggttcatcctccagttaaacctcctgttccggttcaccctccagttaaaccttctgttccggctcaccctcctgttaaaccc

SEQ ID NO: 263400 - DNA, 387 bp, Glycine max
ccctcagtttctcgctcgccaatctcccctctttctcctccaatggccgaccaggtcaccttcgaccagatcgccgagttcaaggaggccttcagcctcttcgacaaggacggcgatggttgtattactactaaggaacttgggactgtgatgcggtcactagggcaaaacccaactgaggcagaactgcaggatatgattaatgaggttgatgctgatggcaatggaaccatcgacttcccagagttcctcaacctgatggctcgcaagatgaaagacaccgactccgaagaggagcttaaagaggctttccgtgtgttcgacaaggatcagaatggtttcatctctgcagctgagcttccgcatgtcatgacaaatcttggggag

SEQ ID NO: 263401 - DNA, 379 bp, Glycine max
tccctcagtttctctctcaccaatttcccctctttctcctccaatggcctaccagggcaccttcggccacatctccgagttcaacgaggccttcatcctcttctacaaggactgcgatggttgtattactactaaggaacttgggactgtgatgcggtcactagggcaaaacccaactgaagcaaaactgcaggatatgattaatgaagttgatgctgatggcaatggaaccatctacttcccagagttcctcaacctgatggctcgcaagatgaaagacaccgactccgacgaggagcttaaggatgcttttcatgtgttctacaaggatcagaatggtttcatctatacacctgaacttcgacatgtcatgacaaat

SEQ ID NO: 263402 - DNA, 260 bp, Glycine max
aggccttcatcctcttcgacaaggacggcgatggttgtattactactaaggaacttgggactgtgatgcggtcactatggcaaaacccaactgaggcagaactgcaggatatgattaatgaggttgatgctgatggcaatggaaccatcgacttcccagagtttctcaacctgatggctcgcatgatgaaagacaccgacttcgatgaggagcttaatgaggctttccgtgtgttcgacatgtgatcagaatggtttcat

SEQ ID NO: 263403 - DNA, 453 bp, Glycine max
  unsure (1)..(453): unsure at all n locations
cacggcacgaatatcttgttgtttggagctatccgagaaaaactctgtaagcatgttgggttaccaggacctgcttacaggtgatgagcttctctctgactccttccgttacaaggaaattgagaatggaatgctgtgggaagttgaggggaagtgggttgttaaaggagcagttgatgtagacattggtgcaaacccttctgctgagggtggaggagaagatgagggagttgatgatgcagctgttaaggttgttgacattgttgacacattcagacttcaggagcaacccgcattcgataagaagcagtttgttaccttcatgaagaggtttatcaagaatttgactcccaagctcgatgccnacaacaggagttgtttaagaagcacatcgagggagcaactaaatacctgctctctaagattaaagatttccaattttttgttggtgag

SEQ ID NO: 263404 - DNA, 461 bp, Glycine max
ggagttgttgttttcacaatgaagacagttctattcctccttctggtgtcaggcgttaatgcccatctccgtcgcgcagccgaatgacttctccgacgcaaacctcaacgagttcaactcctccgtagccataatcataatcatattagtagtcgcgtttttcctcatggcctttttctccatctacgtgcgccactgcgctgattccccttccaacaccgtcaggcctctcaccaccgcacgctccaggagggccgcgcgtggccttgaccccgctctgattcaaacattccctatcctcgaatactccgttgttaagatccacaaaatcggaaaagaagctttggaatgcgctgtgtgtttgtgcgagttcgaggacaccgaaacgctgcgtttgctccccaagtgcgaccacgttttccaccccgagtgcatcgacgagtggttgagctcccacacca

SEQ ID NO: 263405 - DNA, 391 bp, Glycine max
ggcgaagatggggatgtggcactcttcttttgactctcaggtaccgtaaagaccactctgtcgaccgatcacaataggtatctaatcggagatgatgaacactgttggggtgacaatggtgtctccaacattgaaggtggttgctatgccaaatgcattgacctctcacgggagaaagagccagatatttggaatgcaatcaggtttggcacagtgttggaaaacgtggtgtttgatgagcacgaccgagaagttgattactctgacaaatcagttacagaaaatactcgtgctgcttatcctatagagtacattccaaatgcaaagttaccttgcgttggccctcatccaaagaatgtcatacttttggcatgtgacgcatttggggtac

SEQ ID NO: 263406 - DNA, 464 bp, Glycine max
  unsure (1)..(464): unsure at all n locations
attaccgggtcgagcgacgcgtacgatggctcccaaaccgccttgtacgggtctgtttgttggactgaacaagggtcgggtcgtcagcaagattgaattgcctccacgcccctcagatcgtaaggggaaaacaagcaagagggtgcactttgtgaggaacctcataagagaggtagccggttttgcaccctatgaaaagcgtataactgagttgctgaaggttgggaaggataagagggcactgaaggttgcaaagagaaagctcggaacacacaaacgcgcaaagaagaagcgtgaagaaatgtccagtgttctcaagaaagattaaggccttggtggttcttgggagaccaagaaagaaaaaaaatttaaaaaggtttccttttttaaaatttttttttttaaacccctttttggggggntttttttttttttttcccccccaaaaaggaaaaaattttttt

SEQ ID NO: 263407 - DNA, 384 bp, Glycine max
accgcctattacgggtctgtttgttggactgaacaagggtcgggtcgtcagcaagattgaattgcctccacgcccctcagatcgtaaggggaaaacaagcaagagggtgcactttgtgaggaacctcataagagaggtagccggttttgcaccctatgaaaagcgtataactgagttgctgaaggttgggaaggataagagggcactgaaggttgcaaagagaaagctcggaacacacaaacgcgcaaagaagaaacgtgaggaaatgtccagtgttctcaagaaaatgaaggcttgttggtgcttgaagacaagaagaaaaaattttaaagggtttcccttttaaaatttttttttaaaacccttttggggtttttttttttt

SEQ ID NO: 263408 - DNA, 406 bp, Glycine max
  unsure (1)..(406): unsure at all n locations
ccgcccacgcgtccgagaaggcctgggcttagttgataagcataactgggtgaggaagaaagaaggagagtggagaagatggcgtcgagcggagcggtaccgttttggagggcggcggggatgacgtacataacatactcaaacatatgcgcgaatctgctcaggaattgcctcaaggaaccctacaaggccgaatccctctctcgtgagaagctccattttgttctctccaaatgggtcgacgccaagcctgaaaaacctactattcgttcagacaccccagagcagtgatctggaatagttggaagctataaatgcataaatctttgagatctggaaagntttcccaaattttgggttcccaaatttttttttttttgggaaaaaaaacccccctttttttttt

SEQ ID NO: 263409 - DNA, 367 bp, Glycine max
taagcattaatgcgccaggaagaaataaggagatttggagaatatttcaaagaccggagccctaccgatttggagggcggcggggatgacgtacataacatactcaaacatatgcgcgaatctgctcaggaattgcctcaaggaaccctacaaggccgaatccctctctcgtgagaagctccattttgttctctccaaatgggtcgacgccaagcctgaaaaacctactattcgttcagacaccccaaatcactgatctggaatagttggaaactataaattcataaatcttttaaatctggaaatttcccaaattttgagttaccaaatatttttttttttgtaaaaaaaaccccccccttttttt

SEQ ID NO: 263410 - DNA, 453 bp, Glycine max
gaatttccgggtcgaccgcacgcgtgcgcccacgcgtccggcttgcgctcttgccgttcacgagcactttatgaagggctgaaggtaggtgcagcatctgatctgatgctgggatatctggatttcttccttggtggggatgagaaaagacctgatctgcctcctcgtctttatcaaagatttcccatgtctataatttttgggggagatggaagttacatgagtcctttctctattcacagtgataatattcttactagcatcatgagtcagtctgttccaccaactatatggtatcgattagtggctggtcttaatgctcaactacgattggttcgccgtggacatctaaaaataacttttggtcctgttatcagctggcttgatgtatatgcaaaccctaagttggctacatatggggtacgtgttgatcttgcatggtgtcaacctaca

SEQ ID NO: 263411 - DNA, 317 bp, Glycine max
attaagggtgagatatatagaaaaacaaaggagaaaagatagaaatggagaagtttccaggggttgacatggggaaccttaataatgaagagagatcagcaaccatggagataatcaaagatgcctgtgagaactggggtttctttgagttggtgaaccatgggatatccatagagttgatggacaccgtggagaggatgacaaaagagcactacaaaaagtgtatggagcaaaggttcaaagaaatggtagcaagcaaaggtttggagtctgctcaatctgaaatcaatgatttggattgggaaagcactttcttt

SEQ ID NO: 263412 - DNA, 211 bp, Glycine max
aaaccctaatacctaaaagacatcagcaaccatggagataatcaaagatgcctgtgagaactcgggtttctttgagttggtgaaccatgggatatccatatagttcatggacaccgtgtacaggatgacaaaagatcactatacaaaacttattgagcacaagttcaaagaaatttgttcacgcaaatgtttttagtctgctcaatcttaa

SEQ ID NO: 263413 - DNA, 406 bp, Glycine max
cttgtctctgaaaaaacatgttgagggtttcagctataatgctctcttcttctctctcagcttctgttccaatgcggcccagtcacgccacttccgcttttctctctctaaactacattatcgtctattaccgcatatcttctccttcctaccatacacttcttcccttcatatgttatgctacttaatctctgatccacacaataatatacagcaatactctctataattcttcaactaatactgctgttaagaaccctacttctaagattgtctatgatgatcacaaccatgaaagatttcccccagttgacccaagcaagagggcatttgcctacttcgtacttacaggttgtaagtattcttatgcctctgtggtccgtctccttttcctcaagtttgtgct

SEQ ID NO: 263414 - DNA, 311 bp, Glycine max
aattaccgggtcgaccgacgcgtccgcagagtttgagtggacctgtctcagctaccctttaccttggttattcactactgatggccgttgcaatcatgttgtcaaccggcaccattggcttccttatgtcattctactttgtgcactacttgttctcatcagtaaagatagattgaggttcttgttgtcattgcatattaactatgaaaaaggttgattgatataacttgatcacattgcatagtaaggcaacgggatgtttaattcattggctgattttatattggcatgggatctgcaatttggtcttc

SEQ ID NO: 263415 - DNA, 459 bp, Glycine max
cccacgcgtccgcgagcttcagcaatggtgtacgtcaaggctcagaaatcaaaagcctagttcaagagatatcaagtcaagttcaagagaagaagagagggaaaaaccgattaccgtgccaggattcggttgattaatcaggacaagaacaaatataacactccgaaataccgatttgtggttcgctttagcaacaaggacattgttgcacaaataatatctgctagcattgccggcgatttagttcttgctacagcatattcacatgagctgccacgatatggtcttgaagtaggacttacaaattatgcagcagcttattgcactggtctcctgttggcccgaagagtcctcaaaacacttgaaatggatgaagagtatgaaggaaatgttgaggctactggagaggattattcagtggaacctgccgagagcaagaggccattccgggcactcctt

SEQ ID NO: 263416 - DNA, 326 bp, Glycine max
cccacgcgttcggcgaaatcccccaactccatcctctgttcatcgtctaccgggctttcttgtgaaccataactatgattaaggtttttaaagtaaaggaaaagcagagagaacttgcagaaaatgcaagtggcggaccacctgttaagaagcaaagtgctggagagttgcgtcttcacaaagatataagtgagctgaatctaccaaaatcatgtaccatgcaattccccaatggcaaagatgatctgatgaactttgaagtttcaattcgacctgatgatggatattacttaggtggcacattttttgttttcctttcaagtgtc

SEQ ID NO: 263417 - DNA, 260 bp, Glycine max
acgggaaagatgacctgcactttgtagataacgttctggattcagctgctcaggagtatgctagcaaatctgataactttccaacagagatcattgttgacaaccaagtctatcttccacctggacccagtcgtcacaattctcacgatctctactgctccggtggggtggtgttggcttctcgtgatggaaagattgtgtgtgaaaatactcttgatgcacgtcttgatgtagttttccgtaaaaagctttcaaaaatc

SEQ ID NO: 263418 - DNA, 334 bp, Glycine max
cgacccacgcggccgggaaagatgacctgcacttggtagagaacgtgctggattcagctgctcaggagtatgctgaggaagcaagtgtcgatcccccagagatcattgttgacaaccaagtctatcttccacctggacccagtcgtcacaattctcacgatctctactgctccggtggggtggtgttggcttctcgtgatggaaagattgtgtgtgaaaatactcttgatgcacgtcttgatgtagttttccgtaaaaagcttccagagatccgaaagcagctctttggacaaattgttgcttgaagattttgattgtaatgtttgggtacccc

SEQ ID NO: 263419 - DNA, 297 bp, Glycine max
aaaaaaaaaaaaaaatacaaaataaaaataataataaaaaaaaaaaaaaataaataaaaaaaataataaaaaaaaaaattaataaatatataaaaaaaaaaaaaaaaaaaaaataaaaaaaaaaaaaaaaaaaacaaaaaaaaaaaaaaaaaaaaaaaaaccacaaaatacaattaataaaaaaataataaaaacaaataaaataaaaaaaaaaattaaaaatacaaaaaaaaaaattaaacaaaaaaaaaaaaatataatacaaaaaaaaaaaaaacaatataattataatattac

SEQ ID NO: 263420 - DNA, 351 bp, Glycine max
gtcagtcttcagagctaataatgttctcactcttccatctcagtatgtgttgacatgctgggcaaggtgggctaaaaccggtacattgttagatgaacatgcatctgaattgccaagtacttctcgtgaatctgtaccagtttgttataacaatttacgacaagaagcaatccaatatgttgaagaaggtgcataatcaatccaaatctatcatgttgccatgagagctctgaaagaagctgctaaaaaagtttgcaccataaaaaaatagagttctggaacaacaaaaggagctaccacaaccaatggaaaccagggtgaattgcttgtaacacattaaaatggtttttt

SEQ ID NO: 263421 - DNA, 376 bp, Glycine max
cgggtcgagccacgcgtccgcgtcagtagactcacacctgaaactctcaatggctgaaactcccacaatccgtggcggcgtgatcagctgcgccgacatcgcgcgcaaggtctcgcgcgccatctccctcgcccccaacgccgacctttacgccgtcggcagccgctccctcgacaaggcgcgtgccttcgccgacgtcaacggcttccccgccgccgccaaggtgcacggctcctacgaggcggtcctcgacgatcccgacgtcgacgccgtgtacgtaccgctccccactagcctgcaagtgcgctgggccgtgctcgccgcgcaaaaaaaaaaagcacgtcttggctccaaaagaaaaaggcccccccccggt

SEQ ID NO: 263422 - DNA, 283 bp, Glycine max
ccacgcgtacacgtcagtagactcacaccttaaactctcaatttctgaaactcccacaatccgaagcggcttgataaatttcacaaacatcgcgcgcaaagtctcgcgcgccatctccctcgcccccaacgccaccctttacgccgtctgcagccgctccctcgacaaggcgcgtgccttcgccgccgccaacggcttccccgccgccgccaaagtgcacggctcctactaagcggtcctcgactatcccgacatcgactccttgtacgtaccgctccccact

SEQ ID NO: 263423 - DNA, 447 bp, Glycine max
  unsure (1)..(447): unsure at all n locations
ctcaggaggagaataaggatgtctcacaggaagttcgagcacccaaggcacgggtcactgggatttctccccaggaagcgtgctgctcgtcacaggggaaaagtgaaggcattccccaaggatgacccatccaaggcacccaagctcactgcattcttgggttacaaggctggtatgactcacattgttagagaggtcgagaagccaggatcaaagcttcacaagaaggaaacatgtgagcctgttacaattattgagacccctccaatggttattgttggtgttgtgggttatgtgaaaactccccgtggtctccgaacattgaacactgtatgggctcagcacttgagtgaggaactgaaacgtangttttataagaactggtgcaagtccaagaagaaggccttcaccaagtactcaaagcagtatgaaactgaagagggaaag

SEQ ID NO: 263424 - DNA, 418 bp, Glycine max
gacccacgcgtgcgcccacgcgtccgcccacgcgtccgcccactcgtccgctttcaatggaagtcatgtctgcgtctatcttgaatcccaacgctccgatgttcgagccactcgcctatcggacggtggaggatttctccgaccagtggtgggacctcgttcactcctccccctggttcctcgactactggctccgctagtgcttccaagatccccagttccaaaacgacgacgctttcgacttcgactttgacctagatctccaagatgaagatgaaagggaacgaaaggaagggaaggaggtggtgtcgttggggctgctgaaatggcgaagctgtggaggaggatgggcccaggcgccgaagtatgtggaaaaggcccccaagtttgtgaagcccaaggtgagcccacgggctat

SEQ ID NO: 263425 - DNA, 459 bp, Glycine max
catgctcctctctgaattcctcttattcaggaatttggagagtattgatatatgaaggtgggataaaccagtagccaaggaagatatggagttttctatgattttcattgttagcaacattatgctgcttttcagttcagcatttgccaaaactgctagtcctccctctctgagcccaactccagcaccagccccggcaccagacttcgtgaacctcactgagttactcagtgttgctggtccgtttcacaccttccttggataccttgagtccactaaagtgattgacactttccaaaaccaagccaacaacactgaagaaggaattaccatctttgttcctaaggacagtgccttcaatgctataaagaaaactaccctatccaacctcacctctaaccagctaaagcaagtgatcctcttccatgccttgccacatttctattctctggctgagtt

SEQ ID NO: 263426 - DNA, 458 bp, Glycine max
cccacgcgtccgtcaagcattgcatccctcttgatttgtagtttgttttgtgcgttagaggaaagttctgccaaatcaagaggggttttaagatcatagtgtgtgttttgcaacaatggctaagttctttgctgctatgatcttggcactctttgccatttccatacttcaaacagtggtaatggctgctaatgaacaaggaggccacttgtatgacaacaagagcaaatatggaagtggaagtgtcaagagttaccaatgcccatcacaatgctcgaggagatgtagccagacccaataccacaagccctgcatgtttttctgtcagaagtgctgcaggacatgcctgtgtgtgcccccggggtattatggtaataaagctgtgtgcccttgctacaacaactggaaataccaaggaaggaagacccaagtgcccttgagctttaacttgttcaact

SEQ ID NO: 263427 - DNA, 398 bp, Glycine max
cccacgcgtccggtgatttcagttagtgatcggtgttcacttgatctcatcatgatcgtgttcgtctattgaagaagatgccgatcagaaacatcgccgtcggaaggcctgaataggcgactcaccccgacacgtttaatgctgctttgtctgaattcatctcaaccttcatcttcgtgttctcctgctcaggctccttcatctgctactacaagctcaccgactactgcgcttccacccctgccgtcctcatctccgcctccatcgcccatgcattcgccctcttcgtcgccgtcttcgtcggttccaacatctccggcggccacgtcaaccccgccgtcaccttcggcgccttcgttctctgcaacatcaccttcctcctcggcatcgtctacgtc

SEQ ID NO: 263428 - DNA, 255 bp, Glycine max
aaacaacaaggtattcttatcaatggccaattcccaggccctggaatctattctggtaccaatgacaatttgatcattaacgtgcacaataacttgaccgagccgtttcttctatcatggaatggtgttcaacaaaggagaaattcttattaagatggagtttatgggaccacatgctccatccctcctggggagaaacttacctacacactttaaggtaaagatcaaattggaggggggttgtatttcccatct

SEQ ID NO: 263429 - DNA, 377 bp, Glycine max
gaatcccggtcaccacgcgtcgaagacatcttctctgatgtgctccctcactctcgaattgaactgttggtggagtcatgacaaattgattcccagaaacactgttatcccaaccaagaaatctcaggtgttcaccacctatcaggaccagcagactacagtctccattcaggttttcgaaggcgagaggagtctcacaaaggattgccgccttcttgggaaatttgatctgtctggaattcctccagccccaaggggtacgcctcaaattgaagtgaccttcgaagttgatgccaacggcattctaaatgtgaaagcagaagacaagggcactggtgaatcagaaaagatcaccattacaaacgaaaagggacgtc

SEQ ID NO: 263430 - DNA, 421 bp, Glycine max
  unsure (1)..(421): unsure at all n locations
gtgtactttggggtctctaccctgctggatgcctcatctcgcgcgggccaaaaataagatgaagagcacaacgaggcagaactagcagtttctgaattttctggaaatggtgctgggatactatctgctgctagcacagttgccagtacttttctcttagtttttgttgctgaatggngcgacaagtcatttttctccacaattgcccttgcagcagcttcttctccccttggagtcatagctggagcactggctggtcatggtgttgcaactttgctagctgtacttgggggttctttacttgggacgtatttgtcagagaaggttattgcctacatcggaggtgttctctttctcgtctttgccgcaataaccttatttgaaattgtgcaatangggttaaaagaaatgcaatataatc

SEQ ID NO: 263431 - DNA, 345 bp, Glycine max
  unsure (1)..(345): unsure at all n locations
aaaaaaaaaaaaaaattttattttaaaaaaaaaaanaaaannnnnnncctttccgacctctgttataaaaaaaanancccccncccccacacccaaaaaaaaanaaanaaaaaaaaaaaaaancaaaaaaaaaaaaaaacaaaaaaaaataaaaaaacncaacaacaaaaaaaaaaatttaaaaaaaacaaaaacaaaataaaaaaaaaaataaaataaaaaatacaaaaaaaaaaaaaattaaaaaataacaacatttaaaataaaaatcaaaacataaaataaaattaatcacaaaataaaaacaaaaaataataaaaataatcaaccaaacatattaatctt

SEQ ID NO: 263432 - DNA, 421 bp, Glycine max
  unsure (1)..(421): unsure at all n locations
cttctcatcattcattcatcttcgttctaagagccatgtctagcaccgttggccaaaccatcgagtgcatagctgcgattgcatgggaggctgggaagccgctggtgattgaagaagtggaggttgcgccaccgcaagccggtgaagtccgtttgaagatcctctacacctctctttgccacactgatgtttacttctgggatgcgaanggccagactccattgtttcctcgcatttttggccatgaagcttcggngattgtggagagcgtangcgagggtgtgactcatctgaaaccaggtgaccatgccctccctgtgttcacaggagagtgtggagattgcgcccattgcaagtcaaaggagagcaacatgtgtgagctactcangatcaacaccgataggggtgtcatgatccatga

SEQ ID NO: 263433 - DNA, 430 bp, Glycine max
  unsure (1)..(430): unsure at all n locations
cccacgcctccncngacgcgtgggggtttttgtggataagagtgagctataatgggtggctgtagaccttgtttaattgctttgtttgatgttaaccggactcttacagctcccaggaaggtggtcacaccggaaatgttgacattcatgcaagaactacgaaaggttgtaacggttggagttgttgggggttctgaccttataaagatatcagagcaacttggcagcacagttaccaatgagtatgattacgtattttctgagaatggtcttgtggctcacaaagaaggaaagctcattggaactcagagcttgaagtcattccttggtgaagaaaagctcaaggagtttattaactttacacttcattatattgctgatttggacatccccattaagaggggaacatttatggaattccgtaatggga

SEQ ID NO: 263434 - DNA, 189 bp, Glycine max
  unsure (1)..(189): unsure at all n locations
accattgcttaaacactgtttagctgcaacatatatgttctgcttctttcttttgtggntgtagttgagttcaccactacactgtaatttcatttccattttgtctggatttcaatcttttatttgtaatgaggaaatatgacgtcttatttttatattatttttttaatgcgtatgacgtgtttgttg

SEQ ID NO: 263435 - DNA, 238 bp, Glycine max
  unsure (1)..(238): unsure at all n locations
tcttcgcttctgtcttcatactctctgcttaccaacaaattaatgaatattgaatttatgggggaccttctacaaaaacactcaaacctaagtttgatgcctttacacatncggtgcattctcaaatgggctttccaattccaaaaattaatctgaaatttttaattgcttgggctatttctcttaaaggtcttggaagggttcttttcatattttgcaactctttttgaacttttct

SEQ ID NO: 263436 - DNA, 367 bp, Glycine max
  unsure (1)..(367): unsure at all n locations
cccgctaccttttcccgngtactttctaatccaatccaccaaatcggcggcgcgtccttctttctgtctcgaaaccacacatctgcggcggaaccgccgtctccgactatctccgattgatcttccggtaaagtggaccggagatgccggttgccgcttccgccatttacttcctcaacctccgcggcgacgttctcatcaaccgcctctatcgcgacgatgtcgggggaaatatggtggatgcttttaggacgcatattatgcaaacgaaggagcttggtacttgcccaatgaagcaaattggtggatgctctttcttttacatgaagatcaataatgtctacattgtcattgttgtcagcaacaa

SEQ ID NO: 263437 - DNA, 441 bp, Glycine max
  unsure (1)..(441): unsure at all n locations
cacccgctaccttttcccgtgttcgttctaatccaatccaccaaatcggcggggtgggcttttttctatctcnaaaccacacatctgcngcngaaccnccntctccaactatctcctattgatcttccngtaaagtggaccggaaatgccggttgccgcttccgccatttacttcctcaacctccgcggcgacattctcatcaaccgcctctatcgcgacgatgtcgggggaaatatggtggatgcttttaggacgcatattatgcaaacgaaggaacttggtacttgcccaatgaagcaaattgttggatgctctttcttttacatgaagatcagtaatgtctacattgtcattggtgtcaacaacaaccccaatgtcgcttgcgctttaaagtttttgttaaggcttgtgcatttttcccacatactttgtggaacttt

SEQ ID NO: 263438 - DNA, 331 bp, Glycine max
  unsure (1)..(331): unsure at all n locations
cccacgcctncncaagcttcaacaatggtgtacgttaaggctcagaaatcaaaagcctactgcacgagatattaagtcaagttcaagacaaaaacaaagggaaaaaccgattaccgtgccaggattcggttgattaatcaggacaagaacaaatataacactccgaaataccgatttgtggttcgctttagcaacaaggacattgttgcacaaataatatctgctagcattgccggcgatttagttcttgctacaacatattcacatgagctgccacgatatggtcttgaaataagacttacaaattatgcagcaacttattgcacttgtc

SEQ ID NO: 263439 - DNA, 459 bp, Glycine max
  unsure (1)..(459): unsure at all n locations
aaaaaaaaaaaaaaaaaaattttttaaaaaaaaaaaaaaanncaccnttcgttaattntaaaaaaaaancccccccacacacaaananaaaanaaaaaaaaaaataaaaaacaataaaaaaanaaaaaaaaaaaaaaaaaaaaaaaaaaactaaaaatatccaataaaaaaatcaaaaaaaaacaatataacaaaaaaaaaattcaatataaatcacaaaaaaaaatttataaaaaaaaaaaaaaaaacaaataaaaaaataaaaaaattcaaaaaaataaataatccaatctanaaaaaacaaataataaatacaaattccaacaaaataaacaaaataaaaatatcaaaaaatcaaaatatcacacccctttaataaaaaataacacaaaaaaaaatctaaatataataaaaaaaataaaaaataaaaaaaaaaaaaaaacaataataaaataaaaa

SEQ ID NO: 263440 - DNA, 339 bp, Glycine max
gcaaaattgcttgacaggatcagttggtatttatctcccacatagtttgtggttacgattgtttgatcaagtgatcttctctgtgcttgatgacctgcttgaaatttctcagacacactctcaaaaagacttccgcaacatagaaggaacccttgttcttgctttgaagctcttgtgtaaagttttcctccagttaatccaagacctatcacaattgccaggcttcaacaaattatggttggctgtactaagtcggttagaaatttatatgaaagtgaaagttaagggaaagagaagtgagaagcttcaagagcttgtgcctgagcttcttaaaaacac

SEQ ID NO: 263441 - DNA, 328 bp, Glycine max
  unsure (1)..(328): unsure at all n locations
ggctacttttgattgcttgatgaaaacctatggattcctgacaccagaattctggaaggacgctcgcttctccaaatctccattccaagagtacacagatctactggcanaaccaacangaaagactctaatcttggaagaggaaagggtggatgcttgatttgctagttttgctttatggatgttttaggaactttattactttacataacttgttggttctgtgctttacttttggttttgatagacggtatgtctctgtatgcattttgattgtttccaagttttaattgactgcaaaaaaaaaaaaaaaaaaaanattnnaatt

SEQ ID NO: 263442 - DNA, 341 bp, Glycine max
  unsure (1)..(341): unsure at all n locations
aaaagaaaaaaaaaaaaattataaaaaaaaaaaaaaaaacnnaaaactttcgtnnnntgnnaaaaaaaanncccccccccccacaaaacaanaaaaaaaaaaaaaaaaaaaaaaaanaaaaatacaaaaaaacaaaatncaaaaaacaaataacaaaaactaacacaaaaaaaaaaacaaaaaaaataaaaaaaaaacaaaaaaaaaaaaaaaaaaaaaataaataaaaaaaaaaaaaaaaaaaaaaaacaaaaaacaaaaaaaacaaaaaaaaaaaaaaaaaattaaaataaaaaacaaaaaacacaatacaaaaaaaaaaaaaaaacaaccccaacctc

SEQ ID NO: 263443 - DNA, 262 bp, Glycine max
  unsure (1)..(262): unsure at all n locations
tttcctttctgtgtccatctggttagttgggggaaggaaaacgtttctagtgaggccctggaagctgctcgaattgcttgcaacaagtacatggccaaatttgctggaaaggatgctttccacttgagagtcagggtgcacccattccatgttcttaggatcaacaagatgctttcgtgtgccggagctgataggctccaaactggaatgagaggtgcttttggaaagccacanggtacttgtgctagagtggctattggac

SEQ ID NO: 263444 - DNA, 418 bp, Glycine max
cggattcccgggtcgacccagcgtccgggcggcgctgtggcggacgctccggcggtggttgaggagaagacggagttcgacgtggggatcgaggaggtgccgagcaacgctcgaatcgcggtgattaaggcggtgagggcattgacgaacctagcgctgaaggaggcgaaggagttgatcgaagggttgccgaagaagttcaaggaagggatttcaaaggacgaagctgaagatgcgaagaagcaactcgaagaagctggtgccaaggttaccattgcttaaacactgtttagctgcagcatatatgttctgcttcttcttttgttggttgtagttgagttcaccagtacactgtaatttcatttccattttgactggatttcaatcttttatttggaatgaggaaatatgagttctt

SEQ ID NO: 263445 - DNA, 447 bp, Glycine max
cctaaacaactctttctcttcttccttcgctcgttgttctccctcgcgtagagggacagtggcggagacagagacgtttgctttccaggctgagatcaaccagctcctcagtctcatcatcaacaccttctactccaacaaggagattttccttcgtgaactcatcagcaacgcctccgatgctttggacaagattcgatttgagagtttgacagataagagcaagctcgatgctcagccagagttgttcattcatattattccagacaagactaacaatacactgaccattgttgacagtgggattggcatgaccaaagctgatttggtgaacaacttgggtacaattgctagatctggtaccaaggaattcatggaagccttggctgctggtgctgatagtagtatgattggacagtttggtgtggggttctactctgcatatct

SEQ ID NO: 263446 - DNA, 385 bp, Glycine max
acgcactcgtccgcccgcgcgtccgcccacgcgtccgccctttcgtccgcggacgcgtggagttctgtatcgtcgtacttctagagtccttgagttctaaggagacaggaacctacgtctggtggatgaatcatgaccgtgtgatcagagcgtgattaacggcccgggtgagtttctctttgcagtagtctcatctttggctgtataggatcgttcttaggacacttccatgtgcctgggaatggtcatacggttgtctgacagaccaaataagaaaaaaagacaaaaaagtaataaaaaagaatataaataaaacaatttaattcaaaaaataaaatacaagataggacaatatttattaattcaaaataggaattagatcatt

SEQ ID NO: 263447 - DNA, 446 bp, Glycine max
cctaaacaactctttctcttcttccttcgctcgttgttctccctcgcgtagatcgacaggggcggagacagagacgtttgctttccaggctgagatcaaccagctcctcagtctcatcatcaacaccttctactccaacaaggagattttccttcgtgaactcatcagcaacgcctccgatgctttggacaagattcgatttgagagtttgacagataagagcaagctcgatgctcagccagagttgttcattcatattattccagacaagactaacaatacactgaccattgttgacaggggtattggcatgaccaaagctgatttggtgaacaacttgggtacaattgctagatctgggtccaaggaattcatggaagccttggctgctggtgctgatgttaggatgattggacagtttggtgtggggttctactctgcatatc

SEQ ID NO: 263448 - DNA, 436 bp, Glycine max
ggctggcattgttggaaaatacggtacctgttatggcgccagtctgcgtaagcggattgagaagatggaagttagtcaacacagcacgtttttctgtgaattttgtggaaagtatgctgtgaagaggaaagctgtgggaatatggggatgcaaggactgtggtaaagtgaaagctggcggtgcttacactttgaataccgcaagtgccgtgactgtacggagcaccatcaggaggttgagggagcaaactgagagttaagcttttttgtttatgctatcaattactattagactttgcatgaagtgcctagtttgtattcactgaactgcactggttgtattcaaagtaaactccttaagtttaattttgagatgactcttttaattttaattgtttggaactttgtcggtgtgattttgcttcatagtttcattt

SEQ ID NO: 263449 - DNA, 359 bp, Glycine max
aaataaaaaaaaaaaataaacaaataataaaatcaaaaaaaaaaatataaaataattaaaagaaaaaataaaaaaataaaaaattaaataaataaaaaaaaacaaacaaaaaaaaacatataaaaaaaataaaaaaaataaaatatataaaaaaaaaaaaaataaaaaaataaaaataaaaaaataaaaaaaaaaaataaaaaaaataaataaaaaaataaaaaaaacataaaaaaaaaataaataaaaaaaaaaaataaaaaaataaaataataaaaaaaaataactaaaaaaaaaaatattaaaataaaaaaataataaacaaatataaaaataaataaaaaaaattaaaaaataaa

SEQ ID NO: 263450 - DNA, 435 bp, Glycine max
attgctgctgtttgcctattggtgtactttggggtctctaccctgctggatgcgtcatctagcgatggccaaaaatcagatgaagagcagaaggaggcagaactagcagtttctgaattttctggaaatggtgctgggatactatctgctgctagcacagttgccagtacttttctcttagtttttgttgctgaatggggcgacaagtcatttttctccacaattgcccttgcagcagcttcttctccccttggagtcatagctggagcactggctggtcatggtgttgcaactttgctagctgtacttgggggttctttacttgggacgtatttgtcagagaaggttattgcctacatcggaggtgttctctttctcgtctttgccgcaataaccttatttgaaattgtgcaatatgggttaaaagaaatgcaa

SEQ ID NO: 263451 - DNA, 446 bp, Glycine max
cccacgcgtccggcgaaaacccccaactccaacctctgttcatcgtctaccgcgctttgttttcagccagaactatgattaagctttttaaagtaaaggaaaagcagagagaacttgcagaaaatgcaagtggcggaccacctgttaagaagcaaagtgctggagagttgcgtcttcacaaagatataagtgagctgaatctaccaaaatcatgtaccatgcaattccccaatggcaaagatgatctgatgaactttgaagtttcaattcgacctgatgatggatattacttaggtggcacatttttgttttcctttcaaggggctcccatctatccacacgaagcaccaaaggttaagtgtaagacaaaggtctatcatccaaatattgacttggaaggaaatgtttatgctaacatcttacgagaagattggaaacctgtcctt

SEQ ID NO: 263452 - DNA, 370 bp, Glycine max
cccacgcgtccgtcaagcattgcatccctcttgatttgtagtttgttttgggctttaggtaaaagttctgccaaatcaagaggggtcttaagatcatagtgtgtgttttgcaacaatggctaagttctttgctgctatgatcttggcactctttgccatttccatacttcaaacagtggtaatggctgctaatgaacaaggaagccacttgtatgacaacaagagcaaatatggaagtggaagtgtcaagagttaccaatgcccatcacaatgctcgaagagatgtagccagacccaataccataagccctgcatggttttctgtcaaaaatgctgcaagacatgcctgtgtgtgcccccggggttatta

SEQ ID NO: 263453 - DNA, 444 bp, Glycine max
cctaaacaactctttctcttcttccttcgctcgttgttctccctcgcgtagagcgacaggggcggagacagagacgtttgctttccaggctgagatcaaccagctcctcagtctcatcatcaacaccttctactccaacaaggagattttccttcgtgaactcatcagcaacgcctccgatgctttggacaagattcgatttgagagtttgacagataagagcaagctcgatgctcagccagagttgttcattcatattattccagacaagactaacaatacactgaccattgttgacagtggtattggcatgaccaaagctgatttggtgaacaacttgggtacaattgctagatctggtaccaaggaattcatggaagccttggctgctggtgctgatgttagtatgattggacagtttggtgtggggttctactctgcata

SEQ ID NO: 263454 - DNA, 333 bp, Glycine max
aaaaaaataaaaaaaaaaaaaaaaaaaaaaaaaaaaataaaaaaaaaaaaaaaaaataaaaaataaaaaataaaaaaaaaaaaaaaaaataaaaaaataaaataaaaaaaaaaaaaaaaaaaaataaaaaaaataaaaaaaaaaaaaaaaataaaaaaaaaataaaaaaaaaaaaaaataaaaaaaaaaaaaataaaaaaaaaaaataaataaaaaacataaaataaaaaaaataaaaaaaaaaaaaaaataaataaataaaaaaaaaaataaaaaaaaaaaaaaaaaaaaaaaaaaaaaaaaataaaaaaaaaaaaaaataaaaaaaataaa

SEQ ID NO: 263455 - DNA, 425 bp, Glycine max
  unsure (1)..(425): unsure at all n locations
atgatcttggcatgtccaactatcccatggtcccaggacatgaagtggttggtgaggtgctggaggtgggatcaaacgttagcaggttcagagtgggagagttggtgggagttggactcctcgtaggttgctgcaaaaactgccagccatgccaacaagacattgagaattactgcagcaagaagatctggtcttacaatgatgtttatgtcgatggaaaacccacacagggtggctttgctgaaaccatgatcgttgagcaaaagtttgtggtgaagattccagagggtttggcgccagagcaagtggcaccattactgtgtgcgggtgtgacagtgtacagtccactggtacactttgggctgaaagagagtgggctaagaggtggaatattggggcttggaggagtgggacacatggnggtg

SEQ ID NO: 263456 - DNA, 309 bp, Glycine max
cttctccttctcaatcttgtaattctatttcctccaccataatgctgcgcaagcttgtgtcagggccacgcatgaacaagcctggcacagttcccgttcacctcaacgtctatgatctcaccccaatcaacggctatgcctattggcttggccttggagtctaccattctggggttcaagttcatggattggaatatggttttggtgcgcacgagcacgacacaacggggattttcgaagtccaacccaaacactgccctgggttcactttcagaaagtcaattttcatcggaacaacagatctgggtc

SEQ ID NO: 263457 - DNA, 364 bp, Glycine max
cccacgcgtccgcccacgcgtcctttgtcgcgtgggcggacgcgtgggcaatcgggtaggctttattctaacataatggcggctgctctgacgtcgtgttcttccgcaatcgccgccgcgtccgaaaccctagccaaacctgcttccaccataaccttctccgccaccaacctcgctcttcaatcgtcaacttccaagctcggtttcaaatccctaagacttcgccgatgcgccgccgtcttcagctacacccttagcgcgcgcatagtgtctgtgccagctttcaaagcccccgcgctactcgatttcgacacgaatgttttcaagaaggagaaaattaacctagccagacactaccagtaca

SEQ ID NO: 263458 - DNA, 383 bp, Glycine max
ggcaagatgggaattgcccttctctttttacctttcaggtcccgaaaaaaccactctgtcgcgcgatcacaataggtatctaatcgcaaatgatgaacactgttggggtgacaatggtgtctccaacattgaaggtggttgctatgccaaatgcattgacctctcacgggagaaagagccagatatttggaatgcaatcaggtttggcacagtgttggaaaacgtggtgtttgatgagcacgaccgagaagttgattactctgacaaatcagttacagaaaatactcgtgctgcttatcctatagagtacattccaaatgcaaagttaccttgcgttggccctcatccaaagaatgtcatactttttgcatgtgacgcatttg

SEQ ID NO: 263459 - DNA, 469 bp, Glycine max
  unsure (1)..(469): unsure at all n locations
aattcccgggtcgacccacgcgntccggtctcttaatttcactttctttgccttaggtcaccttccttcttttggaactctaagagggggggggtttaataataattcctaatcctctctaatcaggtccattgaatatgtctccgtcgttgaatcttcctcccaagggtggcttcagttttgatctatgccgaaaaaacgcaatgcttcaaaacaagggcctcaaagccccaacctttctcaaaactggcaccactattgtcggttagttttccaggatggtgtcattcttggtgctgatactanggcaactgaaggacctatagtggctgataaaaactgtgagaaaattcattatatggcacccaacatatattgctgtggagcangcacagctgctgatacagaggctgtaacagacatggttagctcacagcttgcattacatcgctaccatactggtcgagaa

SEQ ID NO: 263460 - DNA, 452 bp, Glycine max
  unsure (1)..(452): unsure at all n locations
cccacgcgntccgggaaacctgatcaattcttccgcggaatcaaggtgacccgtttacctgctggggttgattgcgaaaaggaagcaggtgtttcatctccaaacagcacggtttctagcgtcagtggaaagcgcagcgagagggaaaccaatggagaagaaaacgacacagacagagcttgttccagaggcatcatcagcgacgaagaagatgctgaaacctctagaaagaaacttagactctccaaagatcagtcaattgtcctggaagagagcttcaaagaacacaacactcttaaccccgtaagtaaacgtacacatgccaattaattttttttgtcctgtatcagagacatagtatcctctgatctactggatcatatattaatctcactcacgatgtataggtgcgattgatcatagaaaattttgtacacaatgtgaatcaaata

SEQ ID NO: 263461 - DNA, 367 bp, Glycine max
taaataaaaaaaataaaaaaaaaaataaaaaacaaaaaaaaaaaaaaactaaaaaaaaaaaatattaatctcaacacaaaaacaaatcataaataaaaataaaataaataaaaaaaatatatcttaaataaaaaaagtaaataaaataaaaaaaacaaacaaaaataaatatataaaaatatataaaaaaataaaataatattatattataatcattatatttaaaaatcaaaaaaaaaaatataaaattaattaaaataaaaacaacaaaaaaaaacaaattaaaaaataaaaaaaaaaaaaataataaaaaataaaaaaatcaaacattaaaaataaaaataaaaaaaaaaatcaattactatat

SEQ ID NO: 263462 - DNA, 249 bp, Glycine max
  unsure (1)..(249): unsure at all n locations
aaattaaattaaaaaaaaaaaaaaaaaaacctagctttaataaaaaaggccgcaaacaaaaannnaaaaaaaaaaaaaaaaaaaaaaaaaaaaaaaaaaaaaaaaaaaaaaaanaaaaaaaaaaaaaaaaaaaaaaaaaaaaaaaaaaaaaaaaaaaaaaaaaaaaaaaaaaaaaaaaaaaaaaaaaaaaaaaaaaaaaaaaaaaaaaaaaanaaaaaaaaaaaanaaaaaaaaaaaaagagaagagag

SEQ ID NO: 263463 - DNA, 481 bp, Glycine max
  unsure (1)..(481): unsure at all n locations
gaattcccgggtcgacccacgcgtgcggcaaatactaaaattcctttattacctacttcagttttgtgccatcaattataaatccgggggcgggaccacttaacaaggttttttgcccatcccctgatccagcagggaaggaaatgcgccaagcttgcttcgattatcttagtcttggaggtctattctcggaagggccagtctctttgctttcangattaaaccctcggcccttgagcctggttctacatttctttgctgttgcaatatatggtgttggccgtttactgctaccatttccttcacctaaacggatgtggattggagtccgattaatttctagtgcatctggaatcatcttgccaataattaaagcagaaggagtccgtcagatgttcttccctgcaactgttccagcttactataaaaatcccccggcccaataaatgtgagttccgtgaacccatcatgagtcattcaa

SEQ ID NO: 263464 - DNA, 334 bp, Glycine max
  unsure (1)..(334): unsure at all n locations
aaaaaaaaaaaaaaattaaattaaaaaaaacaaaaaaaacacgaatcgttnatttaaaaanggacgcccaccccaaaaaaaanaaaaaaaaaaaaaanaaaaaacaaaaaaaaaaaaaaaaaaancaaaaaaaaaaaacaaaaacaaaaaacaaaaaaaaaaaaaaaaaaaaaaaaaaaaaacaaaaaaaaacaaataaaaaaaaacacaaaaaaaaaacaaaaaaaacacaaaaaaaaaaaaaaaaacaaaaaaaaaaaaaaacaaaaaacaaaaaacacaacagagaacaaaaaaaaaaacaaaaacaaaaaaacaaaaaaaacaaaacaaa

SEQ ID NO: 263465 - DNA, 327 bp, Glycine max
gtcacaccggaaatgttgacattcatgcaagaactacgaaaggttgtaacggttggagttgttgggggttctgaccttataaagatatcagagcaacttggcagcacagttaccaatgagtatgattacgtattttctgagaatggtcttgtggctcacaaggaaggaaagctcattggaactcagagcttgaagtcattccttggtgaagaaaagctcaaggagtttattaactttacacttcattatattgctgatttggacatccccattaagaggggaacatttatggagttccgtagtgggatgctgaatgtctcacctatt

SEQ ID NO: 263466 - DNA, 449 bp, Glycine max
cgcgtcgctgctccgtaccagtttcactgcataaatttgagagaaaactctgcaaacatggtggtttatcaggacctccttacaggtgatgagcttctctcggactccttccgttacaatgaaattgagaatggaatgctgtgggaagttgaggggaagtgggttgttaagggagcagttgatgttgacattggtgcaaacccttctgctgagggtggagaagatgagggagtcgatgacgcagctgttaaggttgttgacattgttgatacattcagacttcaggagcaacccgcttttgataagaaacagtttgttaccttcatgaagaggtttatcaagaatttgactcccaagctcgatgcagagaaacaagagttgtttaagaagcacattgagggagcaactaaatacctgctctctaagattaaggatttccagttttttgt

SEQ ID NO: 263467 - DNA, 211 bp, Glycine max
agaaaataaataattttatatcctacatttttttttttattatttatatttttttttttaattatataataaaataactcttttttttttaaaaaaattattatttttttttaaatattatttattatttatatttttatttttatattttttttaatataattattttttttatataattaatttatttatattaaaaaattttttttat

SEQ ID NO: 263468 - DNA, 408 bp, Glycine max
  unsure (1)..(408): unsure at all n locations
aaaaaaaaaaaaaattaattaaaaaaaaaaaaaaaaacaccaagcttttattaaaaangcccnccccacccaaanaanaanaaannnnnnaaaaanaaananagaaaagaaactgaaaaaaaaagaacaaaaaaaacaaaaaaaaaaaacaacagacaaaaacaaacacacaaacacccacgacccaaaaacaaaaaaaaaaggaaacgaaaaaaacaaccaaccaaataaaccaacaaaaaaacgcaacaaaaacaaaactgcaacaaaaaaaaaccaaaaaaaaaaaaacccccggaaacaacaataaaaaaaaaccattaaaaaaaaaattaaataaaaaaaatcaatccaaaaaaaaaaaaaataaaaaaaaaaatactttaaaaaaataaaaattaaccaact

SEQ ID NO: 263469 - DNA, 445 bp, Glycine max
  unsure (1)..(445): unsure at all n locations
cgcgtcgctgctccgtaccacttttactgttggtaggaaaatgacgtnactgatgctagggctttttctaatgctgcttttgctctcctctgaggtggcatccacgaatacaaaagaggaggcaaatggagtggatgatgccaaatatcccggtggaagctatggagggggttacccaggtcatggcggtggcggttatcctggccatggcggtggcggttatcctggccatggcggtggtggtggctatcctggtcatggtggtggccaccctggtcatggtggcggctaccctggccgtggtggtggatactgtaggcatggctgttgcggtggccggacatacaacggaggttgcagaatgtgctgctataacgctggcgaagctgttgctgcacaaactcaagataagactcacgattaagacgatgcagttctacttaat

SEQ ID NO: 263470 - DNA, 436 bp, Glycine max
attcccggtcgaccacgcgtgcgaccgacgaatatttggtggttggagccatcccaaaaaaacttttgaaaccatgtgggggacgcgggaccttcttacaggtgatgagcttctctctgactccttccgttacaaggaaattgagaatggaatgctgtgggaagttgaggggaagtgggttgttaaaggagcagttgatgtagacattggtgcaaacccttctgctgagggtggaggagaagatgagggagttgatgatgcagctgttaaggttgttggacattgttgacacattcagacttcaggagcaacccgcattcgataagaagcagtttgttaccttcatgaagaagtttatcaagaatttgactcccaagctcgatgcagagcaacaggagttgtttaagaagcacatcgagggagcaactaaatacct

SEQ ID NO: 263471 - DNA, 374 bp, Glycine max
tctgttcattattatgtgcaagcacaccttttaatttattaatatcgggaacctataatcgtgcggtttgcatcaaaaaagccaggggcgacctaataccacttgtataaaaggttttagacatgactggtctgaaattatcagccctgaatcagattaagttgctaactattatatcatccattgatgatctgaactaccctgagaagacaaatacttattacattgtaaatgctccatacatattttctgcttgttggaaggttgtgaagccacttttacaagagaggacaagaagaaaaatacaggtgttaccaggttgtggacgagatgagctattgactatcatggattactcgtctctaccacatttc

SEQ ID NO: 263472 - DNA, 262 bp, Glycine max
  unsure (1)..(262): unsure at all n locations
gaaaagaaaaaaaaaaaaaaataaataaaaaaaaaaaaaaaaccgatcgttaatnaaaagggcagcccaccaaaanaaaaaaaaaaaaaaaaaaaaaaaaaaaaaaaaaaaaaaanaacaaaaaaaaaaaacaaaaaaaaacaaaaaaaaaaaaaaaaaaaaaaaaaaaaaaaaaaaacaaaaaaaaaaaaaaaaaaaaaaaaacaaacaaaaaaaaaacaaaaaaaacaaaaaaaaaaaacaaaaaaaaacaccacgaccc

SEQ ID NO: 263473 - DNA, 299 bp, Glycine max
  unsure (1)..(299): unsure at all n locations
ctttcataaaattcaantttctgaccacctgttaaaaaacaaagttctttagattttcttcttcacaaagatataagtgagctgaatctaccaaaatcatttaccattcaattccccaattgcaaagatgatcttattaactttgaagtttcaattccacctcattattcatattacttaagtcccacattttttttttccttttaaagtgtcttccatctatccacacgaaacaccaaaagttaagtttaaaacaaaagtctatcattcaaatatttacttttaaccaaaattttttc

SEQ ID NO: 263474 - DNA, 361 bp, Glycine max
caaagacatccttctcctggatgtttctcttctcactctcggaattgaaactctgcgttgtgtcattacaaagttgattcccacaaacactgttatcccaaccaagaaatctcaggtgttcaccacctatcaggaccagcagactacagtctccattcaggttttcgaaggcgagaggagtctcacaaaggattgccgccttcttgggaaatttgatctgtctggaattcctccagccccaaggggtacgcctcaaattgaagtgaccttcgaagttgatgccaacggcattctaaatgtgaaggcagaagacaagggcactggtaaatcagaaaagatcaccattacaaacgaaaaggga

SEQ ID NO: 263475 - DNA, 415 bp, Glycine max
  unsure (1)..(415): unsure at all n locations
aaaaaaaaaaaaaaatttaaattaaaaaaaaaaaaaaaaaannnaaccctcttngtttntngaatttaaaaaagggccccgcccccaccccaaaaaannnnnaaaannaaaaaaaaaaaaaaannaaaaaaaaaaaaaacaaaaaaaaaaaggaaaacaaaaaaanaaaaaaaaaaagaaaaaaaaaaaaaggaaaaaaanaaaaaaaaaanaaaaaacacaaaaaaaaaaaaaccaacaaacaaaaaaangaaaaacaaaaaaacaaaaacagaaaacaaaaaaacacaaaacaaaaaaaacaaaaaaaaaaaaaaaaaaaaaaaggcacaaaaaacaaaaaaaacaaacaaaaaaaaaaaaaaaaaaaaacaaaaaaaaaaaaaaaaaaaaaaaaaaaagaaaaaccaacacc

SEQ ID NO: 263476 - DNA, 415 bp, Glycine max
  unsure (1)..(415): unsure at all n locations
cgcgtcgctgctccgtaccantttcactgcttaaatttgagagaaaactctgcaaacatcgtggtttatcagtacctccttacaggtgatgagcttctctcggactccttccgttacaatgaaattgagaatggaatgctgtgggaagttgaggggaagtgggttgttaagggagcagttgatgttgacattggtgcaaacccttctgctgagggtggagaagatgagggagtcgatgacgcagctgttaaagttgttgacattgttgatacattcagacttcangagcaacccgcttttgataagaaacagtttgttaccttcatgaagaggtttatcaagaatttgactcccaagctcgatgcagagaaacaagagttgtttaagaagcacatttgagggagcaactaaatac

SEQ ID NO: 263477 - DNA, 390 bp, Glycine max
ggctggcattgttggaaaatacggttcccgttatggcgccagtctgcgtaagcagggtaggaagatggaagttagtcaacacaccaagtttttctgtgaattttgtggaaagtatgctgtgaagaggaaagctgtgggaatatggggatgcaaggactgtggtaaagtgaaagctggcggtgcttacactttgaataccgcaagtgccgtgactgtacggagcaccatcaggaggttgagggagcaaactgagagttaagcttttttgtttatgctatcaattactattagactttgcatgaagtgcctagtttgtattcactgaactgcactggttgtattcaaaagaaactccttaaagttaattttgaaatgactcttttaatttta

SEQ ID NO: 263478 - DNA, 248 bp, Glycine max
gaccaacgcgtccggggaaacctgctgttcttacacgtgttgtgtatagcatgactgacaacttgagaccaactggtgctgagtcaacatatgtcgccaatgctgttttagatggaagtgatgccattcttctgggtgctgagactttacgtgggttgtaccctattgagactatatctactgttggcagaatttgttcagaggctgagaaagttttcaatcaagacctttattttaaaaagacagtc

SEQ ID NO: 263479 - DNA, 442 bp, Glycine max
gttcatttctacacatccctagctctgtcgttccgtcgttgacgatggcgtttcgggtgcgaagccctgacctccgctctctctttcttctctctctcttgtccatcgcttccgccaatgtcttcttcgaagagcgtttcgatgacgggtgggaaaatcgatgggttaaatcagattggaaaaaagatgagaacgtggctggggagtggaaccacacctctggtcaatggaatggagacgctaatgacaaaggtattcaaaccagtgaggattacagattctatgctatttcagctgagtaccctgaattcagcaacaagggtaagacactagtctttcaattttctgttaagcacgaacagaagcttgactgtggtggtggctacatgaagttgctcagtggggatgttgatcagaagaaatttggcggggatactcctta

SEQ ID NO: 263480 - DNA, 459 bp, Glycine max
  unsure (1)..(459): unsure at all n locations
cccgggccgaccgacgcgtccgnttcatttctacacatccctagctctgtctttccgtcgntgaccatngcntttggggttcgaagcctttacctacgctctccctttcttctctctctcttgtccatcgcttccgccaatgtcttcttcgaagagcgtttcgatgacgggtgggaaaatcgatgggttaaatcagattggaaaaaagatgagaacgtggctggggagtggaaccacacctctggtcaatggaatggagacgctaatgacaaaggtattcaaaccagtgaggattacagattctatgctatttcagctgagtaccctgaattcagcaacaatggtaagacactagtctttcaattttctgttaaacacgaacagaatcttgactgtggtggtggctacatgaagttgctcagtggggatgttgatcaaaagaaatttggcggggatact

SEQ ID NO: 263481 - DNA, 416 bp, Glycine max
  unsure (1)..(416): unsure at all n locations
gggccgacccacgcgtcctcccactcttcctcccactcttttttttttttttcaataacaaacanctctnaagacttatgttaattcttatttaaccccccccccccatctttactntacttttacaaatcccataaaaatcttcacaccctaaattttcacattcatccaataactactaaatgttttaacaactaaattttttaaatcttcttaccttataaacatatcataacaacttttcatcacaattaccaattattattattacctattttctaataatcatcttttacctcacaaataattaaatctcattataacttatatcttaaattcattcctattttaaaaaaatctcaattattttattaactttacacttcattatatttcttattttaacatccccatta

SEQ ID NO: 263482 - DNA, 445 bp, Glycine max
cccacgcgtccgcggacgcgtgggggtttttgtggataagagtgagctataatggctgcgaggagaccgggtttaattgctttgtttgatgttgacgggactcttacagctcccaggaaggtggtcacaccggaaatgttgacattcatgcaaaaactacaaagggttgtaccggttgaagttgtggggggtcctacccttataaaaatttaaaaccacctggccagcacagttaccaatgagtatgattacgtattttctgagaatggtcttgtggctcacaaggaaggaaagctcattggaactcagagcttgaagtcattccttggtgaagaaaagctcaaggagtttattaactttacacttcattatattgctgatttggacatccccattaagaggggaacatttatggagttccgtagtgggatgctgaatgtctcac

SEQ ID NO: 263483 - DNA, 466 bp, Glycine max
  unsure (1)..(466): unsure at all n locations
attcccgggtcgacccacgcgtgcgagacagcanagcaaaaatctaccgtattctctcgctctttctttcactgtcacanacccagatccaggggcttcccagccaacggcgcctctgcggcccaacccctaaacttcctcatctacggccgcacgggctggattggcggcctcctcggctccctctgccgggcccagggcatctccttccattacggctcgggccgcctcgagaaccgggcctccctcgaaaccgacatagccctcctcaagccctcccacgtcttcaacgccgccggcgtcacgggccgccccaacgtcgactggtgcgagtcccacaaagtcgagaccatccgaaccaacgtcgtcggaaccctcactctcgccgacgtctgccgcgaccacggcctcattctcatcaactacgccaccggttgcattttcgagtacgactccgatcaccccc

SEQ ID NO: 263484 - DNA, 446 bp, Glycine max
ggcaaagatggggatgtggcactcttctttggactctcaggtaccggaaagaccactctgtcgaccgatcacaataggtatctaatcggagatgatgaacactgttggggtgacaatggtgtctccaacattgaaggtggttgctatgccaaatgcattgacctctcacgggagaaagagccagatatttggaatgcaatcaggtttggcacagtgttggaaaacgtggtgtttgatgagcacgaccgagaagttgattactctgacaaatcagttacagaaaatactcgtgctgcttatcctatagagtacattccaaatgcaaagttaccttgcgttggccctcatccaaagaatgtcatacttttggcatgtgacgcatttggggtactcccacccgttagcaagctaaacctggcacagaccatgtaccatttcattagtgg

SEQ ID NO: 263485 - DNA, 330 bp, Glycine max
  unsure (1)..(330): unsure at all n locations
actgcataaatttaagagaaatgtcttaatacatattggcccacccacacccccttacannttattatcttctctcnaactccttccnttacaattaaatttataatgtaatgctctctcaattttacgagaattgtgttgttaaaggagcagttgatgttgacatttttgcaaacccttctgctgatggtggagaatattagggagtccatgacgcaactgttaagtttgtttacatttttgatacattcagacttcatgatcaacccgctttttataaaaaacattttgttaccttcattaagaagtttatcaaaaattttactccca

SEQ ID NO: 263486 - DNA, 471 bp, Glycine max
cggaattcccgggtcgacccacgcgtgcgcccacgcgtccgtcaagcattgcatccctcttgatttgtagtttgttttgtgctttagagaaaagtggtgccaaatcaagaggggttttaagatcatagtgtgtgttttgcaacaatggctaagttctttgctgctatgatcttggcactctttgccatttccatacttcaaacagtggtaatggctgctaatgaacaaggaggccacttgtatgacaacaagagcaaatatggaagtggaagtgtcaagagttaccaatgcccatcacaatgctcgaggagatgtagccagacccaataccacaagccctgcatgtttttctgtcagaagtgctgcaggacatgcctgtgtgtgcccccggggtattatggtaataaagctgtgtgcccttgctacaacaactggaagaccaaggaaggaggacccaagtgcccttgagct

SEQ ID NO: 263487 - DNA, 454 bp, Glycine max
acccacccgtcctcttacccttttggtcactatttttccatcttccacctgctgaaagaaactccgaattgtgaattgttgtaaagaaaaaaaccgaaaacactgacactgttattctctgaattttctcaccatctacaactgaagttttaaccaatatggaaactgaaaagtctaatgtttcaaaggctgaagaatttaaactccttgccaatgaagtgttcaatgctcgaaaatactcccaagccattgatctatatacacaatcaattgagctgaacagtcaaaatgcagtttacttttctaatcgtgcctttgcccatcttcggcttgaggaatatggtagtgcaatacaagatgccacaaaggctattgaaattgatcctaaatattcgaagggttattacaggcgaggcgctgctcatcttggactggggaaattcaaggaagcact

SEQ ID NO: 263488 - DNA, 440 bp, Glycine max
  unsure (1)..(440): unsure at all n locations
gcaaatacttttaatcctcttatatcttactcaaacctgngacatccactatagatacagtatcattatcactttacaaccccccccccccatcaccttatccatcaataaattaaattctccaatctttcttcaattatcttaaacttttaaatctattctcataaataccaatctctttactttcataattaaaccctcatccctttatcctttttctccatttcttttctttttcaatatattatatttttccatttacttctaccatttccttcacctaaactaatatncattatattcccattaatttctaatccatcttaaatcatctttccaaaaattaaatcaaaaatacttcctcaaattttctttccttcaaattttccaacttactatataaatccccncccccaataaattttaattccattaaccca

SEQ ID NO: 263489 - DNA, 400 bp, Glycine max
cagacaagcatccagcgcagcatccaccacgtccgcaaaaatcccacaccgctggcttcgctggcccctcccctctctcacatcaaatccatttcgccaaatttcacatcactcttcacaaacagaaaaatagtcctccgccgccggcaatcctaggtttccggtgacgatgctcccctacgcttccatcccggaggccgtggcggcgctgggccgcaacctcaccttcgcggagaccctctggttcaactactccgccgccaagtccgattacttcctctactgccacaacattctgttcctcttcctcgtcttctccctcgtccccctccccctcgtcttcctcgaattcaagcgcttctccttcgtctcttcccacaagatccaaccaaaagtccgc

SEQ ID NO: 263490 - DNA, 428 bp, Glycine max
gtcagtcttcagagctaaaaatgttctcactcttccatctcagtatgtgttgacatgctggacaaggaatgctaaaaccggtacattgttagatgaacatgcatctgaattgccaagtacttctcgtgaatctgtaccagtttgttataacaatttacgacaagaagcaatcaaatatgttgaagaaggtgcaaaatcaatccaaatctatcatgttgccatgagagctctgaaagaagctgctaagaaggtttgcaccataaaaaatcagagttctggaacagcagagggagctacagcaaccaatggaagcaggggtgaattgcttgtagcagatgaagatgttccaagcaatcaatctgtggcggagaagcaaaagaaaataggagagttgactgctgagttagaggccacaaatcaacgatgtg

SEQ ID NO: 263491 - DNA, 445 bp, Glycine max
cccacgcgtccgcccacgcgtccggtttcgttacgttctgcttcgcgtggacgaacaagaagtgtaagttttcattcaatggccagcgctcagctctcagcaatatcttcgtcgatctctacggcgtcgtttgaagggcttcgaccttcggctgttcagtttgcttccgcgggcagaattagaattggcaatctctcccaaaggtctttccggggcttggttgtcaaagccgccaccgttgttgcccccaaatacaccgcgattaagcctctgggagacagagtgctgataaaaattaaggaagcagaggagaaaactgagggtgggattttgcttccatcaactgctcaaacgaagcctcaagggggtgaggtggttgctgttggagaaggaaagacaattgggaagaacaatgtagagattagtgtgaagactggtgcacaag

SEQ ID NO: 263492 - DNA, 429 bp, Glycine max
gacccacgcgtgcgcaaagacatccttctcctgtatgtggctcctctcactctcggaattgaaactgttggtggagtcatgtcatatttgattcccacaaacactgttatcccaaccaagaaatctcatgtgttcaccacctatcatgaccagcagactacagtctccattcaggttttcgaaggcgagaggagtctcacaaaggattgccgccttcttgggaaatttgatctgtctggaattcctccagccccaaggggtacgcctcaaattgaagtgaccttctaagttgatgccaactgcattctaaatgtgaaagcagaagacaagggcactggtaaatcagaaaagatcaccattacaaacgaaaagggacgtcttaaccaggaagaaattgagagaatggttcgcgaagcagaggaatttgca

SEQ ID NO: 263493 - DNA, 378 bp, Glycine max
cccttatctttctctcttctctctccccgtccaaaccctaactccctaccctattccgcgttctctgatccatcatgaaaggaggaaagtccaacaccgaatctaagagagccgatgccaaacttgctgtgaataagaagggcgccgccaccaagactaggaaacccgccggaaaggggaaggcagcgaaagatcctaacaagccaaagaggcctccaagtgctttcttcgttttcatgtaattataatatattgttatctctacgattcatttgacttccgatgcgctctcttatctttcctccgaataattttatcgtcaaaacttttatccttgtccaattgtaggtccacgcgttctttacctgttgttgtttg

SEQ ID NO: 263494 - DNA, 461 bp, Glycine max
aatggccgggtggacccacgcgttctcccactcttccgcccacacgttctaaaaaaatgggttcttcttcttccatatagaccgggtgtttgattttagcatcactcccctcttcagcactctgtgccaaccctcgtagaccaatggatgtacaatttggccgaaactacatgcccacatgggcctttgatcacatcaaatacttcaatggaagttctgacattcagcttcatcttgacaagtacactggtactggcttccaatccaaagggtcatacttgtttggtcacttcagcatgtacataaagattgttcctggagattcagctgtcacagtcactgctttctatttatcttcccaaaatgcggagcacgacgagatatactctgagttcttggggaacagaacaggacaaccttacattttgcaaacaaatgttttcacatgaagcaagggtgac

SEQ ID NO: 263495 - DNA, 447 bp, Glycine max
gttgtgtccaacccattggggaagtctggaggtgccctcatccaccaattaatgatattggctttggggtcactagctaattaaaccccatacttgggaggagtgcttctgctgattgtttctgcctggctagcagcggcaaaatccttggatacccaatttactgcattgcgtaaagaggaagaactcgagaaagagatggaacgagcagccgccgtcaagataccagtggtggctgagactgagagtggaaatggttctcttgcaactggttcaccactgaatccatcctcaggtgactcctcaagcagtccatctgaagcctcaactcctcgcaattaaaatgtgccttctttctgtgagaaattgcctcacagaatgagcaaatagagctcttttgagagcagtgttaggtgaaactatttgttgtaggtttatatataagct

SEQ ID NO: 263496 - DNA, 357 bp, Glycine max
  unsure (1)..(357): unsure at all n locations
ccctcttattatttncatttaatatctctccttctttaaatcttcctcccaattataacttaattttttatctattcctaataaacacatttcttcaaaacaattaccttaaatccccaacctttctcaaaatcttcaccactattttctatttaattttccaaaattttttcattcatcatacattatactatttcaacttaattacctatattaacttataaatacttttttaaaaatatattttattcaacacaacatatatttcttatttatcaatacacatccttctaaataaataaacatttaacaaaacatatttttcttaacaatttcaattacatattataccattat

SEQ ID NO: 263497 - DNA, 436 bp, Glycine max
ggaattgccggatggacccacgcgtcctcccactcttccgcccacgcgtcctaaaaatatgggttcttcttcttccatatgggaccgtgtgtttgattttggcatcactgccctctgcatcactctgtgccaaccctcgtagaccagtggatgtacaatttggccgaaactacgtgcccacatgggcctttgatcacatcaaatacttcaatggaggttctgacattcagcttcatcttgacaagtacactggtactggcttccagtccaaagggtcatacttgtttggtcacttcagcatgtacataaagatggttcctggagattcagctggcacagtcactgctttctatttatcttcccaaaatgcggagcacgacgagatagactttgagttcttggggaacagaacaggacaaccttacatttttcaaac

SEQ ID NO: 263498 - DNA, 448 bp, Glycine max
  unsure (1)..(448): unsure at all n locations
acccacgcgtgcgggcggctctgtgtcggacgcgccggcggtttttgattagaagacggagttcnacntgaggatcgtgttaattccaancaacgctcgcatcncgctaattaaggcggtgagggcattgacaaacctagcgctgaaggaggcgaaggagttgatcgaagggttgccgaagaagttcaaggaagggatttcaaaggacgaagctgaagatgcgaagaagcaactcgaagaagctggtgccaaggttaccattgcttaaacactgtttagctgcaacatatatgttctgcttcttcttttgtgggttgtagttgagttcaccagcacactgtaattccattcccattttgtctggatttcaatcttttatttgtaatgaagaaatatgagctcttaattttataattattttttaaaacgcatatgaggtgtttgtgtg

SEQ ID NO: 263499 - DNA, 486 bp, Glycine max
  unsure (1)..(486): unsure at all n locations
ccggnccggaanncccgggncgacccaagccgtcggccaacccttccaaaaaggcctgggcttagttgataagcataactgggtgaggaagaaagaaggagagtgaagaagatggcgtcgagcgcagcggtaccgttttggagggcggcggggatgacgtacataacatactcaaacatatgcgcgaatctgctcaggaattgcctcaaggaaccctacaaggccgaatccctctctcgtgagaagctccattttgttctctccaaatgggtcgacgccaagcctgaaaaacctactattcgttcagacactccaaagcaatgatctggaatagttggaagctataaatgcataaatctttgagatctggaagttcattgtcattttgaacctttctgggatggttaattcctttggttttttctcttcatgaaatggaacatgcacttgaattttgattgcaccggtaatcttgtaataatacaa

SEQ ID NO: 263500 - DNA, 129 bp, Glycine max
aaaaatataaaaaaataaaattaaaaaacaatccacaaaaaaaaaatcaaacaaaacataaaaaaaaaatatataaaaaataaaaaaaaaaaaaacaaaaaataaaaaaaaaaaataaaaacatcaatt

SEQ ID NO: 263501 - DNA, 400 bp, Glycine max
cccacgcgtccggacagaagagagcgttctagtcgcaaccctaataagaagaaccagcgggtcaagcgagtgacatccaccagccatgggtcgtatgcacagccgcggtaagggtatatcctcttctgctttgccctacaaaaggacaccccctagctggctcaagatctcttcgcaagatgtggaagaaaatatctgcaagtttgcgaagaagggtttgaccccgtctcagattggtgtcattcttcgagattctcacggtattgctcaggtcaacagcgtcactggcagcaaaatccttcgcatcctcaaagctcacgggcttgcgcctgaaattccagaggatctttaccatttgattaagaaagcaagttcaattaagaaacatcttgagaggaac

SEQ ID NO: 263502 - DNA, 342 bp, Glycine max
  unsure (1)..(342): unsure at all n locations
ggctacttttgattgcttgatgaaaacctatggattcctgacaccagaattctggaangggagtcgcttctccaaatctccattccaagagtacacaaatctactgccaaaaccaacaggaaaaactttattcttgaagaaggaaagggtgaatcctgaattggtagttttgctttatggatgttttaggaactttattactttacatactttgttggttctgtgctttacttttgtgtttgatagacagtatgtctctgtatgcattttgattgtttccaaaatttaattgactgcgcnnnaaaaaaaaaaccaatttttatttttttttccaaaaaataa

SEQ ID NO: 263503 - DNA, 434 bp, Glycine max
  unsure (1)..(434): unsure at all n locations
ggcggcgctgtggcggacgctccggcggtttttgaggagaagacggagttcgacctgntggatcgattatgtgccgagcaacgctcccatcncngtgattaaggcggtgagggcattgacgaacctagcgctgaaggaggcgaaggagttgatcgaagggttgccgaagaagttcaaggaagggatttcaaaggacgaagctgaagatgcgaagaagcaactcgaagaagctggtgccaaggttaccattgcttaaacactgtttagctgcagcatatatgttctgcttcttctttttgtggntgtagttgagttcaccagtacactgtaatttcatttccaattttgcctgatttcaatcttttattttgtatgaggaaaaatgagttcctaattttataatattttttttaaagccgaatgaggggttggtg

SEQ ID NO: 263504 - DNA, 383 bp, Glycine max
  unsure (1)..(383): unsure at all n locations
cggacgcgtgggcggacgcgtgggctgcttacaaagcaagcaaaacaaaagacgcagtnagggagaggatgaagagggtgcttctgctgcttctggccttcactgttcttctcatgttgccagaagcttctgctacaaagtttactgttggaaacaaccagttttggaaccccaatattaactacactgagtgggctaaaggcaaacatttctaccttggtgactggctctattttgtgtacgataggaaccaagcgagcgtgttggaagtgaacaagacagattatgaaacatgtaactctgatcatccactcacaaattggactaagggagctggaagagacgtggttccattgaatgtaacaaaaacttactacattatc

SEQ ID NO: 263505 - DNA, 442 bp, Glycine max
  unsure (1)..(442): unsure at all n locations
cggaaatcccgggncgacccaagccttcgcaacccttaacccttccaaaccaaaaaaagtctcacccttgggccaaaaacccgcaagggggggtaggcaaattaagaacaaaccataccccaagtcacggttttgccgtggtgttcctgatcccaagatcaggatttacgatgttggtatgaagaagaagggtgttgatgaatttcctttctgtgtccatctggttagttgggagaaggaaaacgtttctagtgaggccctggaagctgctcgtattgcttgcaacaagtacatggccaaatttgctggaaaggatgctttccacttgagagtcagggtgcacccattccatgttcttaggatcaacaagatgctttcgtgtgccggagctgataggctccaaactggaatgagaggtgcttttggaaagccacagggtact

SEQ ID NO: 263506 - DNA, 453 bp, Glycine max
aaaaaccgggccgacgccacgcgtccgcccacccctccggcgaaaacccccattttttacctctgttcatcgtctaccgcgctttgttttttatcagaactatgattgagctttttaaagtaaaggaaaagcagagagaacttgcagaaaatgcaagtggcggaccacctgttaagaagcaaagtgctggagagttgcgtcttcacaaagatataagtgagctgaatctaccaaaatcatgtaccatgcaattccccaatggcaaagatgatctgatgaactttgaagtttcaattcgacctgatgatggatattacttaggtggcacatttttgttttcctttcaagtgtctcccatctatccacacgaagcaccaaaggttaagtgtaagacaaaggtctatcatccaaatattgacttggaaagaaatgtttgtcttaacatcttacgag

SEQ ID NO: 263507 - DNA, 353 bp, Glycine max
  unsure (1)..(353): unsure at all n locations
ttgaaacagagaaggggttgacggaaaggaaaaccaaatcaaacccaacccaccttgtccgatctgccaccaggtgtggttgttgtgatttgaatggaggcaagtggaggtggcggtggcggtgcttcaccgtctgcaccagtgaagcaatatctgcacgatttctcgaagctgtttcagtactatctggataaatccactccacattccacgtacagatggattgggactnttgtgatagcatccatctacgttttacgcgttgtttatgtgcaggggttttacattgtctcttatggcctcggaatctaccttctgaatctcttgattgttttctctcccctttggtcgat

SEQ ID NO: 263508 - DNA, 442 bp, Glycine max
cccacgcgtccgtcaagcattgcatcttttttgatttgtagtttgttttgtgctttgggtaaaagttctgccaaatcaagaggggttttaagatcatagtgtgtgttttgcaacaatggctaagttctttgctgctatgatcttggcactctttgccatttccatacttcaaacagtggtaatggctgctaatgaacaaggaggccacttgtatgacaacaagagcaaatatggaagtggaagtgtcaagagttaccaatgcccatcacaatgctcgaggagatgtagccagacccaataccacaagccctgcatgtttttctgtcagaagtgctgcaggacatgcctgtgtgtgcccccggggtattatggtaataaagctgtgtgcccttgctacaacaactggaagaccaaggaaggaggacccaagtgcccttgagct

SEQ ID NO: 263509 - DNA, 406 bp, Glycine max
ccacgcgtccgcccgtcgctgctccgtaccagtttcactgtttaaatttgagagaaaactctgcaaacatgttggtttatcaggacctccttacaggtgatgagcttctctcggactccttccgttacaatgaaattgagaatggaatgctgtgggaagttgaggggaagtgggttgttaagggagcagttgatgttgacattggtgcaaacccttctgctgagggtggagaagatgagggagtcgatgacgcagctgttaaggttgttgacattgttgatacattcagacttcaagagcaacccgcttttgataagaaacagtttgttaccttcatgaagaggtttatcaagaatttgactcccaagctcgatgcagagaaacaagagttgtttaagaagcacat

SEQ ID NO: 263510 - DNA, 382 bp, Glycine max
cgtccgtttttctactttgagtcttctggatccttttttttctccttgaactcaaacatggcagaggaggtggttctgctagattgctggccaagtccatttgggatgagggtcaggattgcacttgctgaaaagggtatcaaatatgagtacaaagaagaggacttgaggaacaagagtcctcttctcctccaaatgaacccggttcacaagaagattccggttctcatccacaatggcaaacccatttgtgaatccctcattgctgttcagtacattgaggaggtttggaatgacagaaatcccttgttgccttctgacccttaccagagagctcaagctagattctgggctgattatgttgataagaagatatatgatc

SEQ ID NO: 263511 - DNA, 324 bp, Glycine max
aaaaaaataaaaaataaaaaaaatataaataaacaaaaaaaaaataaaattaatcaatccataaaaaaaaaaaataaaaaactttttaaaaaaaataaaaaataaaaaaaaaaaataaaaaaaatacaaaataaaaaaactaataataaaaaaaataaaaataaaataatctaaaaaaaataataaaaaaaaaaaaaaaaaaaaaaaaaaaataaaataaaataaaaaaaaaaaaaaaaaaaaatcaaaaataaaaaaaaaaaaataaaaaaaaataatatataaaaaaatataaaaataaaaataaataaataatcataatat

SEQ ID NO: 263512 - DNA, 263 bp, Glycine max
  unsure (1)..(263): unsure at all n locations
ccgcccacccgtccgcccacccgtccgggganggtagattagttagaacaagatgttgcanctacgctatttttcgattttctccgaaatgcttttgattctcacgctcgtcttcaaaaccccactgagaaaactcgtcatcgtttccctcgatagtgtgaagcgcggtcgcggtcccgtggtggtttccaccgtgggcgccacattgatggtggttctcgcttcgagcctctacagcatggccaagatccagcaactcaccc

SEQ ID NO: 263513 - DNA, 333 bp, Glycine max
  unsure (1)..(333): unsure at all n locations
aaaacatcaacnttccagggctgcagttttcactatgatcgatagacccccaataccagagttggtgaaccatccaaccgtccaaagcaagattcgtgatgagatatcaaaagtgctaaaaggggagccagttacagaatccaacctacacgagctaccatacttacaagccacggtgaaagagacactgagacttcacaccccaattcctcttctggtgccccacatgaacctggaagaagcaaagctaggagggcacactgttccaaaagagtcaaaggtggtggtgaatgcttggtggcttgccaacaacccttcatggtggaagaaccc

SEQ ID NO: 263514 - DNA, 315 bp, Glycine max
  unsure (1)..(315): unsure at all n locations
ccgtttttcttcctcaaaaacacatcctaatgttcttaccgcggaggtggcgatcgtggcggcggccgtgtcggtttcggacgtggattcngcgggcgaggacccggaggtgacaggggccgaggccggcgccgaggcccccgccgcgaggaagaggagaagtgggtcccagtgaccaaactgggccgcctggtgaaggagggaagaatccgaagccttgaacagatctacctccactcgctcccgatcaaggagcaccagatcatcgacacgctcgtgggtcccaccctcaaggacgaggtgatgaagatcacg

SEQ ID NO: 263515 - DNA, 324 bp, Glycine max
gtcagtcttcagagctaaaaatgttctcactcttccatctcagtatgtgttgacatggtggacaaggaatgctaaaaccggtacattgttagatgaacatgcatctgaattgccaagtacttctcgtgaatctgtaccagtttgttataacaatttacgacaagaagcaatcaaatatgttgaagaaggtgcaaaatcaatccaaatctatcatgttgccatgagagctctgaaagaagctgctaagaaggtttgcaccataaaaaatcagagttctggaacagcagagggagctacagcaaccaatggaagcaggggtgaatt

SEQ ID NO: 263516 - DNA, 327 bp, Glycine max
aaaaataataaaaaaaaaataaaaacaaaaaaacacacacaaaataaaaaaataataaaaaaaaaaaaacaaaaaaaaaaaaaaaaaaaaaatcacaaaaaaataaatacaaacaaaaaaaataaaaaataataaaaaaaaaaaaaaaaaaacaaaaaaaacaaaaaaaaaaataaaaaaaactaataccaatcaaaaaaaaaaaaaataaatcatcttaaaaaaatcaaaaaatataaacatcatataaaaaaaaacattaaaaaaaattaaaaaaacatttttaaaaaacataaaaaaaaataacaaaaaaaaaataattatata

SEQ ID NO: 263517 - DNA, 453 bp, Glycine max
ccggtccggaattcccgggtcggcccaacccgtccggcccccggtaaaatcagttatagtcttcttgtgagacaggaggggcacaaacggattatgtggtcatgttcttggaatccacatggtcacgaatttgcgacaggttcaagggataagacagtgaaaatctgggccatagagagggagtctgtcaagcagcttatgtctttacctcaatttacgagtagtgtaacagcattatcttgggttggtctccatcatcggaagaataatggacttctagctgttggaatggaaaatggccaaatagagttgtggaatctgtcttataacagagcagatgatgggagcatagcagcaccaggtttggctgcttctcttgctgtacgtatagatccttttatatgccatgcgtctaccgtaaaccgtctagcatggaaaaaaaatgaggatgat

SEQ ID NO: 263518 - DNA, 435 bp, Glycine max
  unsure (1)..(435): unsure at all n locations
ggcggctctntnnctgacgcgccggctgttgttgaggagaagacggagttcgacntggtnatcgatgaggtgccgagcaacgctcgaatcgcggtgattaaggcggtgagggcattgacgaacctagcgctgaaggaggcgaaggagttgatcgaagggttgccgaagaagttcaaggaagggatttcaaaggacgaagctgaagatgcgaagaagcaactcgaagaagctggtgccaaggttaccattgcttaaacactgtttagctgcagcatatatgttctgcttcttcttttgttggttgtagttgagttcaccaatacactgtaattttaatttccattttggctggatttcaatcttttatttgtaatgaggaaatatgaagtcctaattttataatatttttttttaatgcgaattaggtgtttgttg

SEQ ID NO: 263519 - DNA, 453 bp, Glycine max
tcccgggtcaagccacgcgtccacccacgcgtccgcccacgcgttcgctccagatttaagaagaaacttaatcgagatcactttaggtcactaatacatcatggcagacgagacccacaacaagtatgagagctctgaggttgaggtccaggatcgtggtgtttttgactttctcggtaagaaaaaggatgaagaagacaagcctcatcctcaggaggaggtcatcgccaccgagtttcaaaaagtcactgtctcagaccaaggagagaacaagcacagcctcttagaaaagcttcaccgatctgacagcagctctagctcttcaagtgaggaggaaggagaagatggagagaaaaggaagaagaagaataaggaaaagaaagggctgaaagagaagatcgaggagaaaatagaaggtgatcatcatcatcacaaggatgaggacacaagtgt

SEQ ID NO: 263520 - DNA, 199 bp, Glycine max
accttcaacctcacccttctttcaagactctttgaaaaattctaatgccccttataaaccaaccactcactcttctcatcaatatatcacctctaatttccgacctacatctctattatatttcaaatctcattttacatactccttacatcaatcactacaacaccccctcacaactcacatatatcactacaacttc

SEQ ID NO: 263521 - DNA, 417 bp, Glycine max
cccacgcgtccgggagaagcttaaggagcaaaagcaatggcgccgaagaaggggagaaccgggacaaggaaccctgatttggttagggggattggcaagtattcgaggtcgcagatgtaccacaagaggggcatctgggccatcaaggccaaaaacggtggcgttttgccccgccacgatcccaagcccaagcccgaggccccggcccagaagccgcccaagttctaccccgcggacgatgttaagaagcccctcgtcaacaagcacaagcccaaacccgcgaaactcagggctagcattactccagggactgtgttgatcctgcttgctgggaggttcaagggaaagagggttgttttcctgaagcagctcccatctggatggcttcttgtaactggtccctttaagatcaatggg

SEQ ID NO: 263522 - DNA, 437 bp, Glycine max
tttgaatacattccttggagtttatactgaaagatgggtttgaagatggcgggactgatggtaggcctttccgtcatgctccttttggtctcctctgaggtggcatccacgaatacaaaagaggaggcaaatggagtggatgatgccaaatatcccggtggaagctatggagggggttacccaggtcatggcggtggcggttatcctggccatggcggtggcggttatcctggccatggcggtggtggtggctatcctggtcatggtggtggccaccctggtcatggtggcggctaccctggccgtggtggtggatactgtaggcatggctgttgcggtggccggacatacaacggaggttgcagaaggtgctgctataacgctggcgaagctgttgctgcacaaacctcaagatagactcacgattaagacgatgc

SEQ ID NO: 263523 - DNA, 517 bp, Glycine max
  unsure (1)..(517): unsure at all n locations
ccgggtcgagccacgcgtccggcagagcagagatctagcgtattctctcgctctttctttcactgtcacagagccacatccatgggcttcccatccgacggcgcctctgcggcccagcccctaaacttcctcatctacggccgcacgggctggattggcggcctcctcggctccctctgccgggcccagggcatctccttccattacggctcgggccgcctcgagaaccgggcctccctcgaaaccgacatagccctcctcaagccctcccacgtcttcaacgccgccggcgtcacgggccgccccaacgtcgactggtgcgagtcccacaaagtcgagaccatccgaaccaacgtcgtcggaaccctcactctcgccgacgtctgccgcgaccacggcctcattctcatcaactacgccaccggttgcattttcgagtacgactccgatcaccccctcggatccggtatcggcttcaaagaaaccgactctnccaatttcaccggttctttttact

SEQ ID NO: 263524 - DNA, 206 bp, Glycine max
gtccgtaattcaccgggtcgacccacgcgtacgagaaaatgtaattttcagcactgtccaggaaatttaaagattgtaattctttatgcctcattttattattaaaaaaaaaaaaaaaaaaaaaaaaaaaaaaaataaaaaaacaaaaaaaaaaaaaatataaatatacaaaaaatatatattaaaaaaacatagcatactatttt

SEQ ID NO: 263525 - DNA, 434 bp, Glycine max
  unsure (1)..(434): unsure at all n locations
cccacgcgtccggataaattgtctcactccgacatgattgctgtcctctgggaaatgatggttanggggaccgacacggtggcggttttgattgagtggatactggcgaggatggtgcttcatccggaggtgcaaaggaaggtacaagaggagttggacgcggtggttaggggtggcgctttgacggaggaggtcgtggcggcgacggcgtatcttgcggcggtggtgaaagaggttctgaggctgcacccgccgggcccgcttctctcgtgggcccgcttggccatcactgatacgaccattgatgggtatcacgtgcctgcggggaccaccgctatggttaatatgtgggccatagcaagggacccggaggtgtggctggacccacttgagttcaagcccgagaggttcatgggtctgggaaacgagttttc

SEQ ID NO: 263526 - DNA, 500 bp, Glycine max
ccgggtcgagccagcgcgtccggttgccgggctctaccgtggtttcaacatctcatgtgttggaatcatcgtgtatcgtggtcctggctttttattgaatgattgtgttaaaccagttgtcctcacagggtcattgcaggatagcttttttgccagctttgcccttggatggctcatcaccaatggtgcaggtcttgcatcatacccaatagacactgttagaagaagaatgatgatgacctctggtgaagctgtcaagtacaagagctccttggatgcattcacacagatcctcaagaatgagggtgccaagtccttgttcaaaggtgccggtgccaacatccttcgtgccgttgccggtgctggtgtgcttgctggttatgacaagttgcaggttcttgtgttcggcaagaagtacggctctggtggggcttaagttctaatgctgagtcagtactattatttgtttttagatggcgattgaaaaaaccattgagttc

SEQ ID NO: 263527 - DNA, 485 bp, Glycine max
cccacgcgtccgcggacgcgtgggggtttttgttgataagagtgagctataagggctgccaggggaccgggtttaattgctttgtttgatgttgacgggactcttacagctcccaggaaggtggtcacaccggaaatgttgacattcatgcaagaactacgaaaggttgtaacggttggagttgttgggggttctgaccttataaagatatcagagcaacttggcagcacagttaccaatgagtatgattacgtattttctgagaatggtcttgtggctcacaaggaaggaaagctcattggaactcagagcttgaagtcattccttggtgaagaaaagctcaaggagtttattaactttacacttcattatattgctgatttggacatccccattaagaggggaacatttatggagttccgtagtgggatgctgaatgtctcacctattggccgaaactgtagccaagaagaaagagatgagtt

SEQ ID NO: 263528 - DNA, 173 bp, Glycine max
aaaaaaaaaaaaaaaaaaaaattaaaaaaaaaattaaaaaaaaacaaacaaaaaagagaattcgaggaaaattacacaaacatacaaagaaaatacaactaaaataaagacaccaaaaaacaaaacaatggccgccttttaacaaaaaaaaaaactaaaaaaacacaaacaaa

SEQ ID NO: 263529 - DNA, 315 bp, Glycine max
taccgggtttcaacatcttttttattcgaatcatcctaaatacgactctaggctatttatgaaatgatttcaacaaaccacaaatcctcacatagtcattgcaacataactattttgccatctttgcccttgaatggctcatcaccaatcatgcaagactaacatcatacccaatagacactgctacaagaagaatgatgatgacctctggagaaactgtcaaatacaataactccttagatacattcacacagatcctcaaaaatgatggttccaagtccttattcaaagaagccaataccaacatcctacaaa

SEQ ID NO: 263530 - DNA, 462 bp, Glycine max
cgtccactttttgagaacaagagggcattggatctggtttttctgccaaattgtctcaaatttgcgtattgttatttattagattgtgattggtgacgttgaatttggttgcaggaattccgacggggcgattctccggtcgtcggccggcgagactaggaaatcggcgtcgccggagaaggaggaccggtactacacgacgcggggttcggcggaggagaacggcaaggtcaccggcgacggcaacaacggcgaggaacgtgccctagtttggcccaagctctacatcactctctcaagcaaggagaaagaggaagactttctcgccatgaagggttgtaagcttcctcagcgacccaaaaagagagccaaaatcatccaaagaagcttacttttggtgagtcctggggcgtggttgtctgatatgtgccaagaaagatatgaagttagggagaagaaaag

SEQ ID NO: 263531 - DNA, 326 bp, Glycine max
atgtggacattcatcgcaagaactacaaagcgattgcacgtctgaacttgatgggggtgattaccttataaatatatctaaggatctgggcatcacagacaccaatgagaacaattacttatcgccctacaatgcactggaggatcacaacgtatgaaagctgattatagctcataacatgtagtcacacctaggtgaatacatactcacagcggtgatcaactgtacacttcataataatgctgatctggacatctccattatgacgggaacatttatggagttccgcattgggatgcttaatgccttacctattggtcgaaact

SEQ ID NO: 263532 - DNA, 484 bp, Glycine max
cgtcagttcaagaacaatttattgcactaatattgacattaagcttactcaagccgaggtcaaactcttgtttgaatctatttgtggagaggttcaacggttgaggcttcttggagattaccatcattcaactcgaattgcttttgttgagttcacagtggctgagagtgcaattgcagctctaagctgtagtggggtgattctgggttcactgcccataagggtaagtccatcgaagacaccagttcgatcacgtgctcctcgccctactatgcactgaatcaactttccatgtttctggggttgattgctgctgagatatatttacatatatatatatacatagaaacagctgtgttctaaggaacatgtggcatttagttggtacttttgtcctcatgtcttacagtatggttactttgcttccccttgggggattatggttctctgatttagcttgtagtcggatcgaactttgaggatc

SEQ ID NO: 263533 - DNA, 493 bp, Glycine max
  unsure (1)..(493): unsure at all n locations
ttcaagaacaatttattgcacaaatattgacaagaagcttactcaagccgatgtcaaacacttgtttgaatctatttgtggagaggttcaacggttgaggcttcttggagattaccatcattcaactcgaattgcttttgttgagttcacagtggctgagagtgcaattgcagctctaagctgtagtggggtgattctgggttcactgcccataagggtaagtccatcgaagacaccagttcgatcacgtgctcctcgccctactatgcactgaatcaactttccatgtttctggggttgattgctgctgagatatatttacatatatatatatacatagaaacagctgtgttctaaggaacatgtggcatttagttggtacttttgtcctcatgtcttacagtatggttactttgcttccccttggnggattatggttctctgttttagcttgtagtcggatcgaactttgaggatcttgatgacttaatta

SEQ ID NO: 263534 - DNA, 497 bp, Glycine max
  unsure (1)..(497): unsure at all n locations
atggctcccaaaccgcctagtacgggtctgtttgttggactgaacaagggtcacgtcgtcaccgggaaggaattgcctccacgcccctcagatcgtaaggggaaaacaagcaagagggtgcactttgtgaggaacctcataagagaggtagccggttttgcaccctatgaaaagcgtataactgagttgctgaaggttgggaaggataagagggcactgaaggttgcaaagagaaagctcggaacacacaaacgcgcaaagaagaagcgtgaggaaatgtccagtgttctcaggaagatgagggctggtggtgctggagacaagaagaaataagtcttatttactgttttccagattcactagatggacctgtgtattgatggacgagctttcatatttttgctttggttcaattagtttacttcaagattttgtttgagaaatatgttttgcttaactgagacatgatttatggaagaagctagnatggattattt

SEQ ID NO: 263535 - DNA, 471 bp, Glycine max
  unsure (1)..(471): unsure at all n locations
gtcgaccacgcgtccgggcggcgctgtggcggacgcgccggcggtggttgaggagaagacggagttcggggtggtgatggaggatgtgccgagcaacgctcgaatcgcggtgattaaggcggtgagggcattgacgaacctagcgctgaaggaggcgaaggagttgatcgaagggttgccgaagaagttcaaggaagggatttcaaaggacgaagctgaagatgcgaagaagcaactcgaagaagctggtgccaaggttaccattgcttaaacactgtttagctgcagcatatatgttctgcttcttcttttgttggttgtagttgagttcaccagtacactgtaatttcatttccattttgtctggatttcaatcttttatttgtaatgaggaaatatgagttcttatttttatattattttttttaatgcgtatgaagtgtttgttgaaaaaaaaaaanntnnnaatat

SEQ ID NO: 263536 - DNA, 237 bp, Glycine max
tcaaattcctactgccttcaatccttttgcttattcaaatgctaatgactcctattctgtttcaaaagactattttcatattctcttacaacatctaaatgtaattaaaatccttacaacctttcatgtatttaaaaaataattcaactataacaagatacttaaatatgttaataaagacttctgttacaattcaacattttttcaagacccataactataacactttattcaact

SEQ ID NO: 263537 - DNA, 410 bp, Glycine max
  unsure (1)..(410): unsure at all n locations
agaaaacctaagcttagaattagaaacaaagaaaagaagaaaggaaagaattgatcgttgggaatgcagggaggaaagaaagcgggagagtccattaaggaaacagctacaaacattggtgcttctgccaaggctggcatggagaagaccaaggccactgtccaagagaaggcagaaagaatgacagcacgtgatccggtgcaaaaggagttggcaacccaaaagaaagaggcaaagatgaaccaggcggagctggacaagcaggcggcgcgtcagcataacacggcggccaaacagtccgtcaccacggctgggcacatgggacatggccaccacaccaccggaaccgggactgggaccgncacgtattccacccaccgggaaatattggcaagccaatgggggccaac

SEQ ID NO: 263538 - DNA, 303 bp, Glycine max
aaaaaaagccctagcaccccattaaagaaacatctacaaacatttgtacttctgccaaggcttccatggataataccaaggccactgtccaagataatgcataaagaatgacatcactttatccgctgcaaaattatttaccaacccaaaataaatatgcatacatcaaccattcatatcattacaaacattctactcgtcatcataacacagttaccaaacaatccaccaccactgcttaacacattttacattgccaccacaccaccataacccttacttgaaaccacactaattccacca

SEQ ID NO: 263539 - DNA, 315 bp, Glycine max
acatttaaaataccaaagcaaagaattgatcgtaggaaaggtttaaaataaaaaaagcgccagacaccattaaggaaacagctacaaacattggtgcttctgccaaggctggcatggagaagaccaaggccactgtccaagagaaggcagaaagaatgacagcacgtgatccggtgcaaaaggagttggcaacccaaaagaaagaggcaaagatgaaccatgcagaactggacaatcaagcgtcgcgtcagcataacacggcggccaaacagtccgtcaccacggcttgtcacatgggacaagtccaccacacca

SEQ ID NO: 263540 - DNA, 427 bp, Glycine max
caaagacatccttctcctggatgtggctctcctcactctcggaattgaaactgtgggtggagtcatgacaaagttgattcccagaaacactgttatcccaaccaagaaatctcaggtgttcaccacctatcaggaccagcagactacagtctccattcaggttttcgaaggcgagaggagtctcacaaaggattgccgccttcttgggaaatttgatctgtctggaattcctccagccccaaggggtacgcctcaaattgaagtgaccttcgaagttgatgccaacggcattctaaatgtgaaggcagaagacaagggcactggtaaatcagaaaagatcaccattacaaacgaaaagggacgtcttagccaggaagaaattgagagaatggttcgcgaagcagaggagtttgcagaggaagacaag

SEQ ID NO: 263541 - DNA, 377 bp, Glycine max
  unsure (1)..(377): unsure at all n locations
ataatgatgatattgaggttgaggttgtggagggtgttgatctttggttgaagattcaagaggaggcaaggttagatgttgatcaagaaccaattttatccagctactatttcagttccattttgtctcacaaatctttggagagtgccttggccaaccacctctccacaaatttgagcagcttgagccttccaagcagcaccctttttgaccttttcatgggtgttttggttgatgatggagatgatgacatcgtangtgctgtgaaggatgatttgatagctgttaaggagagggaccctgcttgcataagttatgtgcattgcttgctgaatttcaagggttttttggcatgtcaggctcataggattgctcac

SEQ ID NO: 263542 - DNA, 349 bp, Glycine max
  unsure (1)..(349): unsure at all n locations
cttttctactttgagtcttcttgatccttctttttctccttgaactcaaacatggcagatgaggtggttctgctagatttctggccaagtccatttgggatgagggtcaggattgcacttgctgaaaagggtatcaaatatgagtacaaagaagaggacttgaggaacaagagtcctcttctcctccaaatgaacccggttcacaagaagattccggttctcatccacaatggcaaacccatttgtgaatccctcattgctgttcagtacattgaggaggtttggaatgacagaaatcccttgttgccttctgacccttaccagagagctcangctagattctgggctg

SEQ ID NO: 263543 - DNA, 241 bp, Glycine max
  unsure (1)..(241): unsure at all n locations
ccatcaactcaaacatancaaagganggttttaatttaaatttttccccacatacatttaatataaatatcattatttcactttctcaaaatgttatcaaatattattacaaataataatactttattaacaaaattcctcttctcctccaaataaacccatttcacaataatattccatttctcatccacaatttcatacccatttataaatccctcattactattcattacatttatta

SEQ ID NO: 263544 - DNA, 434 bp, Glycine max
atacccggctcgacgcacgcatgcggtcatatgctctatgtttactggttagggttctaagcctggtgcttcgatgaagggtgcgttttatataaggaactggtatgagacgtttctataagacatcttggcccgtccatgattcagcagatgcagcatgcttgcaatgaatgcaagggtactggagaaaccatcaacgacagagatcgctgcccacagtgcaagggagaaaaggttgtgcaggagaaaaaagtccttgaagttattgtggaaaagggaatgcataacgggcagaagattacattccctggcgaagctgatgaagcgccagacacaattactggggatattgtctttgtccttcagcataaggaacattccatattcaaaagaaaggcttaagatctttttgtagagcacattttgtcccttac

SEQ ID NO: 263545 - DNA, 422 bp, Glycine max
gaatacccgggtggacgcacgcatccgcggaacgatgactcggcgtcggatccacggtgaggttgccgacgtggaaggagagggagagcttcaatatgagagagagaagacgaagagcgattgcagctaagatctacactggccttcgagcccaggggaactacaagcttccaaagcactgcgacaacaacgaggtcctgaaagctctctgcgccgaagctggctggatcgtggaagaagatggcacaacttatcgaaagggatgtaagagacccacgagtgagattggaggaacaccactgaacttaagcgcgtgttcttccattcaggcaagtccacaatcctcgtcatacccgagtcctgtaccatcctaccatgctagcccaacctctttctcgttcccaaccccacgcgcattgacg

SEQ ID NO: 263546 - DNA, 298 bp, Glycine max
gcttggtgatcccaacactttcgttaacatgattcatacgatgctgaagcttggactgatggttgagttttgattctaatgaagcagatgctgacatgcctcctcttgaggacgctgatgcagatgctgagggtagcaagatggaagaagttgattaaatctgacttaattgcctgttacgtttttagaaacaatgattggagaaacagtctttttactatgttttatgttttttgaattttcgaaattttggaacgttggctagttaggtgccgtatgtagtagtttctttatggta

SEQ ID NO: 263547 - DNA, 396 bp, Glycine max
  unsure (1)..(396): unsure at all n locations
aatacccgggccgaccgcacgcgtccgggggcgaagaatcagattcagggattgaattataagggtaatggcgccaacaatggtngggtttcgtcatgctccttctccagccttggacttgattccaatttatgtgaacaacttcgtgataggttggggtttgaagttccaacgctggtgcaagctcaagcaattcccgttattctctcggggcggcatgcattggtgaatgctgcaacgggcacggggaagactgttgcgtatttggctccgattattcatcacttgcagggttatgaaaatcggattcagcgctctgatggaacatttgcgttggttcttgtaccgacgcgggagctatgcttgcaggtttatgaaattcttcaaaagttattg

SEQ ID NO: 263548 - DNA, 369 bp, Glycine max
cactcttcttctcttgcggctagggttttagcgcagcttcttctagatttaaggaagatgggtaaggaaaaggttcacatcagtattgtggttattggccatgttgactctgggaagtccactaccactggccacctgatctacaagcttggaggcattgacaagcgtgttattgagagatttgagaaggaagctgctgagatgaacaagaggtctttcaagtatgcctgggtgcttgataagcttaaggctgagcgtgaaagaggaatcacaattgatattgccttgtggaagtttgaaaccaccaagtactattgcacagtcattgatgcccctggacacagggatttcatcaggaacatgatcact

SEQ ID NO: 263549 - DNA, 296 bp, Glycine max; identical to SEQ ID NO: 263119

SEQ ID NO: 263550 - DNA, 385 bp, Glycine max
acgcgtccgattgctgctgtttgcctattggtttacttttgggtttctaccctgctggatgcctcatcgagcggtttccattaatcagatgaagagcagaacgaggcagaactagcagtttctgaattttctggaaatggtgctgggatactatctgctgctagcacagttgccagtacttttctcttagtttttgttgctgaatggggcgacaagtcatttttctccacaattgcccttgcagcagcttcttctccccttggagtcatagcttgagcactgtctggtcatggtgttgcaactttgctagctgtacttgggggttctttacttgtgacgtatttgtcagataaggttattgcctacatcggatgtgttctctttc

SEQ ID NO: 263551 - DNA, 462 bp, Glycine max
aatacccgggccgaccgcacgcgtccgggcggcgctgtggcggacgcgccttcggtggttgaggagaagacggagttcgacgggggggtcgaagaggtgccgagcaacgctcgaatcgcggtgattaaggcggtgagggcattgacgaacctagcgctgaatgaggcgaaggagttgatcgaagggttgccgaagaagttcaaggaagggatttcaaaggacgaagctgaagatgcgaagaagcaactcgaagaagctggtgccaaggttaccattgcttaaacactgtttagctgcagcatatatgttctgcttcttcttttgctggttgtagttgagttcaccagtacactgtaatttcatttcattttgtcttgattttaatcctttaatttgtaatgaggaaaatatgaattcctaattttaatataatttttttaatggctattaaggggttggttg

SEQ ID NO: 263552 - DNA, 350 bp, Glycine max
gaattcccgggtcgaccgcacgcgtccggtcatatgctccaagtgcactggtaagggttctaagtctggtgcttcgatgaagtgtgcgggttggcaaggaactggtatgaaggtttctataagacatcttggcccgtccatgattcagcagatgcagcatgcttgcaatgaatgcaagggtactggagaaaccatcaacgacagagatcgctgcccacagtgcaagggagaaaaggttgtgcaggagaaaaaagtccttgaagttattgtggaaaagggaatgcagaacgggcagaagattacattccctggcgaagctgatgaagcgccagacacaattactggggata

SEQ ID NO: 263553 - DNA, 305 bp, Glycine max
tccaacttctactttaaggtttctaattccaacccttccatcaactgctccgcatgtttaaaaactaatatgaccctccctatcacacatcttttcccctccattattcatcacatccatcattcttacaataaattcaaccttactacaaaaaccatcaacgacatacaacactccccacaatacaaggaataaaatgttcttcacaataaaaaagtcctatcaattcattttaaaaactaaatccacaactttcataaaattacattccctaactaaactgattaatcaccatacacaactac

SEQ ID NO: 263554 - DNA, 376 bp, Glycine max
caccgattagattaggggcttcgaacaaggtatcccttaaacccaaaccctaatctgattcgctttgtattatggcgtctgagagcgcttctcgatcgagttccgcggccgattcgtacattgggagcttgataagcttgacctctaagagtgagatcagatacgaaggtattctctacaacatcaacaccgaagagtccagtattggcctcagaaacgtgcggtcttttggaacagaatgaaggaaaaaggatggcccacaaatccctcccagtgacaaggtttatgagtatatacttttccgtgggactgacatcaagggattacagggttaatcttcttcaactggcctgcctaattcacaagtcagctttga

SEQ ID NO: 263555 - DNA, 432 bp, Glycine max
  unsure (1)..(432): unsure at all n locations
gaattcccggctcgacgcacgcgtccgcgcaaattcaaaggaggatctctcttgcgttttctctaggttttcgctatggcgtggaagggaattttgaaggagcttaaggatttgcagaaggatcctccaacatcttgcagtgccggtcctgttgttgctgaagatatgttccattggcaagctacaattatgggtcctccagacagtccctatgcaggaggtgttttcctagtgaccattcatttccctccagattatccctttaagccacccaaggttgcattcaggacaaaggttttccacccaaatataaatagcaatggaagcatttgccttgatatattgaaggagcagtggagccctgctctaaccatttncaaggtgttgctctcaatttgttcctattgacggatccaaatcctgatgatcctt

SEQ ID NO: 263556 - DNA, 380 bp, Glycine max
ccggcccgacgcacgcgtccgatggctcccaaaccgcctagtacgggtctgtttgttggactgaacaagggtcacgtcgtggccaggtttgaattgcctccacgcccctcagatcgtaaggggaaaacaagcaagagggtgcactttgtgaggaacctcataagagaggtagccggttttgcaccctatgaaaagcgtataactgagttgctgaaggttgggaaggataagagggcactgaaggttgcaaagagaaagctcggaacacacaaacgcgcaaagaagaagcgtgaggaaatgtccagtgttctcaggaagatgagggctggtggtgctggagacaagaagaaaataatcttatttactgttttcagattcac

SEQ ID NO: 263557 - DNA, 267 bp, Glycine max
caatttgaacaatattctttactgacattttcaattatagtgtaaattaattttattcaatatgattataatccattatatattaccctaactaaatttaaaaatttgcttaaaatacatttatattttacacaacatcttactaaaaattcttacaatataatatttaaacttctacataaagaattttaaacttcactaacttttcaaactgaaaatatatttttaaaactataatagtttaattatcttctactaactacaata

SEQ ID NO: 263558 - DNA, 461 bp, Glycine max
  unsure (1)..(461): unsure at all n locations
aaaaaaaaaaaaaattanatataaaaaaaaaaaaaaaaaaaaaaaggaaacgataaaaatttcaaaaaaagcaaaccaaaacccaacaaaaaataaaaaaaataacaaaaaaaaaaaaaaaaaaataataaaaaaaaaaaaaaaaaaaaaaaaataaaaaataaaaaaaaaataaaaaaataaaaaaaaaaaaaaaaaaaaaaaaaaataaaaaaaaaataaaaaaaaataaaataaaaaaaaaaaaaaaaaaaataaaaaaaaaaaaaaaaaaataaaaaaaaaatatataaaaaaaaaaaaacaaaaaaataaaaaaaaaaataaaaaaaaaaaaaaataaaaaaaaaacataaaaaaaataaaacacaaaaaaaaaaaaaaacaaaaaataaaaaaaaaaaaatatataaaaaataataaaaaaaataaaataaaatatataaataataaaataaaaa

SEQ ID NO: 263559 - DNA, 352 bp, Glycine max
atcgaaaccttaagtttcggatcaggtctgagcaatctggttggtagaacctttggtcttagagagtcaagttttatgtctgaattagacgatcaaattcctactgccttcgatccttttgctgatgcaaatgctgatgactcgggtgctgggtcaaaggagtatgtgcatattcgcgtacagcagcgaaatggaaggaaaagcctgacaaccgttcagggattgaaaaaagaattcagctataacaagatacttaaagatgttaagaaagagttctgttgcaatggaacagttgttcaggacccagaactaggacaggttattcaacttcaaggtgatcagaggaagaatg

SEQ ID NO: 263560 - DNA, 350 bp, Glycine max
cttttctactttgagtcttcttgatccttctttttctccttgaactcaaacatggcagatgaggtggttctgctagatttctggccaagtccatttgggatgagggtcaggattgcacttgctgaaaagggtatcaaatatgagtacaaagaagaggacttgaggaacaagagtcctcttctcctccaaatgaacccggttcacaagaagattccggttctcatccacaatggcaaacccatttgtgaatccctcattgctgttcagtacattgaggaggtttggaatgacagaaatcccttgttgccttctgacccttaccagagagctcaggctagattcttggctga

SEQ ID NO: 263561 - DNA, 279 bp, Glycine max
aattcccgggtcgaccgacgcgtccgcccacgcgtccgggaagatggtgctttcggatgaggaaatgggtcgtctgtaccgagtaacgaagactgtgatgcaaatgcttcggtacacgggttttctggtgggtgacttcgagatcaacatgtcgaagcatgaattcaagtccaaagtacgggcaagcacatgaagcgcgaggacctggtcatcaacaagtccaagaaggacaactccggcgaccagatctacgtcttcttccccgacgagcccaaggtc

SEQ ID NO: 263562 - DNA, 428 bp, Glycine max
cgggccgaccgacgcgtacgcttgaaggccattgtcagttttgtcacaatttaattccagctttgcactgtcttttggacagtttcctttggtacaagaacagagttattctggtcggacaattcttcatggtggtgcaaggtatcaagcaactggccgcgggtttgttgttcgccatatcaaattttcagagaactacagactctactctcgtagtcattttgttaaagggttggaggttgcgcttttgttgatagtatatcttgcttatggctataatgaatgtggtgcactctcatatattcttttgagtataagcagttggtttatggctctatcctggttgattgctccatatttattcaacccatctggatttgaatggcaaaaggtggtggaagatttcagagattggacaaaatggctac

SEQ ID NO: 263563 - DNA, 341 bp, Glycine max
atcgaaaccttaagtttcggatcaggtctgagcaatctggttggtagaacctttggtcttggagagtcaagttttatgtctgaattagacgatcaaattcctactgccttcgatccttttgctgatgcaaatgctgatgactcgggtgctgggtcaaaggagtatgtgcatattcgcgtacagcagcgaaatggaaggaaaagcctgacaaccgttcagggattgaaaaaagaattcagctataacaagatacttaaagatgttaagaaagagttctgttgcaatggaacagttgttcaggacccagaactaggacaggttattcaactttcaaggtgatc

SEQ ID NO: 263564 - DNA, 386 bp, Glycine max
  unsure (1)..(386): unsure at all n locations
gaattcccgggccgaccgacgcgtccgcccaggcgtccggaaaagggaagtatcttatttgaataatatgaagggcggtcaaggaatcgcaaaaacaccgtcctcttctaagagaacactaagtcagggttcagttgatatatatgctgctcagtgcaaaaattgcttgaaatggagagagattgatacacaggaagagtttgaagaaattaaaagtaaagttgctaagaaaccttttctttgcaccaaaaaggctaatagttcctgtaataaacctggtgatattaaatatgattcctttcggacatggttgattgacaagcctaacctcccaaagactccacanggttttaagaggagcttggtgcttagaaaagattactcca

SEQ ID NO: 263565 - DNA, 361 bp, Glycine max
cccacgcgtccgtcaagcattgcatccctcttgatttgtagtttgttttgtgctttagatagaagtgctgccaaatcaagaggggttttaagatcatagtgtgtgttttgcaacaatggctaagttctttgctgctatgatcttggcactctttgccatttccatacttcaaacagtggtaatggctgctaatgaacaaggaggccacttgtatgacaacaagagcaaatatggaagtggaagtgtcaagagttaccaatgcccatcacaatgctcgaggagatgtagccagacccaataccacaagccctgcatgtttttctgtcaaaagtgctgcaggacatgcctgtgtgtccccccg

SEQ ID NO: 263566 - DNA, 360 bp, Glycine max
caaagacatccttctcctggatgtggctcccctcactctcggaattgaaactgttggtggagtgcatggcaaagttgattcccagaaacactgttatcccaaccaagaaatctcaggtgttcaccacctatcaggaccagcagactacagtctccattcaggttttcgaaggcgagaggagtctcacaaaggattgccgccttcttgggaaatttgatctgtctggaattcctccagccccaaggggtacgcctcaaattgaagtgaccttcgaagttgatgccaacggcattctaaatgtgaaggcagaagacaagggcactggtaaatcagaaaagatcaccattacaaacgaaaagg

SEQ ID NO: 263567 - DNA, 412 bp, Glycine max
cgcaaattcaaaggaggatctctcttgcgttttctctaggttttcgctatggcgtcgaagcgaatgttgaaggagcttaaggatttgcaaaaggatcctccaccattttccattgccggtcctgtggttgctgaaaatatgtccaattgccaagctccaataatgggtcctccaaacagtccttatgcaggaggtgttttcctagtgaccattcatttccctccagattatccctttaagccacccaaggttgcattcaggacaaaggttttccacccaaatataaatagcaatggaagcatttgccttgatatattgaaggagcaatggagccctgctctaaccatttccaaagtgttgctctcaatttgttccctattgacggatccaaatcctgatgatcctttggtcc

SEQ ID NO: 263568 - DNA, 322 bp, Glycine max
cttcttctctggttgattcggatctagagtcttcagtttctcctcgttgttcttcggtttcgtgttttcaatttcgattctttcgttaatttaataagatgtttgggagggcaccgaagaagagcgataatacgaggtactacgaaatcctcggcgtctccaagaacgcttcgcaggatgatctgaagaaggcttacaagaaagccgccattaagaatcaccccgacaagggcggtgatcccgagaagtttaaagagctggcgcaagcttatgaggttctgagtgaccctgagaagcgtgagatatatgatcagtatggtga

SEQ ID NO: 263569 - DNA, 453 bp, Glycine max
aaaaaaaaaaaaaaattaatttaaaaaaaaaaaaaaaaaaaaaagaaacgaaaaatattaaaagagggaaaacaaaccacaataaaaaaaaaaaaaaataaaaaaaaaataaaaaaaatataaaaaaaaaaaataaaaaaaaatataataaaaaaaaaaaaataatataaaaaaaataaaataaaaaaaaaaacaaataaaaaaaaaaaaaaaaaaaaaaaaataaaaaaaaaaaaaataaaaaaaaaaaataaaaaaaaaaaaaaaaaaaaaaataataaaaaaaaaataaaaaaaaaaaataaataaaataataataataaaaaaaaataaaaaaaaaaaaacaaaaaaaataaaaaaaaaaataaaataaaatacaaaaataataaataaataaaaaaaaaaataaaaaataaaaataaaaataaaaataaaaaaaataataaaaatata

SEQ ID NO: 263570 - DNA, 105 bp, Glycine max
aaaaaaaaaaaaaagaaacgaaaaattaaaaaagaggataaaccaacccaaaaataaaaaaaaaaaataaaaaaataatatcaaataaaaaaaaaaatatataat

SEQ ID NO: 263571 - DNA, 425 bp, Glycine max
  unsure (1)..(425): unsure at all n locations
cccttgggggtttttgtgattataagggacctataatgcctgcggggggaccggtttaaatggcttggtttgatgttaacggaactcttacagctcccaggaaggtggtcacaccggaaatgttgacattcatgcaagaactacgaaaggttgtaacggttggagttgttgggggttctgaccttataaagatatcagagcaacttggcagcacagttaccaatgagtatgattacgtattttctgagaatggtcttgtggctcacaaggaaggaaagctcattggaactcagagcttgaagtcattccttggtgaagaaaagctcaaggagtttattaactttacacttcattatatngctgatntggacatccccattaagaggggaacatttatggagttccgtagtgggatgctgaatgtc

SEQ ID NO: 263572 - DNA, 288 bp, Glycine max
  unsure (1)..(288): unsure at all n locations
tcccaacactttcggtaacagtaantacaggacgctgaagcttggactcagcattgttgaagatgctggtgaagcacatgctgacatgcctcctcttgaggacgctgatgcagatgctgagggtagcaagatggaagaagttgattaaatctgacttaattgcctgttacgtttttagaaacaatgattggagaaacagtctttttactatgttttatgttttttgaattttcgaaattttggaacgttggctagttaggtgccgtatgtagtagtttctttatggta

SEQ ID NO: 263573 - DNA, 448 bp, Glycine max
cgcgtccgggggtgtgcaacccattggggaagtctgtggtgccctcatccagcaatttatgatgtggacttttgggtcactagctaattcaaccccatacttgggaggagtgcttctgctgattgtttctgcctggctagcagcggcaaaatccttggatacccaatttactgcattgcgtaaagaggaagaactcgagaaagagatggaacgagcagccgccgtcaagataccagtggtggctgagactgagagtggaaatggttctcttgcaactggttcaccactgaatccatcctcaggtgactcctcaagcagtccatctgaagcctcaactcctcgcaattaaaatgtgccttctttctgtgagaaattgcctcacagaatgagcaaatagagctcttttgagagcagtgttaggtgaaactatttgttgtaggtttatata

SEQ ID NO: 263574 - DNA, 257 bp, Glycine max
  unsure (1)..(257): unsure at all n locations
cgcgtccgggggccnncctctaccgtggtttcaacaatttatgtgttggaatcatcgtgtatcggggtctgttctttggattgtatgattctgttaaaccagttgtcctcacagggtcattgcaggatagcttttttgccagctttgcccttggatggctcatcaccaatggtgcaggtcttgcatcatacccaatagacactgttagaagaagaatgatgatgacctttggtgaacctgtcaagtccaaaacctcc

SEQ ID NO: 263575 - DNA, 387 bp, Glycine max
  unsure (1)..(387): unsure at all n locations
aaacccgccggaggcacgcgtccgtcgctctctctctcactttgtcctccatattcaagtgtcggaaagtttgcttcttttcgactctgaatcaccctatttattttgggtctctcatctttcttcttccttccaagttgtttttggtgttggtgttggtgttgaattgagttgagaagaaaagaagaggtcatagacacacacacaagacatgtctgctgttgagtcagctgaacacaacaacatcagaggagtaccaactcatggtggacgctatgttcagtacaatatctatggcaatctcttcgaagtttccagaaagtatgtccctcctattcgccctgtcngtagaggtgcttatggtattgtttgcgctgctgtaaatgc

SEQ ID NO: 263576 - DNA, 435 bp, Glycine max
gcgtccgccgcgcgtccgcgcgtcgctgctccgtatcatgtttcactgcataaatttgagagaaagctctgcttacatgttggtttatcaggacctccttacaggtgatgagcttctctcggactccttccgttacaatgaaattgagaatggaatgctgtgggaagttgaggggaagtgggttgttaagggagcagttgatgttgacattggtgcaaacccttctgctgagggtggagaagatgagggagtcgatgacgcagctgttaaggttgttgacattgttgatacattcagacttcaggagcaacccgcttttgataagaaacagtttgttaccttcatgaagaggtttatcaagaatttgactcccaagctcgatgcagagaaacaagagttgtttaagaagcacattgagggagcaactaaatacct

SEQ ID NO: 263577 - DNA, 445 bp, Glycine max
ccggcgggagccacgcgtccgccgacgcgtccggataaattgtctcactctgacatgattgctgtcctctgggaaatgggggttatggggaccgacacggtggcggttttgattgagtggatactggcgaggatggtgcttcatccggaggtgcaaaggaaggtacaagaggagttggacgcggtggttaggggtggcgctttgacggaggaggtcgtggcggcgacggcgtatcttgcggcggtggtgaaagaggttctgaggctgcacccgccgggcccgcttctctcgtgggcccgcttggccatcactgatacgaccattgatgggtatcacgtgcctgcggggaccaccgctatggttaatatgtgggccatagcaagggacccggaagtgtggctggacccacttgagttcaagcccgagaggttcatgggtctggaaa

SEQ ID NO: 263578 - DNA, 115 bp, Glycine max
ctctctacatatatttttttttttattgttatatttttttttcttttttttttttaattttttttttttttatatttttattttttttatattatttgtgttttttttttttttt

SEQ ID NO: 263579 - DNA, 303 bp, Glycine max
  unsure (1)..(303): unsure at all n locations
ccggtgatttcagtgagtgattggtgttcactngatctcatcataaggggcggggttaattgaagaagatgccgatcagaaacatcgccgccggaaggcctgaaaaggcgactcaccccgacacgttgaaggcggctttggctgagttcatctcaaccttcatcttcgtgttcgccggctcaggctccggcatcgcctacaacaagctcaccgacaacggcgctgccacccctgccggcctcatctccgccttcatcgcccatgcattcgccctcttcgtcgccgtctccgtcggcgccaaca

SEQ ID NO: 263580 - DNA, 449 bp, Glycine max
aaacccggctcgacgcacgcgtccgttggaatacattccttgtagtttatactgtaagatgggtttgaagatggcgttactgagcctaggcctttccctcatgctccttttggtctcctctgaggtggcatccacgaatacaaaagaggaggcaaatggagtggatgatgccaaatatcccggtggaagctatggagggggttacccaggtcatggcggtggcggttatcctggccatggcggtggcggttatcctggccatggcggtggtggtggctatcctggtcatggtggtggccaccctggtcatggtggcggctaccctggccgtggtggtggatactgtaggcatggctgttgcggtggccggacatacaacggaggttgcagaaggtgctgctataacgctggcgaagctgttgctgcacaaactcaagataagactcacg

SEQ ID NO: 263581 - DNA, 452 bp, Glycine max
cccacgcgtccgattgaatatccatggttctcttagttcttttatccattaaaaaactcgagattaatggttctaagaagaactatagtagttgaaagatatcttttgcaaatatgcatatttaactgaggttgttataacttgttccttccctcaaaaaaaaaaaaaaaagaaagaaaaagaacctattagcctccttcattggatatattacatctataaggagtaaattctaccggttcagagaatagaaaaataatcaaaataaaagtcagcagtctcacatctctaattttggtgacagattcaaggggttaaatttgatccagaaggtgaatatgtgagacaatggctacctgagttggcaagaatgccaactgagtggatccatcatccttgggatgcaccgcttactgttcttagagcagcaggagttgagctgggtcaaaatt

SEQ ID NO: 263582 - DNA, 388 bp, Glycine max
  unsure (1)..(388): unsure at all n locations
atatccatngtttttttacattttttatccattaaaaaactatgcattattagaactattaaaagctatactagttcaaatatatcttttacaaatatacatatttaacttatattattataacttattccttccctcaaaaaaaaaatattaccatataataataacctattatcctccttcatttaatatattacatctataattaataaattctaccctttcacataatataaaaataatcaaaatcaaatacatcaatctcacatctctaattattataacaaaattcaaacaccaaattttatccaaaatatcaatatatctcacaatatctaccttatatttacaaaaattcccaccttattcaattccataatccttttta

SEQ ID NO: 263583 - DNA, 398 bp, Glycine max
  unsure (1)..(398): unsure at all n locations
tcttctcttgcggctagggttgtttcgcagctncttctagatttaaggaagatgggtaaggaaaagggtcacatcagtattgtggttattggccatgttgactctgggaagtccactaccactggccacctgatctacaagcttggaggcattgacaagcgtgttattgagagatttgagaaggaagctgctgagatgaacaagaggtctttcaagtatgcctgggtgcttgataagcttaaggctgagcgtgaaagaagaatcacaattgatattgccttgtggaagtttgaaaccaccaagtactattgcacagtcattgatgccccttgacacaaggatttcatcaagaacctgatcactgggacatcccaagctgactgtgctgttcttatcat

SEQ ID NO: 263584 - DNA, 390 bp, Glycine max
gtttcattttccctcactttctcgctcgccttacgccccttgctctcctccaatggccgaggagctctcggacaaccagatcgccgagttcaatgaggccttcagcctcttcgacaaggacggcgatggttgtattactactaatgaacttgggactgtgatgcggtcactagggcaaaacccaactgatgcataactgcatgatatgattaatgaggttgatgctgatggcaatggaaccatcgacttcccagagttcctcaacctgatggctcgcaagatgaaagacaccgactccgatgaggagcttaatgaggctttccgtgtgttcgacaaggatcaaaatggtttcatctctgcaactgagctccgccatgtcatgacaaatct

SEQ ID NO: 263585 - DNA, 323 bp, Glycine max
actcggtctcggaattcccgggtcgacgcacgcgtccgcccgcgcgtccggtcgcaagtgagacaggtctgcctacttttcccgccacggcgccttcggacgccttctccgcttgccggagcccgcggaggaagagacgcctaccatgagaccggcgccgccgtccgcggtggtcgtgatgggcctcccccaggactgctccgtcctcgatctcaagtcccgattcgagatctacggcgccatctcccgcatctgcatcgaccgcgacgccgtcggattcatcacttaccggaccaatgactccttctactctgccatctttc

SEQ ID NO: 263586 - DNA, 470 bp, Glycine max
tactcggtcttgaattcccgggtcgacgcacgcgtccgcttgtcttcctcagaaacacatcctaatgtcagagcgcggaggtggcgatggtggcggcgaccgttgcggtttcggacgtggattcggcgggcgaggacgcggaggtgacaggggccgaggccggcgccgaggcccccgccgcgaggaagaggagaagtgggtcccagtgaccaaactgggccgcctggtgaatgagggaagaatccgaagccttgaacagatctacctccactcgctcccgatcaaggagcaccagatcatcgacacgctcgtgggtcccaccctcaaggacgaggtgatgaagatcacgccggtccagaagcagacccgggccgggcagaggacccggttcaaggtcttcgtcgtcgtcggagacaacaacggtcacgttgggcttggctttaagtgcaacaaggaagtggcgacagtta

SEQ ID NO: 263587 - DNA, 474 bp, Glycine max
gcgtccgcccgggcgtccgcggacgcgtgggttgctttggacctttttcaggttcataggaacactgatgctgtgggagttagcactgagaacattactcagaattggtactttgggaacaagaaatccatgctcattcccaattgcctatttcgtgtgggctgctctgcgctgcttctctctaacaagccggcagatcgaaggagggccaagtaccggcttgtccacgtcgtgaggactcatcgcggggccgacgacaaggcgttccggtgtgtttaccaggagcaggatgatgctgggaaaactggtgtttccttgtctaaggatttgatggcaattgctggtggagcattgaagactaacatcaccacacttggtcctcttgtgctgccaattagtgagcagcttctgtttttcgtgactctgctgatgaacaagttatttaaggctgggtgtgaagccttacataccgga

SEQ ID NO: 263588 - DNA, 471 bp, Glycine max
aaaaaatgggttcttcttcttctatgtggacggtgtgtgtgattttggcatcactggccgctgcagcactctgtgccaacccacgcaggccagtggatgtacaatttggccgaaactacgtgcccacatgggcctttgatcacatcaaatatttcaatggtggttctgacattcagcttcatcttgacaagtacactggtactggcttccagtccaaagggtcttacttgtttggtcacttcagcatgtacataaagatggttcctggagattctgctggcacagtcactgctttctatttatcttcccaaaacgcggagcatgatgagatagactttgagttcttggggaacagaacaggacaaccttacattctgcaaacaaatgtgttcaccggaggcaagggtgatagagagcaaagaatctatctctggtttgatcccacgaaagaataccacagatactccattt

SEQ ID NO: 263589 - DNA, 460 bp, Glycine max
aattccctggtcgacaccacgcctccgggcggcgctgtggcggacgcgccggcggtggttgaggataagacggagttcgacgtggggatcgaggaggtgccgagcaacgctcgaatcgcggtgattaaggcggtgagggcattgacgaacctagcgctgaaggaggcgaaggagttgatcgaagggttgccgaagaagttcaaggaagggatttcaaaggacgaagctgaagatgcgaagaagcaactcgaagaagctggtgccaaggttaccattgcttaaacactgtttagctgcagcatatatgttctgcttcttcttttgttggttgtagttgagttcaccagtacactgtaatttcatttccattttgtctggatttcaatcttttatttgtaatgaggaaatatgagttcttatttttatattattttttttaatgcgtatgaagtgtttgttg

SEQ ID NO: 263590 - DNA, 394 bp, Glycine max
acccacgcgtgcgcacggcacgaatatcttgttgtttggagctatccgagattaactctgtaaacatgttggggtaccatgagctccttacaggtgatgagcttctctctgactccttccgttacaaggaaattgagaatggaatgctgtgggaagttgaggggaagtgggttgttaaaggagcagttgatgtatacattggtgcaaacccttctgctgagggtggatgagaagatgagggagttgatgatgcagctgttaaggttgttgacattgttgacacattcagactttaggagcaacccgcattcgataagaagcagtttgataccttcatgaagaggtttatcaagaatttgactcccaaactcgatgcaaagcaacatgagttgtt

SEQ ID NO: 263591 - DNA, 450 bp, Glycine max
cccacgcgtccgattgaatatccatggttctcttagttcttttatccattaaaaaactcgagattaatgtttctaagaagaactatagtagttgaaagatatcttttgcaaatatgcatatttaactgaggttgttataacttgttccttccctcaaaaaaaaaaaaaaaagaaagaaaaagaacctattagcctccttcattggatatattacatctataaggagtaaattctaccggttcagagaatagaaaaataatcaaaataaaagtcagcagtctcacatctctaattttggtgacagattcaaggggttaaatttgatccagaaggtgaatatgtgagacaatggctacctgagttggcaagaatgccaactgagtggatccatcatccttgggatgcaccgcttactgttcttagagcagcaggagttgagctgggtcaaaa

SEQ ID NO: 263592 - DNA, 433 bp, Glycine max
gaccgacgcgtccggccaggcgtccgattgaatatccatggtttttttagttcttttatccattaaaaaactctgtattaataggtctaataagaactatagtagttgaaagatatcttttgcaaatatgcatatttaactgaggttgttataacttgttccttccctcaaaaaaaaaaataaaagaaagaaaaagaacctattagcctccttcattggatatattacatctataaggagtaaattctaccggttcagagaatagaaaaataatcaaaataaaagtcagcagtctcacatctctaattttggtgacagattcaaagggttaaatttgatccaaaaggtgaatatgtgagacaatggctacctgagtttgcaagaatgccaactgaatggatccatcattcttgggattcacccgttactgttc

SEQ ID NO: 263593 - DNA, 206 bp, Glycine max
  unsure (1)..(206): unsure at all n locations
caattcccgggtcgacgcacgcgtccgatggctcccaaaccgcctattacgggtcttttngnnggacngaacaaggggcacntctagaccaattttgaattgcctccaggcccctcagatcgtaaggggaaaacaagcatgagggtgcactttgtgaggaacctcatatgataggtagccggttttgcaccctattaaaagcgtat

SEQ ID NO: 263594 - DNA, 323 bp, Glycine max
aattcccgggtcgaccgcacgcgtccgcttggggatcccaacactttcggtaacattattcacatgatgctgaagcttggactgaggattgatgaggatgctggtgaagcagatgctgacatgcctcctcttgaggacgctgatgcagatgctgagggtagcaagatggaagaagttgattaaatctgacttaattgcctgttacgtttttagaaacaatgattggagaaacagtctttttactatgttttatgttttttgaattttcgaaattttggaacgttggctagttaggtgccgtatgtagtagtttctttatggta

SEQ ID NO: 263595 - DNA, 468 bp, Glycine max
aatacccggctcgacgcacgcgtccgagagaacctaagcttagaattagaaacattgaaaagaagaaaggaaagaatggatcgttgaaaatgcatggaggaaagaaagcgggagagtccattaaggaaacagctacaaacattggtgcttctgccaaggctggcatggagaagaccaaggccactgtccaagagaaggcagaaagaatgacagcacgtgatccggtgcaaaaggagttggcaacccaaaagaaagaggcaaagatgaaccaggcggagctggacaagcaggcggcgcgtcagcataacacggcggccaaacagtccgccaccacggctgggcacatgggacatggccaccacaccaccggaaccgggactggaaccggcacgtattccaccaccggggaatatggtcagcccatgggggcccaccagacgtcggcaatgccttgccatggaaccgggc

SEQ ID NO: 263596 - DNA, 339 bp, Glycine max
atgggtcccaaaccgcctagtacgggtctttttgctggttttaacaagggtcacgtcgtcgccaatatggaattgccttcacgcccctcagatcgtaaggggaaaacaagcaagagggtgcactttgtgaggaacctcataagagaggtagccggttttgcaccctatgaaaagcgtataactgagttgctgaaggttgggaaagataagagggcactgacagttgcaaagagaaagctcggaacacacaaactcgcaaagaacaatcgtgaggaaatgtccactgttctcacgaagatgatggctggtggtgcttgacacaagaagaaataagtctta

SEQ ID NO: 263597 - DNA, 459 bp, Glycine max
acgcacgcgtccgcccgggcgtccgaaataggttaagaggtttaacaattggcaaagaaagccagggaaaacagcttgaaaccccaagaatatgagggaggtacatttacagtgactaacctgggagggccatttggtgtcaaacaattctgtgcaatcatcaatcctcctcaggcaggcattcttgccgttggatctgctgagaggagggtcgttccgggttcgggtgctgaagaattcaagtttgcttccttcatgtctgtgaccctcagctgtgatcatcgtgttatagatggtgcaattggtgccgaatggttaaaagcattcaaaggctatattgaaaatccagagaccatgttgttgtaagaataaatagaaggctcccatgacgtactaaattcctttcaagtcattctaggcaggggatgagattttgttcacctgggtatttctgtttgg

SEQ ID NO: 263598 - DNA, 464 bp, Glycine max
tcccgggtcgacgcactcgtccggaaggtcctacagtatagatttagagcactatcaatcatcaaataaagccggggaatacagcttgattccccaagaatatgaggcatgtacatttacagtgactaacctgtgaaggccatttggtgtcaaacaattctgtgcaatcatcaatcctcctcaggcaggcattcttgccgttggatctgctgagaggatggtcgttcctggttctggtgctgaagaattcaagtttgcttccttcatgtctgtgaccctcatctgtgatcatcgtgttatatattgtgcaattggtgcctaatggttaaaagcatttaaaggctatatttaaaatccatagaccatgttgttttaagaataaatataaagcttccatgacgtactaaatttctttcaaatcattctaagcatgtgatgagaattatgttcaacctgggtatttt

SEQ ID NO: 263599 - DNA, 409 bp, Glycine max
tcgacccacgctccgaaaaatgtaattttcagcactgtccaagataattaaagaatggaaattcttaatccctagtttaattagaaaaaaaaaaaaaaaaaaaaaaaaaaaaaaaaaaaaaaaaaaaaaaaaaaaaaaaaaaaaaaaaaaaaaaaaaaaaaaaaaaaaaaaaaaaaataaaaaaaaaaaaaaaaaaaaaaaaaaaaaaaaaaaaaaaaaaaaaaaaaaaaaaaaaaaaaaaggggggccctttaaaaaaaacaaaatttaaaaaaacatgattttaaataaaaaaattttaataagggaacaaaaaaaaaaaataaagggcccgtttaaaaaaaaagttaaatgaaaaaaaactctgattaaaaaaaaaaaaaccacttagaaaaaaaaaccttttttt

SEQ ID NO: 263600 - DNA, 159 bp, Glycine max
ataaatctcatatacctcagactatttggaaaaattaaaaaaacataaaaaccaaaaaaaaaaaaaaaaaaataataaaaaaaaaaaaaaaaaaaaaaaaaaaataaaaataataataacaaactaataaaaaaaactctacaaaaataaataaacaaa

SEQ ID NO: 263601 - DNA, 207 bp, Glycine max
  unsure (1)..(207): unsure at all n locations
tctccgtaccagtttcactgtttaaatntgttagaaaactctgcaaacatggtggtttatgataacctccttgcatgtgatgagcttctctcggactccttccgttacaatgaaattgagaatggaatgctgtgggaagtttgatgggaagtgtgttgttaaggtagcaggtgatgttgacattggtgcaaacccttcttctgaagg

SEQ ID NO: 263602 - DNA, 444 bp, Glycine max
ttcaagaacaatttattgcacaaatattgtcaagaagcttactcaagccgatgtcaaacgcttctttgaatctatttgtggagaggttcaacggttgaggcttcttggagattaccatcattcaactcgaattgcttttgttgagttcacagtggctgagagtgcaattgcagctctaagctgtagtggggtgattctgggttcactgcccataagggtaagtccatcgaagacaccagttcgatcacgtgctcctcgccctactatgcactgaatcaactttccaatgttctggggttgattgctgctgagatatatttacatatatatatatacatagaaacagctgtgttcttaagaacatgtggcatttagttgggacttttggtctcatgtcttacaatatgggtaacttgctttccctttggggattatgggtctctg

SEQ ID NO: 263603 - DNA, 431 bp, Glycine max
cagagtttgagtggacctgtctcagctaccctttaccttggttattcactactcatggccggggcaatcatgttgtcaaccggcaccattggcttccttatgtcattctactttgtgcactacttgttctcatcagtaaagatagattgaggttcttgttgtcattgcatattaactatgaaaaaggttgattgatataacttgatcacattgcatagtagggcaacggatgtttaattcattgtctgattttatattgcgatgggatctgcagtttgttctccttctgcctgtttcccaaagtagtgtactcattcaagtattcaactagtgtttgagatcatgtttcaagtattttgttcaagtttctttagaaggttgtaattcaaactctcatctcatttcaatactttagaaaaatgatgttagat

SEQ ID NO: 263604 - DNA, 440 bp, Glycine max
cccacgcgtccgcccacgcgtccgcagggaagttgtggaagttgttgggcgtgctcaacggtggccacagtggaagcaataaacaagatagtgacagggaagtttgtgtccttatctgaacaagaacttgtggactgtgacagagcctacaatgaaggatgcaatggtggccttatggactatgcattcgaattcatcattcaaaatggaggcattgacacagacaaagattacccataccgtggctttgatggcatctgtgatccaactaagaaaaatgcaaaggttgtgaacattgatgggttcgaggatgttccaccgtatgatgagaatgccttgaagaaagctgtcgctcatcaacccgtaagcattgctattgaagcctctggcagagatttgcaactttatcaatcgggtgtatttactggtaaatgtgggac

SEQ ID NO: 263605 - DNA, 281 bp, Glycine max
cccacgcgtccgcccacgcgtccgcagggatgttgtggaagttgttgggcgttctcaacggtggccacagtggaagcaataaacaagatagtgacagggaagtttgtgtccttatctgaacaagaacttgtggactgtgacagagcctacaatgaaggatgcaatggtggccttatggactatgcattcgaattcatcattcaaaatggaggcattgacacagacaaagattacccataccgtggctttgatggcatctgtgatccaactaagaaaaatgc

SEQ ID NO: 263606 - DNA, 418 bp, Glycine max
  unsure (1)..(418): unsure at all n locations
gcccggatcccggtcgccacgcgtcgccacgcgtcgccacctccgggattttgctagtttgaacaagatgttgcagctagtctacactgcgattttctccgaaatgcttttgattctcacgctcgtcttcaaaaccccactgagaaaactcgtcatcgtttccctcgatagtgtgaagcgcggtcgcggtcccgtggtggtttccaccgtgggcgccacattgatggtggttctcgcttcgagcctctacagcatggccaagatccagcaacgcaccctcgaggccggcatagtcaaccccaccgaccaagtcctcatgtccaagcacatgctcgaagcttctctcatggggtttctgctggtcctctctctgatgattgatagattgcaccattacataagagagcttcngtcactc

SEQ ID NO: 263607 - DNA, 273 bp, Glycine max
  unsure (1)..(273): unsure at all n locations
acttccacacctnaaatcaaccatttcctaattctaataatcaacaccttctactccaacaagaaaattttccttcttaaactcatcaccaactcctccaatgcttttaacaaaattctatttaagagtttaacaaataagagcaagctctatgctcagccatattttttcattcatattattccatacaatactaacaatacacttaccattttttacaattttattttcatgaccaaatcttatttgttgaacaactttgttacaatttct

SEQ ID NO: 263608 - DNA, 447 bp, Glycine max
ggctggcattgttggaaaatacggtacccgttatggcgcctgtctgcgtaagcagattaagagagatggaggttagtcaacacagcaagtttttctgtgaattttgtggaaagtatgctgtgaagaggaaagctgtgggaatatggggatgcaaggactgtggtaaagtgaaagctggcggtgcttacactttgaataccgcaagtgccgtgactgtacggagcaccatcaggaggttgagggagcaaactgagagttaagcttttttgtttatgctatcaattactattagactttgcatgaagtgcctagtttgtattcactgaactgcactggttgtattcaaaataaactccttaagtttaattttgagatgactcttttaattttaaattgtttggaactttgtcggggtgattttgcttcatagtttcatttattgtttgc

SEQ ID NO: 263609 - DNA, 464 bp, Glycine max
  unsure (1)..(464): unsure at all n locations
ccggnccggaattcccgggtcgaccgacgcgtcctttctgaaccacaactacgagactttcatggtatccctgtcccactcaccgatgaatactagaatccttttatcttaactgactagcgcgttaatcccgtccaactcactggtgtcgctaccaccgctaccggcacagcaggttctgggtttgggtcctatggtaccggtgcttactgtggtggtgcaagtgcaaccaccgttgcagatcttttgtcaacccaaccaatgagtggcatggaggctagagagcttcgtcgttcctccatttcaagctctagctcgtctgatgatgattggcaaggtgggaagaggaagaaaggaatgaatgataaaataaaagagaaactaccangggtaggaggagggaataataataaggagcatgcacacacaacatctgctccaaccaccgtcactaaccacccttc

SEQ ID NO: 263610 - DNA, 267 bp, Glycine max
cccccccccccccccccccccccccccccccccgccaccacccccccccccccccccccccccccccccccccccccccccaccccccccccccccccccccccccccccccacccccccccccccccccccccccccccccaccccccccccggcccccccccccccccccccccccccccccccccccccccccccccccccccccccccccccccccacccccccccccccccccccccccccccccccccccccccccccccc

SEQ ID NO: 263611 - DNA, 377 bp, Glycine max
ccaattcactctttttcttctcgccctctgccgtgggaggagtttgtaacatggctgctctaccaacggcggagcttagtgacgcaaatgcaacacatgtagcaagttgtgatgtgagggtgttgcatccagtgttcaaggtttacggtggggccaccgcgttctccggccccgttgtcaccgtgaaggtgtttgaagacaacgtgttggtgagggagcttcttgagacgaaaggcgaaggaagagtattggttgttgatggaggaggaagcttgaggtgtgcattggtgggagggaatttggcactgattgcacataacatgggttgggctgggattgtggtgaatggctgcatcagagatgtggatgagatcaat

SEQ ID NO: 263612 - DNA, 250 bp, Glycine max
gactcaaatgcaacacatgtagcaagttgtgatgtgagggtgttgcatccagtgttcaaggtttacggtggggccaccgcgttctccggccccgttgtcaccgtgaaagtgtttgaagacaacgtgttggtgagggagcttcttgagacgaaaggcgaatgaagagtattggttgttgatggaggaggaaacttgatgtgtgcattggggggagggaaattgacactgattgcacataacatgggttggg

SEQ ID NO: 263613 - DNA, 365 bp, Glycine max
cggaattcccgggtcgacccacgcgttcggtattgcatacttcttccctggctgaatgccttggttaccccaccgcctgtttaaaaaaaatgggtcctcatctggcatgacttgaatttgtcaagaaaggcagtgtccttcaaagctgttcgggagaaatacaagcaacacaagttcaaatatgtagctaatctgccttcccctccacatgtaccaagttattactttgaagaacagtgatgcactggaaatttcttaatagataaaattcatttgaaaaaatagaagactttttgaagtgatctactcttatggaacttggtatcttttaaatcatgcctgatcaagcatgtcatgtgttgaac

SEQ ID NO: 263614 - DNA, 357 bp, Glycine max
  unsure (1)..(357): unsure at all n locations
gatgggtgcaaaccgcctattaccggtctgtttgttggactgaacaaaggtcacgtcgtcaagtanattgtatagcctncacgcccctcanatcntaaggngaaaacaagcaagagggtgcactttgtgaggaacctcataagagaggtagccggttttgcaccctatgaaaagcgtataactgagttgctgaaggttgggaaggataagagggcactgaaggttgcaaagagaaagctcggaacacacaaacgcgcaaagaagaagcgtgaggaaatgtccagtgttctcaggaagatgagggctggtggtgctggagacaagagaaataagtctatttactgttttcagatcact

SEQ ID NO: 263615 - DNA, 392 bp, Glycine max
  unsure (1)..(392): unsure at all n locations
cgcgtgcgatggctcccaaaccgcctagtacgggtctgttttttggactgaacaagggtcacgtcgtcaggggagaagaattgcctccacgcccctcanatcgtaaggggaaaacaagcaagagggtgcactttgtgaggaacctcataagagaggtagccggttttgcaccctatgaaaagcgtataactgagttgctgaaggttgggaaggataagagggcactgaaggttgcaaagagaaagctcggaacacacaaacgcgcaaagaagatgcgtgaggaaatgtccagtgttctcaggaagatgagggctggtggtgctggagacaagaagaaataagtcttatttactgttttcagattcactagatggacctgtgtattgatggac

SEQ ID NO: 263616 - DNA, 300 bp, Glycine max
  unsure (1)..(300): unsure at all n locations
cccccccccccccaaannnnnnnnannnnannanaaaaaanccccccccccacccncccccccaccccccccccccccccccccnacacccccacccccccccccccccacccccccccncccccccccccccacaacaccccccccccccccccccccacacccccccaccaccccacccccaaccccccnccccacccccccccccaaccccccccccccccccnccccccacacccccccacccccccaaccccccccccccaaccccaccccaccccccaccccccccccgccccc

SEQ ID NO: 263617 - DNA, 487 bp, Glycine max
  unsure (1)..(487): unsure at all n locations
ggccgaatcccggtcgccacgcgtgcacgctcatgctattgcttcctatctctttttcatgaccccttcatggagtccactttgctgaccaatctactagtcttcaacaacaccctccaaccagagttaatgaggagtgtgcatgtgtaccgccgaggggatggagagaaaagggaagttgagagagagtttgtgttttcagagagcggctcctatggggaaatgcaggctaccccaattcctggattggtaaaatctcgtgtttctgaagtgtgtgaagggcaccgaaatggagtgtggctttgtgtctttgcgttccatgccgatcacactcctcaattttgccgcattccaccggttttgttggtcacatgaaacccaaagcttaagatgattccaaacttgcttgatgatctncatgtgatatacaagttggaccggaagggaggaagacagtgatatatcacaagactatacaggggaagaa

SEQ ID NO: 263618 - DNA, 369 bp, Glycine max
cccacgcgtccgtcaagcattgcatccctcttgatttgtagtttgttttgtgctttagatgaaagttctgccaaatcaagaggggttttaagatcatagtgtgtgttttgcaacaatggctaagttctttgctgctatgatcttggcactctttgccatttccatacttcaaacagtggtaatggctgctaatgaacaaggaggccacttgtatgacaacaagagcaaatatggaagtggaagtgtcaagagttaccaatgcccatcacaatgctcgaggagatgtagccagacccaataccacaagccctgcatgtttttctgtcagaagtgctgcaggacatgcctgtgtgtgcccccggggtatta

SEQ ID NO: 263619 - DNA, 322 bp, Glycine max
gaaaacccggggggaccgacgcgtgcggtgggggatcccaacactttcggttacatgtttcacaggatgctgaagcttggactgatagtagtgatgacgctggtgaagcacatgctgacatgcctgctcttgaggacgctgatgcatatgctgagggttgcaagatggaagaagttgattaaatctgacttaattgcctgttacgtttttagaaacaatgattggagaaacagtctttttactatgttttatgttttttgaattttcgaaattttggaacgttggctagttaggtgccgtatgtagtaatttctttatggta

SEQ ID NO: 263620 - DNA, 396 bp, Glycine max
gataactactattgaagaagcaaaacgattctacccactgttcggactcggggccaatggggcccttattttctctggccggacagtcaaatacttttctaatctgaggcagaatttaggtcctggagttgatggttgggccatctctctgaaagcaatgatgagcatagttgtgggtatggggtttgcaatctgtttcctgtactggtgggtgaacaattatgttcctcttcctactcgtagcaagaagaagaaggagaagcccaaaatgggaacaatggagagcttgaagttcttggtgtcttcaaagtacatcagagatcttgccactttagtggttgcttatggaatcagcatcaatcttgttgaggttacctggaagtctaagctcaaagc

SEQ ID NO: 263621 - DNA, 361 bp, Glycine max
  unsure (1)..(361): unsure at all n locations
atggctcccaaaccgcctagtacgggtctgtttgttggactgaacaagggtcacgtcgtcggcaagtatgaattgcctccacgcccctcanatcgtaaggggaaaacaagcaagagggtgcactttgtgaggaacctcataagagaggtagccggttttgcaccctatgaaaagcgtataactgagttgctgaaggttgggaaggataagagggcactgaaggttgcaaagagaaagctcggaacacacaaacgcgcaaagaagaagcgtgaggaaatgtccagtgttctcaggaagatgagggctggtggtgctggagacaagaagaaataagtcttatttacttgtttccagattcact

SEQ ID NO: 263622 - DNA, 124 bp, Glycine max
  unsure (1)..(124): unsure at all n locations
cctttactttttttcttttgcatgattngaatcttgattggaaaaacgacgattgtagaagtttacccatcaattcaattttaagccgtgccttcttcaaaaaaaaaataaataaaaaaataaa

SEQ ID NO: 263623 - DNA, 390 bp, Glycine max
  unsure (1)..(390): unsure at all n locations
aagcacaacngggtgaggacgaagaagacagttttaaaaagatggcgggccccccacctctaccgttttggacggcggcggggatgacgtacataacatactcaaacatatgcgcgaatctgctcaggaattgcctcaaggaaccctacaaggccgaatccctctctcgtgagaagctccattttgttctctccaaatgggtcgacgccaagcctgaaaaacctactattcgttcagacaccccagagcagtgatctggaatagttggaagctataaatgcataaatctttgagatctggaagttcattgtcattttgaacctttctgagatgcttaattcctttgtttctttctctccatgaaatggaacatgcactggattttgattt

SEQ ID NO: 263624 - DNA, 332 bp, Glycine max
  unsure (1)..(332): unsure at all n locations
cccacgcgtccgagaaggcctgggcttagttgataagcataactgggtgaggaagaaagggggagagtgaagaagatggcgtcgagcggagcggtaccgttttggagggcggcggtgatgacgtacataacatactcaaacatatgcgcgaatctgctcaggaattgcctcaaggaaccctacaaggccgaatccctctctcgtgagaaagctccatttgttctctccaaatgggtcgacgccaagcctgaaaaacctactattcgttcagacaccccagagcagtgatctggaatagttggaagctatanatgcataaatctttgagatct

SEQ ID NO: 263625 - DNA, 336 bp, Glycine max
  unsure (1)..(336): unsure at all n locations
tggtctgtaattcccgggtcgacccatgcgtccgtcttcttaaaaattccaacaacaatccaagtgatagacactcgttgcgatggaacttgtagcggaatccgagcgaactctgtacccatacgtgactggatcctctgtagtcgctatcaaatacaaagatgggattctaatggccgctgacatgggaggttcgtatggatctaccctgcggtataagagtgttgagcgtatcaagcctattggaaagcattctcttcttggtgctagcggngagataagtgactttcaagaaattttgcgctaccttgacgagcttatcctttatgacaacat

SEQ ID NO: 263626 - DNA, 373 bp, Glycine max
  unsure (1)..(373): unsure at all n locations
aaaacccgggccgaccgacgcgtccgcccacgcctccttcaagcattgcatccctcttgattngnagcacgctctgcgctttaaatgaaagttttgacaaatcaagagggcttctaaaatcatagtgtgtgttttgcaacaatggctaagttctttgctgctatgatcttggcactctttgccatttccatacttcaaacagtggtaatggctgctaatgaacaaggaggccacttgtatgacaacaagagcaaatatggaagtggaagtgtcaagagttaccaatgcccatcacaatgctcgaggagatgtagccagacccaataccacaagccctgcatgtttttctgtcaaaagtgctgcaggacatgcc

SEQ ID NO: 263627 - DNA, 433 bp, Glycine max
cccacgcgtccgcggacgcgtgggggtttttgtggataagagtgagctataatggctggggggagaccgggtttaattgctttgtttgatgttgacgggactcttacagctcccaggaaggtggtcacaccggaaatgttgacattcatgcaagaactacgaaaggttgtaacggttggagttgttgggggttctgaccttataaagatatcagagcaacttggcagcacagttaccaatgagtatgattacgtattttctgagaatggtcttgtggctcacaaggaaggaaagctcattggaactcagagcttgaagtcattccttggtgaagaaaagctcaaggagtttattaactttacacttcattatattgctgatttggacatccccattaagaggggaacatttatggagttcccgaatgggatgc

SEQ ID NO: 263628 - DNA, 412 bp, Glycine max
cccacgcttcctcgcgtccctgctcctttcttttttcactacataaatttgatagatgacgctgcactcatgttggttgatcaggaccaccttacaggtaactatcctctttcgaacaccgtgctcaacaatgaaatggagacagtaatgcagtaactagtagaggttatgacggttggaattgtagcaggttatgacctcataaagacataacatcaacttgacagcacagataccaatgaatatgattacgcattttctgagaatggtctcgtggctcacacggaaggaaagctcattggaactcagagcttgaagtcattccttggtgaagaaaagctcaaggagtttattaactttacacttcattatattgctgatttgcacattcccattaagaagggaacattta

SEQ ID NO: 263629 - DNA, 284 bp, Glycine max
gcgtccgcccaggcgtcctcccacgcgtccgctgggttgctgggaaaaagaaaaataaaatgggttccaataattcttactaggagttctcgaacgaaatcggtttgggctcctccaacattggttcttacattaatggccaatggaaagccactggttcttctgtcacttctgttaatccttctaacaatcagagcatagctcaagtgactgaagcgactttgcaagattatgaggagggattgcaagcttgcagtgaagcatccatgacatggattactatt

SEQ ID NO: 263630 - DNA, 376 bp, Glycine max
  unsure (1)..(376): unsure at all n locations
cggacgcctnnnctntttttgaatctcagtttttgccagctgtcacggagcttgtcgttacggaattgatgtacttgcagtatatggatcctaaagagccaatctatatttacataaattccactgggactacgcgagatgatggtgaaacggtaggcatggagacagaaggttttgccatttatgatgcaatgatgcagttgaaaaatgagatacacacagtggcggttggatctgctataggtcaagcctgtttgctactttcagcagggtctccgggtaaacgctttatgatgccacatgctaaagccatgattcagcagcctcgtattccttcctctgggttgatgcctgcaagtgatgttcttattcgtgc

SEQ ID NO: 263631 - DNA, 352 bp, Glycine max
aaaaaaaaaaaaaaaaaaaaaaaaaaaaattttaaaaaaaaaaaaaaaaaaaaaaaaaaaaagaaaattttaaaaaaaaaaaaaaccccaaaaaaaaaaaaaaaaaaaaaaaaaaaaaattttttttttttttaaaaaaaaaaaaaaaaaaaaaaaaaaaaaaaaaaaaaaaagccccccccctttaaaaaccccaaatttttccccccctttctaacaaattaaatttttttttttttcccccccaaaataaattcccccccccctttttaaaaaactttgtaattgaaaaacccctcttttccccaaattaaaaccctttaaaaaaaaccccctttccccaatttgtatt

SEQ ID NO: 263632 - DNA, 407 bp, Glycine max
cccacgcgtacaaaaaggcctgggcttagtttataagcataactgggtgaggaagaaagagagagagtgaagaagatggcgtcgagcggagcggtaccgttttggagggcggcggggatgacgtacataacatactcaaacatatgcgcgaatctgctcaggaattgcctcaaggaaccctacaaggccgaatccctctctcgtgagaagctccattttgttctctccaaatgggtcgacgccaagcctgaaaaacctactattcgttcagacaccccagagcagtgatctggaatagttggaagctataaatgcataaatctttgagatctggaagttcattgtcattttgaacctttctgtgatgtttaattcctttgtttttttctcttcatgaaatggaacat

SEQ ID NO: 263633 - DNA, 334 bp, Glycine max
  unsure (1)..(334): unsure at all n locations
acatgttgagggtttcagttataaagcnctcttcttctctctcatcatagttnttcttacaaaaccaatcacgccccttccacttttctctctcgaaacgacgtcgtcgtcgatgaccgcatatctgctccttcctcccatccccttcttcccttcagaggttatgctactgaatccctgatccacacaaaaaaaaacagcattactcctgagattccgccaactgttactgctgttaagaaccctacttctaagattgtctatgatgatcacaaccatgaaagatttcccccaagtgacccaaacaaaatgtcatttgcctacttcaaactta

SEQ ID NO: 263634 - DNA, 265 bp, Glycine max
gccgatcttaatgacgcaaatgccacacatgtagcaagttgtgatgtgagggtgttgcatccagtggtcaaggtttacggtggggccaccgcgttctccggccccgttgtcaccgtgaaggtgtttgaagacaacgtgttggtgagggagcttcttgagacgaaaggcgaaagaagagtattggttgttgatggaggaggaagcttgaagtgtgcattggtgggagggaatttggcactgattgcacataacatgggttgggctg

SEQ ID NO: 263635 - DNA, 406 bp, Glycine max
gccgacccacgcggcggaaatgtgaaagccttatcatacagtgtttgtaagattctaaggtagaagttgaagaagtggatgatgtgataattgtaggcggatgttcttacatcccgagggtgaaaaatcttgttactaacgtatgtaaaggcaaggaactttataaaggcatgaatcctttagaagctgctgtttgcggtgcagcagtggaaggagctattgcttcaggcgtcaatgatccctttgggaacttggacttgttaactatccaagctacacctcttgccattgggattcgagctgatgggaacaagtttgtccctgtaattccgagggatactacaatgccagcacggaaggagctagttttcacaactactcatgacaatcaaactgaggcgttgat

SEQ ID NO: 263636 - DNA, 385 bp, Glycine max
ttcaagaacaatttattgcacaaattttgattagaagcttactcaagccgatgtcggacagttctttgaatctatttgtggagaggttcaacggttgaggcttcttggagattaccatcattcaactcgaattgcttttgttgagttcacagtggctgagagtgcaattgcagctctaagctgtagtggggtgattctgggttcactgcccataagggtaagtccatcgaagacaccagttcgatcacgtgctcctcgccctactatgcactgaatcaactttccatgtttctggggttgattgctgctgagatatatttacatatatatatatacatagaaacagctttgttctaaggaacatgttgcatttaattggtacttt

SEQ ID NO: 263637 - DNA, 341 bp, Glycine max
  unsure (1)..(341): unsure at all n locations
cccacgcgtccgctncttttttttttctcttttttttatttccttaaaccattgcccaaacgctgggcttaaatcctcctgttcctcctcnaacctgtaantaatgtttttcctgtaaaccttgaacttaaaactcttccaccctcttaccctcaccctcaccctgttcactcccccacaccagcacctcttcacccaccagcaaatgcttctaacccacaccaccaccaccaccaccaccacccttcagcaccagcacctgttccttcaccttctcaccacaattaccctcctacccctgcccctgctaagcctcctactcaccaccatcaccatcaccc

SEQ ID NO: 263638 - DNA, 390 bp, Glycine max
ggctggcattgttggaaaatacggtacccgttatggcgccagtctgcgtaagcagattaagaagatggaagttagtcaacacagcaagtttttctgtgaattttgtggaaagtatgctgtgaagaggaaagctgtgggaatatggggatgcaaggactgtggtaaagtgaaagctggcggtgcttacactttgaataccgcaagtgccgtgactgtacggagcaccatcaggaggttgagggagcaaactgagagttaagcttttttgtttatgctatcaattactattagactttgcatgaagtgcctagtttgtattcactgaactgcactggttgtattcaaaagaaactccttaagtttaattttgagatgactcttttaatttta

SEQ ID NO: 263639 - DNA, 468 bp, Glycine max
  unsure (1)..(468): unsure at all n locations
gggccgaccgacgcgtccggtcatatgctccaagtgcactggttatggttctaagtctggtgcttcgatnaagggggctggttgtcaaggaactggtatgaacgtttctataagacatcttggcccgtccatgattcagcagatgcagcatgcttgcaatgaatgcaagggtactggagaaaccatcaacgacagagatcgctgcccacagtgcaagggagaaaaggttgtgcaggagaaaaaagtccttgaagttattgtggaaaagggaatgcagaacgggcagaagattacattccctggcgaagctgatgaagcgccagacacaattactggggatattgtctttgtccttcagcagaaagaacatcccaaattcaaaagaaaggctgaagatctttttgtaaagcacattttgtcccttactgaaaccttatgtggcttccaatttgtgctgactcactttga

SEQ ID NO: 263640 - DNA, 373 bp, Glycine max
  unsure (1)..(373): unsure at all n locations
aaaacccgggccgaccgacgcgtccggcgcgatatcncgtatctttctctttttttttcctacgatggagttttnangtggggagtgtaaggtttttgagtctgttaaggtatatccaacctaattcgaggcatgcatacacctttctcaggctgctcttggtgaggcaaagaaagacaaatcaaatgaaccagttgttctctacttgaaagttggtcaacagaaatttgtcttgggaaccctttccagggagaaaattcctcaaatacctctggaattggttttggaaaaggagtttgagctttcccacaactcaaagaatgccagtgttcatttctgtggatacaaggcattttatgatgcttgcgattat

SEQ ID NO: 263641 - DNA, 486 bp, Glycine max
  unsure (1)..(486): unsure at all n locations
cggnccggaanncccgggtcgaccgcacgcgtccgcccacgcgtccggactgcccaagatgtatctacaatgttacggtgcgggcaaaagaccatggtctttctgatcaacaatggtggatacaccatcgaggttgaaattcatgatgggccgtacaatgtgattaagaactggaattacactgggttgattgatgcaatccacaatggtgaagggaaatgctggactgccaaggtgttctgtgaagaggagctagttgaagcaattgccacagccacaggacccaagaaagactccttatgcttcattgaggtgattgttcataaggatgacaccagtaaagaattgcttgaatggggctcaagggtttctgctgccaatagccgtcctcccaatcctcagtaatcttcagaatttatcctatgactaaaattgctgcagttgccctttagctctatgaaagtgagaatcatttgagatgatgcc

SEQ ID NO: 263642 - DNA, 418 bp, Glycine max
aaaaaaggttcatagttgatatctccagcggaacgatgaagtttgaagatttggcagaaggatgcatggcaaaaatactgtcctacaccactcgtgcggatgtatgcaggctttctctggtttccaaagcctttcattccgcggctgaagccaacactgtgtgggattgctttctcccctctgatttgtcctctatcatctccccttcttcttccgttcctccctttcgctctattaaggatctctatctctatctctccgatcgtcccaccatcatcgatcaaggtataaagagttttcaattggagaagcggactgggaacaagtgttacatgctttccgctagagatctgagcattatatggggtgacactactcattattgggagtggacaaccctaccagagtccaggttcga

SEQ ID NO: 263643 - DNA, 455 bp, Glycine max
  unsure (1)..(455): unsure at all n locations
cggaanncccggnccgacccacgcgtncgctttctccaagacaaaaaaaaaaacgtgatttcgcttttttcttcgaataaaccacaaacggcacggacgagaagaggagtgagagaaaatggggttgtcgttcacgaagctgttcagcaggttgtttgcgaagaaggaaatgaggattctgatggtaggtctcgatgctgctggtaagacaaccatcttgtacaagctcaagcttggagaaatcgtcaccaccatccccaccatcggatttaatgttgagactgtggagtacaagaacatcagcttcactgtgtgggatgttggtggtcaggacaagatccgtcctctgtggaggcattatttccagaacactcagggtctcatttttgtggttgatagcaatgatagggatcgagtggttgaggcaagggatgagttgcacaggatgttgaatg

SEQ ID NO: 263644 - DNA, 399 bp, Glycine max
gaagggctctcctggcaggttgagagtacttatgccggtagattctaacgaagatgatgaggaaattgaggtggttggttatgtgaaattttctgagcgagtaactcagtcattgtctggagtttctatacgacctgcttcagatggtaagacagacttctacgaggttagtcacagacttgagagtggggtatacatgtgcgattgattttgtaatcatagttgattaataggggttgtactttttcattttttggtcatgagatttatggtttggttgtgtttatagcattcttggatatggatcatgtaccttgaactctggaattatctgaaaatctttgtttctctgttgttatggctgtgaatttacatcaatggattgtatttggtcttcac

SEQ ID NO: 263645 - DNA, 386 bp, Glycine max
cccgggccgaccgcacgcgtacgtattatctttattccactgaatatttcattttcatcccactggacaccctcaatgttatgtatctttatattatctataaatgttaacgatacccaacttgcaactactagactagttttctatcggaatgtatatacgtgaataatccaacatgcctttttcttaagtaaaaaaactaccctcaatccatgcctcaaaagggttgataataagtaaaaaaaatcaatgaattcatgataaaacccttctgcgttgttctattataaaatcttttgtcaataaaggaatcaacgggttgggggatcaaatggtcaagttcttttgttggtaaattggaagattagaaacatgactattgcttt

SEQ ID NO: 263646 - DNA, 406 bp, Glycine max
ttttatctttattccactgaatagaacatgagcatataaatggataccctttatattatgtgatctttatattatctataaagggtaaagatatccgatgtgaatctatttgtttagttttctatcggtatgtatataggtgaataatccaacatgcctttttgtgaagtaaaaaaactaccctcgatccatgcctcaaaagggttgataataagtaaaaaaaatcaatgaattcatgataaaacccttctgcgtttttttattataaatttttttgtcaataaagggatcaaggggttgggggatcaaatggtaaagttcttttgttggtaaattggaggattagaaacatgactattgctttccaattagcttgttttgcattaattgctatttcatttatttt

SEQ ID NO: 263647 - DNA, 354 bp, Glycine max
gccgaccgacgcgtccgcccacgcgtccggcgcgatgccagtttgtgttgtgtggtatcatcacagcgaagcgcgccgccactactaaactttcctcactttctctctctctctctgtgagttgtggaaattgattagaattgaaaataatgtctggttcggaggacgagggaggagaagagtacctcttcaagatcgtcataatcggagactccgcggtggggaaatcgaacctgctgtcccgctacgcccggaacgagttcaacatgcactccaaggccaccataggcgtcgagttccagactcagtgcttggaaatcgactccaaagaagtcaaagctcagatttgggaca

SEQ ID NO: 263648 - DNA, 418 bp, Glycine max
  unsure (1)..(418): unsure at all n locations
gctgaacgcagtaagcactaangagtagcgagtattgtctgatacttgcaccctcttaacgggaacgtgagacagagaaagggttgacggaaaggaaaaccaaatcaaacccaacccaccttgtccgatctgccaccaggtgtggttgttgtgatttgaatggaagcaagtggaggtggcggtggcggtgcttcaccgtctgcaccagtgaagcaatatctgcacgatttctcgaagctgtttcagtactatctggataaatccactccacattccacgtacagatggattgngacttttgtgatagcatccatctacgttttacgcgttgtttatgtgcaggggttttacattgtctcttatggcctcggaatctaccttctgaatctctttgatggtttctctcccctttggtcga

SEQ ID NO: 263649 - DNA, 324 bp, Glycine max
  unsure (1)..(324): unsure at all n locations
gaaaaccaaacaaacccncccatcttgtccgatctgccaccaggtgtggttgttgtgatttgaatggaggcaagttgaggtggcggtggcggtgcttcaccgtctgcaccagtgaagcaatatctgcacgatttctcgaagctgtttcagtactattctggataaatccactccacattccacgtacagatggattgggacttttgtgataacatccatctacgttttacgcgttttttatttgccagggttttacattgtttcttattggctcggaatctacctttctgaaacttttgattgggtttcttctccctttggtcg

SEQ ID NO: 263650 - DNA, 337 bp, Glycine max
cccacgcgtccggtgaagctggatcattcctccgcggaatcgatgtgaaccgtttaccttgggtggttgattgcgaagaggaagcaggtgtttcatctccaaacagcacggtttctagcgtcagtggaaagcgcagcgagagggaaaccaatggagaagaaaacgacacagacagagcttgttccagaggcatcatcagcgacgaagaagatgctgaaacctctagaaagaaacttagactctccaaagatcagtcaattgtcctggaagagagcttcaaagaacacaacactcttaaccccgtaagtaaacgtacacatgccaattaatttttttt

SEQ ID NO: 263651 - DNA, 380 bp, Glycine max
aaaactaaatttttctttcaaaaaaacaaaaaaaaaaaaacgcctttttttaattataacaacgccccgccacccaaaacatctccaaacagcacggtttctatcgtcattggaaagctcatctagatttaaaccaatgtataataaaactacacatacagagcttgttccatatgcatcatcagcgacgaagaagattctgaaacctctagaaataaacttagactctccaaagatcagtcaattgtccttcaagagagcttcaaagaacacaacactcttaaccccttaatttaacgtacacattccaattaattttttttttcctgtatcaaaaacatagtatccttttatctacttcatcatatattaatctcact

SEQ ID NO: 263652 - DNA, 468 bp, Glycine max
  unsure (1)..(468): unsure at all n locations
ttttattaaaaaaaaaaattttatttttaaaaaaaaaaatnaaactctaactttctatttttaaaagcccncccccacaaaaaaaaaataaaaaaaaaatttttctttttttatttattttttttttttttttttttcttctatattaatttttttttttttttcttttattttatctacaaattttttttttatttttttattttttttttattatctttttatttatttttctttttatttattctttatttttttttttatctttttttttttttttttttcttttttaatctttttttcttttttttttttttttttatatattaattttatatattattcttttttttttttatttattttttatttatctatatttttttcttttcctctttctatttttatttttactttatatctttattttttttatttttatttatatcttttctattttctattttt

SEQ ID NO: 263653 - DNA, 276 bp, Glycine max
  unsure (1)..(276): unsure at all n locations
ataaaaaaaaaaaaaaaaaattttatttaaaaaaaaaaaaaaaaatctacgttttttgattgaaaggggccccccaaaaaaaaanaaanaaaaaaaaaaaaaaaaaaaaaaaaaaaaaaaaaaaanaaaaaaaaaaaaaaaaatttttttttttttttaataaaataattataattttttttttatattttttttttatataattttttaattattatattaaaattttttattttatttaatttttttttttatttattttttttaataattttt

SEQ ID NO: 263654 - DNA, 342 bp, Glycine max
  unsure (1)..(342): unsure at all n locations
aaaaaaaaaaattaatttaaaaaaaaaaaaaaaaacttctgtctttaaaaaaaaaaacccgcccaaaaaaaaaaanaaaaaaaaaaaaaaaaaaaaaaaaaaaaaaaanaaacaaaaaataaacaaaaaaaaaaaaaaaacaaaaaaaaaaaaaaaaaaaaatttaaatttaaacaaattaacacaaaaattatacccataaaaaaataaaaaaaaaaaaaaaaactacaaaaaaaaaataaactaaaaaaaaaaaaaaaaatcacttcctgtaattaaaaaaaaaaacataaaaaaaacaatataaaacaaaaaacaaaaaaaataaataaaaatcacaaa

SEQ ID NO: 263655 - DNA, 462 bp, Glycine max
  unsure (1)..(462): unsure at all n locations
cccacgcgtccgtcaagcattgcattcctcttgatttgtagtttgttttgtgcttgggatgtggttctgccaaatcaagaggggttttaagatcatagtgtgtgttttgcaacaatggctaagttctttgctgctatgatcttggcactctttgccatttccatacttcaaacagtggtaatggctgctaatgaacaaggaggccacttgtatgacaacaagagcaaatatggaagtggaagtgtcaagagttaccaatgcccatcacaatgctcgaggagatgtagccagacccaataccacaagccctgcatgtttttctgtcagaagtgctgcangacatgcctgtgtgtgcccccggngtattatggtaataaagctgtgtgcccttgctacaacaactggaagaccaaggaagggggacccaagtgcccttgagcttcaacttgttcaacttcaatt

SEQ ID NO: 263656 - DNA, 313 bp, Glycine max
  unsure (1)..(313): unsure at all n locations
aattcattattgnccctacaatgtgattaaaaactntaattacacttttttnatttatnccatccattttttttatattaaaatctttacttcccatttttttttaataatatctaatattatcaatttttttatttacatgacccaagaaagactccttatgcttcattgangtgattgttcataangatgacaccaataaagaattgtttgaattggtctcaagggttttctgtttccaaaatcctatttttcaattcttaattatttttttaatttattttcttttcttaatttttttaattttttcttt

SEQ ID NO: 263657 - DNA, 468 bp, Glycine max
cccacgcgtccggactgcccaagatgtatctacaatgttacggtgcgggcaaaaaaccatgagcttgctgatcaacaatggtggatacaccatcgaggttgaaattcatgatgggccgtacaatgtgattaagaactggaattacactgggttgattgatgcaatccacaatggtgaagggaaatgctggactgccaaggtgttctgtgaagaggagctagttgaagcaattgccacagccacaggacccaagaaagactccttatgcttcattgaggtgattgttcataaggatgacaccagtaaagaattgcttgaatggggctcaagggtttctgctgccaatagccgtcctcccaatcctcagtaatcttcagaatttatcctatgactaaattgctgcagttgccctttagctctatgaaagtgagaatcatttgagatgatgcccttgtagggaatttacct

SEQ ID NO: 263658 - DNA, 465 bp, Glycine max
  unsure (1)..(465): unsure at all n locations
cccacgcgtccgcnagcttcaacaatggtgtacgtctaggctcagaaatcaaaagcctactgcatcgttattatgtcaagttcaagagaacaananagggaaaaaccgattaccgtgccaggattcggttgattaatcaggacaagaacaaatataacactccgaaataccgatttgtggttcgctttagcaacaaggacattgttgcacaaataatatctgctagcattgccggcgatttagttcttgctacagcatattcacatgagctgccacgatattggctttgaagaggacttataaattatgcagcaggttattgcactggtctactgtntgcccgaaaagttctttaaacatctttaattgtttatgagtttgtattgatttgtttagttcttttgttttgcttattcattttattatttatatttttttttatttatttcttaattattttttttt

SEQ ID NO: 263659 - DNA, 169 bp, Glycine max
caatgtgattaagaactggaattacactttttttattgatgcaatccacattttttatacttaaatcctcaacttccaattttttcttttaatactatctattttaatcaatttccacatccacattacccaataaagactccttattcttcattgaactcatttttca

SEQ ID NO: 263660 - DNA, 249 bp, Glycine max
gttcatttctacacatccctagctctgtcgttccgtcgttgacgatggcgtttcgggtgcgggagccgtgacctccgctctctctttcttctctctctctggaccatcgcttccgccaatgtcttcttcgaagagcgtttcgatgccgggtgggaaaatcgatgggttaaatcagattggaaaaaagatgagaacgtggctggggagtggaaccacacctctggtcaatggaatggagacgctaatgac

SEQ ID NO: 263661 - DNA, 430 bp, Glycine max
gtctgaaagctattctccaccgtatccgcatgcttcgccgtttgaaacagtgcctgagccggggcagaacaaacagagaaggcttttctgaagcaaccaaaagtgtttctatgctctaagaaaggtgggaagggaaagaggcctgggaaaggtgggaatcgcttttggaagtcaattgggcttggattcaagactcccagagatgccattgaaggaacatatattgacaagaagtgccccttcactggcaatgtttccattcggggtcgtatcctagccggtacttgtcacagtgctaagatgacaaggaccattattgtaaggaggaattatcttcattttattaagaaataccagagatatgaaaagcgacattccaatattcctgcacatatatcaccttgtttccgtgttaaaagaggagatcatg

SEQ ID NO: 263662 - DNA, 274 bp, Glycine max
  unsure (1)..(274): unsure at all n locations
annaataatattaatatttttttttattttatattttttattttttttacttattatttttttttttatatattattttttttttattttttatttatttttataatttaaatttttttatttatctttttttttttttttatttattttctcttaatattttattttttttatttttatttttttttactcttctattttttttttttattatttttttttttttttttttttttttttattctatttttttttattttatttaaaaattttt

SEQ ID NO: 263663 - DNA, 310 bp, Glycine max
atattatatttttaattattattttttatttttattattttttaattttttttttttttttttaattattttattttaatttaaatattttttttttttttattttatattttttatttttaatctattattatttttattttcaaatttttatttctttttttttattttattattatatattttataatttattattttattattttttttttttttattttttatttttattatattttttatttaattttatttttattattatatatattattttttttattatttatattatttttatttattt

SEQ ID NO: 263664 - DNA, 307 bp, Glycine max
tattaattaaattttattttatattttttaatttttttattttttatttttttatatttttttaaattatatattttattttttttattattattatttatatattataattttattttttttattttttatttattaatattctttttacctatttttttttttattttattatattttatattttttataatttttttttttttttttattatttatattatttaaatttatttatttcttttaatttatttttatatttttttttttttatattatattttttttttttattattttttttttt

SEQ ID NO: 263665 - DNA, 394 bp, Glycine max
ggactggaatacccgggtcgaccgacgcgtgcgcggaacgataaccggcggcggatctacggttaggttgccgacgtggaaggagagagagagcggcaagatgagagagagaagacgaagagcgattgcagctaagatctacactggccttcgagcccaggggaactacaagcttccaaagcactgcgacaacaacgaggtcctgaaagctctctgcgccgaagctggctggatcgtggaagaagatggcacaacttatcgaaagggatgtaagagacccacgagtgagattggaggaacaccactgaacttaagcgcgtgttcttccattcaggcaagtccacaatcctcgtcatacccgagtcctgtaccatcctaccatgctagcccaacc

SEQ ID NO: 263666 - DNA, 407 bp, Glycine max
  unsure (1)..(407): unsure at all n locations
aataaaaaaaaaaaaaaaattataattaaaaaaaaaaaaaaaaaactcttgactcntaaattaaaggccccccaaaaaaaaaaaaannannaaaaaaaaaaaaaaaaaaaaaaaaaaaaaaaaaaaaaaagaaaaaaaaaaaactaaaaaaaaaaaaaaaaaaaaaaaaacacaanacaaaaaaaaacaaaaaaaaaaacacaaaacaaaaaacaaaaaaaaaacaaaaaacaacaaaaaaaataaacaaaaataaaaaaacaaaacacattctaatatatttttaatttattttatttaaaattatataatttataactaaaattaatttataataattttaattattatttaaatttaattttaatttttattaatattaaataattttttcttaaaaataaaat

SEQ ID NO: 263667 - DNA, 282 bp, Glycine max
  unsure (1)..(282): unsure at all n locations
caananctatcactnnaanatnaaaacatctnacttcattttcactcaaataacccaaaattttcccatcatncccttctctacaanttcttttaaaaataaaatacctcnttttcctttattctaatcttttaatcatnatctccttcaaccttatccttttctacattaaaatcctttttattatattncacatatcaaattcactgtcttnctaattcccaatcaatcaaatctttttacttctcactcactccattaattncaacccaccaaaacaat

SEQ ID NO: 263668 - DNA, 321 bp, Glycine max
cccacgcgtccggactgcccaagatgtatctacaatgttacggtgcgggcaaaaaaccatggtctgggtgatcaacaatggtggatacaccatcgaggttgaaattcatgatgggccgtacaatgtgattaagaactggaattacactgggttgattgatgcaatccacaatggtgaagggaaatgctggactgccaaggtgttctgtgaagaggagctagttgaagcaattgccacagccacaggacccaagaaagactccttatgcttcattgaggtgattgttcataaggatgacaccagtaaagaattgcttgaatg

SEQ ID NO: 263669 - DNA, 281 bp, Glycine max
  unsure (1)..(281): unsure at all n locations
aaaataaaaaaaaaaaaaaaaaatttaaaatttaaaaaaaaaaaaaaaaaaaattgtcactgctgattttnaaaggggcccgggaaaaaaaaaaaaaaaaaaaaaaaaaaaanaaaaaaaanaaanaaaaanaaaaaaaaaaaaaaaanaaaaaaaaaaacttttttttatttaatataattaatattataattaatttttttttattatttattatattaaattattaaatttttattataaaaataatatattataaattaaaatatatattaaataat

SEQ ID NO: 263670 - DNA, 443 bp, Glycine max
  unsure (1)..(443): unsure at all n locations
attgctgctgtttgcctattggtgtactttgtggtctctaccctgctggatgcctcatcgggcgagtggccaaaaatcagatgaagagcagaaggaggcagaactagcagtttctgaattttctggaaatggtgctgggatactatctgctgctagcacagttgccagtacttttctcttagtttttgttgctgaatggggcgacaagtcatttttctccacaattgcccttgcagcagcttcttctccccttggagtcatagctggagcactggctggtcatggtgttgcaactntgctagctgtacttgggggttctttacttgggacgtatntgtcagagaaggttattgcctacatcggaggtgttctctttctcgtctttgccgcaataaccttatttgaaatngtgcaatangggttaaaagaaatgcaatataatc

SEQ ID NO: 263671 - DNA, 341 bp, Glycine max
  unsure (1)..(341): unsure at all n locations
aaaaaaaaaaaaaaattaaaaataaaaaaaaaaaaaaaaactcgcacctgtaaattaaaaaaggcccccccaannaaaaaaaaaaaaaaaaaaaaaaaaaaaaaaaanaaaaaaaaaaaaaaaaaaaacaaanaaaaaaaaacaacaccataaaaaaacaaaaaaaaaaaaaaaacacaacaacaacaaaaaaaaaaaaaacaacaaaaaaacaaaaaaaaaaaacancaaacacaacacaaaaaaaaaaaaaaaaaaaaaaaaacaaaaaaaagaggagtgggagcaacaaaaaaaaaaaaaaaaaacacaaaaaacaaaaaaaaaaaaaataataatat

SEQ ID NO: 263672 - DNA, 477 bp, Glycine max
  unsure (1)..(477): unsure at all n locations
agaaaaaaaaaaaaaaaaatttataatttaaaaaaaaaaaaaaaaaagctcgtaagggttgattatnanagggcccggccaganaaaaaaannaaaaaaaaaaaaaaaaaaaananaaaaaaaaaaaaaaaaaaataaaaanaaaaaaaaaaaaaaattattttaataatattaatatataataaaatatattatttattaatatttatatttataaaaaaatatatttattaataaataaaaatattataatataattaattatataaaatatataatatatatataatataaaataatattggggtggtgggggattatatatataattatattaataaaaaatataaaatatatataatatttatataatatatatatttattaaaaatttaaaaaaataaattataatattttttaataaaataattttataattatatttatataatatatttaataataaataaaatttta

SEQ ID NO: 263673 - DNA, 144 bp, Glycine max
  unsure (1)..(144): unsure at all n locations
acaaaaaaaagggangggggaggcgcggagnatgcaagaaataacggcaacccagncatactgtaccatatatcaaaggatgaatctaatccaagtgaccttgttgatacactaaagaaatttgaggttgattttattctttta

SEQ ID NO: 263674 - DNA, 446 bp, Glycine max
cgcaccagtttcaccgcacgaatatcttgttgtttggagcgatccgagaaaaacgctgtggacatgttggtttaccaggacctccttacaggtgatgagcttctctctgactccttccgttacaaggaaattgagaatggaatgctgtgggaagttgaggggaagtgggttgttaaaggagcagttgatgtagacattggtgcaaacccttctgctgagggtggaggagaagatgagggagttgatgatgcagctgttaaggttgttgacattgttgacacattcagacttcaggagcaacccgcattcgataagaagcagtttgttaccttcatgaagaggtttatcaagaatttgactcccaagctcgatgcagagcaacaggagttgtttaagaagcacatcgagggagcaactaaatacctgctctctaagattaaagattt

SEQ ID NO: 263675 - DNA, 453 bp, Glycine max
aattcccggaccgacgcagcgcgtccgcgggcgcgtgggttatcctaagtctttggttatagttctgcaatggcttcaagtcatgaggaggggtctccatttgggagctactggaagcccatttgtgtgcagggttcatattgccctcaagttgaagggagttcaatacaaatatgtcgaagaaaatttgaggaacaagagtgaactgcttctcaaatccaacccagttcatatgaaggttccagtgtttatttacaatgagaagcccatatcatagtctcttgtgattgttgaatacattgatgagacatggaagaacaaccccatcttgccttctgatccttaccaaagagccttggctcgtttctggtccaaattcattgatgataatgtttttggtgcctcatggaaattcggttttacagctgatgataaataacgtgagaagaatgt

SEQ ID NO: 263676 - DNA, 443 bp, Glycine max
aatcaaactagaattattctgacagtaaactttagttctgcaatggcttcaagtcaggagtaggtgtcccttttgggagctactggaagcccatttgtgtgcagggttcatattgccctcaagttgaagggagttcaatacaaatatgtcgaagaaaatttgaggaacaagagtgaactgcttctcaaatccaacccagttcacaagaaggttccagtgtttattcacaatgagaagcccatagcagagtctcttgtgattgttgaatacattgatgagacatggaagaacaaccccatcttgccttctgatccttaccaaagagccttggctcgtttctggtccaaattcattgatgataaggtttttggtgctgcatggaaattcgttttcacagctgatgagaaagagcgtgagaagaatgttgaggaagcaattgaggc

SEQ ID NO: 263677 - DNA, 397 bp, Glycine max
attcccgggtcgacgcacgcgtccgaaggggcctggaataatccagacacgtaaattatagtgctgcaatggcttcaagtcaggtagtatgggatccaatttgggagcgggtggaagcccatttgtgtgcagggttcatattgccctcaagttgaagggagttcaatacaaatatgtcgaagaaaatttgaggaacaagagtgaactgctttttaaatccattttagttcacaagaaggttttagtgtttattcacaatgagaagcccatatcagagtctcttgtgattgttgaatacattgatgagacatggaagaacaaccccattttgccttctgatccttaccaaagagccttggctcgtttctggtccaaattcattgatgataagggtttt

SEQ ID NO: 263678 - DNA, 434 bp, Glycine max
acccacccgtccgaaaaaaaaaaagaaaaaaaaaaaaaaaattttaaaaatttaaaacaaaaaaaaaaaaaaaggaaaaaagaaaaaattaaaaaaaacaaaaacaaaaatattggttttaaaaaaaaaaaaaaaaaaaaaaaaaaaaaaaaaaaaaaaaaggcccccccccccaaacacccccaccttcccacccccaccctcccccctcaaacccccttcaaaaccccccccaaatccaatcccctcccccccctttaccccccttcacccctgaaaacccctttccttccccaacttaaccccctttcaaacaaaccccctttcccccccctccctaaaacccaaaacccccccccccaacccccttcccaacctattccccccccaaattcccaatggccccccccctttatcccccccttaaccccccc

SEQ ID NO: 263679 - DNA, 481 bp, Glycine max
acgcgtgcgatggctcccaagccgcctagtacgggtctttttgttttactgaacaagggtcacgtcaggaccattgaggaattgcctacgggccccgcagatcgtaaggggaaaacaagcaagagggtgcactttgtgaggaacctcataagagaggtagccggttttgcaccctatgaaaagcgtataactgagttgctgaaggttgggaaggataagagggcactgaaggttgcaaagagaaagctcggaacacacaaacgcgcaaagaagaagcgtgaggaaatgtccagtgttctcaggaagatgagggctggtggtgcttgagacatgaagaaataagtcttatttactgttttccagattcactagatggacctgtgtattgatggaccaagctttaataattttgttttggttcaataagttacttcaagattttgtttgagaaatatgttttgcttaactgaaacatgattta

SEQ ID NO: 263680 - DNA, 449 bp, Glycine max
cgcgtacgctgggttgcaagattcacttcaaattaggtttttcgctgatcggttcctcatcacatcaggcgacggttcaaatcatcgcagctccttgattatttccttttgttgatacgcggaatcgcgcacacggtgctggtgtgtgcactgaggtagaaagaagaagattgaattgtaaacagcatgaattaccttcttggagctttcaagcctgcatgtaatgtcttgatcacgtttaatgatgggaagaaccggaagcaggttccgtttaaaaaagaaaatggtcaaatggtcacagtcccacttttccaaagtcaagaaaacattggtgggaagattacaatagaaccaatgcaagggaagaagattgatcacaatggtgtaaaagttgagctccttggacagatagagatgtattttgacagaggaaatttttatgactttac

SEQ ID NO: 263681 - DNA, 472 bp, Glycine max
gttgtgtgcaacccattggggaagtctggttgtgccctcatccagcaatttatgatatgggcttttgggtcactagctaattcaaccccatacttgggaggagtgcttctgctgattgtttctgcctggctagcagcggcaaaatccttggatacccaatttactgcattgcgtaaagaggaagaactcgagaaagagatggaacgagcagccgccgtcaagataccagtggtggctgagactgagagtggaaatggttctcttgcaactggttcaccactgaatccatcctcaggtgactcctcaagcagtccatctgaagcctcaactcctcgcaattaaaatgtgccttctttctgtgagaaattgcctcacagaatgagcaaatagagctcttttgagagcagtgttaggtgaaactatttgttgtaggtttatatataagctcttatagaataaacttgctagctac

SEQ ID NO: 263682 - DNA, 280 bp, Glycine max
  unsure (1)..(280): unsure at all n locations
gttgccgggctctaccgtggtttcaacatctcatgtgttggaatcatcgtgtatcgtggtgtgtactttggattgtatgattctgttaaaccagttgtcctcacagggtcattgcaggatagcttttttgccagctttgcccttggatggctcatcaccaatggtgcangtcttgcatcatacccaatagacactgttagaagaagaatgatgatgacctctggtgaagctgtcaagtacaagagctccttggatgcattcacacagatcctcaagaatg

SEQ ID NO: 263683 - DNA, 141 bp, Glycine max
gaattcccgggtcgacgcacgcgtccggaaaaaaaaaaaagccttttactttttttcttttgcatgatttgaatcttgattggaaaagcttcgaattggggtgttttacccatcaattcaattttaagccgtgccttcttc

SEQ ID NO: 263684 - DNA, 421 bp, Glycine max
cccacgcgtccgattgaatatccatggttctcttagttcttttatccattaaaaaactcgagattgatatttctaagaagaactatagtagttgaaagatatcttttgcaaatatgcatatttaactgaggttgttataacttgttccttccctcaaaaaaaaaaaaaaaagaaagaaaaagaacctattagcctccttcattggatatattacatctataaggagtaaattctaccggttcagagaatagaaaaataatcaaaataaaagtcagcagtctcacatctctaattttggtgacagattcaaggggttaaatttgatccagaaggtgaatatgtgagacaatggctacctgagttggcaagaatgccaactgagtggatccatcatccttgggatgcaccggttactgttctt

SEQ ID NO: 263685 - DNA, 453 bp, Glycine max
ttctcgggtcgacgcacgcgtccgggagctttggatatctatagcgaaagcgtgtcaccaccaaaaaccgaactgttcccagagctctctctcactcttccaacaatcgaaatccaaaaccctaccgacaccacactcaatcgaaattcttcattctcttctcatcgatggggcagaagtctctgatctacgcgttcgtgtcgcggggaacagtgattctcgcggagtacaccgaattcagcggaaacttcaactccatcgccttccagtgccttcagaagctccctgccaccaacaacaagttcacctacaattgcgacgcacacaccttcaattacctcgtcgacaatggctacacatattgtgttgttgcagatgaatcaattggaagacagttacccatggcttttctagagcgtgtcaaagatgaatttgtgtcaaaatatggtggtg

SEQ ID NO: 263686 - DNA, 355 bp, Glycine max
cccactcgtcctaccacacatcctatcaaaaattgtaccttgtctaaaatctacgaaacataagaatttatgatcaattatatataacgttctgaacatctattaacacacttatacttactcccacatttataataaacatcattaataccaattcatatcacattatcacattcactctaattatacaatatcatctctatcctacatatcacaattaatattaccattctcaaagaccaattcaataacaatccatcttcttccagtcacattacttattatatacaacctataaacctatatattctaaactacgctaatctactcaactacacacataccattcatatac

SEQ ID NO: 263687 - DNA, 207 bp, Glycine max
atatatatcttcatctctcattttactattttattatcttaatacacttatttcacttgaaactttccttccattacatctcattatcttcataaacttccatctttcaacaacaaattcacttacaactgttaccaccacaccttcaatttcctattttaataattttattcttactttgatttttccaattaattttttatcaat

SEQ ID NO: 263688 - DNA, 445 bp, Glycine max
cctaaacaactctttctcttctgccttcgctcgttgttctccctcgcgtagatcgacaagcgcggagacagagacgtttgctttccaggctgagatcaaccagctcctcagtctcatcatcaacaccttctactccaacaaggagattttccttcgtgaactcatcagcaacgcctccgatgctttggacaagattcgatttgagagtttgacagataagagcaagctcgatgctcagccagagttgttcattcatattattccagacaagactaacaatacactgaccattgttgacagtggtattggcatgaccaaagctgatttggtgaacaacttgggtacaattgctagatctggtaccaaggaattcatggaagccttggctgctggtgctgatgttagtatgattggacagtttggtgtggggttctactctgcatat

SEQ ID NO: 263689 - DNA, 418 bp, Glycine max
cccacgcgtccgagcagcgcaagcacgcacgcattctgtgtgttgtggtttctctgagtggcgagtggactcagttacggagcaataatgagtcaggaatcgtttatatatagcttcgtggctcgtgggacgatggtgttggctgagtacacggagttcactggaaacttccctgccattgcagctcagtgtcttcagaagcttccatcttccaacaacaagttcacttacaactgtgaccaccacaccttcaatttcctagttgaagatggttatgcttactgtgttggtgccaaggaatctgttagcaagcagatctctattgctttccttgaacgtgtcaaagctgacttcaagaaaagatatggtggtggaaaagcagatacagctattgccaagagtcttaacaaggagtttg

SEQ ID NO: 263690 - DNA, 321 bp, Glycine max
  unsure (1)..(321): unsure at all n locations
ccatatcaaantatttaagcttcattttaaattcaaatatacaccatacaatcacttcaatcatctatttcaaatcacaatctcaccatcattcttacactctattcctctataattatatcaacacttatttcttattcattcataaacatctccaataaatccatttctcatacttatccattctattattcattctcattctctatctttaacataactattcaattcatctacttatcattattattataaactttatttttattcaaatccttattcatattatattattacctctcccaatttcacccaaatatt

SEQ ID NO: 263691 - DNA, 402 bp, Glycine max
gacgcacgcgtccgggagctttggatatctatagcgaaagcgttacaccaccaaaaaccgaactgttcccatgtctctctgtcactcttccaacaatcgaaatccaaaaccctaccgacaccacactcaatcgaaattcttcattctcttctcatcgatggggcagaagtctctgatctacgcgttcgtgtcgcggggaacagtgattctcgcggagtacaccgaattcagcggaaacttcaactccatcgccttccagtgccttcagaagctccctgccaccaacaacaagttcacctacaattgcgacgcacacaccttcaattacctcgtcgacaatggctacacatattgtgttgttgcagatgaatcaattggaagacagttacccatggcttttct

SEQ ID NO: 263692 - DNA, 431 bp, Glycine max
  unsure (1)..(431): unsure at all n locations
gttgaatcgtgaaaatgttcagaaaccagtacgacacggacgtgaccacatggagcccggcggngaggctgttccaggtggagtacgctatggaggcggtgaagcagggctcggcggcgatagggctccgatcgaagacccacgtggtcctcgcatgcgtcaacaaggccaactccgaactctcctcgcaccagaagaagatcttcaaggtcgacaatcacatcggcgtcgccatcgctggcctcaccgccgatggccgcgtcctctcccgctacatgagatccgaatgcatcaactataattacacctacgagtcgccgctccccgtcggcagactagtcgttcagctcgccgataaggctcangtttgcacacagcggtcttggaaacgtncttatggggttggactcctggtagcttgattagatgaa

SEQ ID NO: 263693 - DNA, 356 bp, Glycine max
  unsure (1)..(356): unsure at all n locations
cgacgcacgcgtccggttgaatcgtgaaaatgttcagaaaccatttcgacactgacgtgaccacatggagccctgcggnttggctattccaggtggactacgctatggaggcggtgaatcagggctcggcggcgatagggctccgatcgaagacccacgtggtcctcgcatgcgtcaacaaggccaactccgaactctcctcgcaccagaagaagatcttcaaggtcgacaatcacatcagcgtcaccatcgctggcctcaccgccgatggccgcgtcctctaccgctacatgagatccgaatgcatcaactataattacacctacgagtcgccgctccccgtcagcagactagtc

SEQ ID NO: 263694 - DNA, 457 bp, Glycine max
aattcccgggtcgacgcacgcgtgcgcttgaaggccattgtcagttttgttacaattcaattccagctttgcactgtcttggtcacgttttccttgggtacaagaacacattattttggtcggacaattcttcatggtggtgcaaggtatcaagcaactggccgcgggtttgttgttcgccatatcaaattttcagagaactacagactctactctcgtagtcattttgttaaagggttggaggttgcgcttttgttgatagtatatcttgcttatggctataatgaaggtggtgcactctcatatattcttttgagtataagcagttggtttatggctctatcctggttgtttgctccatatttattcaacccatctggatttgagtggcaaaaggtggtggaagatttcagagattggacaaattggctactctaccgaagtggaattggtgtta

SEQ ID NO: 263695 - DNA, 292 bp, Glycine max
tcccaacactttctctaacattatccatatagatgctgaaccttatacttacgattcagttaaatttctaagaagcacatcctaacataccttctctttaagacacttatacatatacttattatatcaatatataataatttcattaaatctaacttaattacctgttacttttttaaaaacaattattttataaacaatctatatactattttttattttatttgaattttctaaattttataactttatctacttaattaccatatttaataatatctttattataaaa

SEQ ID NO: 263696 - DNA, 322 bp, Glycine max
aattcccgggtcgacgcacgcgtccgcttgatgatcccaacactttcggtaacaggattcacaggatgctgaagcttggactgaggattgatgaagatgctggtgaagcagatgctgacatgcctcctcttgaggacgctgatgcagatgctgagggtagcaagatggaagaagttgattaaatctgacttaattgcctgttacgtttttagaaacaatgattggagaaacagtctttttactatgttttatgttttttgaattttcgaaattttggaacgttggctagttaggtgccgtatgtagtagtttctttatggta

SEQ ID NO: 263697 - DNA, 446 bp, Glycine max
aattcccgggtcgacccacgcgtgcgcccacgcgtccgggagaagcagattgagcttaagcaatggcgccgaagaagccgggaaccgctacaaggaaccctgatttggttagggggattggcaagtattcgaggtcgcagatgtaccacaagaggggcatctgggccatcaaggccaaaaacggtggcgttttgccccgccacgatcccaagcccaagcccgaggccccggcccagaagccgcccaagttctaccccgcggacgatgttaagaagcccctcgtcaacaagcacaagcccaaacccgcgaaactcagggctagcattactccagggactgtgttgatcctgcttgctgggaagttcaagggaaagagggttgttttcctgaagcagctcccatctggattgcttcttggaactggtccctttaagatcaatggggtt

SEQ ID NO: 263698 - DNA, 448 bp, Glycine max
  unsure (1)..(448): unsure at all n locations
ctgagttgcaagattcacttcaaattatgcgtttcgctgatcggttcctcatcacatcagacgacgtcgcatatcatcgcaattccttgattatttccttttgttgatacgcggaatcgcgcacacggtgctggtgtgtgcactgaggtagaaagaagaagattgaattgtaaacagcatgaattaccttcttggagctttcaagcctgcatgtaatgtcttgatcacgtttaatgatgggaagaaccggaagcaggttccgtttaaaaaagaaaatggtcaaatggtcacagtcccacttttccaaagtcaagaaaacattggtgggaagattacaatagaaccaatgcaagggaagaagattgatcacaatggtgtaaaagttgagctccttggacagatagagatgtattttgacagaggaaattnttatgactttactttcctt

SEQ ID NO: 263699 - DNA, 463 bp, Glycine max
aatacccggcccgacgcacgcatgcgctcgctcacacactctcttattgtctctctatcatggctcacattctccctttgctcctggtcacctaccaaaccgccaccgcctccgcccacaatatcaccgacattctcgccgccaaccccgactacagcgacttcaacggcttcctctcccaaaccggcctcgccggcgaaatcaacacccgccagaccatcaccgtcctcgtcctcaacaacgccgccctctccgccgtggccgcaaaacaccccctctccgtcgtcaaaaacctcctcagcctccacatcctcctcgactacttcgacaacacaaagctccaccagatccccaacggcaccacgctctccaccactctctaccaaaccaccggcaatgccaacggcaacggcggctccgtcaacatcaccgacctcaaaagcggtaaggttggcttccgctc

SEQ ID NO: 263700 - DNA, 438 bp, Glycine max
cggacgcgtgggttatcctaagtctttgggaatagtgctgcaatggcttcaagtcaggaggaggtgacccttttgggagctactggaagcccatttgtgtgcagggttcatattgccctcaagttgaagggagttcaatacaaatatgtcgaagaaaatttgaggaacaagagtgaactgcttctcaaatccaacccagttcacaagaaggttccagtgtttattcacaatgagaagcccatagcagagtctcttgtgattgttgaatacattgatgagacatggaagaacaaccccatcttgccttctgatccttaccaaagagccttggctcgtttcttgtccaaattcattgatgataaaggtttttggtgctgcatggaaatccgttttcacagctgatgagaaagagcgtgagaagaatgttgaggaagcaat

SEQ ID NO: 263701 - DNA, 447 bp, Glycine max
ggtctctaagtttcactttctttgcatatttcaacctcctttctctgtgactctgagtagcgtatcggtttattattatttctaattctctcttatcaggtccattgaatatgtctccgtcgttggatcttcctcccaagggtggcttcagttttgatctatgccgaagaaacgcaatgcttcaaaacaagggcctcaaagccccaacctttctcaaaactggcaccactattgtcggtttagttttccaggatggtgtcattcttggtgctgatactagggcaactgaaggacctatagtggctgataaaaactgtgagaaaattcattatatggcacccaacatatattgctgtggagcatgcacagctgctgatacagaggctgtaacagacatggttagctcacaactgaattacatcgctccatactggtcgagatcaagag

SEQ ID NO: 263702 - DNA, 368 bp, Glycine max
acgcgtgcgggtgtctaagtgtcactttctttgcatattgcaaccttctttctctgtgactctgagggggcgattgttaaattattattgctaattctctcttatcaggtccattgaatatgtctccgtcgttggatcttcctcccaagggtggcttcagttttgatctatgccgaagaaacgcaatgcttcaaaacaagggcctcaaagccccaacctttctcaaaactggcaccactattgtcggtttagttttccaggatggtgtcattcttggtgctgatactagggcaactgaaggacctatagtggctgataaaaactgtgagaaaattcattatatggcacccaacatatattgctgtgga

SEQ ID NO: 263703 - DNA, 329 bp, Glycine max
taagtgtcactttctttgcaattgcaccttctttctctgtgactctgactagctcattggataattattattggctaattcgtctcttatcaggtccattgaatatgtctccgtcgttggatcttcctcccaagggtggcttcagttatgatctatgcctaagaaacgcaatgcttcaaaacaagggcctcatagccccaacctttctcaaaactggcaccactattgtcggtttagtttttcaggatggtgtcattcttggtgctgatactagggcaactgaaggacctatagtggctgataaaaactgtgagaaaattcattatatg

SEQ ID NO: 263704 - DNA, 432 bp, Glycine max
ggctgaagcacaactacgagaccagcatggcaaccctgtcccactcaccgatcaatacggtagtgcggttatcttaactgacgagcgcggtaatcccgtccaactcactggtgtcgctaccaccgctaccggcacagcaggttctgggtttgggtcctatggtaccggtgcttacggtggtggtgcaagtgcaaccaccgttgcagatcttttggcaacccaaccaaggagtggcagggaggctagagagcttcgtcgttccttcagttcaagctctagctcgtctgaggatgaatggcaaggtgggaggaggaaaaaggaattgaaggttaaaataaaggagaaactccaagggtaagaaggagggaataatattaggggccttgcccccccacaactggttcaaacaacggcacttaccaacctggtgat

SEQ ID NO: 263705 - DNA, 438 bp, Glycine max
ctttcaagcacagctactacaccatcatcactttcctctcccactcaccaatcaatactataagccagggttattttctaactatcgcgggaatatcatccaactcactcttgtctctaccacctctacctacacaccatattcatctctttacttctctattatacctcttcttactatcttgttacaatttcaaccaccttttcatatctttattcaacccaaccaataaatttcatatatgctacagatcttcatcaatcctccagttcaaactctaactcttcttactatgattttcaacgtataaactaagaataaagataatgatatataaaataaaacaaaaactactcattatattaatatgcaataataataatgatcatgcacacacaacaacttctccaaccacctacactaaccacccttcttatc

SEQ ID NO: 263706 - DNA, 427 bp, Glycine max
atttccgggtcgagccacgggtgacgcctacttttgattgcttgatgaaaacctatgttattcctgacaccagaattctggaaggagacgcgctgctccaaatctccattcggagagtacacagatctactggcaaaaccaacaggaaagactctaatcttggaggaggaaagggtggatgcttgatttgctagttttgctttatggatgttttaggaactttattactttacatactttgttggttctgtgctttacttttggtttttgatagaaggtatgtctctttatgccttttgaatggttccaagttttaattgactgccaaaaaaaaaaaaataaaaattaaaaataaaaaaataaaaaaaataaaaaaaaaaaagggccgccccttttaaagaaccaaacttaactaccccttccttcc

SEQ ID NO: 263707 - DNA, 235 bp, Glycine max
tcgccgtgagccaagagccatactaattcagctacaaactgcaataacaggggcatggtggttatcgaaatgcgatcgcatcgtcgagaataatgggaattttgggagcgattcttatacatccagatgactcttaccctctgctgaaactcaaaatggcagctatgaacgcctagaagctgatcctgtctgagccgtactgggcgttctgctacacaatgctctacaaggtttc

SEQ ID NO: 263708 - DNA, 298 bp, Glycine max
  unsure (1)..(298): unsure at all n locations
ggctacttttgattgcttgatgaaaacctattgattcctgacaccagaattctggaaggagactcgcttctccaaatctccattccaagagtacacagatctactggcaaaaccaacaggaaagactctaatcttggaggaggaaagggtggatgctngatttgctagttttgctntatggatgttttaggaactntattactttacatactttgttggttctgtgctttacttttggntttgatagacggtatgtctctgtatgcattttgaatggttccaagtttaaattgactgc

SEQ ID NO: 263709 - DNA, 390 bp, Glycine max
actcggtccggaattcccgggtcgacctcacgcgttacggagctattgctcgtgcctatacggatatcatatttacatttccattttctatctataagtgttcgaataatcttatgctatgggaaagtctcacatatactggagcgctgattaccagaaagcctaatataaggcgaagaataagctcatagctctaattgctagtaatggatgcgctactctaatgctacgtttggcatggacatatgctggaacttacgacctgagctctaagacctgaggtaccttctgaaccataaagcacccctacgaactcgctcacggtacttaccacggtctttacaatccttgtaggcttttggaaccactcaaagcggagtttcctatttt

SEQ ID NO: 263710 - DNA, 434 bp, Glycine max
cggacgcgtgggtttcagaggcaccgaatgttcttacagttgcattaaagagatttcagtctgggaaagttgggaagctcaacaagcctattcaatttcctgaaatacttaacttggcacctttcatgagcgggactagtgataaatcacccatatacagattgtatggggtagttgttcacttagatatcatgaatgctgccttttcgggtcactatgtgtgctatgtgaagaatatccaaaacaagtggttcaaggttgatgacagtgtggtgacagctgttgaaatggattaagtcttgacaaaaggacctataagcttttctaatccaaggggttggccaaggccccaagaattatttggaaccgaatactggtcccagattcaaaacgttaagtcagtggaaagactcttaccacgaaagccagatcta

SEQ ID NO: 263711 - DNA, 446 bp, Glycine max
gtcatatgctccaagtgcactggtaagggttctaagtctggtgcttcgatgaagtgtgctggttgtcaaggaactggtatgaaggtttctataagacatcttggcccgtccatgattcagcagatgcagcatgcttgcaatgaatgcaagggtactggagaaaccatcaacgacagagatcgctgcccacagtgcaagggagaaaaggttgtgcaggagaaaaaagtccttgaagttattgtggaaaagggaatgcagaacgggcagaagattacaattcctggcgaagcttatgaagcgccagacacaattaccggggatattggctttggcccttaacagaaagaacattccaaattcaaaagaaaggcttaagatctttttgtagagcacattttgtcccttactgaagccttatgtggcttccaatttgtgctgactcactt

SEQ ID NO: 263712 - DNA, 482 bp, Glycine max
gtcctgaattcccgggtcgagccacgcgtccggtcatatgctccaagtgcactggtaagggttctaagtctggtgcttcgatgaagtgtgctggtggtcaatgaactggtatgaaggtttctataagacatcttggcccgtccatgattcagcagatgcagcatgcttgcaatgaatgcaagggtactggagaaaccatcaacgacagagatcgctgcccacagtgcaagggagaaaaggttgtgcaggagaaaaaagtccttgaagttattgtggaaaagggaatgcagaacgggcaaaagattacattccctggcgaaacttgataaaccccagacacaattactggggatattggctttgtcctttaacagaaaggacattccaaattcaaaagaaaggcttaagatctttttgtagagcacattttgtcccttactgaagccttatgtggctttcaatttgtgctgactcacttggat

SEQ ID NO: 263713 - DNA, 252 bp, Glycine max
gtccggtcatgtgctccaagtgcactggtatttgttctaagtctggtgcttcgatgaagtgtgctgggtgtcaattaactggtatgaaggtctctataaaacatcttggcccgtccatgattcaccatatgcatcatgcttgcaatgaatccaagggtactgtagaaaccatcaacgacagagatcgctgcccacattgcaaggtagaaaaggttttcatgagaaaaaattccttaaatttattgtgaaaaa

SEQ ID NO: 263714 - DNA, 410 bp, Glycine max
gacccacgcgtggcgtcatatgctccaagtgcactggttttggttctaagtctgatgcttcgataaatgctgctggtgtgtcaaggaactggtattaatgtttctataatacatcttggcccgtccatgattcagcatattcatcatgcttgcaatgaatgcaatggtactggagaaaccatcaactacagatatcgcttcccacattgcaagggagaaaaggttgtgcacgataaaaaagtcctttgagctattgtggaaaacggaatgcataacgggcataacattacatttccttgctaaacttattaaactccatacacaattactggggatattgtctttgtccttcagcagaatgaacattccaaattcaaaagaaaggctttatatctttttgtatagcacat

SEQ ID NO: 263715 - DNA, 319 bp, Glycine max
gaatcggcgggtcgacccacgcgtgcggtcacctctcaacattgaactgctttatggatttaaatgatgtccgtcgcttcatgaagcgagatgactttgaacaactaagtcttccaatattggacacttgtgaaccgacctttatacaacgcactcagctgaaccaggtcttaacgctgtaaatctacacacaccataagctactgattcaggttctcacatacctgccattaacaaaatattcacagaaattttcaacttggagccatagcggacaatgaatgctaatcagtctgatgatttcatctgctcgttaaaa

SEQ ID NO: 263716 - DNA, 446 bp, Glycine max
cggacgcgtgggctgagaaaccctccactctttagtccaaactctcctcctacccaaaatggatgcaagggcatcatcttcttcagcttcctcgattcttttccttgcagcaattgtagctgcttatttctattcatcagaagcagctgtgtccaaaggatcttttgaggacaatttcagcataatgtggtctgaggaccattttactacctctaaagatggacagatctggtatctctcactagacaaagacacaagatgtggatttcaaacaaaacaacgctacagaattgggtggttcaatatgaagcttaagttggtagcaagtgactctgctggtgttgtgacagcttattatatgtgctcaaaaaatggtgccggacccgaaagagatgaacttgattttgagtttttggggaacagaacaagagagccttatttgattc

SEQ ID NO: 263717 - DNA, 420 bp, Glycine max
  unsure (1)..(420): unsure at all n locations
acttacgcataagcttataaaccctncactctttagtcttaactctcctcctacccaaaatacagacaagttcatcatcaacttcaacttcctctattcttttcctatcatcaattctaactccttatttctattcatcataatcatctgtctccaaaagatcttattattacaatttcatcataatttaatcttaataccattttactacctctaaaaatccacatatctagtatctcttactatacaaatacacattattttgatttcaaaccaaacaactcttcaaattttcctccttcattattaatcttaaatttctaacactttactcttcttctttttttacaacttatttatatttcctcaaaaaattattcccctaccaaaaataaattaactttaattttaatttttttt

SEQ ID NO: 263718 - DNA, 409 bp, Glycine max
ccaattcactctttttcttctcgccctctgccgtgggaggagtttgtaacatggctgctctaccaacggcggagcttagtgacgcaaatgcaacacatgtagcaagttgtgatgtgagggtgttgcatccagtgttcaaggtttacggtggggccaccgcgttctccggccccgttgtcaccgtgaaggtgtttgaagacaacgtgttggtgagggagcttcttgagacgaaaggcgaaggaagagtattggttgttgatggaagaagaagcttgaagtgtgcattggtgggaaggaatttggcactgattgcacataacatgggttgggctgggattgtggtgaatggctgcatcagagatgtggatgagatcaatgcaagtgatattggcgtcagagccttggcttc

SEQ ID NO: 263719 - DNA, 424 bp, Glycine max
ccaatttactctttttcttctcgccctctgccgtagcggtagtttgtaacatggctgctgtaccaacggcggagcttagtgacgcaaatgcaacacatgtagcaagttgtgatgtgagggtgttgcatccagtgttcaaggtttacggtggggccaccgcgttctccggccccgttgtcaccgtgaaggtgtttgaagacaacgtgttggtgagggagcttcttgagacgaaaggcgaaggaagagtattggttgttgatggaggaggaagcttgaggtgtgcattggtgggagggaatttggcactgattgcacataacatgggttgggctgggattgtggtgaatggctgcatcagagatgtggatgagatcaatgcaagtgatattggcgtcagagccttggcttctcattcactcagatc

SEQ ID NO: 263720 - DNA, 398 bp, Glycine max
ggtcgacccacgcgtgctttctcctctcaacattgagtgctttttggattataaggatgtccggtgcttcatgaagctatgatgagtttgagcaactaagtcttccaattttggaacgtgtgaagggacctctggagaaggcacttgctgaagcaggtcttaccgttgaaaatgtacacacagttgaggtggttggttcaggttctcgggtaccggccattaacaaaatattgacagagtttttcaaaaaggagcctatgcggacaatgaatgctagtgagtgtgttgctaggggctgtgcgttggaatgcgcaattcttagtccaacgttcaaagtacgagaatttcatgtcaaccaaagccttcctttctcgatttctctttcatggaaaggttct

SEQ ID NO: 263721 - DNA, 433 bp, Glycine max
  unsure (1)..(433): unsure at all n locations
caaaacaatcaacaatagcttgctagctactcctgttgctgtgagaaccgttgatgtagatgcgttgcaagcaagatttagagactccaacaataaaagccatgcttaacacctaccatgcctncaaactctcatcaaaccagtgtggttctagccttgtgcaaacaatagatgcacctttacctctcgtatggtccctcataaggcgctttgagtatccacaagggtacaagctctttgtgaagaagtgcaaccttcttgatggggatggtggcattggaagcgtgcgtgaggtcatgatcacatctgggttacccgctggtgttagtgttgaaaaggtggacaagctccatgatgaacagcatgtcttgaaagttaacatcattggtggtgatcacaagcttggcaattataggtcaacgattactttgca

SEQ ID NO: 263722 - DNA, 454 bp, Glycine max
cactcttgcgctcaacaatcaacaatatctttcttactacttttttttttttcagaacaccacttttaaatacgtctcgttcaagtttaaacttctccatcatttttacacattcttaatacataacattcattccaattctcattaaacctataatactatttcctctctcaaactatttatacatctttaactttctaacaaaacctcatatcacacttctaatatactcaacaccacaatcattatgagttcaattgcaacctacaatatccctatcgttacaacttattccatatttactaaacttttctccaatcatacctcttctaatttcattttttataaaatttacattttcctttttcttttattatttttcaattttacattctttttatttttttaaaatttatgtttttttaacaattcgtatttttcatttatttattca

SEQ ID NO: 263723 - DNA, 433 bp, Glycine max
cccacgcgtccggcgaaaacccccaactccaacctctgttcatcgtctaccgcgctttctttgtaaccagaactatgattaagctttttaaagtaaaggaaaagcagagagaacttgcagaaaatgcaagtggcggaccacctgttaagaagcaaagtgctggagagttgcgtcttcacaaagatataagtgagctgaatctaccaaaatcatgtaccatgcaattccccaatggcaaagatgatctgatgaactttgaagtttcaattcgacctgatgatggatattacttaggtggcacatttttgttttcctttcaagtgtctcccatctatccacacgaagcaccaaaagttaagtgtaagacaaaagtctatcatccaaatattgacttggaaagaaatgtttgtcttaacatcttacgagaagattg

SEQ ID NO: 263724 - DNA, 387 bp, Glycine max
acgcgtacgacacgcgtccggtttctggttgaggaaccaacttcatatcaatgcatgaggccttcaaaaggtaacactttaagaaaatgtcctgcagttgtcacaaataaaaatgatttgatgaggtacagagtatccataaaataatggattccaagttatcctggcccatataccaaaggataaacttaatccaattaaccttgttaatcccttatgaaaatttaaggttaatttaatcttttagcttgataccctaaacctataccagatgaattgatcccagcctacaaaagatctatatttaacattcatacattactttttccaacttttggaagccaaggaatctattgcattaaagtgcacaaaacacttatttttttt

SEQ ID NO: 263725 - DNA, 457 bp, Glycine max
cccacgcgtccggccaaacctccgaactcctttctactctcatcgtatacagcgcatactttggcaccagaactatcaataagctttataaactaaatgaaaagcacaaagaacttgcaaaacatgcaactggcaagaccacctgttaagaagcaaagtgcttgatagttgactcttcacacagatataagtccactgaatctaccataatcatgtaccatgcaattccccaatgccaaagatgatctgatgaactaataagttacaattacacctgatgatggatattactcatgtggcacatttttgtttcccttttaagaggcctccatctatacaaacgaaacacccaaagttaaacgtaagacaaaagtctattataccaatattgacttggaacgaaatgcctggcttcacattttaccagaagattggaaacctgtccttaatataaaca

SEQ ID NO: 263726 - DNA, 451 bp, Glycine max
tgaattctgggagcatcgcggttatgacaagtgagcaattgattgagtttgcatggggacttgctaatagcaacaaaaactttttgtgggtcataagggcagatcttgtggcgggtgaaaatgctgttttacctccagagtttgtgaaacaaaccgaaaatagaggcctattgtctagttggtgctcccaggagcaagtgttggctcacccttcagttgggggatttttgacacacagtggttggaattcaacgttggaaagtatgtgtggaggtgttccaatgatttgttggcctttctttgcagagcaacagaccaattgtcggttttggtgcaaggattgggggaatgggttggagattgaagatggtgaaagggaaaaaattgagagccttgtgaaggaattgattgatggggaaaagggttaagagattaagaaaaaagcttttca

SEQ ID NO: 263727 - DNA, 276 bp, Glycine max
cccacgcgtccggtgatttcagtgagtgatcggcgttcacttgatctcatcataatcgtcagggtcagttgaagaagatgccgatcagaaacatcgccgtcggaaggcctgaagaggcgactcaccccgacacgttgaaggcggctttggctgagttcatctcaaccttcatcttcgtgttcgccggctcaggctccggcatcgcctacaacaagctcaccgacaacggcgctgccacccctgccggcctcatcttcgacttcatcgcccatgcat

SEQ ID NO: 263728 - DNA, 286 bp, Glycine max
cacgcgtccggcgatctcagtgagatgatcgtgtgctcacttgatctcatcataatcgtcagcgtgaagtgaagattatgccgatcagctacatcaccgtcagaaggtctgaagaggctactcaccccgacccgttgaaggcggctctggctgatttcatctcaaccttcatcttcgtgttcgccggctcaggctccggcatcgtctacaacaagctcaccgacaacggcgctgacacccctgccggactcatctccgtctccatcgcccatgcattcgccctctt

SEQ ID NO: 263729 - DNA, 240 bp, Glycine max
gcgtacgctgacagcatcgcggctatgacaagttttcatttgattgagttagcatggcgacttggggtatgtcaacattaaactagtttgtgggtcataagggcagatcttgtggcgggtgaaaatgctgttttacctccagagtttgtgaaacaaaccgaatatagaggcctattgtctagttggtgctcccagtagcaagtgttggctcacccttcagttcgtggatttttgacacac

SEQ ID NO: 263730 - DNA, 214 bp, Glycine max
cgcgtccggcaaagatggggatgtggcactcttctttggactctcaggtaccggaaagaccactctttcgagcgatgacaataagtatctaatcggagaagattaacactgttggggtgacaatggtgtctccaacattgaaagtggttgctatgccaaatgcattgacctctcacgggagaaagagccagatatttgaaatgcaatcaggttt

SEQ ID NO: 263731 - DNA, 267 bp, Glycine max
gatttggatgctaatttttttgatcagccagaaatgcttggagagcccattgcaactctgcgtttgctgcactatgaaggtcaagtttcggatcccttgaaaggattatatggagctggagctcatactgactatggtttaattacactgttagcaacagatgatgtctcgggtcttcaaatatgcaaagatagggatgctaaacctcagaaatgggaggatgtagcaccattgaagggagcattcatagtgaatcttggtgacatg

SEQ ID NO: 263732 - DNA, 289 bp, Glycine max
cccacgcgtccgcggacgcgtgggttgaaaacgacccgtttcctccctcgcacggatccacgcgaaatctgagattccttcgaattgttaactctctttcagtttcaagttggaaactttttcgattttcgctttctggaggtgtgaattgttgtttgaaagtcacaagcaatggtgaaggacactgcgtattatgacatattaggtgtcaattatgatgcatctgctgcagagatcaagaaagcttattatgtcaaggctagaattgttcaccccgataaaaatcctg

SEQ ID NO: 263733 - DNA, 489 bp, Glycine max
gggtcgtctcacttcgtcaaaaccaacttaaactttctccccaattctcaagccaaccgggtctgccttcaagagcaagtaccaagatgaactcattgccaatgctgcttacattggcaccccagggaagggtatccttgctgctgatgagtcaactggtacaattggcaagcgattggccagcattaatgtcgagaatgttgaagcaaatagtcgtgctcttcgtgaactcctattcaccacacctggtgcttttgagtgcctcagtggtgtgatcttgtttgaggaaaccctataccaaaagacagcttcaggaaaacccttcgtagagttgatgaaggaaggaggagttctccctggtatcaaggttgacaagggcacagtagagcttgcaggaactaatggggagactactactcaaggtttggatggccttggcgcccgatgccagaagtactatgaagccggtgcccgttttgccaaatggcg

SEQ ID NO: 263734 - DNA, 497 bp, Glycine max
cgacgcacgcgtccgcccacgcgtccgagaaggcctgggcttagttgataagcataactgggtgaggaagaaaggaagagagtgaagaagatggcgtcgagcggagcggtaccgttttggagggcggcggggatgacgtacataacatactcaaacatatgcgcgaatctgctcaggaattgcctcaaggaaccctacaaggccgaatccctctctcgtgagaagctccatattgttctctccaaatgggtcgacgccaagcctgaaaaacctactattcgttcagacaccccagagcagtgatctggaatagttggaagctataaatgcataaatctttgagatctggaagttcattgtcattttgaacctttctgtgatgtttaaattccttggttttttctctccatgaaatggaacatgcactggattttgatttgcactgttaatcttgtaataatacaagtttaaacgaatgatttagaactattgacata

SEQ ID NO: 263735 - DNA, 415 bp, Glycine max
  unsure (1)..(415): unsure at all n locations
aattcccgggtcgacgcacgcgtccggtcgtctcacttcgtcaaaaccaaccaaactccttcccaattctcaagccaaccatgtctgcncgggtttagcaagtaccaagatgaactcattgccaatgctgcttacattggcaccccatggaagggtatccttgctgctgatgagtcaactggtacaattggcaagcgattggccagcattaatgtcgagaatgttgaagcaaataggcgtgctcttcgtgaactcctattcaccacacctggtgcttttgagtgcctcagtggtgtgatcttgtttgaggaaaccctataccaaaagacagcttcaggaaaacccttcgtagagttgatgaaggaaggaggagttctccctggtatcaaggttgacaagggcacagtagagcttg

SEQ ID NO: 263736 - DNA, 461 bp, Glycine max
gcgtggggtcggtcttcagagctaaaaatgttttcattcttccatctcagtatgtgttgacaggctgtctaagtaatgctaaaaccggtacattgttagatgaacatgcatctgaattgccaagtacttctcgtgaatctgtaccagtttgttataacaatttacgacaagaagcaatcaaatatgttgaagaaggtgcaaaatcaatccaaatctatcatgttgccatgagagctctgaaagaagctgctaagaaggtttgcaccataaaaaatcagagttctggaacagcagagggagctacagcaaccaatggaagcaggggtgaattgcttgtagcagatgaagatgttccaagcaatcaatctgtggcggagaagcaaaagaaaataggagagttgactgctgagttagaggccacatatcaacgatgtgaagtttatagagcatacttgctggct

SEQ ID NO: 263737 - DNA, 486 bp, Glycine max
tcccggctcgacgcacgcgtccgcggacgcgtgggttatcctaagtctttgggaatagtgctgcaatggcttcaagtcaggagaaggtgacccttttgggagctactggaagcccatttgtgtgcagggttcatattgccctcaagttgaagggagttcaatacaaatatgtcgaagaaaatttgaggaacaagagtgaactgcttctcaaatccaacccagttcacaagaaggttccagtgtttattcacaatgagaagcccatagcagagtctcttgtgattgttgaatacattgatgagacatggaagaacaaccccatcttgccttctgatccttaccaaagagccttggctcgtttctggtccaaattcattgatgataaggtttttggtgctgcatggaaatccgttttcacagctgatgagaaagagcgtgagaagaatgctgaggaagcaattgaggctctgcagtttcttgagaatg

SEQ ID NO: 263738 - DNA, 311 bp, Glycine max
acaccatctacttaaatcccatatcaacttcaaattaccatacacaccctcaaatctaacttaattaaatacaaatatatctcaataaaattttacacaacaaaacattcactacttcttaaatccaacccactccacaaaaaacttccacttcaatattcacaatcataaacccatatcataatctctcataatcactaaatacattaaacaaacattcaacatcaaccccatcaaaccttcttatccacaccaaataacctattctattaatttatccaaattcattaattataatctctctaatcttc

SEQ ID NO: 263739 - DNA, 383 bp, Glycine max
gacccactcatcggtagttttagggcttttcattcttctctcttctcttctcttcaatggctacaatcagtctgattaattgctcttccacttctcgtctcctcttccccttaacctctcaaattcactcttccttcactcgttcccctctctctcctcccgttttcaccaatgactccacatcttcttcttcttcttcttcttccagttccaacccctgttgatgatccatgtccaccttcaccagaacgaaacctcacgttaatgtctgaactattggacacgtgtatcacggtaagaccactcttactgcatcaatcaccattgtgcttgctgatgaagggaaagctaaagctgttgccttctattaaatctataatgct

SEQ ID NO: 263740 - DNA, 442 bp, Glycine max
acgcgtccgatggagagcattggaacttcatattccactactaccttaggccttggtaacttcatcaaagccttgcttctctcaacagtgtcaaatatcaccaagaaaaatggtcacaaggggttgattttgaacaatctgaatgagtctcatcttgactactactatgcattttttgcaatattaaacttcctcaacctcatcttcttcgcgtatgttactatgtactatgtatatagggttgaagtttcagattccatagacaagcttgcaaaagaactgaaggaaaagaccgtgtccaacgttgtgaatccaaaagactagttgattggggtatctaaggtgagaaagaggattaagaccgtgaaaagtttcaaaactactttatgtacaaatttggatggccaaagaactagatatgtgtgtgtctgtagagggtgtg

SEQ ID NO: 263741 - DNA, 412 bp, Glycine max
  unsure (1)..(412): unsure at all n locations
acgcacgcgtccggtagaacaagaagaaaaaaccttcacaattatctagtcctagctagaatcaggagggtgtatctcaccttcaagaacacatcgccatggcaaggaacttgcttcttgtgctttttgcagtagccaccctcctccatggctcagcagcccaaaccagacacatggtcggtgatgccacgggctggatcatccctgctggcggcgctgccacctacaccgcctgggcttccaacaaaaccttcaccgtaaacgacactctcgtgttcaacttcgccaccggccaacacaacgtggccaaggtaacgaaatcggctttcgacgcgtgcaactgctggagcgccgtttcaccctgacctnncgtccatcgaccgtgaccctgaacgaaacaggggagcaatac

SEQ ID NO: 263742 - DNA, 384 bp, Glycine max
cctgaacaactctttctcttcttccttctttcgtttttctccctcgcgtagatctacagaggcgggtgtacatatacatttgctctccatgctgacatcaaccagctcctcattctcatcatcaacaccttctactccaacaaggagattttccttcgtgaactcatcagcaacgcctccaatgctttggacaacattcgattcgagagttttacagataagagcaagctcgatactcagccacagttgttcattcatattattccagacaagactaacaatacactgaccattgttgacagtggtattggcatgaccaaatctgatttggtgaacaacttgtgtacaattgctagatctggtaccaatgaattcatggaagcc

SEQ ID NO: 263743 - DNA, 498 bp, Glycine max
  unsure (1)..(498): unsure at all n locations
gaattcccgggtcgacgcacgcgtgcgcccgcgcgttctagaaggcctgtgcttagttgataagcataactgggtgaggagggaaagatgagagtgaagaagatggcgtcgagcggagcggtaccgttttggagggcggcggtgatgacgtacataacatactcaaacatatgcgcgaatctgctcaggaattgcctcaaggaaccctacaaggccgaatccctctctcgtgagaagctccattttgttctctccaaatgggtcgacgccaagcctgaaaaacctactattcgttcagacaccccagagcagtgatctggaatagttggaagctataaatgcataaatctttgagatctggaagttcattgtcattttgaacctttctgtgatgtttaattcctttgnttttttctctccatgaaatggaacatgcactggatattgatttgcacggttaatctngtaataatacaagtttaaacgaatgatttaaac

SEQ ID NO: 263744 - DNA, 484 bp, Glycine max
gaattcccggctggacccacgcgtccgcggacgcgtgggcggacgcgtgggttattatccgcagctgcttttattcgcgccgcaagcagtgagccatggccgtcggaaagaacaagcgcatctccaaggggaagaagggtggcaagaagaaggcagctgatccctttgccaagaaggattggtatgacattaaggctccttctgtttttcaagtgaaaaatgttggcaaaaccctcgtctctcgtactcagggtaccaagattgcttctgaaggactcaagcatagagtgtttgaggtctccttggctgatcttcaaggggatgaggatcatgcattcaagaagattaggttgagagctgaagatgtgcaagggaagaatgttctgacaaatttctggggaatggatttcacaacagacaagctgaggtcattggtacgaaaatggcaaactcttattgaagcccatgtggatgtgaagacaac

SEQ ID NO: 263745 - DNA, 200 bp, Glycine max
taattctccaatctaatacccacatattcctccaattcctcaaccataccaactctaaactctcctcacaccacaagaatatcttcaaagtccacaatcacatctccatcgccatcgatgacctcacctactataaccatcatctctcccactacatgatatccgaatgcattaactataattacacctactactttccc

SEQ ID NO: 263746 - DNA, 516 bp, Glycine max
gaattcccgggtcgacccacgcgtgcgcccacgcgtccggactgcccaagatgtattgacaatgttacggtgcgggcaaaggggcagcatctttctgatcaacaatggtggatacaccatctaggttgaaattcatgatgggccgtacaatgtgattaagaactggaattacactgggttgattgatgcaatccacaatggtgaagggaaatgctggactgccaaggtgttctgtgaagaggagctagttgaagcaattgccacagccacaggacccaagaaagactccttatgcttcattgaggtgattgttcataaggatgacaccagtaaagaattgcttgaatggggctcaagggtttctgctgccaatagccgtcctcccaatcctcagtaatcttcagaatttatcctatgactaaattgctgcagttgccctttagctctatgaaagtgagaatcatttgagatgatgccctttgagggaatttacctttgttaatggcttgaaacatt

SEQ ID NO: 263747 - DNA, 515 bp, Glycine max
  unsure (1)..(515): unsure at all n locations
aattcccgggtcgacccacgcgtgcgattgctgctgtttgcctattggtgtactttggggtctctaccctgctggatgccgcatggagcgatggccaaaaatcagatgaagagcagaaggaggcagaactagcagtttctgaattttctggaaatggtgctgggatactatctgctgctagcacagttgccagtacttttctcttagtttttgttgctgaatggggcgacaagtcattgatctccacaattgcccttgcagcagcttcttctccccttggagtcatagctggagcactggctggtcatggtgttgcaactttgctagctgtacttgggggttctttacttgggacgtatttgtcagagaaggttattgcctacatcggaggtgttctctttctcgtctttgccgcaataaccttatttgaaattgtgcaatangtgttaaaagaaatgcaatataatctccgtgcaaagggttcaagaacgtaatgacctctagagttgtatgat

SEQ ID NO: 263748 - DNA, 303 bp, Glycine max
gcgtccgctggatgatcccaacactttttttaacattattcacaggatgctgaagcttgaactgatgattgattaagatgctggtgaagcagatgctgacatgcctcctcttgaggacgctgatgcagatgctgagggtagcaagatggaagaagttgattaaatctgacttaattgcctgttacgtttttagaaacaatgattggagaaacagtctttttactatgttttatgttttttgaattttcgaaattttggaacgttggctagttaggtgccgtatgtagtagtttctttatggta

SEQ ID NO: 263749 - DNA, 338 bp, Glycine max
cccaacactttctataacatgattcacaggatgctcaagcttgaactttagaaaatttaaaatgcccttgaaccatatcctaacatacctcctcttaatgactctaattcatattcttaagatatcaagattgaataagttaattaaatctgacttaatttcctgttacatttttaaaaacaatgattgtataaacagtctttttactatattttatgtttttttaattttctaaattatgtaacattagctagttaattaccaaatgtattatttttctttatgataaaaaaaaaaaaaaaatgactttcactctacattatccaatcttacttact

SEQ ID NO: 263750 - DNA, 462 bp, Glycine max
  unsure (1)..(462): unsure at all n locations
gaaaaccggnccgaccgacgcgtccgcggacgcctgggttatcctatttctttgggtttagtgctgcaatggcttcaggtcatgtgggggggacccttttgggagctactggaatcccatttgtgtgcagggttcatattgccctcaagttgaagggagttcaatacaaatatgtcgaagaaaatttgaggaacaagagtgaactgcttctcaaatccaacccagttcacaagaaggttccagtgtttattcacaatgagaagcccatagcagagtctcttgtgattgttgaatacattgatgagacatggaagaacaaccccatcttgccttctgatccttaccaaagagccttggctcgtttctggtccaaattcattgatgataaggtttttggtgctgcatggaaatccgttttcacagctgatgagaaagagcgtgagaagaatgtttaagaaacaa

SEQ ID NO: 263751 - DNA, 418 bp, Glycine max
  unsure (1)..(418): unsure at all n locations
cgtccgcccacgcgtccgntctaatctcattctccttctgttcaaacactctctctcatggcatcagagaanaatatgaggatcggcatcaacggatttggaaggattggccgtttggtggccagggttgcccttcaaaggaatgatgttgaacttgttgctgtcaacgatcctttcatcaccactgattacatgacatacatgttcaagtacgacaccgttcatggccagtggaagcattttgatgtgaaggtgaaggactctaagacccttctctttggtgagaagcccgtcaccgtttttggaatcaggaaccctgaggaaattccatggggtgaggttggtgctgattatgttgttgagtcaactggtgtattcactgacaaggacaaggctgctgctcacttgaagggtggtg

SEQ ID NO: 263752 - DNA, 80 bp, Glycine max
aaaaaaaaaaaaaaaaaaaaaaaaaaaaaaatttaaaaaaaataaaaaaaaaaaaaaaaaaaagaaaaaaaaaggaaaaa

SEQ ID NO: 263753 - DNA, 319 bp, Glycine max
tctactttgagtcttcttgatccttctttttctccttgaactcaaacatttcacgtgaggtttttatgctagattggtcgccaaatccatttgggatgaaggtcaagatttcactttcttaaaaaggtatcaaatattaatacaaagaataggacttgaggaacaagagtcctcttctcctccaaatgaacccggttcacaagaagattccggttctcatccacaatggcaaacccatttgttaattccctcattgctgttcagtacattgaagaggtttggaatgacagaaatcccttgttgccttctgacccttacc

SEQ ID NO: 263754 - DNA, 423 bp, Glycine max
cgcgtcgctgctccgtaccagtttcactgcataaatttgagagaaaactctgcaaacatgtgggtttatcgggacctccttacaggtgatgagcttctctcggactccttccgttacaatgaaattgagaatggaatgctgtgggaagttgaggggaagtgggttgttaagggagcagttgatgttgacattggtgcaaacccttctgctgagggtggagaagatgagggagtcgatgacgcagctgttaaggttgttgacattgttgatacattcagacttcaggagcaacccgcttttgataagaaacagtttgttaccttcatgaagaggtttatcaagaatttgactcccaagctcgatgcagagaaacaagagttgtttaagaagcacattgagggagcaactaaatacctgctctct

SEQ ID NO: 263755 - DNA, 425 bp, Glycine max
cccacgcgtccgcgcgtcgcttctccgtacctttttcactgcataaatttgggagaaaactgtgcaaacatgttggtttatcaggacctccttacaggtgatgagcttctctcggactccttccgttacaatgaaattgagaatggaatgctgtgggaagttgaggggaagtgggttgttaagggagcagttgatgttgacattggtgcaaacccttctgctgagggtggagaagatgagggagtcgatgacgcagctgttaaggttgttgacattgttgatacattcagacttcaggagcaacccgcttttgataagaaacagtttgttaccttcatgaagaggtttatcaagaatttgactcccaagctcgatgcagagaaacaagagttgtttaagaagcacattgatggagcaactaaata

SEQ ID NO: 263756 - DNA, 439 bp, Glycine max
  unsure (1)..(439): unsure at all n locations
attgctgctgtttgcctattggtgtactttggggtctctaccctgctggatgcctcatctggcgatgggggaaaatcagatgaagagcagaaggaggcagaactagcagtttctgaattttctggaaatggtgctgggatactatctgctgctagcacagttgccagtacttttctcttagtttttgttgctgaatggggcgacaagtcatttttctccacaattgcccttgcagcagcttcttctccccttggagtcatagctggagcactggctggtcatggtgttgcaactttgctagctgtacttgggggttctttacttgggacgtatttgtcagagaaggttattgcctacatcggaggtgttctctttctcgtctttgccgcaataaccttatttgaaattgtgcaatangggttaaaaagaaatgcaatat

SEQ ID NO: 263757 - DNA, 393 bp, Glycine max
  unsure (1)..(393): unsure at all n locations
aggcctgtncttagtttataagcatttctttgtgaggaaaaaagaagaagagttaggaagatggcttcnaccgnaccggtaccttttttgatggcggcggggatgacgtacataacatactcaaacatatgcgcgaatctgctcaggaattgcctcaaggaaccctacaaggccgaatccctctctcgtgagaagctccattttgttctctccaaatgggtcgacgccaagcctgaaaaacctactattcgttcagacaccccatagcagtgatctggaatagttggaagctataaatgcataaatctttgagatctggaagttcattgtcattttgaacctttctgtgatgtttaattcctttgtttttttctctccaataaatggaacatg

SEQ ID NO: 263758 - DNA, 391 bp, Glycine max
  unsure (1)..(391): unsure at all n locations
aagagtcaaanaaaggggtggttgctgctttttaagctaataatttttaggccataagtcatatttttcgcagcatcaaactaacaaattactcatatcatataataagatggcccgttctctctcgcaagccaaacgtattggtgtccttgttgctcaatctatctccctaattcccgttcatcggcgaggttactcagtggcatccgatgtatcggtaagagttggattgggtaatattgggcgaaggaatggaatcgtgggaggtgtagaagagaagcctgatacaagagatggttcaaaagcctactcaactgatttttccccatacccattaacatgttactatatgcccattaaccacaccccttaaattgacccggtggagctt

SEQ ID NO: 263759 - DNA, 433 bp, Glycine max
ctcaccattttcaccgcacgaatatcttgttgtttggagcgatccgagaaagactctgtagacatgttggtttaccaggacctccttacaggtgatgagcttctctctgactccttccgttacaaggaaattgagaatggaatgctgtgggaagttgaggggaagtgggttgttaaaggagcagttgatgtagacattggtgcaaacccttctgctgagggtggaggagaagatgagggagttgatgatgcagctgttaaggttgttgacattgttgacacattcagacttcaggagcaacccgcattcgataagaagcagtttgttaccttcatgaagaggtttatcaagaatttgactcccaagctcgatgcagagcaacaggagttgtttaagaagcacatcgagggagcaactaaatacctgctctcta

SEQ ID NO: 263760 - DNA, 427 bp, Glycine max
agaaagaccaatccgaggagacgaatagacatagaaaaggctcacacaccacccgtggaaggaatgaatgattgagaaaccaaatcaaaccacgccagcttcaaaacgctgcgtttcactcccgtcctcgcgtcgctcccaaaccctaatcctatccgcggcattcctctggtcgccgtcgacaccgtcccggtcgcgccaaccgccgtaacccgaagaaaccgaatcgatctgagagaaggtgcgatctcggaggtgggagccaaacgaaacgatgccgtctcacgcggatctggagcgacagatcgagcagctgatggactgcaagcctctgtcggagtcggaggtgaaggcgctgtgcgatcaagcgaggacgattcttgtggaggagtggaacgtgcaaccggttaaatgccccgtcaccgtc

SEQ ID NO: 263761 - DNA, 438 bp, Glycine max
  unsure (1)..(438): unsure at all n locations
tctgttcattattatgtgcagtcacacattctaattaatgaatatcgtgagcgtataatcgtgccttctgcatcaaagaagcaggggcgacctattaccacttgtataaaggttttagacatgactggtctgaagttatcagccctgaatcagattaagttgctaactattatatcatccattgatgatctgaactaccctgagaagacaaatacttattacattgtaaatgctccatacatattttctgcttgttggaaggttgtgaagccacttttacaagagaggacaagaagaaaaatacaggtgttaccaggttgtggacgagatgagctattgactatcatggattactcgtctctaccacatttctgtcgaagagaangctctggatcatccagacattctgagagtggtagtgaaaattgctattccttg

SEQ ID NO: 263762 - DNA, 377 bp, Glycine max
  unsure (1)..(377): unsure at all n locations
ttctaattcttttatcatttatttgaagattgatatgtcaagtgggaaaaccantagccaaagaagatattnaattttctatgattttcattgctaccacattatgctgcttttcagttcagcatttgccaaaactgctaatcctccctctctgagcccaactccagcaccatcccctgcaccagacttcgtgaacctcactgagttactcagtgttgctggtccgtttcacaccttccttggataccttgagtccactaaagtgattgacactttccaaaaccaaaccaacaacacttaagaaaggaattaccacctttgttcctaaagacaatgccttcaatgctataaaaaaaactaccctatccaacctcacc

SEQ ID NO: 263763 - DNA, 322 bp, Glycine max
tcccgggtcgacccacgcgttcgcccacgcgttcgtccacgcgttcgcagggaagttgtggaagttgttgggcgttctcaacggtggccacagtgggagcaataaacaagatagtgacagggaagtttgtgtccttatctgaacaagaacttgtggactgtgacagagcctacaatgaatgatgcaatggtggccttatggactatgcattcgaatttcatattcaaaatggaagcattgactcatacaaagattacccataccgtggctctgatggcatctgtgatccaacttagaaaaatgcaaatgttgtgaacattga

SEQ ID NO: 263764 - DNA, 450 bp, Glycine max
ggtcgaccacgcgtccgcccacgcgtccggtgatttcagtgagtgatcggtgttcacttgatctcatcataatcgtcggcgtcaatttgagaagatgccgatcagaaacatcgccgtcggaaggcctgaagaggcgactcaccccgacacgttgaaggcggctttggctgagttcatctcaaccttcatcttcgtgttcgccggctcaggctccggcatcgcctacaacaagctcaccgacaacggcgctgccacccctgccggcctcatctccgccttcatcgcccatgcattcgccctcttcgtcgccgtctccgtcggcgccaacatcttcggcggccacgtcaaccccgccgtcaccttcggcgcctttgtcggcggcaacatcaccttcctccgcggcatcgtctacgtcatcggccagctcctcggctccatcgtcgccttcct

SEQ ID NO: 263765 - DNA, 414 bp, Glycine max
catgctcctctctgaattcctcttattcattaatttggagagtattgatgtatcattgtagtataatctagtagccaatgaagatatggagttttctatgattttcattgttagcaacattatgctgcttttcagttcagcatttgccaaaactgctagtcctccctctctgagcccaactccagcaccagccccggcaccagacttcgtgaacctcactgagttactcagtgttgctggtccgtttcacacctttcttggataccttgagtccactaaagtgattgacactttccaaaaccaaaccaacaacactgaataaggaattaccatctttgttcctaatgacagtgccttcaatgctataaagaaaactaccctatccaacctcacctttaaccagctaaagcaagt

SEQ ID NO: 263766 - DNA, 418 bp, Glycine max
gtcttcttctctaaaataaaaaaccctaacttctgaacctttcaccggggcgccaccgatgccctatctccactaatcaaagaaaagaaaatgagtagacgctcgagcagaactgtctacgttgggaatctacccggtgatatccgtgaaagagaagttgaagatttgtttctgaagtacggacacataacacacatcgacctaaaggttcccccaagaccacctggttatgcatttgtagagtttgaagatgctcaagatgctgaggatgcaattcgtggtcgtgatggctatgattttgatggccaccggttacgggtggagcctgcccatggtgggcgtggtcattcatcctcaaaagatcggcacaatagtcacagcaatggccgaggtggacgttgggtatctaggcgctctg

SEQ ID NO: 263767 - DNA, 347 bp, Glycine max
ccttaaatttcttatcatatctgactaattttacttttacaacctttcctcttatgaaggctttttaaatatctgaatcctactatcaaattcctactaccttctatcctttttctgattcaaattctcatgacttctttccttcatcaaaacattatctgcatattcgcttacatcatctaaatgtaatgaaaatccttacaacctttcattcattgaaaaaagaattcaactataacaatatacttaaacatgttaataaatactttcttttcaatgcaacattttttcatgacccataactattacattttattcaactttaaatttatcatacgaataatttt

SEQ ID NO: 263768 - DNA, 422 bp, Glycine max
ttctcttcgagggtttgggtttctcttcctcccttggagaaaaagaagagccaccgctgggacgccgttcgtgcatttttgaggtgccgctgtcatgtttgggcgtggtggaccaaggaggagtgataactccaaatattatgatattctcgggatttccaaaaatgccagtgaagatgaaatcaagaaggcctatagaaaggcggctatgaagaaccatccagataagggaggagatcctgaaaagtttaaagagttaggtcaagcatatgaagttttaagtgatcctgagaagaaagaactgtatgaccagtatggtgaagatgcccttaaagaagggatggggggaggaagctcgtttcataatccatttgatatatttgaatcattttttggaggagcaagctttggtggtggtggta

SEQ ID NO: 263769 - DNA, 415 bp, Glycine max
gtcggcccacgcgtccgggtgtgtgcaacccattggtgaagtctttagttgccctcatccaccaatttatcatattgacatttttttcactagctaattcaaccccatacttgggaggagtgcttctgctgattgcttctgcctagctagcagcgtcaaaatacttggatacccaatttactgcattgcgtaaagaggaagaactcgacaaagacattgaacgagcagccgccgtcaagataccactggtggctgaaactgacagtggaaatcgttctcttgcaactggttcaccaatgaatccatccttaagtgacttctcaatcaatccatctgaagccttaactcctcgcaattaaaatgtgcctttcttctttgagaaatttcctcacataatgaacaaattgaactcttt

SEQ ID NO: 263770 - DNA, 464 bp, Glycine max
ggtcttgaattcccgggtcgaccgcacgcgtccgtgtggacctcacagtgaggctggagaaggattcctcctacgatgaaattaaaaatgctatgaaggattaatcagagggcaagttgaagggaattcttggttacactgaagatgatgtggtctccaccgactttgtgggcgatagcagatcaagtatttttgatgcaaaggctggaattgcattgaataagaactttgtgaagcttgtctcttggtatgacaacgagtggggatacagctcacgtgtcattgacctgcttgtattcgttgccaagaagtctttttaaggttgtactgaaaaaaaagtagcttgtctagacattatgtgctggtgtctagctgcgatttagtgtcttcttgctcgggcagaaattaaaagtatgaataaatcggtttctgtaaccggtgttggtaccctgttatgagcatta

SEQ ID NO: 263771 - DNA, 347 bp, Glycine max
aattcccgggtcgaccgcacgcgtccgcaagaaccaacctaccttttgcaatctcaattcaatggcgtcctctctgagtgcgaatcagttcctctcctctaccctcctctccaggtccctccttcgccccgccgcttccgcttcccaccgctctttcaacaccaacgccatgcgccagtatgacaaccgctccgacgaccacagcaccgacatcgatcgtcactcctaacgctctttccctagcactgctcgccacgactatatcttctcatatgttttggatccattttttccgactcggattttgacccatgttcttaacatgatggaccatatcatggacaatc

SEQ ID NO: 263772 - DNA, 388 bp, Glycine max
atcgaaaccttaagtttcggatcaggtctgagcaatctggttggtagaacctttggtctgagagagtcaagttttatgtctgaattagacgatcaaattcctactgccttcgatccttttgctgatgcaaatgctgatgactcgggtgctgggtcaaaggagtatgtgcatattcgcgtacagcagcgaaatggaaggaaaagcctgacaaccgttcagggattgaaaaaagaattcagctataacaagatacttaaagatgttaagaaagagttctgttgcaatggaacagttgttcatgacccaaaactaggacaggttattcaactttaatgtgatcagaggaaaaatgtttctacctttctgggccaagctggtttcgtgaaaa

SEQ ID NO: 263773 - DNA, 432 bp, Glycine max
ctgagttgcaagattcacttcaaattatgcgtttcgctgatcggttcctcatcacatcaagcgacgtcgcagatcatcgcaattccttgattatttccttttgttgatacgcggaatcgcgcacacggtgctggtgtgtgcactgaggtagaaagaagaagattgaattgtaaacagcatgaattaccttcttggagctttcaagcctgcatgtaatgtcttgatcacgtttaatgatgggaagaaccggaagcaggttccgtttaaaaaagaaaatggtcaaatggtcacagtcccacttttccaaagtcaagaaaacattggtgggaagattacaatagaaccaatgcaagggaagaagattgatcacaatggtgtaaaagttgagctccttggacagatagagatgtattttgacagaggaaattttta

SEQ ID NO: 263774 - DNA, 343 bp, Glycine max
cacgcgtccggcaccattttcaccgcacgaatatcttgttgtttggagctattcgagaaaaactctgtgggcatgttggggtaccatgacctccttacaggtgatgagcttctctctgactccttccgttacaaggaatttgataatggaatgctgtgggaagttgaggggaagcgggttgttaaaggagcaattgatgtttacattggtgcaaacccttctgctgatggtggaagacaagatgatggatttgatgatgcaactgttaaggttgttgacattggttacacattcagacttcaagagcaacccgcattttattataagcaaattgttaccttta

SEQ ID NO: 263775 - DNA, 326 bp, Glycine max
cgggtcgacggacgcgtccgcttgatgatcccaacactttcggtaacaggattcacaggatgctgaagcttggactgaggattgattaagatgctggtgaagcagatgctgacatgcctcctcttgaggacgctgatgcagatgctgagggtagcaagatggaagaagttgattaaatctgacttaattgcctgttacgtttgtagaaacaatgattggagaaacagtctttttactatgttgtatgttatttgaaatttcgaaagtttggaacgttggctagttatgtgccgtatgtagtaagtttctttatgggaaaaaaataa

SEQ ID NO: 263776 - DNA, 381 bp, Glycine max
agaagccatgattcggcttgacatgagtgaattcatggaaaggcacacagtctccaaactgattggttcacctcctggatacgttggttacactgagggtggtcaactgaccgaggcagttcggcgtcgtccctacactgttgtactctttgatgagattgagaaagcccatcctgatgtattcaacatgatgcttcagatcctggaagatggaagattaacagacagcaaaggaagaactgtggacttcaagaacacgcttcttataatgacatcaaatgttggaagcagtgtgattgagaaaggaggcccgaaaataagatttgaccttgattatgatgagaaggatagcagttacaaccgaatcaagagcttggtgac

SEQ ID NO: 263777 - DNA, 438 bp, Glycine max
  unsure (1)..(438): unsure at all n locations
gagaagccatgattcggcttgacatgtgtgttttcatggaaaggcacacagtctgggactgattggttcacctcctggatacgttggttacactgagggtggtcaactgaccgaggcagttcggcgtcgtccctacactgntgtactctttgatgagattgagaaagcccatcctgatgtattcaacatgatgcttcagatcctggaagatggaagattaacagacagcaaaggaagaactgtggacttcaagaacacgcttcttataatgacatcaaatgttggaagcagtgtgattgagaaaggaggccgtaaaataggatttgaccttgattatgatgagaaggatagcagttacaaccgaatcaagagcttggtgactgaggaactgaagcaatacttcatgccagagttcttgataggatggatgaaatgatt

SEQ ID NO: 263778 - DNA, 465 bp, Glycine max
  unsure (1)..(465): unsure at all n locations
gtttttggcccgttaatttccgagcaatcgttcgccgtcgcttgaagctgctgctgctgctgcccgttgtgaagtgtttgttctccgtcatctcgcgtcgttagttcattgaactcactgcattgagtggatttggtacaagttgagttcagaatggatgggcgacatcagaagcaaaaaaacaagtacagtataattgttcctacatataatgagcgtctcaacattggtctcattgtttacctcatcttcaagcaccttggggatgctgattttgaaattattattgtggacgatgggagtcctgatggtactcaggatgttgtaaaacaactgcagcaagtttatggagaagatcggattctgttaagagcacgccctangaagttgggtttgggaactgcttatattcatggcatgaagcatgcatcttgaaatttttgtggcatcatggatgctgatcta

SEQ ID NO: 263779 - DNA, 441 bp, Glycine max
  unsure (1)..(441): unsure at all n locations
ggtctctaagtttcactttctttgcatagggcaacctcctttctctgtgactctgaatatcggatcgtttaataataatttctaattctctctaatcaggtccattgaatatgtctccgtcgttggatcttcctcccaagggtggcttcagttttgatctatcccgaaaaaacgcaatgcttcaaaacaggggcctcaaagccccaacctttctcaaaactggcaccactattgtcggtttagttttccaggatggtgtcattcttggtgctgatactagggcaactgaaggacctatagtggctgataaaaactgtgagaaaattcattatatggcacccaacatatattgctgtggagcangcacagctgctgatacagaggcttgtacagacatggntagctcacagctgcaattacatcgctaccatactggtcgag

SEQ ID NO: 263780 - DNA, 296 bp, Glycine max; identical to SEQ ID NO: 263119

SEQ ID NO: 263781 - DNA, 441 bp, Glycine max
ggaaagatgacctgcacttggtagagaacgtgctggattcagctgctcaggagtgtgctgagaaagcaaatgtcgatcccccagagatcattgttgacaaccaagtctatcttccacctggacccagtcgtcacaattctcacgatctctactgctccggtggggtggtgttggcttctcgtgatggaaagattgtgtgtgaaaatactcttgatgcacgtcttgatgtagttttccgtaaaaagcttccagagatccgaaagcagctctttggacaaattgttgcttgaagattttgattgtaatgtttggttacccctggaactatatcccgaagcataagcttgtcttcatgtcttggacctgaatagctatcaagccattgcttctgtgaacttataattattgtcccttaaattacgtcattttcggtagtccagt

SEQ ID NO: 263782 - DNA, 320 bp, Glycine max
cccacgcgtccggactgcccaagatgtatcgacaatgttacggtgcgggcaaaaaaccatgatctttctgatcaacaatggtggatacaccatcgaggttgaaattcatgatgggccgtacaatgtgattaagaactggaattacactgggttgattgatgcaatccacaatggtgaagggaaatgctggactgccaaggtgttctgtgaagaggagctagttgaagcaattgccacagccacaggacccaagaaagactccttatgcttcattgaggtgattgttcataaggatgacaccagtaaagaattgcttgaat

SEQ ID NO: 263783 - DNA, 193 bp, Glycine max
  unsure (1)..(193): unsure at all n locations
accggnccgacggacgcgtccgcccaggcatccntactgcccaagaattatctactatgttacggngcggacaaaaggggcatgtttgtttcttatcaacaattggtgcatacaccatctaggttgaaattcatgatgggccgtacaatgtgattaagaacttgaaatcacactgggttgattgatgcaatcc

SEQ ID NO: 263784 - DNA, 446 bp, Glycine max
ctcagattcagcaattttctattttcttctctcatggcttcagattccaaaaaggatttccctgctgaacaataagggggtaattgctttacacgttgtggttcctcctgattccttccatctcatttgcttctgggaaaaaagtttgcatttgtgtgtaggcatgacaaagaatgacaaagctggaacagcagagaataaagcatccaaagatgaaacgtcatctaaagattctccagcagcacaaagagctactacagctacttctggacctgcaactggttttccaggcaacccttttgatttctctgcaatgtctggcctgctcaatgatccaagtatcaaggaattggctgaacagatagcaaaagatccatcattcaaccagatggctgagcagcttcagaaaacttttcagggagctccacaggatgctatgcctagct

SEQ ID NO: 263785 - DNA, 436 bp, Glycine max
tttgaatacattccttgtagtttatactgaacgatgggtttgaagatggcgttactgatcctaggcgtttccctcatgctccttttggtctcctctgaggtggcatccacgaatacaaaagaggaggcatatggagtggatgatgccaaatatcccggtggaagctatggagggggttacccaggtcatggcggtggcggttatcctggccatggcggtggcggttatcctggccatggcggtggtggtggctatcctggtcatggtggtggccaccctggtcatggtggcggctaccctggccgaggtggtagatactgtatgcatggctgttgcggtggccggacatacaacggaggctgcagaaggtgctgatataacactggcgaagctgttgctgacatactcaatataagactcacgattaagacgatgc

SEQ ID NO: 263786 - DNA, 335 bp, Glycine max
  unsure (1)..(335): unsure at all n locations
ctggctcctggtgcaaagaaaattcatcctggaatatcttctagcataatttctgagctaactgattgcaatgctgctctttcccagcagagaaagaagcgacagattcctccaactttggctcctgtcgaagctctagaggcatatacccagatatctagtcatccctttcacaaaacaaacaaacaaggcattatatctcttgatatcctttattctaaggaccttaatgcaactggaggtattgatacaaatgctgttatttttgaccgcccatcangacagatattatctacactcagtggtcactctaaaaagtgaccagtgtaaagttt

SEQ ID NO: 263787 - DNA, 427 bp, Glycine max
  unsure (1)..(427): unsure at all n locations
aaagccttatcatacagttttttcaagatgccaaggtacaanttgagggagggtatgatgtgataattgtacgcccatnttcttacatcccnagggtgaaaaatcttgttactaacgtatgtaaaggcaaggaactttataaaggcatgaatcctttagaagctgctgtttgcggtgcatcagtggaaggagctattgcttcaggcgtcaatgatccctttgggaacttggacttgttaactatccaagctacacctcttgccattgggattcgagctgatgggaacaagtttgtccctgtaattccgagggatactacaatgccagcacggaaggagctagttttcacaactactcatgacaattaaactgaggcgtttatccttgtctatgaaggagaaggttgaaaggcaaaaaaaaccaccta

SEQ ID NO: 263788 - DNA, 420 bp, Glycine max
  unsure (1)..(420): unsure at all n locations
gcttggcttcccatcaccgagtctcgcaatggaaatgctcactatgctgcatttgacaacgctcaatgctggtgttggcttccaggccctctttttgccagttgcttttgcttatcttggctggagttggggaattctttccttaaccatagcatattgttggcaactttacacgttatggattttggtcagcttcacgaagcagttccaggtaaaaagatacaacagatatgtggagctagcacaagcagcnnattgggaaaagattaggagtctggcttgctctctttccaactgtttatttgtcagcaggaactgcaacagctttgattcttaatggaggagagaccatgaaactgttcttccaaatagtttgtggtcccacgtgtacctcanatnncttaaccacagtggagtggt

SEQ ID NO: 263789 - DNA, 377 bp, Glycine max
ggggtgggcttcccatcaccgagtctttcaatggaaatgctcactatgctgcattgggcacggtcaatgtctgatgttgcttccacaccctctttttgccagttgcttttgcttatcttggctggagttggggaattctttccttaaccatagcatattgttggcaactttacacgttatggattttggttcagcttcacgaagcatttccaggtataagatacaacatatatgtggagctagcacaagcagcatttggcgaaagattatgagtctggcttgctctcttcccaacttgttatttgtcaggaggaactgcaacagctttgattctttattgtaggagagaccatgaaactgttcttccaaatagtttg

SEQ ID NO: 263790 - DNA, 380 bp, Glycine max
  unsure (1)..(380): unsure at all n locations
gaaatgtgaaagccttatcatacagtgtttgcaagatgccaaggtagaagttgaagaagtgaatgatggtgataattgtaggcggatgttcttacatcccgagggtgaaaaatcttgttactaacgtatgtaaaggaaaggaactttataaaggcatgattcctttaaaagctgctgtttgcggtgcagcagtggaaggagctattgcttcangcgtcaatgatccctttggaaacttggactttgtaaactatcaagctacacctcttgccattgggattcgagctgatgggaacaagtttgtccctgtaattccgagggatactacantgccagcacggaaggagctagttttcacaactactcatgacaatcaaact

SEQ ID NO: 263791 - DNA, 312 bp, Glycine max
cccacgcgtccgggaagatggtgctttcggaggaggaaatgggtcgtctgtaccgaataaggaagacggtgatgcaaatgcttcgggacaggggttttctggtgggtgacttcgagatcaacatgtcgaagcatgagttcaagtccaagtacggcgagcacatgaagcgcgaggacctggtcatcaacaagtccaagaaggacaactccggcgaccagatctacgtcttcttccccgacgagcccaaggtcggcgtcaagaccatgaagacctacaccaaccgcatgaactccgaaaacgtctatagagcca

SEQ ID NO: 263792 - DNA, 456 bp, Glycine max
cccacgcgtccggcgaaaacccccaactccaacctctgttcatcgtctaccgcgggttcggttcaaccagaactatgattaagctttttaaagtaaaggaaaagcagagagaacttgcagaaaatgcaagtggcggaccacctgttaagaagcaaagtgctggagagttgcgtcttcacaaagatataagtgagctgaatctaccaaaatcatgtaccatgcaattccccaatggcaaagatgatctgatgaactttgaagtttcaattcgacctgatgatggatattacttaggtggcacatttttgttttcctttcaagtgtctcccatctatccacacgaagcaccaaaggttaagtgtaagacaaaggtctatcatccaaatattgacttggaaggaaatgtttgtctcaacatcttacgagaaagatggaaccctgccttaatataaacac

SEQ ID NO: 263793 - DNA, 416 bp, Glycine max
  unsure (1)..(416): unsure at all n locations
ttttatctttattccactgaatagaacatgagcatataaatggataccctttatatgatggatctttatattatctataaagggtaaagatatccgatgtgaatctatttgtttagttttctatcggtatgtatataggtgaataatccaacatgcctttttgtgaagtaaaaaaactaccctcgatccatgcctcaaaagggttgataataagtaaaaaaaatcattgaattcatgataaaacccttctgcgtttttttattatannattttttgtcaataaagggatccagggggttgggggatcaaatggtaaagttcttttgttggtaaattggaggattagaaacatgactattgctttccanatagctgtttttgcattaatngctatttcatttattttattggatagt

SEQ ID NO: 263794 - DNA, 426 bp, Glycine max
cccacgcgtccggtcgcaagagagacaggtcagcctacttttcccgccacgacgccgccgagcgccgcctccccttgccggagcccgcggaggaggagacgcctacgatgagaccggcgccgccgtccgcggtggtcgtgatgggcctcccccaggactgctccgtcctcgatctcaagtcccgattcgagatctacggcgccatctcccgcatccgcatcgaccgcgacgccgtcggatacatcacctaccggaccaaggactccgccgacgctgccatcgccgccggcctcgaccccaccttcggaatcaccgttaactctaaaatggttcaagtgttgtgggcaacggaccctctagccatgtggagggaagggagtggtaatagcaggaaccaaaggtctatgtcaaagcttgtgcgtgctg

SEQ ID NO: 263795 - DNA, 400 bp, Glycine max
  unsure (1)..(400): unsure at all n locations
aagacggagttcgacttggtggtcggggaggtgccnagcaaccctcaaatcccggtgattaaggcggtaagggcattgactaacctagcgctgaaggaggctaatgagttgatcgaagggttgccgaataagttcaaggaagggatttcaaaggacaaagcttaagatgctaagaatcaactctaagaacctggtgccaaggttaccattgcttaaacactgtttagctgcagcatatatgttctgcttcttcttttgttggttgtagttgagttcaccagtacactgtaatttcatttcccatttgtctggatttcaatcttttatttgtaatgaggaaatatgagttcttaattttatataatttttttaatgcttataagtttttgttgaaatataa

SEQ ID NO: 263796 - DNA, 209 bp, Glycine max
cccacgcgtccggcgaaaacccccaactccatacctctgttcatcgtctaccgcgctttctgttcaaccagaactatgattaagctttttaaagtaaaggaaaagcagagagaacttgcagaaaatgcaagtggcggaccacctgttaagaagcaaagtgctggagagttgcgtcttcacaaaagatataagtgagctgaatctacaaa

SEQ ID NO: 263797 - DNA, 417 bp, Glycine max
  unsure (1)..(417): unsure at all n locations
aatttccagcaatctttcctgtctcttgaagctnctgctgctgcggccggttgtgaagtgtttgttctccgtcatctcacgtcnttagttcattgaactcactgcattgagtggatttggtacaagttgagttcagaatggatgggcgacatcagaagcaaaaaaacaagtacagtataattgttcctacatataatgagcgtctcaacattggtctcattgtttacctcatcttcaagcaccttgtggatgctgattttgaaattattattgtggacgatgggagtcctgatggtactcaggatgttgtaaaacaactgcagcaagtttatggaaaaaaacggattctgttaagagcacgccctatgaagttggttttggaactgcttatattcatggcttgaatcatgcatttgg

SEQ ID NO: 263798 - DNA, 503 bp, Glycine max
  unsure (1)..(503): unsure at all n locations
cggacttgaaggcccgggccgaccgacgcgtccgcccacgcgtccgttatgcattgcatccctcttgatttgtagtttgttttgtgctttagataaaagttctgccaaatcaagaggggttttaagatcatagtgtgtgttttgcaacaatggctaagttctttgctgctatgatcttggcactctttgccatttccatacttcaaacagtggtaatggctgctaatgaacaaggaggccacttgtatgacaacaagagcaaatatggaagtggaagtgtcaagagttaccaatgcccatcacaatgcttgaaggagatgtagccagacccaataccacaagccctgcatgtttttctgtcagaagtgctgcaggacatgcctgtgtgtgcccccggngtattatggtaataaagctgtgtgcccttgctacaacaactggaagaccaaagaaagaggacccaagtgcccttgagcttcaacttgttcaacttcaattgtcgc

SEQ ID NO: 263799 - DNA, 261 bp, Glycine max
tttaatttaaaagaaaatgttcgaaaacatgtctattctgacttagaaggagaaatgcatgggagtaccgatgtgtaccatgcatgagaatttaaatatagtaatgtccatatcttaccaaaaacaagtcatttatggattttatcaggaaaatcatacaggtccggttcagtctctttttcaatccgaaaagatcaagatcaaatgaacattcattatctttctactggagaaagagatttttgtaaccttttagcaagt

SEQ ID NO: 263800 - DNA, 296 bp, Glycine max; identical to SEQ ID NO: 263119

SEQ ID NO: 263801 - DNA, 419 bp, Glycine max
gttcttctaccttattttctttccctagtcaaggagattcatctctgcagcaggttgttttagaaaagaaaaaatgctgaagatttgctgcattggggctggatatgtggggggtccaacaatggcagtcattgcactgaaatgcccctcaattgaagtggctgttgttgacatctctaaatccaggattgcagcatggaacagtgaccagctccctatctatgagccaggccttgatgatgtggtgaagcaatgtcgtggcaggaaccttttcttagcactgatgttgagaaacatgtctatgaggccgacatagtgttcgtctccgtcaacaccccgacaaaaactcgtggtcttggagccggaaaggctgcagatttgacttactgggagagtgcagcacgcatgattgctgatgt

SEQ ID NO: 263802 - DNA, 327 bp, Glycine max
tctccacccaaaccaatccattattcattttaatcttcttatacatcccaataaaaacccaataaaaatatactctttataattatcttttttttctttattataccaatcaatctattctattaaaaaattaactaccttttttcaatttccaattttttctctcaatcaactacattttaaattttaattatcttcaacaccctctaaatttctcttaatatacaatcattactcaaattcaaattattctttcatattcaataaccaataacctttttcttcttcttattaatcatataatttccaacacaaacaccttctttt

SEQ ID NO: 263803 - DNA, 466 bp, Glycine max
tcctgaattcccggtcgacccaccgtcggcacgtgaaatcagtatagctctgggacagggggcacaacgatatctggcgtgttctggaaatcacatgtcacaaattgcgacaggttcaggggataagacagtgaaaaatctggccatagagagggagtctgtcaagcagcttatgtctttacctcaatttacgagtagtgtaacagcattatcttgggttggtctccatcatcggaagaataatggacttctagctgttggaatggaaaatggccaaatagagttgtggaatctgtcttataacagagcagatgatgggagcatagcaacaccaagtttggctgcttctcttgctgtacgtatagatccttttatatgccatgcgtctaccgtaaaccgtctagcatggaagaaaaatgaagatgatcaaacgagtatgcaacttgcttcatgtggagcttataat

SEQ ID NO: 263804 - DNA, 298 bp, Glycine max
ggctacttttgattgcttgatgaaaacctatggattcctgacaccagaattctggaaggaggctcgcttctccaaatctccattccaagagtacacagatctactggcaaaaccaacaggaaagactctaatcttggaggaggaaagggtggatgcttgatttgctagttttgctttatggatgttttaggaactttattactttacatactttgttggttctgtgctttacttttggttttgatagacggtatgtctctgtatgcattttgattgtttccaagttttaattgactgc

SEQ ID NO: 263805 - DNA, 323 bp, Glycine max
cccacgcgtccgctctattcctctgacttcccatagaccacaatacactcaccccaggcagagaaatttcgtttcaaaattgtgatatggacggaagagcgagcagcagcgtgggcggagaagcatcgccagctccagcaccggtgccgataacgaatgcgaacgcgccgccgcctttcttgagcaagacatacgagatggtagaggacccttcgacggactcgatagtgtcgtggagtccaacgaacaacagtttcgtggtttggaaccctcccgagttcgccagagatctcttgcccaaacacttcaagcacaacaacttc

SEQ ID NO: 263806 - DNA, 401 bp, Glycine max
gacgatttggaattgggaaggcgagggattgtctctcgtctcttcctcttctctttcgattgatccctcattcataatcttccaatccaacaacctcagcctcacactcacacatacacacatctgaacgcgtatcgtccctcccatggcttcaaagcgcatcctcaaggagctcaaggacttgcagaaagacccaccaacttcttgcagcgctggtccagtagctgaagacatgttccattggcaagcaacgattatgggtcctgctgatagtccttatgctggaggtgtattcctagtcactattcactttcctccggattatcctttcaaacctcccaaagttgcctttaggactaaggtgtttcatccgaacatcaacagcaatggtagcatttgtc

SEQ ID NO: 263807 - DNA, 340 bp, Glycine max
  unsure (1)..(340): unsure at all n locations
ggctacttttgattgcttgatgaaaacctatggattcctgacaccagaattctggaaggagactcgctttttccaaatctccattccaagaatacacagatctactggcaaaaccaacaggaaagactctaatcttggaggaggaaagggtggatgcttgatttgctagttntgctttatggatgttntaagaactntattactttacatacttttgtggttctgtgctttacttttggttttgatagacggtatgtctctgtatgcatttntgattgttccaagttttaattgacttgcaannaaaaaaaannaaannaaaannnnnnnnnnnannnna

SEQ ID NO: 263808 - DNA, 460 bp, Glycine max
atcagattaatatatgttagtatagttttgaaaatataaatatggctatttaaaaattaagagataaatagataatgtatatattattttaaatttttaatatgattttttttcatgtatgataaatgtgctaaatatttaaaaactaaataaaaataaatacataactgaaaagaagtaattaattatgttgcgttaaacacataatataaaagataataaactaagaaagaatttatgtaatattttctcagatatttttggtattattttttgataaaagccaaagaagcaccgccacacttccaccaaagggatggatccaaagtttctgaggaaccaaaggtacgcgaggaagcataacaagaagagcggtgaaacagccacggaagaagagtaaagtgtcactctcaaatggggctattaggatttgatttgctattcaagtcccatatgtttt

SEQ ID NO: 263809 - DNA, 443 bp, Glycine max
  unsure (1)..(443): unsure at all n locations
attgctgctgtttgcctattggtgtactntggtgtctctaccctgcttgatgcctcatctagccgggggcaaaaaatcaaatgaaaagcacaaagaagcaaaactaacagtttctgaattttctggaaatggtgctgggatactatctgctgctagcacaggtgccagtacttttctcttagtttttgttgctgaatggggcgacaagtcatttttctccacaattgcccttgcagcagcttcttctccccttggagtcatagcttgagcactggctggtcatggtgttgcaactttgctagctgtactttggggttctttacttgggacgtatttgtcagagaaggttattgcctacatcggaggtgttctctttctcgtcttttccgcaataaccttatttgaaattgtgcaatangggttaaaagaaatgcaatataatc

SEQ ID NO: 263810 - DNA, 450 bp, Glycine max
ggtcgacccgcgcgtccggtcagtcttcagagctaaaaatgttctcactcttccatctcagtatgtgtggacatgctgggcaaggaatgctaaaaccggtccatggttagatgaacatgcatctgaattgccaagtacttctcgtgaatctgtaccagtttgttataacaatttacgacaagaagcaatcaaatatgttgaagaaggtgcaaaatcaatccaaatctatcatgttgccatgagagctctgaaagaagctgctaagaaggtttgcaccataaaaaaatcagaagttctggaacaagcagaggggagctacagccacccaatggaagcaggggtgaattgcttgtagcagatgaagatgttccaagcaatcaatctgtggcggagaagcaaaagaaaataggagagttgactgctgagttagaggccacaaatcaacgatgt

SEQ ID NO: 263811 - DNA, 441 bp, Glycine max
cccacgcgtccgcggacgcgtgggggtttttgtggataagagtgagctataatggctggcaggagaccgggtttaattgctttgtttgatgttgacgggactcttacagctcccaggaaggtggtcacaccggaaatgttgacattcatgcaagaactacgaaaggttgtaacggttggagttgttgggggttctgaccttataaagatatcagagcaacttggcagcacagttaccaatgagtatgattacgtattttctgagaatggtcttgtggctcacaaggaaggaaagctcattggaactcagagcttgaagtcattccttggtgaagaaaagcttcaggagtttattaactttacacttcattatattgctgatttggacatccccattaagaggggaacatttatggagttccgtagtgggatgcttgatgtc

SEQ ID NO: 263812 - DNA, 429 bp, Glycine max
  unsure (1)..(429): unsure at all n locations
cggggcggcccacgcgtccgcccacgcgtccgcccacgcgtccgcccacgcgtccgcccacgcgtccgtctccctctgggtgtcactagctctgtgcattcttctctcgctctctgccttccatcacactcggcatttcctttcccaagatagtagaagatggcagacactgaggatattcaacctcttgtttgtgacaatggaacaggaatggttaaggctggatttgctggagatgatgccccacgtgctgtgtttcccagcattgtaggtcgtcctcgtcacactggtgtgatggttggcatgggccanaaaagatgcatatgttggtgatgaggcccaatctaaaaggtgtattttgactctcagtaccccattgaacatggaattgtgagcaattgggatgatatgggaaagaattggcatcat

SEQ ID NO: 263813 - DNA, 463 bp, Glycine max
  unsure (1)..(463): unsure at all n locations
atccgggcgaccacgcgtcgccacgcgtcggcaaaccccaactcaacttgtcatgctacggcttcttgcaggcagactatgattagcttttaaagtaagganaagcagagagaacttgcagaaaatgcaagtggcggaccacctgttaagaagcaaagtgctggagagttgcgtcttcacaaagatataagtgagctgaatctaccaaaatcatgtaccatgcaattccccaatggcaaagatgatctgatgaactttgaagtttcaattcgacctgatgatggatattacttaggtggcacatttttgttttcctttcaagtgtctcccatctattcacacgaagcaccaaaggttaagtgtaagacaaaggtctatcatccaaatattgacttggaaggaaatgtttgtctcaacatcttacgagaaagatggaaacctgtccttaatataaacactgtca

SEQ ID NO: 263814 - DNA, 373 bp, Glycine max
  unsure (1)..(373): unsure at all n locations
ctctgctgcgtttgcttctcctccacccatccacaaacgaacacacactttgattgaaaatggggcgtgttcgcacaaagacagtgaagaagtcctcgcggcaagtgatcgagaggtactactctcgcatgacgctggacttccacacgaacaagaaggttctggaagaggtggccatcattccctccaagaggctccgcaacaagatcgcgggattctccacccacctcatgaagcggatccagaagggtcccgtacgtggaaatctcctcaagctgcangaggaagagcgcgagcgccgcatggacttcgtccccgatgtcttcgncatcaagacccgaccagatcgaggtcgacaaggagacgctcgaca

SEQ ID NO: 263815 - DNA, 324 bp, Glycine max
  unsure (1)..(324): unsure at all n locations
cggggcgagcccacgcgtccgcttctccttctcaatcttgtaattctatttcttccaccataatgctgcgcaagcttggntganngccattcaagaacaagcctggcacaattcccgttcacctcaacgtctatgatctcaccccaatcaacggctatgcctattggcttggccttggagtctaccattctggggttcaagttcatggattggaatatggttttggtgcgcacgagcacgacacaacggggatttttgaagtccaacccaaacactgccctgggttcactttcagaaagtcaattttcatcggaacaacagatc

SEQ ID NO: 263816 - DNA, 382 bp, Glycine max
  unsure (1)..(382): unsure at all n locations
cccacgcgtccgtcaagcattgcatccatcttgatttgtactctgttttgtgctttagatgggagttctgccaaatcaagaggggttttaagatcatagtgtgtgttttgcaacaatggctaacttctttgctgctatgatcttggcactctttgccatttccatacttcaaacagtggtaatggctgctaatgaacaaggaggccacttgtatgacaacaagagcaaatatggaagtggaagtgtcaagaagtaaccaatgcccatcacaatgctcgaggagatttagccagacccaatcccacaggccctgcatgtttttctggcagaagtgctgcangacatgcctgtgtgtgcccccggggtattatgggaaataagc

SEQ ID NO: 263817 - DNA, 177 bp, Glycine max
cttgaattttcttcatccttctctgttctcctagaacttgattacttgaacattccctatggcagatgaggtggttcttctggatttctggccaagtccatttgggatgagggtcaggattgcacttgctgaaaagggtatcgaatatgagtacaaagaagaggacttgaggaacaa

SEQ ID NO: 263818 - DNA, 446 bp, Glycine max
cctaaacaactctttctcttcttccttcgctcgttgttctccctcgcgtagatcgacagtggcggagacagagacgtttgctttccaggctgagatcaaccagctcctcagtctcatcatcaacaccttctactccaacaaggagattttccttcgtgaactcatcagcaacgcctccgatgctttggacaagattcgatttgagagtttgacagataagagcaagctcgatgctcagccagagttgttcattcatattattccagacaagactaacaatacacctgaccatggttgccagggtattggcatgaccaaagctgatttggtgaacaacttgggtacaattgctagatctggtaccaaggaattcatggaagccttggctgctggtgctgatgttagtatgattggacaagttggtgtggggttctactctgcatatc

SEQ ID NO: 263819 - DNA, 451 bp, Glycine max
  unsure (1)..(451): unsure at all n locations
ctctcttccttctttctctttacctcgtcattggcattgccagtggcgttcaaacaaagacgttcgacttgcagaggaaactgcagcatggcaccccggagtgcctnctcccccaatcaagaaaggagaaaggcgctattatactggaaatgaangacagaggtgagtgctcagagtcagagagaaaaggtgattgngttgagaaacagttggtactggatggtctccacgttcgttcaattcaaaatcacattcgaaaaaggacctctagtagccaaattgcagattcctcggaaacccaagttccattaacttctggcataaaattccaaactctaaactacattgtgacaatgggattgggtagccagaacaataacgtgatagtagacactggaagcgacttgacatgggtccaatgcgagccttgccggtcatgttataatcaaaa

SEQ ID NO: 263820 - DNA, 404 bp, Glycine max
  unsure (1)..(404): unsure at all n locations
cccacgcgtccgcccacgcgtccggtttcgtttcgttctgcttcgcgtggaccaacaggaagggtaagttttcattcaatggccagcgctcatctctcatcaatatcttcgtcgatctctacggcgtcgtttgaagggcttcgaccttcggctgttcagtttgcttccgcgggcagaattagaattggcaatctctcccaaaggtctttccggggcttggttgtcaaagccgccaccgttgttgcccccaaatacaccgcgattaagcctctgggagacagagtgctgataaaaattaaggaagcagaggagaaaactgagggtgggattttgcttccatcaactgctcaaacgaagcctcaaggnggtgaggtggttgctgttggaaaaaggaaagacaattg

SEQ ID NO: 263821 - DNA, 462 bp, Glycine max
cccacgcgtccgggtttaaatcacctttgaatttctgctatggcttcaaccagatcgggctttcttcttcttttcattcaattgtgcttctcacttctacccttgtcattcgctcaatcccccgccaccgggtctaccgaaggttacaccatttatggtcgagtgaagatccccagtgtgggaacaaaagattatattcttcctggaaaaatttcaaatgtcaaagtcatactcaatggtggtcaaagagttacttttctgaggcctgatggatatttctcattccacaatgttcctgcagggacacatctaattgaagtggctgccataggctatttcttttctccggtacgagttgatgtaagtgccagacaccatggcataattcatgcagccctgacagataataggagggggctaagtgagtttgcttggagccattgaagatgaacaatattttga

SEQ ID NO: 263822 - DNA, 465 bp, Glycine max
cccacgcgtccgggagaagcagaaggttcatttgcaatggcgccgaaaaagccgagagccaggacaaggaaccctgatttggttagggggattggcaagtattcgaggtcgcagatgtaccacaagaggggcatctgggccatcaaggccaaaaacggtggcgttttgccccgccacgatcccaagcccaagcccgaggccccggcccataagccgcccaagttctaccccgcggacgatgttaagaagcccctcgtcaacaagcacaagcccaaacccgcgaaactcagggctagcattactccagggactgtgttgatcctgcttgctgggaggttcaagggaaagagggttgttttcctgaagcagctcccatctggattgcttcttgtaactggtcccttaagatcaatggggttcctctcagaagggtgaaccaatcgtatgtcattggtacatccacaa

SEQ ID NO: 263823 - DNA, 465 bp, Glycine max
ctcttctcttttttttggatttcctggcccgtttatttttgggggatagccagtattcgtttgctctggccacatttagcccttctggaaagcttgttcaaattgaccatgctttgacggctgtcgggtctggacaaacgtctttgggaattaaagctgcaaatggagttgtcattgctaccgagaagaaattgccatctatattggttgatgaagcatcagtccagaaaattcagttattaacaccaaatataggtgtcgtatatagtggcatgggtcctgattttcgagttttggttcggaaaagcaggaaacaagccgagcagtatcaccgtttatataaagaaccaattcctgtcactcaacttgtcagggaagttgccgccgtattgcaggaatttactcaatctggtggtgttaggccttttggagtgtccctgctagttgctgggtttgatgataacg

SEQ ID NO: 263824 - DNA, 462 bp, Glycine max
  unsure (1)..(462): unsure at all n locations
tcttcctctaaaccctaaacaactctttctcttctttcttcgctcgntgntctccctcgcggagatcgacaatggcggagacagagacgtttgctttccaggctgagatcaaccagctcctcagtctcatcatcaacaccttctactccaacaaggagattttccttcgtgaactcatcagcaacgcctccgatgctttggacaagattcgatttgagagtttgacagataagagcaagctcgatgctcagccagagttgttcattcatattattccagacaagactaacaatacactgaccattgttgacagtggtattggcatgaccaaagctgatttggtgaacaacttgggtacaattgctagatctggtaccaaggaattcatggaagccttggctgctggtgctgatgttagtatgattggacaagtttggtgtggggttctactctgcatatctt

SEQ ID NO: 263825 - DNA, 394 bp, Glycine max
  unsure (1)..(394): unsure at all n locations
cgacgttctcgataagcacttggaacgatcctctccttccacttctcgccccatcacctccggctcgaggaattccaacctccaagtggaggaatctgaaacggagagtgaagagtctgatgttagtggctctgatggggatgacacctcttggatctcgtggttctgtaatctcagagggaatgagttcttttgtgaggtggatgatgattacatacaggatgactntaacctatgtgggttgagcagtcaagtgccctactatgattatgcccttgatttgattctcgacgtcgagtcgtcccatggtgacatgttcacggaggaacagaatgagttgattgaatcagcggcgganatgctttatggtctgattcatgccagatatgtgttg

SEQ ID NO: 263826 - DNA, 413 bp, Glycine max
  unsure (1)..(413): unsure at all n locations
ctttttttttataagtttttaaagttttttttgctcttcttttttaattcctcaaatttttggtgataaattttaattcttcattaattttttgttaacacttttagtcttattaaatttttttgtccatttttaatccttcatttatttttattattcaaaattagacttaaatataaaataaatgaggaaaaaatgaataaaatacaaaataattttgaataataaaaataaataaggaattaaaaatggataaaaaaattagagggaataaaaatactgataaaaaattagtgaagaaataaaaattgttaaaaaaattggaggactaaaaattagattctttgagattttggaaagacanaaaacttaatcctttttttctactctcatttatcaatttctctctattt

SEQ ID NO: 263827 - DNA, 327 bp, Glycine max
  unsure (1)..(327): unsure at all n locations
aaccagctcctcaggcncatcagcaacaccgnctactccaacaaggagatattccttcgtgaactcatcagcaacgcctccgatgctttggacaagattcgatttgagagtttgacagataagagcaagctcgatgctcagccagagttgttcattcatattattccagacaagactaacattacactgaccattgttgacagtggtattggcatgaccaaagctgatttggtgaacaacttgggtacaaatgctagatctggtaccaaggaattcatggaagccttggctgctggtgctgaagatagtatgattggacagtttggt

SEQ ID NO: 263828 - DNA, 438 bp, Glycine max
cccacgcgtccgattttaactgtgtgtgtgtttcttacgtgaaaagtactttttttgatgagggtaactcaactttgctatttataatctactatgcagctgagaagctaaacttgccatacttaagtgcttatctgaattcccttggaaccaattaccggcatggggcaaattttgccactgggggatccaccattaggaagcagaatgaaaccatatttcaatatggaataagtcctttctctcttgacattcagattgtgcaatttaaccagtttaaagcacgcaccaaacaactctatgaagaagccaaggccccacatgaaaagagcaagcttccagtgcctgaggagttctctaaggctctctacacatttgacattggtcaaaatgatctctctgttgggtttagaaagatgaattttgaccaaatacgtg

SEQ ID NO: 263829 - DNA, 463 bp, Glycine max
cttcactttcattctttgcttcagaaaattatttagctagctatctaggatggtgagtgttgaagagatccgtcaggcacaacgtgcagaaggccctgccactgtcatggctattggcaccgccactcctcccaactgcgtcgatcagagtacctatcctgactattacttccgcatcaccaacagcgagcacatgactgagctcaaagaaaagttcaagcgcatgtgtgataagtcaatgattaagaagcgatacatgtacttaaatgaagagatcctgaaggagaatccgagtgtttgtgcatatatggcaccttcattggatgcaaggcaagacatggtggttgtggaggtaccaaagttgggaaaagaggctgcaactaaggcaatcaaggaatggggtcaacccaagtccaagattacccatctcattttttgcaccaccagcggtgtcgacatgcct

SEQ ID NO: 263830 - DNA, 408 bp, Glycine max
ctgctcttcttttttaattcctcaaattttggatgataaattttaattcttcattaattttttgttaacacttttagtcttattaaatttttttgtccatttttaatccttcatttatttttattattcaaaattagacttaaatataaaataaatgaggaaaaaatgaataaaatacaaaataattttgaataataaaaataaataaggaattaaaaatggataaaaaaattagagggaataaaaatactgataaaaaattagtgaagaaataaaaattgttaaaaaaattagaagactaaaaattagaatctttgagaattttgaaagacaaaaaacttaatcctttttttctactctcatttatcattttctctctatttaaaaaaattgtatggtatcttgaga

SEQ ID NO: 263831 - DNA, 340 bp, Glycine max
  unsure (1)..(340): unsure at all n locations
cccacgcgtccgcttctctctctctctctctgtttttcttgcttgaagcaatggccaaagccttggcgtcagtgctgctgtttctcctcgtagctgtgagtaatgtgtttgctgtagagcttgaacttgaaactcttccaccctcttaccctcaccctcaccctgttcactcccccacaccagcacctcttcacccaccagcaaatgctcctcacccacaccaccaccaccaccaccaccaccctccagcaccagcacctgttccttcaccttctcaccacaattaccctcctacccctgcccctgctaagcctnctactcaccaccatcaccatcaccc

SEQ ID NO: 263832 - DNA, 446 bp, Glycine max
cccacgcgtccgcccacgcgtccgcagggattttgtgttagttgttgggcgttctcaacggtggccagagtggaagcaataaacaagatagtgacagggaagtttgtgtccttatctgaacaagaacttgtggactgtgacagagcctacaatgaaggatgcaatggtggccttatggactatgcattcgaattcatcattcaaaatggaggcattgacacagacaaagattacccataccgtggctttgatggcatctgtgatccaactaagaaaaatgcataggttgtgaacattgatgggttcgaggatgttccaccgtatgatgagaatgccttgaagaaagctgtcgctcataaacccgtaagcattgctattgaagcctcttgcagagatttgcaactttatcaatcgggtgtatttacttgtaaatgtgggacaagttt

SEQ ID NO: 263833 - DNA, 443 bp, Glycine max
ctctcttccttctttctctttacctcgtcattttcattgccagtggcgttcaaaccaagaccgtccacttgcagaggaaactgcagcatggcaccccggagtgcctcctcccccaatcaagaaaggagaaaggcgctattatactggaaatgaaggacagaggtgagtgctcagagtcagagagaaaaggtgattgggttgagaaacagttggtactggatggtctccacgttcgttcaattcaaaatcacattcgaaaaaggacctctagtagccaaattgcagattcctcggaaacccaagttccattaacttctggcataaaattccaaactctaaactacattgtgacaatgggattgggtagccagaacatgagcgtgatagtagacactggaagcgacttgacatgggtccaatgcgagccttgccggtcatgttat

SEQ ID NO: 263834 - DNA, 439 bp, Glycine max
  unsure (1)..(439): unsure at all n locations
gtcagtaaccatcgtcgtgagcgaagatccattataatacagttacaaattgcaatggcacacgtcattgtggttatcgaaatttgatcgcagcgtcgagaagaatgggaagtttgggagcgattctgaaacatccagatgacttttaccctctgctgaagctgaaaatggcggcgaggaacgccgagaagcagatcccgccggagccgcactgggcgttctgctacacaatgctccacaaggtttctcgaagtttcgccctcgtcattcagcaactcggcatcgagcttcgcaacgccgtttgcatattttatttggttctgcgagctctcgacaccgttgaggatgatactagcatagaaacagatgtncaggtgccaatactgatagcctttcaccgtcatatttatgatcgtgattggcacttttcatgtggcac

SEQ ID NO: 263835 - DNA, 476 bp, Glycine max
cccacgcgtccgcccacgcgtccgctccagatagaagaagaaacttaatcgatcatcacttcacgttcagtaatacatcatggcagacgagacccagaacaagtatgagagctctgaggttgaggtccaggatcgtggtgtttttgactttctcggtaagaaaaaggatgaagaagacaagcctcatcctcaggaggaggtcatcgccaccgagtttcaaaaagtcactgtctcagaccaaggagagaacaagcacagcctcttagaaaagcttcaccgatctgacagcagctctagctcttcaagtgaggaggaaggagaagatggagagaaaaggaagaagaagaagaaggaaaagaaagggctgaaagagaagatcgaggagaaaatagagggtgatcatcatcatcacaaggatgaggacacaagtgtcccttgtgagaaaagtgaggttggtgaaacagcacatgctgagg

SEQ ID NO: 263836 - DNA, 451 bp, Glycine max
cccacgcgtccgagaaggcctgggcttagttgataagcataactgggtgaggaagaaagaaggagagtgaagaagatggcgtcgagcggagcggtaccgttttggagggcggcggggatgacgtacataacatactcaaacatatgcgcgaatctgctcaggaattgcctcaaggaaccctacaaggccgaatccctctctcgtgagaagctccattttgttctctccaaatgggtcgacgccaagcctgaaaaacctactattcgttcagacaccccagagcagtgatctggaatagttggaagctataaatgcataaatctttgaaatctggaagttcattgtcattttgaacctttctgtgatgtttaattcctttggttttttctctccatgaaatggaacatgcactgtattttggtttgcacggttattcttggtataatacaag

SEQ ID NO: 263837 - DNA, 306 bp, Glycine max
cccacgcgtccgagaaggcctgggcttagttgataagcataactgggtgaggaagaaagaaagagagtgaagaagatggcgtcgagcggagcggtaccgttttggagggcggcggggatgacgtacataacatactcaaacatatgcgcgaatctgctcaggaattgcctcaaggaaccctacaaggccgaatccctctctcgtgagaagctccattttgttctctccaaatgggtcgacgccaagcctgaaaaacctactattcgttcagacaccccagagcagtgatctggaatagttggaagc

SEQ ID NO: 263838 - DNA, 443 bp, Glycine max
cccacgcgtccgcccacgcgtccgaaaaaaatgggttcttcttcttccatatggaccgtgtgtttgattttggcatcactggcctctgcagcactctgtgccaaccctcgtagaccagtggatgtacaatttggccgaaactacgtgcccacatgggcctttgatcacatcaaatacttcaatggaggttctgacattcagcttcatcttgacaagtacactggtactggcttccagtccaaagggtcatacttgtttggtcacttcagcatgtacataaagatggttcctggagattcagctggcacagtcactgctttctatttatcttcccaaaatgcggagcacgacgagatagactttgagttcttggggaacagaacaggacaaccttacattttgcaaacaaatgttttcacaggaggcaagggtgacagagagca

SEQ ID NO: 263839 - DNA, 217 bp, Glycine max
accggccggattcccggtcgccacgcgtcgttatcttattccctgataaactgagcatataatggaacccttatatatctgatcttatatatctataaagggtaaagatatccgatgtgaatctatttgtttagttttcaatcggtatgtatataggtgaataatccacatgcctttttgtgaagtaaaaaaactaccctcgatccatgccctcaaa

SEQ ID NO: 263840 - DNA, 263 bp, Glycine max
gaatgataaggtatatgaacaatccttaacagatacttctacaagatgttctattttttcatagaaaaaaattcgctcaaaaaaaacgcgaaaatattttaatcgtaacttagaggatttgttacgtagaaaaagaaagatagattcatattcccatacatataaattatataggaacaaaaaaaatcttggattactttttgaaaaaaaagtagaaatccatttttttggagtaaaaatactattccaattataataataag

SEQ ID NO: 263841 - DNA, 401 bp, Glycine max
cccacgcgtccggggcgattcgcggcggagattcgagatccgtggaagaagcagcgcgtgtggctggggacgttcgattccgccgaggatgccgcgcgggcttacgacaaggctgcccgatccttccgcgggcccaaggccaagaccaatttcccctccttccccggcccgacggaccaccactcctcgcagcagattccgccgctctaccaggcccacgggctttccaccaagttcgagcccgcccaggtgaaccggcccaccaccagcggcatgagcagcaccgtggagtccttcagcgggcctagggttcccccctcctcctcctcctctcgcaagccccttgtggttgttaaccctatcatccctctcgacgacgacgacgacgattgccacagcga

SEQ ID NO: 263842 - DNA, 481 bp, Glycine max
ccgcctgaataccgggccgcccacgcgtccgcccacgcgtccggcaccccacattgagtatctagtccgtaccaaccaaattcctcgcgaaaggccccagcagaagtacccatcatggctgttagttcttggtgctggcacccttccatttggcaccttgttcattgagctcttctttatcatgtccagcatttggatgggtcgcgtttactacgtctttgggtttctcttcgctgttttgatccttcttgtggcggtttgtgccgaggtatctctagttctgacttacatgcacctgtgtgtggaggattggaaatggtggtggaaatcgttctttgcctgcggttctgtcgccatatacatctttttgtactctgtcaactatcttgtgtttgacctcaagagtgtgagcagtcctgtgtctgcaactctttacttaggctactcactcttcatggttctagcaatcatgctatctaca

SEQ ID NO: 263843 - DNA, 441 bp, Glycine max
cggacgcgtgggtttcaaaggcaccgaatgttcttacatttgcattaaagagatttcagtcggggaaaggtgggaagctcaacaagcctattcaatttcctgaaatacttaacttggcacctttcatgagcgggactagtgataaatcacccatatacagattgtatggggtagttgttcacttagatatcatgaatgctgccttttcgggtcactatgtgtgctatgtgaagaatatccaaaacaagtggttcaaggttgatgacagtgtggtgacagctgttgaattggatagagtcttgacaaaaggagcatatatgcttttctatgcaaggtgctcgccaagggccccaagattaattaggaacagaatactgtccccagattcaaaacgtaaagtcagtggaaagactcttacaacgaaagcaagatctatatcta

SEQ ID NO: 263844 - DNA, 450 bp, Glycine max
cccacgcgtccggttgttttcgttcctctgaagtctggagtggtggagcttggttcgtttgaaatggtgcctgaagagcagggtgttgtggaaatggtcaggacagcatttggggaatccagtcctggacaggcaaaggtgtttccaaagatttttgggcatgagttaagcctgggggatacaaaatctcagtctataactattagtttctccccaaaggtggaagatgatccgggtttcacttcagactcctatgaagttcaagcactaggggtgaaccatgcttatggaaattcttccaatgggactttaggtgacggtaatgaaggaacattgtttcctcaattgaatcaaatgatggctgggaattttaatgctcaagcaagggttccttgtctagatctcggtaatgaagactcatcatcaattcatgcagatgagcggaagccc

SEQ ID NO: 263845 - DNA, 446 bp, Glycine max
cccacgcgtccggactgcccaagatgtatcgacaatgttacggtgcgggcaaaaaaccatcgtctttctgatcaacaatggtggatacaccatcgaggttgaaattcatgatgggccgtacaatgtgattaagaactggaattacactgggttgattgatgcaatccacaatggtgaagggaaatgctggactgccaaggtgttctgtgaagaggagctagttgaagcaattgccacagccacaggacccaagaaagactccttatgcttcattgaggtgattgttcataaggatgacaccagtaaagaattgcttgaatggggctcaagggtttctgctgccaatagccgtcctcccaatcctcagtaatcttcagaatttatcctatgactaaattgctgcagttgccctttagctctatgaaagtgaaaatcatttgagatga

SEQ ID NO: 263846 - DNA, 439 bp, Glycine max
  unsure (1)..(439): unsure at all n locations
gggtcgaccacgcgtgcgcccacgcgtccggactgcccaagatgtatctttcttgtttctgngcgggcaaaaaaccatcgtctttcgtatcatctattttccatacaccatcntngttgaaattcatgatgtgccgtacaatgttattaaaaactggaattacactggttttattgatgcaatccacatttgttaatgtaaatgctttactgccaaggtgttctgttaaaaggaactagttgaatcaatttccacatccacagaacccaataaagactccttatacttcatttaggtgattgttcataatgatgacaccagttaataattgcttgaatggggctcaagggtttcttcttccaatatccgtcctcccaatccttagtaatcttcataattatttctatgactaaatttcttcagttgccctttacctcta

SEQ ID NO: 263847 - DNA, 441 bp, Glycine max
cggacgcgtgggtttcagaggcaccgaatgttcttacagttgcattaaagagatttcagtctgggaaatttgggaagctcaacaagcctattcaatttcctgaaatacttaacttggcacctttcatgagcgggactagtgataaatcacccatatacagattgtatggggtagttgttcacttagatatcatgaatgctgccttttcgggtcactatgtgtgctatgtgaagaatatccaaaacaagtggttcaaggttgatgacagtgtggtgacagctgttgaattggatagagtcttgacaaaaggagcatatatgcttttctatgcaaggtgctcgccaagggccccaagattaattaggaacagaatactgtccccagattcaaaacgtaaagtcagtggaaagactcttacaacgaaagcaagatctatatcta

SEQ ID NO: 263848 - DNA, 114 bp, Glycine max; identical to SEQ ID NO: 262864

SEQ ID NO: 263849 - DNA, 339 bp, Glycine max
ggaactgcgggtgtgtatagcggaagcgtgactccaccaagaaccgggcggagcccagatgtctctataactcttccaacagacgaaatacaataccctaccgacaccacactcaatcgaaactcttcatgctattgtcatagatggggcaggagcatatgatctacgcgttcgtgtcggggagtacagtgattcttgcggaggacaccgaattcagcggaatcttgaacttcatcggctaccagtgccgtgacaagctccctgcctccgacaacatggtcagctacgattgcgacgcacgacgcctcaattacctagtcgacgatggctacacatatt

SEQ ID NO: 263850 - DNA, 441 bp, Glycine max
ctgagttgcaagattcacttcaaattatgcgtttcgctgatcggttcctcatcacatcaaacgacgtcgcagatcatcgcaattccttgattatttccttttgttgatacgcggaatcgcgcacacggtgctggtgtgtgcactgaggtagaaagaagaagattgaattgtaaacagcatgaattaccttcttggagctttcaagcctgcatgtaatgtcttgatcacgtttaatgatgggaagaaccggaagcaggttccgtttaaaaaagaaaatggtcaaatggtcacagtcccacttttccaaagtcaagaaaacattggtgggaagattacaatagaaccaatgcaagggaagaagattgatcacaatggtgtaaaagttgagctccttggacagatagagatgtattttgacagaagaaatttttatgactttac

SEQ ID NO: 263851 - DNA, 398 bp, Glycine max
cgcacatcctctataaggagggaaactgagctcagtaagaagcctcctcgccaatctttagatggatacaagcacgtggttgatgtggaatactgtcccccagttccttctgatggccctaaatttcctccaaaagcagtaaaagcaaaagaggcagcacaaaatgcgcccaatacacagaatactgtggaatatcatgaaattgtagaagatgagatgattcgaggattacagcagttgggatggaaaaaagttgatgtcagctttcactcagcattctggcctttctttgctcataacaacattcatgtgaaaaatgaatggtttcacaatgctggtgtaggagttattgctcatgtggccgaaagcttaagacagctagaagcatcatcattttt

SEQ ID NO: 263852 - DNA, 389 bp, Glycine max
  unsure (1)..(389): unsure at all n locations
aattgtttatgcttacagatcaggtgaggtgattcggctaccaaaaggggtttcaattccagtgacactaanagttctggagtttgagcttttccacttctgtccaatccaagaaatagctccaagtatatcatttgcagcaatagggctactggatatgttcaacactggaggagcagtggagcaggttgagattcataaccgagcagcaacgaaaacaatagctcttagtgtaaggggaagaggcagatttggagtttactcctcccagagaccactgaagtgtgtggtaggtggcgctgaaaccgacttcaactatgactcagagaccgggttgacaaccttctccattccagtttctccagaggagatgtacagatggtcaatag

SEQ ID NO: 263853 - DNA, 295 bp, Glycine max
cttgatgatcccaacactttcggtaacaggattcacaggatgctgaagcttggactgagcattgatgaagatgctggtgaagcagatgctgacatgcttcttttgaagacccttatgcaaatgctgaaggtagcaagattgaagaaggtgattaaatctgacttaattgcctggtacgtttttagaaacaatgattggagaaacagtctttttactatggtttatggtttttgaattttcgaaattttggaacgttggctagttaggtgccgtatgtagtagtttctttatggta

SEQ ID NO: 263854 - DNA, 329 bp, Glycine max
ggtctggaattcccgggtcgaccgacgcgtccgcttgatgatcccaacactttcggtaacaggattcttaggatgctgaagcttggactgagcgggggtgaagatgctggtgaagcagatgctgacatgcctcctcttgaggacgctgatgcagatgctgagggtagcaagatggaagaagttgattaaatctgacttaattgcctgttacgtttttagaaacaatgattggagaaacagtctttttactatgttttatgttttttgaattttcgaaattttggaacgttggctagttaggtgccgtatgtagtagtttctttatggta

SEQ ID NO: 263855 - DNA, 466 bp, Glycine max
ggtctggaattaccgggtcgaccgacgcgtccgacgcttcatgctattgcttcctatctctttttcatgaccccttcatggagtccactttgcggacgaatctactagtcttcaacaacaccctccaaccagagttaatgaggagtgtgcatgtgtaccgccgaggggatggagagaaaagggaagttgagagagagtttgtgttttcagagagcggctcctatggggaaatgcaggctaccccaattcctggattggtaaaatctcgtgtttctgaagtgtgtgaagggcaccgaaatggagtgtggctttgtgtctttgcgttccatgccgatcacactcctcaattttgccgcattccaccggtttttgtggtcacaagaaacccaaagcttaagatgattccaaacttgcttgatgatctccatgtgatatacaagttggaccggaaggaggaagacagtga

SEQ ID NO: 263856 - DNA, 262 bp, Glycine max
atcgctgcgattaaggccgtgagggcattgacgaacctagcgctgaaggaggcgaacgagttgatcgaagggttgccgaagaagttcaaggaagggatttcaaaggacgaagctgaagatgcgaagaagcaactcgaagaagctggtgccaaggttaccattgcttaaacactgtttagctgcagcatatatgtactgcttcttctttcgttggctgtagttgagttcaccagtacacttgtaattgcatttccattttgtc

SEQ ID NO: 263857 - DNA, 453 bp, Glycine max
tttgaatacattccttgtagtttatactgaaagattggtttgaagatggcgttactgatcctaggcctttccctcatgctccttttggtctcctctgaggtggcatccacgaatacaaaagaggaggcaaatggagtggatgatgccaaatatcccggtggaagctatggagggggttacccaggtcatggcggtggcggttatcctggccatggcggtggcggttatcctggccatggcggtggtggtggctatcctggtcatggtggtggccaccctggtcatggtggcggctaccctggccgtggtggtggatactgtaggcatggctgttgcggtggccggacatacaacggaggttgcagaaggtgctgctataacgctggcgaagctgttgctgcacaaactcaagataagactcacgattaagacgatgcagttctacttaattag

SEQ ID NO: 263858 - DNA, 447 bp, Glycine max
tttgaatacattccttgtagtttatactgaaagatgggtttgaagatggcgttactgatccgaggcctttccctcatgctcctttgggtctcctctgaggtggcatccacgaatacaaaagaggaggcaaatggagtggatgatgccaaatatcccggtggaagctatggagggggttacccaggtcatggcggtggcggttatcctggccatggcggtggcggttatcctggccatggcggtggtggtggctatcctggtcatggtggtggccaccctggtcatggtggcggctaccctggccgtggtggtggatactgtaggcatggctgttgcggtggccggacatacaacggaagttgcagaaggtgctgctataacgctggcgaagctgttgctgcacaaactcaagataagactcacgattaagacgatgcaattctactt

SEQ ID NO: 263859 - DNA, 434 bp, Glycine max
  unsure (1)..(434): unsure at all n locations
ggcggcgctgtggcggacgcgccggcggtggttgaggagaagacggagttcgacgtggtgatcgaggaggtgccgagcaacgctcgaatcgcggtgattaaggcggtgagggcattgacgaacctagcgctgaaggaggcgaaggagttgatcgaagggttgccgaagaagttcaaggaagggatttcaaaggacgaagctgaagatgcgaagaagcaactcgaagaagctggtgccaaggttaccattgcttaaacactgtttagctgcagcatatatgttctgcttcttcttttgttggttgtagttgagttcaccagtacactgtaatttcatttccattntgtctggatttcaatcttttatttgtaatgagggaaatatgagttcttattnttatattatnntttttaatgcgtatgaaagtgttgttg

SEQ ID NO: 263860 - DNA, 417 bp, Glycine max
ggcggcgctgtggcggacgcgccggcggagtacgaggagaagacggagttcgacgtggtggtcgacgttgtgccgagcaaggctcgaatcgcggtgattaaggcggtgagggcattgacgaacctagcgctgaaggaggcgaaggagttgatcgaagggttgccgaagaagttcaaggaatggatttcaaaggacgaagctgaagatgcgaagaagcaactcgaagaagctggtgccaaggttaccattgcttaaacactgtttagctgcagcatatatgttctgcttcttcttatgttggctgtagttgagttcaccagtacactgtaatttcatttccattttgtctggatttcaatcttttatttgcaatgacgaaatatgagttcttatatttatattatatttattaatgcg

SEQ ID NO: 263861 - DNA, 438 bp, Glycine max
gaccgacgcatccgttcgaccactccttccatcgaatatccacggcttaactcaaatctcgtatccatcaaaaaacgctgagttaatattactaagaagaggtctaataaatgaaagatatcttttgcacatatgcatatctaactcaggacgctataacttgttccttccctcaaaaaaaaaaaaaaaagaaagaaacataacctatcagcctccttcattggatatattacatctataaggagaaaattctaccggatcaaataatagcactataatcaaaataaacgtcagcagtctcacatctctaatttaggtgacagattcaatgagtcaaatttgatccagaaagtgaatctgttagacaatggctacctgagttggcaagaatgccaactgagtgtatccatcatccttgggatgcaccgattactgcac

SEQ ID NO: 263862 - DNA, 446 bp, Glycine max
aaaaaataacagaaaaaaaagaaaaagataattctgatttacttgttcctgaaaacattttatccgctagacgtcgtagagaattgagaattctaatttgtttaaatccaaataatataaatagtatgcatagaaacacaatattttataatccaaataaagtccaaaatggttttccacttttgactaaaaaaagaaaatattttgagaaagataaaaaaaaactaatgaatttcaaaatttttctttggccaaaatatcgattagaagatttagcttgtataaatcgatattggtttaatacccataatggaagccgtttcagtatagtaaggatacatatgtatccgcgaatgaaaattcgttaatccaaatttgtcttctatttaccatatttatatggtaaatagaagacacattaatatctatatctatctatatagata

SEQ ID NO: 263863 - DNA, 443 bp, Glycine max
cccacgcgtccgagaaggcctgggcttagttgataagcataactgggtgaggaagaaagagggagagtgaagaagatggcgtcgagcggagcggtaccgttttggagggcggcggggatgacgtacataacatactcaaacatatgcgcgaatctgctcaggaattgcctcaaggaaccctacaaggccgaatccctctctcgtgagaagctccattttgttctctccaaatgggtcgacgccaagcctgaaaaacctactattcgttcagacaccccagagcagtgatctggaatagttggaagctataaatgcataaatctttgagatctggaagttcattgtcattttgaacctttctgtgatgtttaattcctttgtttttttctctccatgaaatggaacatgcactggattttgatttgcacggttaatcttgtaat

SEQ ID NO: 263864 - DNA, 444 bp, Glycine max
cccacgcgtccgattgaatatccatggttctcttagttcttttatccattaaaaaactctagattaatatttctaagaagaactatagtagttgaaagatatcttttgcaaatatgcatatttaactgaggttgttataacttgttccttccctcaaaaaaaaaaaaaaaagaaagaaaaagaacctattagcctccttcattggatatattacatctataaggagtaaattctaccggttcagagaatagaaaaataatcaaaataaaagtcagcagtctcacatctctaattttggtgacagattcaaggggttaaatttgatccagaaggtgaatatgtgagacaatggctacctgagttggcaagaatgccaactgagtggatccatcatccttgggatgcaccgcttactgttcttagagcagcaggagttgagctggg

SEQ ID NO: 263865 - DNA, 444 bp, Glycine max
gttgccgggctctaccgtggtttcaacatctcatgtgttggaatcatcgtgtatcgtggtctgtactttggattgtatgattctgttaaaccagttgtcctcacagggtcattgcaggatagcttttttgccagctttgcccttggatggctcatcaccaatggtgcaggtcttgcatcatacccaatagacactgttagaagaagaatgatgatgacctctggtgaagctgtcaagtacaagagctccttggatgcattcacacagatcctcaagaatgagggtgccaagtccttgttcaagggtgccggtgccaacatcctccgtgccgttgccggtgctggtgtgcttgctggttatgacaagttgcaggttcttgtgttcggcaagaagtacggctctggtggggcttaagttctaatgctgagtcagtactattatttg

SEQ ID NO: 263866 - DNA, 444 bp, Glycine max
  unsure (1)..(444): unsure at all n locations
cgactatcaaaaaaatcagaaaaggttacgagatttatattaactgcattcagtataagttgaagacacataagggctctaaccatattccggctcgtgatcaacccatatatacctatagaaaataaataggcactcaaaacaagtgcatgctcgaatatcattgaccaactccttatcaatttttattcatttcgatatgaacaagaagaattcaacggatttgattgactaatattataagtctacaacaaaataaagtattcgcaataaaaaaaagattttaatacagaanatattcgttttcattcacatagaattcaaccaaaataaatgtgataaaatctaaaaaaaaaaaaaaattgaattttggttttggtttatattattagttctaaaaatttcttattggcgagctacgacaatngcacctatcaaagcaac

SEQ ID NO: 263867 - DNA, 237 bp, Glycine max
caaaaaaatcaccaaatactactttatttatacttactgcatacattaaaaattggaaggctcatattgactctaaccacccatcaattcaatatcaacccatacctacttcaaaaaaaaaaaaaatcaactcaaaacaaatacatactcaaatatcatccactatctactaatcaatcttacttcatctccatatcaacatcataatcttacataatctcacctactaataatata

SEQ ID NO: 263868 - DNA, 450 bp, Glycine max
cgaccgacgcgtgcgcgactatcggaaaaatcagaaaaggttacgagatttatattaactgcattcagtataagttgaggcacataatggctctaaccatattccggctcgtgatcaacccatatatacctatagaaaataaataggcactcaaaacaagtgcatgctcgaatatcattgaccaactccttatcaatttttattcatttcgatatgaacaagaagaattcaacggatttgattgactaatattataagtctacaacaaaataaagtattcgcaataaaaaaaagattttatacagaaatattcgttttcattcacatagaattcaaccaaaataaatgtgataaaatctaagaaaaaaaaaaaattgaattttggttttggtttatattattagttctaaaaatttcttaatggcgagctacgacaattgcacctatcaa

SEQ ID NO: 263869 - DNA, 443 bp, Glycine max
ctgaaatcaatcatgctattggagctgaaggagttttaagtgtagaatgtaaggaagttgtttctgaatatggagaattgttatgggatctcttggtatctggggtaagttctctttgcccaaccttgaagttttctcttcacctcaatttgcagtctttgctctttcccttcatgtgttttcacccccccacccttaaatgagtttgatcttgatttgcaggtacgacccgatgatgtatgctcacaggttggcttatgtttcaaaaggactaaatcagagaggttaggatttgttcttttaaaatcgtaattagcatttttatatttcaatatttttgtatcccctttttatcatatttgattcagtacacttcaattgagtaatgatttgaagatgttggatgaatgcttaataattctggctgtgagcttaaagtcaag

SEQ ID NO: 263870 - DNA, 114 bp, Glycine max; identical to SEQ ID NO: 262864

SEQ ID NO: 263871 - DNA, 349 bp, Glycine max
cccacgcttacacaaagaaaaaaaatccttttacttcttttctctttcataatttaaatctttattaaaaaagcaaaatttaaaaatgatttacccatcaattcaattaaaatcctatccttcttcaaaaaaaaaaaaaaaaaataaaataaaaaaaaaaaaaaaaattacaatcattataaataatccaaacttacaaacacttacattcaacataatacctattatataaatacacctaaaatcaattcactatcacactatttacaactactatacttataaaaccctttcattacccaactaaatctcctaccaacacatcccctattatacatctaactaaata

SEQ ID NO: 263872 - DNA, 446 bp, Glycine max
  unsure (1)..(446): unsure at all n locations
caccgtcacttttccttaacggcgaagctatcgccgaagggcacaaccgtcattcccactcgaaaccgtttcttctatcctccactctccccatcccaataacaaagagaggaatcgaagtctgttccgttctgatcagaaagggaataacggtaacggagatatggggcttctgtctaacagagtaactagagagagcctgaaaccaggggatcacatctactcttggaggactgcttacatatacgctcatcacggcatttatgtcggcgatgacaaagtcattcacttcactagacatgggcaagaagtaggaaccggtactgcactagatcttctcctcatcagttcaggaccagccaagcctcgagaaagttgcccaacttgtacagcaccccaagaggaacacggngttatctcctcatgcatgaactgcttcctagctg

SEQ ID NO: 263873 - DNA, 474 bp, Glycine max
aattcccgggccgaccgacgcgtccgcaccgtcacttttccttaacggcgaagcttttgccgaagggcacaaccgtcattccgactgcaaaccgtttcttctatcctccactctccccatcccaataacaaagagaggaatcgaagtctgttccgttctgatcagaaagggaataacggtaacggagatatggggcttctgtctaacagagtaactagagagagcctgaaaccaggggatcacatctactcttggaggactgcttacatatacgctcatcacggcatttatgtcggcgatgacaaagtcattcacttcactagacatgggcaagaagtaggaaccggtactgcactagatcttctcctcatcagttcaggaccagccaagcctcgagaaagttgcccaacttgtacagcaccccaagaggaacacggtgttatctcctcatgcatgaactgcttcctagctggt

SEQ ID NO: 263874 - DNA, 431 bp, Glycine max
ccgcctaatacggattctttcgacggactgaacaaggatcacttggacgcctttttttaattgcctgcacgcccctcatatcgtaacgcgaaaacatgcaatatgctgcactttgttaggaacctcatacaaaacgtatcctgttttgcaccctattaaaagcgtataactgaataactgaatgatgctaatgataatatgtcacttaaagttgcaaatataaagcacttatcacacaaacgcacaaagaataagcctgaggaaatttccaatgttctcatgaatattacggctggtggtgctagatacaacaataaatatgacttatttactagttctcatattcactatattgacctgtgtattgattaactaactttcatattaatctttttttcaatcatattacttcaatatttttttttacaaat

SEQ ID NO: 263875 - DNA, 395 bp, Glycine max
cccaaacgtccggccacgcgtccgcccactcgaccaaattaattgggtactgcttcttccatatataccgggtgttttatataggcatcacggccctcttcagcactctaggccaaccctcatataccagcgaatgtacaatttggccgaaactacttgcccacatggtcatttgatcacatcaaatacttcaatggatgttctgacattcaccttcatcacgacaaatacactggtactttcttccagtccaaatggtcatacttgcatagtcacttcatcatgtacataaatatttttcctgaagactcacatggcacagttactgttatctatctatcttcctaaaatgctcaacacgactagatatactttgaattcatggtgaacaataa

SEQ ID NO: 263876 - DNA, 475 bp, Glycine max
aatacccgggtcgaccgacgcgtccgcggacgcgtgggtctctctctttctctttttctctcatccagatcttgaaaaaaaaagaagacacaatggcagcgagcgctcccactccacgcgaagagttcgtgtacatggcgaagctggcggagcaggccgagcgctacgaggagatggtggagttcatggagaaggtctccgcctccgccgagagcgaggagctgaccgtggaggagcgcaacctcctctccgtcgcctacaagaacgtaatcggcgctcgccgcgcctcctggcgcatcatctcctccattgagcagaaggaggagagccgcggcaacgaggaccacgtcgccgtcatccgtgactaccgctccaagatcgaagccgagctctccaacatctgcgacggaatcctcaagctcctcgacacgcgcctcgtcccctccgccgtctccggcgactccaaggtcttcta

SEQ ID NO: 263877 - DNA, 151 bp, Glycine max
ataaagatggttcctggagattcagctggcacagtcactgctttctatttatcttcccaaaatgcggaacactacgagatagactttgagttcttggggaacagaacaggacaaccttacattttgcaaacaaatgttttcacaggaagca

SEQ ID NO: 263878 - DNA, 413 bp, Glycine max
caaagacatccttctcctggatgtggctcttctcactctcggaattgaaactgttggtggagtcatgacaaagttgattcccagaaacactgttatcccaaccaagaaatctcaggtgttcaccacctatcaggaccagcagactacagtctccattcaggttttcgaaggcgagaggagtctcacaaaggattgccgccttcttgggaaatttgatctgtctggaattcctccagccccaaggggtacgcctcaaattgaagtgaccttcgaagttgatgccaacggcattctaaatgtgaaggcagaagacaagggcactggtaaatcagaaaagatcaccattacaaacgaaaagggacgtcttagccaggaagaaattgagagaatggttcgcgaagcagaggagtttg

SEQ ID NO: 263879 - DNA, 432 bp, Glycine max
gcgttcgcccatgcgtcttttctatttcgcttactggctatagaccacaatacactcaccccgggcaaagaatttcttttcaaaattgtgatatggacggaagagcgagcagcagcgtgggcggagaagcatcgccagctccagcaccggtgccgataacgaatgcgaacgcgccgtcgtctttcttgagcaagacatacgagatggtagaggacccttcgacggactcgatagtgtcgtggagtccaacgaacaacagtttcgtggtttggaaccctcccgagttcgccagagatctcttgcccaaacacttcaagcacaacaacttcttcagctttcgtcgccaattaaacacctactgatttaggaaggtagatccagatcgctgggaaattgcaaatgagggatttttgaggggtcaaaaacacttgc

SEQ ID NO: 263880 - DNA, 249 bp, Glycine max
tgctagtctgagaatggattggcacaaggtcggtgctaatgaatggcttggttttcgcttggactatatgggagtgattttcctttgctttgccactatttttatgatctttctgccaagtgctattattaagccagaatatgttggtttgtctttgtcctatggcctggctctcagtagtctcttggcatttaccataagcatgacttgttctgttgagaacaaaatggtttcaattgagagaattaa

SEQ ID NO: 263881 - DNA, 375 bp, Glycine max
cttcgatgaagtgtgctgaggggcaaggaactggtatgaaggtctctataagacatcttggcccgtccatgattcagcagatgcagcatgcttgcaatgaatgcaagggtactggagaaaccatcaacgacagagatcgctgcccacagtgcaagggagaaaaggttgtgcaggagaaaaaagtccttgaagttattgtggaaaagggaatgcataacgggcagaagattacattccctggcgaaactgatgaagcgccagacacaattactggggatattggctttgtccttcagcataagtgaacaatccaaattcaaaagaaaggctgaagatctttttgtagagcacattttgtcccttactgaaacccta

SEQ ID NO: 263882 - DNA, 188 bp, Glycine max
ctgagaactctacatatgaagcatgatcgagtgctaggacaactggaactgtcaactcgagagcatcacctacactttcaaggatggcaaaacatttcaacttgagcatgtgtttattcgaagcatcaaattcatgtttatagtcataccttacattcttaagaatgctcctatgtttaaacaattgt

SEQ ID NO: 263883 - DNA, 274 bp, Glycine max
  unsure (1)..(274): unsure at all n locations
ggccaaactccattgtttcctcgtatatttggtcatgaagctggagggattgtggagagcgtgggtgagggtgtgactcatctcaaaccaggggaccatgccctcccagtgtttaccggngagtgtggagaatgccctcattgcaagtcagaggagagcaacatgtgtgatcttctcaggatcaacactgataagggtgtcatgatccatgacaggcaaaccaagatttctattaaaggaccacctatttaacattttggtggtaccttcacat

SEQ ID NO: 263884 - DNA, 341 bp, Glycine max
cgttcgggcttgttttgattgctttatgaataccgattgattcctcacaccagaattctgggaggagagtcgcttctccaaatctccattgcaagagtacacagatctactggcaaaaccaacaggaaagactctaatcttggaggaggaaagggtggatgcttgatttgctagttttgctttatggatgttttaagaactttattactttacatactttgttggttctgtgctttacttttggttttgatagacggtatgtctctgtatgcattttgatttgttccaagttttaattgactgcaaaaaaaaaaaataaaatttattattaaattaatttt

SEQ ID NO: 263885 - DNA, 348 bp, Glycine max
  unsure (1)..(348): unsure at all n locations
ggattttgatgctggtnattttgatcattcagttatgctatcagagcccattgcaactctgcgggtgctagactatgaatgtcaagtttcggatcccttgaaaggattatatggagctggagctcatactgactatggtttaattacactgttagcaacagatgatgtctcgggtcttcaaatatgcaaagatagggatgctaaacctcagaaatgggaggatgtagcaccattgaatggagcattcatagtgaatcttggtgacatgctggaacccttgagcatctgcgtttttaagtccacacttgacatagttctatgaaacggtcaaagaagatattctaattg

SEQ ID NO: 263886 - DNA, 404 bp, Glycine max
  unsure (1)..(404): unsure at all n locations
tgctgttcttttacgtgttgaggttagcatttctgacaacttgagaccaactcagactgaggcaacatatgtcggggatgctgttttagatggaagtgatgccattcttctgggtgctgagactttacgtgggttgtaccctattgagactatatctactgttggcagaatttgttcagaggctgagaaagttttcaatcaagacctttattttaaaaggacagtcaaatatgttggagaacccatgactcacttggaatctattgcatnctttgcggtacgagctgcaattaatgttgaaagcatctattataatttggtttacttcatctggaatgggctgaaagattgattgcaaagtttaggccaacaatgccagtactatctgttggaacccccgactt

SEQ ID NO: 263887 - DNA, 152 bp, Glycine max
ttttctaatctgaggcagaattatgtcctggagttgatggttgggccatctctctgaaagcaatgatgagcatagttgtgggtatggggtttgcaatctggattttttactttttttttaacattttttttttttttcctacttttatcatg

SEQ ID NO: 263888 - DNA, 202 bp, Glycine max
caacaattgaagcaacatgttaaattataaagggggcttgaccatatttggtgaaccatccaaccgtccaaagcaagaatcgtgatgagatatcaaaagtgctaaaaggggagccagtttcataatctaacctacacgagctaccatccttacaagccacatttaaagagacactgagactttacacttcaatttctttttt

SEQ ID NO: 263889 - DNA, 202 bp, Glycine max
cccacgcgtccgtccacgcgtccggtgattgaagctagttagaacaagatgttgcagctactctgcactgcgattttctccgaaatgcttttgattctcacgctcgtcttcaaaaccccactgagaaaactcgtcatcgtttccctcgatagtgtgaagcgcggtcgcggtcccgtggtggtttccaccgtgggcgccacat

SEQ ID NO: 263890 - DNA, 408 bp, Glycine max
ccacgcgtccgaaattcacccgctaccttttcccgtgtacgatcgaatccaatccaccaaatcggcggcgacgcctccgctctgtctcgaaaccacagatctgcggcggaaccgccgtctccgactatctccgattgatcttccggtaaagtggaccggagatgccggttgccgcttccgccatttacttcctcaacctccgcggcgacgttctcatcaaccgcctctatcgcgacgatgtcgggggaaatatggtggatgcttttaggacgcatattatgcaaacgaaggagcttggtacttgcccagtgaggcagattggtggatgctctttcttttacatgaggatcagtaatgtctacattgtcattgttgtcagcaacaacgccaatgtcgcttgcgctttca

SEQ ID NO: 263891 - DNA, 398 bp, Glycine max
cccacgcgtccgaaatgcacccgctaccttttcccgtgtacgttctaatccaatccaccaaatcggcggcgacgccggcgctctgtctcgaaacgacagatctgcggcggatatgtcgtgtccgactttctccgattgatcttccggtaaagtggaccggagatgccggttgccgcttccgccatttacttcctcaacctccgcggcgacgttctcatcaaccgcctctatcgcgacgatgtcgggggaaatatggtggatgcttttaggacgcatattatgcaaacgaaggagcttggtacttgcccagtgaggcagattggtggatgctctttcttttacatgaggatcagtaatgtctacattgtcattgttgtcagcaacaacgccaatgtcgc

SEQ ID NO: 263892 - DNA, 426 bp, Glycine max
  unsure (1)..(426): unsure at all n locations
cccacgcgtccgcacctttgttcactcttcttctcttgcggcttgggttttagcgcagcttcttctagatttaaggaagatgggtaaggaaaaggttcacatcagtattgttgtcattggccatgtcgactctgggaaatccactaccactggtcacctgatttacaagcttggaggcattgacaagcgtgttattgagaggtttgagaaggaagctgctgagatgaacaagaggtctttcaagtatgcctgggtgctggacaaacttaaggctgagcgtgaaagaggaatcaccattgatattgctttgtggaagtttgaaacaacaaagtattattgcacagttattgatgcgcctggacatagggatttcattaagaatatgattactgggacatnccaagctgactgtgcttgtcttatcat

SEQ ID NO: 263893 - DNA, 410 bp, Glycine max
cccacgcgtccgcttctctctctctctttcttctttacttgcttgaagcaatggccaaggcgttggcatcagtgctgctgtttctcctcgtagctgctagtaatgtgtttgctgtacagcttgaacttgagactcttccaccctcttaccctcaccctcaccctgttcactcccccacaccagcacctcttcacccaccagcaaatgctcctcacccacaccaccaccaccaccaccaccaccctccagcaccagcacctgttccttcaccttctcaccacaattaccctcctacccctgcccctgctaagccttctactcaccaccatcaccatcaccctcctgctcctgttaatccacctcctgttcccgttcattctccagttaaacctcctgttccggttcaccct

SEQ ID NO: 263894 - DNA, 423 bp, Glycine max
cccacgcgtccggcgaaaacccccaacttcaacctctgttcatcgtctaccgcgctttcttgtcaaccagaactatgattaagctttttaaagtaatggaaaagcagagagaacttgcagaaaatgcaagtggcggaccacctgttaagaagcaaagtgctggagagttgcgtcttcacaaagatataagtgagctgaatctaccaaaatcatgtaccatgcaattccccaatggcaaagatgatctgatgaactttgaagtttcaattcgacctgatgatggatattacttaggtggcacatttttgttttcctttcaagtgtctcccatctatccacacgaagcaccaaaggttaagtgtaagacaaaagtctatcatccaaatattgacttggagggaatgtttgtctcaacatcttacg

SEQ ID NO: 263895 - DNA, 343 bp, Glycine max
ggctacttttgattgcttgatgaaaacttattgattcctgacaccagaattctggagggagactcgcttctccaaatctgcattccaagagtacacagatctactggcaaaaccaacaggaaagactctaatcttggaggaggaaagggtggatgcttgatttgctagttttgctttatggatgttttaggaactttattactttacatactttgttggttctgtgctttacttttggttttgatagacggtatgtctctgtatgcattttgattgtttccaagttttaattgactgcaaaaaataaaaataataatattttattttattattataatatttt

SEQ ID NO: 263896 - DNA, 443 bp, Glycine max
gaaaaacaagagcaaattgggatcgattaatttgaagaacaccacaagcaagatgcatgttgttgtggtgctcaacacgcaatcctactgcagaggcctagaacctccttcatcttctccttccgtcgtttccaacaagggaacaaggactttgagtttcaggaggctgctgctgcgtccttctcttgggattcatttatcgcgtagctttgctttaaagtgtgttgttactccgaacccagctgtggaattgccattaactgctgaaaatgtagaaagtgtattggatgaaattcgaccctatctcattgcagacggtgggaatgtggctttacatcaaattgatggcaatgttgtgcgcttgaagctacaaggcgcatgttgttcctgtccaagttctgttaccaccatgaaaatgggcattgaacgtcggttaatggaaa

SEQ ID NO: 263897 - DNA, 450 bp, Glycine max
  unsure (1)..(450): unsure at all n locations
cggtcttgaattcccgggngttcccggggaaaacccacgcgtcgatgaagagcatgaacttatattccacatttccttagcctggtaacttatcagtgctttcttctctcaacagtgtcaattcaccaagaaaaatggtcacaaggggtggattttgaacaatctgaatgagtctcatcttgactactactatgcattttttgcaatattaaacttcctaacctatcttcttcgcgtatgttactaggtactatgtatatagggttgaagtttcagattccatagacaagcttgcaaaagaactgaaggaaaagaccgtgtccaacgttgtgaatccaaaagactagttgattggggtatctaaggggagaaagaggattaagaccgtgaaaagtttcaaaactactttatgtacaaatttggatggccaaagaactagatatgtgtgtg

SEQ ID NO: 263898 - DNA, 374 bp, Glycine max
  unsure (1)..(374): unsure at all n locations
ataatgatgatattgaggttgaggttgttgttggtgttgatctttggttgaagattcaagaggaggcaaggttagatgttgatcaagaaccaatttttgtccagctactattatagttccattttgtctcacaaatctttggagagtgccttggccaaccacctctccacaaatttgagcagcttgagccttccaagcagcaccctttttgaccttttcatgggtgttttggttgatgatggagatgatgacatcgtaagtgctgtgaaggatgatttgatagctgttaaggagagggaccctgcttgcataagttatgtgcattgcttgctgaatntcaagggttttttggcatgtcaagctcataagattgc

SEQ ID NO: 263899 - DNA, 390 bp, Glycine max
ggagattctgatttgttctctcagatctgatcttaccgtcgccggaatccaactcaacctgggtcggattcttgggtatcatcgcatggccattcgttttagcctctcaattagagattttagttcgcttcaaattcgaggtttgatttgaagttgaaagttggaatagcttaactgttgtgtaaaacaaccaacacacacgagcatgggaagccaagacaacaacgtagaattgtcatccaattcatctctagcttacaaatctgctaaagtgttatgtgctggtcaccggcgtcttgttggctcggacaattgtcgcaagctcacccaacttgggttcactaatctagtcttgcgcatccatgccgagcttgatctcactcgacaatc

SEQ ID NO: 263900 - DNA, 198 bp, Glycine max
ggcggccctgtggcggacgcgccggctttttttgaggagaagacggagttcgacgtggtgatctatgagagaccgagcaacgctcgaatcgcggtgattaaggcgggaaggccttgaccaaacttacccttaaagaagccaaagaatttatccaaaggtttcccaaaaaattcaaagaaaggatattaaaagaccaaa

SEQ ID NO: 263901 - DNA, 439 bp, Glycine max
cccacgcgtccgcccacgcgtccgccctcgcgtccgcccacgcgtccgtctccctctggcgcgtcactagctctgtgcattcttctctcgctctctgccttccatcacactcggcatttcctttcccaagatagtagaagatggcagacactgaggatattcaacctcttgtttgtgacaatggaacaggaatggttaaggctggatttgctggagatgatgccccacgtgctgtgtttcccagcattgtaggtcgtcctcgtcacactggtgtgatggttggcatgggccaaaaagatgcatatgttggtgatgaggcacaatctaagaggggtattttgactctcaagtaccccattgaacatggaattgtgagcaattgggatgatatggaaaagatttggcatcataccttctataatgagcttcgtgttgcccc

SEQ ID NO: 263902 - DNA, 427 bp, Glycine max
gtcagaacaatttattgcacaaatattttctatgaagcttactcaagccgatgtcaaacggtctttgaatctatttgtggagaggttcaacggtttaggcttcttggagattaccatcattcaactcgaattgcttttgttgagttcacagtggctgagagtgcaattgcagctctaagctgtagtggggtgattctgggttcactgcccataagggtaagtccatcgaagacaccagttcgatcacgtgctcctcgccctactatgcactgaatcaactttccatgtttctggggttgattgctgctgagatatatttacatatatatatatacatagaaacagctgtgttctaaggaacatgtggcatttagttggtacttttgtcctcatgtcttacagtatggttactttgctttcccttggg

SEQ ID NO: 263903 - DNA, 423 bp, Glycine max
  unsure (1)..(423): unsure at all n locations
gcggcgctgggcggacgcgccggcggttttgaggagaagacggagttcgacgtgggggtcgagtggtgccgagcaacgctcgaatcgcggtgattaaggcggtgagggtattgacgaacctagcgctgaaggaggcgaaggagttgatcgaagggttgccgaagaagttcaaggaagggatttcaaaggacgaagctgaagatgcgaagaagcaactcgaagaagctggtgccaaggttaccattgcttaaacactgtttagctgcagcatatatgttctgcttcttcttttgttggttgtagttgagttcaccagtacactgtaatttcatttccattttgtctggatttcaatcttttatttgtaatgaggaaatatgagttcttatttttatattattttttttaatgcgtatgangtgt

SEQ ID NO: 263904 - DNA, 401 bp, Glycine max
cacagacatccgttttctggatgtgttttttctcactctcaggattgaaactgtagggggggtcatgacaaagtcgctgcgcactaacactgctattctaaccaagagatgtcaggtgttacaccacctatcatgaccagcagactacattctcgattcatgctctcgaaggctagaggagtactacataggatcgaccacttcatggaatatgggatctgtctggaatcccgttaacaagcacgtgatccctaaatatgagacctgacacacataagtttgcaccctcaagagttctaaacgtaaaccgcagattacatgggcaactggtaaatcacagaagatcacgctttcaaacgaataggaacgtctcagccaatatgaaacagatagaatggatc

SEQ ID NO: 263905 - DNA, 273 bp, Glycine max
tgtcctcacacgggcattgctagataacctttctgccaactttgtcctttgatggcgcatcaccaatggtgcacgtcttgcatcatacccaatatacactgttttaagaagaatgattatgacctctggtgaagccgtcaagtacaagagctccttggatgcatttacacatatcctcaagaatgagggtgccaaaacccttttcaaaggtgccggtgccaaaatttttcttgccgttctcatgcttttgttctttctggttattaacaaatt

SEQ ID NO: 263906 - DNA, 333 bp, Glycine max
acccacgcgtccgcggacgcgtgggtctctctctttctctttctctctcatccagatcttgaaaaaaaaaaaaaagacaatggcagcgagcgctcccactccacgcgaatagttcgtgtacatggcgaagctggcggagcaggccgagcgctacgaggagatggtggagttcatggagaaggtctccgcctccgccgagagcgaggagctgaccgtggaggagcgcaacctcctctccgtcgcctacaagaacgtaatcggcgctcgccgcgcctactggcgcatcatctcctccattgagcagaaagaggagagccgcggcaacgaggacca

SEQ ID NO: 263907 - DNA, 423 bp, Glycine max
ctaaacaactcttctctttttccttcgctcgttgttctccctcgcgtagatcgacagggcggagacagagacgtttgctttccaggctgagatcatccagctcctcagtttcatcatcaacaccttctactccaacaaggagattttccttcgtgaactcatcagcaacgcctccgatgctttggacaagattcgatttgagagtttgacagataagagcaagctcgatgctcagccagagttgttcattcatattattccagacaagactaacaatacactgaccattgttgacagtggtattggcatgaccaaagctgatttggtgaacaacttgggtacaattgctagatctggtaccaaggaattcatggaaagcctggctgctggtgctgatgttagtatgattggacaagttggtgt

SEQ ID NO: 263908 - DNA, 447 bp, Glycine max
cccaggcgtccgcccacgcgtccggtgatttaagctagttagaacaagatgttgcagggagtctacactgcgattttctccgaaatgcttttgattctcacgctcgtcttcaaaaccccactgagaaaactcgtcatcgtttccctcgatagtgtgaagcgcggtcgcggtcccgtggtggtttccaccgtgggcgccacattgatggtggttctcgcttcgagcctctacagcatggccaagatccagcaacgcaccctcgaggccggcatagtcaaccccaccgaccaagtcctcatgtccaagcacatgctcgaagcttctctcatggggtttctgctgttcctctctctgatgattgatagattgcaccattacataagagagcttcggtcactcaggaagaccatggaagctattaagaaacaaagccgaagttttgaagat

SEQ ID NO: 263909 - DNA, 248 bp, Glycine max
tccaacatcgagattttccttcttgaactcatcatcaactcctccgatgctttggacaagattccatttgagagtttgacagataagagcaagctctatgctcagccacagttgttcattcatattattccagacaagactaacaatacactgaccattgttgacagtggtattggcatgaccaaagcttatttggtgaacaacttgggtacaattgctagatcttgtaccaaggaattcatggaaac

SEQ ID NO: 263910 - DNA, 422 bp, Glycine max
cccacgcgtccgcccacgcgtccgcccactcgtccgcccacgcgtccgtctccctctttcggtcactagctctgtgcattcttctctcgctctctgccttccatcacactcgatatttcctttcccaagatagtagaagatggcagacactgaggatattcaacctcttgtttgtgacaatggaacaggaatggttaaggctggatttgctggagatgatgccccacgtgctgtgtttcccagcattgtaggtcgtcctcgtcacactggtgtgatggttggcatgggccaaaaagatgcatatgttggtgatgaggcacaatctaagaggggtattttgactctcaagtaccccattgaacatggaattgtgagcaattgtgatgatattggaaagatttggcatcataccttctataatg

SEQ ID NO: 263911 - DNA, 377 bp, Glycine max
acgcgtccggatagctactattgaagaagcaaaacgattttacccactgttcggactcggggccaatggggcccttattttctctggccggacagtcaaatgcttttctaatctgaggcataatttaggtcctggagttgatggttgggccatctctctgaaagcaatgatgagcatagttgtgggtatggggtttgcaatctgtttcctgtactggtgggtgaacaattatgttcctcttcctactcgtagcaagaagaagaaggagaagcccaaaatgggaacaatggagagcttgaagttcttggtgtcttcaaagtacatcagagatcttgccactttagtggttgcttatggaatcagcatcaatcttgttg

SEQ ID NO: 263912 - DNA, 445 bp, Glycine max
atggctcccaaaccgcctagtacgggtctgtttgttggactgaacaagggtcacgtcgtcgccaagaaggaattgcctccacgcccctcagatcgtaaggggaaaacaagcaagagggtgcactttgtgaggaacctcataagagaggtagccggttttgcaccctatgaaaagcgtataactgagttgctgaaggttgggaaggataagagggcactgaaggttgcaaagagaaagctcggaacacacaaacgcgcaaagaagaagcgtgaggaaatgtccagtgttctcaggaagatgagggctggtggtgctggagacaagaagaaataagtcttatttactgttttccagattcactagatggacctgtgtattgatggacgagctttcatatttttgctttggttcaattagtttacttcaagattttgtttgagaaata

SEQ ID NO: 263913 - DNA, 446 bp, Glycine max
cgcgtccgatgggtcccaaaccgcctagtacgggtctgtttgttggactgaacaagggtcacgtggtggccagattgaattgcctgcacgcccctcagatcgtaaggggaaaacaagcacgagggtgcactttgtgaggaacctcataagagaggtagccggttttgcaccctatgaaaagcgtataactgagttgctgaaggttgggaaggataagatggcactgaaggttgcaaagagaaagctcggaacacacaaacgcgcaaagaagaagcgtgaggaaatgtccagtgttctcaggaagatgacggctggtgatgctggagacaagatgaaataaatcttatttactgttttccagattcactagatggacctgtgtattgatggactagctttcatatttttgctttggttcaattactttactataagaatttgcttga

SEQ ID NO: 263914 - DNA, 153 bp, Glycine max
  unsure (1)..(153): unsure at all n locations
cccacgcgtccggaaaaaaaaaaaagccttttactttttttcttttgcatgatttgaatcttgattgngaaaagcttcgaattggggtgttttacccatcaattcaattttaagttgtgctttgttcaataaacaaagaaaataggtgaaaaa

SEQ ID NO: 263915 - DNA, 353 bp, Glycine max
  unsure (1)..(353): unsure at all n locations
cggtcttgaattcccgggggnttcccggnnaacccacgcgtcgattcgatgcgcaagaagaaaacccttctaccgttcaagagcaaatcttggagaccctactggtagaccatcactctcgaagcagagtcagatccataacatgtaaggccaaaattcagacaggaaggatcccaccagatcagcacggctcattttgtggcaagcagcttgaggatggacgtacccttgctgattatacatccaaaaggagtcactctccactggtcttcgtctcgggtgggatgcaaatctttgtaagaccttgcggnaaagacaatacccttgagtcgagagctcgacacattgcaacg

SEQ ID NO: 263916 - DNA, 436 bp, Glycine max
ttcgacccacgcgttcgctgttattattatggcagtcacacattttaattaatgaatatcgtgagcgtataatgttgccttctgcatcaaagaagcaggggcgacctattaccacttgtataaaggttttagacatgactggtctgaagttatcagccctgaatcagattaagttgctaactattatatcatccattgatgatctgaactaccctgagaagacaaatacttattacattgtaaatgctccatacatattatctgcttgttggaaggttgcgaagccacttttacaagagaggacaagaagaaaaatacaggtgttaccaggttgtggacgagatgagctattgactatcatggattactcgtctctaccacatttctgtcgaagagaaggctctggatcattcagacattctgagagtggtagtga

SEQ ID NO: 263917 - DNA, 434 bp, Glycine max
cccacgcgtccgcgagcttcagcaatggtgtacgtcaaggctcagaaatcaaaagcctacttcaagagatatcaagtcaagttcaagagaagaagagagggaaaaaccgattaccgtgccaggattcggttgattaatcaggacatgaacaaatataacactccgaaataccgatttgtggttcgctttagcaacaaggacattgttgcacaaataatatctgctagcattgccggcgatttagttcttgctacagcatattcacatgagctgccacgatatggtcttgaagtaggacttacaaattatgcagcagcttattgcactggtctactgttggcccgaagagtcctcaaaacacttgaaatggatgaggagtatgaaggaaatgttgaggctactggagaggattattcagtggaacctgccgagag

SEQ ID NO: 263918 - DNA, 442 bp, Glycine max
cccacgcgtccgcccacgcgtccgaaaaaaatgggttcttcttcttccatatggaccgtgtgtttgattttggcatcactggcctctgcagcactctgtgccaaccctcgtagaccagtggatgtacaatttggccgaaactacgtgcccacatgggcctttgatcacatcaaatacttcaatggaggttctgacattcagcttcatcttgacaagtacactggtactggcttccagtccaaagggtcatacttgtttggtcacttcagcatgtacataaagatggttcctggagattcagctggcacagtcactgctttctatttatcttcccaaaatgcggagcacgacgagatagactttgagttcttggggaacagaacaggacaaccttacattttgcaaacaaatgttttcacaggaagcaagggtgacagagagc

SEQ ID NO: 263919 - DNA, 430 bp, Glycine max
gacccacgcgtccgcgcgtcgctgctccgtaccagtttcactgcttaaatttgagagaaaactctgcaaacatgttgggttatcaggacctccttacaggtgatgagcttctctatgactccttccgttacaatgaaattgagaatggaatgctgtgggaagttgaggggaagtgggttgttaagggagcagttgatgttgacattggtgcaaacccttctgctgagggtggagaagatgagggagtcgatgacgcagctgttaaggttgttgacattgttgatacattcagacttcaggagcaacccgcttttgataagaaacagtttgttaccttcatgaagaggtttatcaagaatttgactcccaagctcgatgcagagaaacaagagttgtttaagaagcacattgaaggagcaactaaatacct

SEQ ID NO: 263920 - DNA, 405 bp, Glycine max
aacccacgcgtccgcgcgtcactgctacgtaccagattcactgcttatattagcgagacaactctgcctacatggtggtgtatcaggacctgcttacaggtgatgagcttgtgtcggactccttccgttacaatgaaatggagaatggaatgctgaggcaagttgaggggaagtgggttgttaagggagcaggtgctgttgacattggcgcagacccttatgctgagggtggagaagatgaaggagtcgatgacgcagctgataaagctgttgacattgttgatacattcagactttacgagctacccgattttgataagaaacagtttgataccttcatgaacaggattatcaagaatatgactaccaagctcgatgcacagaatccagagttgtttaagaagc

SEQ ID NO: 263921 - DNA, 406 bp, Glycine max
gtcatatgctccaagtgcactggtaagggttctaagtctggtgcttcgatgaagtgtgctggttgtcaaggaactggtatgaaggtttctataagacatcttggcccgtccatgattcagcagatgcagcatgcttgcaatgaatgcaagggtactggagaaaccatcaacgacagagatcgctgcccacagtgcaagggagaaaaggttgtgcaggagaaaaaagtccttgaagttattgtggaaaagggaatgcagaacgggcagaagattacattccctggcgaagctgatgaagcgccagacacaattactggcgatattgtctttgtccttcagcagaaagaacattccaaattcaaaagaaaggctgaagatctttttgtagagcacattttggtcctta

SEQ ID NO: 263922 - DNA, 392 bp, Glycine max
gaaccatgcagtctgtgaggtccatcttagcaagttttgtggttcttctattatcaatttcattcaccgcttcacttccaattgaagaagctttcaaccattgtctcacacaacactctcaaactccaaaccaattttcctcatcaatctacacttccaccaatggttccttcacttctatccttgagtccacagctcaaaatctaaggtacttgttgccctcagtgccaaaacctgatttcatattcaccccacttgatgactctcaagtccaagcagcagtgatttgtgcaaaaaagcttggaattcacatgagagtgcgcagtggaggacatgactatgaagggctctcttatgtttcccttattgagaagccattcatgatcctaaac

SEQ ID NO: 263923 - DNA, 433 bp, Glycine max
  unsure (1)..(433): unsure at all n locations
tgtaagttacatgatgtgaagttgcaaatgctttggagatcaccaacttcaaaatgcagctactgctacttgtgtggcacttgttcttcgcaatttaggatggagtatttctgataaatctattaggtatggtttagaggatacataccttcttggaaggagtcaatttctaacatctgaagaagctgaggtattaggacttactggatcaacagtactgcttgatggagcccacaccaaagaatctgccaaagctctgatgaataccataaggatggcatttcccaaggctcaattggtttttgttgttgcaatggcaagtgacaaagatcatgtgggatttgctcgagagattctctcangtgtacatgtggagactgtcgttttgacagaagctgctattgctggaggtgtaactcgaacaacaccagca

SEQ ID NO: 263924 - DNA, 453 bp, Glycine max
cccacgcgtccgcccacgcgtccggtgattgaagctagttagaacaagatgttgcagctactctacactgcgattttctccgaaatgcttttgattctcacgctcgtcttcaaaaccccactgagaaaactcgtcatcgtttccctcgatagtgtgaagcgcggtcgcggtcccgtggtggtttccaccgtgggcgccacattgatggtggttctcgcttcgagcctctacagcatggccaagatccagcaacgcaccctcgaggccggcatagtcaaccccaccgaccaagtcctcatgtccaagcacatgctcgaagcttctctcatggggtttctgctgttcctctctctgatgattgatagattgcaccattacataagagagcttcggtcactcaggaagaccatggaagctattaagaaacaaagccgaagtttgaagatggaaaaa

SEQ ID NO: 263925 - DNA, 418 bp, Glycine max
cttttctactttgagtcttcttgatccttctttttctccttgaactcaaacatggcagatgaggtggttctgctagatttctggccaagtccatttgggatgagggtcaggattgcacttgctgaaaagggtatcaaatatgagtacaaagaagaggacttgaggaacaagagtcctcttctcctccaaatgaacccggttcacaagaagattccggttctcatccacaatggcaaacccatttgtgaatccctcattgctgttcagtacattgaggaggtttggaatgacagaaatcccttgttgccttctgacccttaccagagagctcaggctagattctgggctgattatgttgataagaagatatatgatcttggaaggaagatttggacatcaaaaggagaagaaaaagaag

SEQ ID NO: 263926 - DNA, 454 bp, Glycine max
  unsure (1)..(454): unsure at all n locations
aagaatcaaagaaaggggtggtggctgcttcgaaagcttaataatttgtttatttccagagcatcatagttttcgcagcagcaaactaacaaattactcatatcatataataagatggcccgttctctctcgcaagccaaacgtattggtgtccttgttgctcaatctatctccctaattcccgttcatcggcgaggttacgcagtggcatccgatgtatcggtaagagttggattgggtaatattgggcgaaggaatggaatcgtgggaggtgtagaagagaagcctgatacaagagatggttcaaaagcctactcaactgattgggccccagacccagtaacaggttactataggcccattaaccacacccctgaaattgacccggtggagcttcggcataggttgctccgatcacctncactagagcctagaggagttgctggacacccat

SEQ ID NO: 263927 - DNA, 418 bp, Glycine max; identical to SEQ ID NO: 263925

SEQ ID NO: 263928 - DNA, 430 bp, Glycine max
cccacgcgtccggcgaaaacccccaactccaacctctgttcatcgtctaccgcgctttcttttcaaccagaactatgattaagctttttaaagtaaaggaaaagcagagagaacttgcagaaaatgcaagtggcggaccacctgttaagaagcaaagtgctggagagttgcgtcttcacaaagatataagtgagctgaatctaccaaaatcatgtaccatgcaattccccaatggcaaagatgatctgatgaactttgaagtttcaattcgacctgatgatggatattacttaggtggcacatttttgttttcctttcaagtgtctcccatctatccacacgaagcaccaaaggttaagtgtaagacaaaggtctatcatccaaatattgacttggaaggaaatgtttgtctcaacatcttacgagaaga

SEQ ID NO: 263929 - DNA, 450 bp, Glycine max
  unsure (1)..(450): unsure at all n locations
gttgccgggctctaccgtggtttcaacatctcatgtgttggaatcatcgtgtatcgtggtctgtactttggattgtatgattctgttaaaccagttgtcctcacagggtcattgcaggatagcttttttgccagctttgcccttggatggctcatcaccaatggtgcaggtcttgcatcatacccaatagacactgttagaagaagaatgatgatgacctctggtgaagctgtcaagtacaagagctccttggatgcattcacacagatcctcaagaatgagggtgccaagtccttgttcaagggtgccggtgccaacatcctccgtgccgttgccggtgctggtgtgcttgctggttatgacaagttgcaggttcttgtgttcggcaagaagtacggctctggtggggcttaagttctaatgctgagtcagtactattattntgtttta

SEQ ID NO: 263930 - DNA, 398 bp, Glycine max
aaaaaaggttcatagttgatatctccagcggaacgatgaagtttgaagatttggcagaaggatgcatggcaaaaatactgtcctacaccactcgtgcggatgtatgcaggctttctctggtttccaaagcctttcattccgcggctgaagccaacactgtgtgggattgctttctcccctctgatttgtcctctatcatctccccttcttcttccgttcctccctttcgctctattaaggatctctatctctatctctccgatcgtcccaccatcatcgatcaaggtataaagagttttcaattggagaagcggactgggaacaagtgttacatgctttccgctagagatctgagcattatatggggtgacactactcattattgggagtggacaacc

SEQ ID NO: 263931 - DNA, 429 bp, Glycine max
cccacgcgtccgcccacgcgtccgctccagagagaagaagaaacttaatcgatcatcacttcacttcactaatacatcatggcagacgagacccagaacaagtatgagagctctgaggttgaggtccaggatcgtggtgtttttgactttctcggtaagaaaaaggatgaagaagacaagcctcatcctcaggaggaggtcatcgccaccgagtttcaaaaagtcactgtctcagaccaaggagagaacaagcacagcctcttagaaaagcttcaccgatctgacagcagctctagctcttcaagtgaggaggaaggagaagatggagagaaaaggaagaagaagaagaaggaaaagaaagggctgaaagagaagatcgaggagaaaatagagggtgatcatcatcatcacaaggatgaggacacaagt

SEQ ID NO: 263932 - DNA, 414 bp, Glycine max
acgaacagatcaatgtggagtacaatgtttcgtacgtttatcatgcgatgtttgcctacttcgatagggacaatgttgcgctcaagggtcttgccaagtttttcaaggagtcaagcgaggaggaaagggagcatgctgagaaattgatggaatatcagaacaagcgaggtggaaaggtgaagttacaatctatagtgatgcctcttactgagtttgaccatgaggaaaagggagatgcgctatatgcaatggaacttgccctgtcgttggagaagctgacaaatgaaaagctgcttaacttgcacagtgttgcctcaaagaacaatgatgtgcaattggcagattttattgaaagcgagtttttgggtgaacaggtggaagccataaaaaaaatctctgaatacgttgctcaac

SEQ ID NO: 263933 - DNA, 275 bp, Glycine max
caagttttctctttgagtcaagcgaggctgatagggagcatgcacataaattgatggatatatcatacattctaagtggaaagtaattttttattctttgtattgccttttactgatcataatctttttgatttagggagatgcgctatatgcaatggaacttgccctgtcgttggagaagctgacaaatgaaaagctgcttaacttgcacagttgtgccttaaagaactatgatgtgcaattggcagattttattgaaagcgagttttttattg

SEQ ID NO: 263934 - DNA, 456 bp, Glycine max
ctctctgctcctagggtttctccttcgagtgagggaaatggctcccaaaccgcctagtacgggtctgtttgttggactgaacaagggtcacgtcgtcaccaagaaggaattgcccccacgcccctcagatcgtaaggggaaaacaagcaagagggtgcactttgtgaggaacctcataagagaggttgctggttttgcaccctatgaaaagcgtataactgagttgctgaaggttgggaaggataagagggcactgaaggttgcaaagagaaagcttggaacccacaaacgtgcaaagaagaagcgtgaggaaatgtccagtgttctcaggaagatgagggctggtggtgctggagacaagaagaaataagtcttatttatttactcttttccagattcactagatggacctgtgtattgatggacgaactttcatatttttgctttggttcaatt

SEQ ID NO: 263935 - DNA, 422 bp, Glycine max
caccgcacgaatatcttgttgtttggagcgatccgagaaaaactctgtaaacatgttggtttaccaggacctccttacaggtgatgagcttctctctgactccttccgttacaaggaaattgagaatggaatgctgtgggaagttgaggggaagtgggttgttaaaggagcagttgatgtagacattggtgcaaacccttctgctgagggtggaggagaagatgagggagttgatgatgcagctgttaaggttgttgacattgttgacacattcagacttcaggagcaacccgcattcgataagaagcagtttgttaccttcatgaagaggtttatcaagaatttgactcccaagctcgatgcagagcaacaggagttgtttaagaagcacatcgagggagcaactaaatacctgctctcta

SEQ ID NO: 263936 - DNA, 441 bp, Glycine max
cccacgcgtccgagaaggcctgggcttagttgataagcataactgggtgaggaagaaagaaggagagtgaagaagatggcgtcgagcggagcggtaccgttttggagggcggcggggatgacgtacataacatactcaaacatatgcgcgaatctgctcaggaattgcctcaaggaaccctacaaggccgaatccctctctcgtgagaagctccattttgttctctccaaatgggtcgacgccaagcctgaaaaacctactattcgttcagacaccccagagcagtgatctggaatagttggaagctataaatgcataaatctttgagatctggaagttcattgtcattttgaacctttctgtgatgtttaattcctttgtttttttctctccatgaaatggaacatgcactggattttgatttgcacggttaatcttgta

SEQ ID NO: 263937 - DNA, 394 bp, Glycine max
  unsure (1)..(394): unsure at all n locations
aattcccgggccgaccgacgcgtccgnttcttctaccttattttctttccctagtcaaggagattcatctctgcagcagggggttggagaaaagaaaaaatgctgaagatttgctgcattggggctggatatgtggggggtccaacaatggcagtcattgcactgaaatgcccctcaattgaagtggctgttgttgacatctctaaatccaggattgcagcatggaacagtgaccagctccctatctatgagccaggccttgatgatgtggtgaagcaatgtcgtggcaagaaccttttcttcagcactgatgttgagaaacatgtctatgaggccgacatagtgttcgtctccgtcaacaccccgacaaaaactcgtggttttggagcccgga

SEQ ID NO: 263938 - DNA, 320 bp, Glycine max
cttttctactttgagtcttcttgattcttctttttctccttgaactcaaacatggcagatgagggtgttctgctagatttctggccaagtccatttgggatgagggtcaggattgcacttgctgaaaagggtatcaaatatgagtacaaagaagaggacttgaggaacaagagtcctcttctccttcaaatgaacctcgttcacaggaagattccggttctcatccacaatggcaaacccatttgtgaatccctcattgctgttcaatacattgaagaggtttggaatgacagaaatccctttgtgccctttgaccctta

SEQ ID NO: 263939 - DNA, 386 bp, Glycine max
cttttctactttgagtcttcttgatccttctttttctccttgaactcaaacatggcagatgaggtggttctgctagatttctggccaagtccatttgggatgagggtcaggattgcacttgctgaaaagggtatcaaatatgagtacaaagaagaggacttgaggaacaagagtcctcttctcctccaaatgaacccggttcacaagaagattccggttctcatccacaatggcaaacccatttgtgaatccctcattgctgttcagtacattgaggaggtttggaatgacagaaatcccttgttgccttctgacccttaccagagagctcaggctagaatctgggctggatatgttgataagaagatatatgatctttggaagga

SEQ ID NO: 263940 - DNA, 322 bp, Glycine max
  unsure (1)..(322): unsure at all n locations
cgggccgaccgacgcgtccgcttggctactttgagtcttcttgatttttttgtttctccttgaactcaaacatgggggatgaggtggttctgctagatttctggccaagtccatttgggatgagggtcaggattgcacttgctgaaaagggtatcaaatatgagtacaaagaagaggacttgaggaacaagagtcctcttctnctccaaatgaacccggttcacaagaagattccggttctcatccacaatggcaaacccatttgggaatccctcattgctggtcaatacatttgaggaggttggaatgacagaaattccct

SEQ ID NO: 263941 - DNA, 251 bp, Glycine max
ctcgggtactctaaatcgtctggattcattttattctccttgcactctgacatggaacgtgaggtagttatgataatagtctgtccaagtccatttctgatgaggatcacgattgcactagctgcataacatatcaaatcttatgcccaagactactacttgatgaacaccagtaatcttatactgcacatgaaccttgttcactagaagattcactattctcatccacaatggcaaaaccatatgcgaat

SEQ ID NO: 263942 - DNA, 262 bp, Glycine max
aattcccgggtcgaccgcacgcgtccgggctagttttgattgcttgatgaaaacctatggattcctgacaccagaattctggaaggaggctcgcttctccaaatctccattccaagagtacacagatctactggcaaaaccaacaggaaagactctaatcttggaggaggaaagggtggatgcttgatttgctagttttgctttatggatgttttacgaactttattactttacatactttgatagttctgtgctttacttt

SEQ ID NO: 263943 - DNA, 285 bp, Glycine max
  unsure (1)..(285): unsure at all n locations
ctttgcttcctcagaaacacatcctaatggttagcgcggagtggcgatcgtggcggcgagcgtggcggtttcggacgtggattcggcgggcgaggacgcggaggtgacaggngccgaggccggcgccgaggcccccgccgcgaggaagaggagaagtgggtcccagtgaccaaactgggccgcctggtgaaggagggaagaatccgaagccttgaacagatctacctccactcgctcccgatcaaggagcaccagatcatcgacacgctcgtgggtcccaccctt

SEQ ID NO: 263944 - DNA, 296 bp, Glycine max
  unsure (1)..(296): unsure at all n locations
ccgggccgaccgacgcgtccgnccgggcgttctgccgcactgtgattagcttatcacccagcatgcacaatcgtctgtacagagaagcaagaccattggaggagggtcttgccgaggccattgacgatggcaagattggaccaggggatgaccccaagattcgctccaagatcttgtcagaagagtttggttgggacaaggatctcgccaagaaaatctggtgctatggccctgagacccttggacccaacatggtggctgatatgtgtaagggagtccagtatttgaatgaaatc

SEQ ID NO: 263945 - DNA, 246 bp, Glycine max
tccacgcgttcgggcgcactgtgattagcatatcaccctgcatgcacaatcgtctgtacatggaagcaagaccattggaggaggcgtctggccgatgccattgacgatggcaagattggaccacgggatgaccccaagattcgcttcaagatcttgtcagaagagtttggttgcgacaaggatctcgccaagaaaatctagtgctttggccctgagacccttggacccaacatggtgtgtgatatg

SEQ ID NO: 263946 - DNA, 188 bp, Glycine max
tgccgatgccattagacgatggcaagattgaaccacgggatgaccccaagattcgctccaagatctagtcagaagagtttggttagcacaatgatctcgacaaaaaaatctactgctctggccctgaaacccttgaacccaacatggtgggagatatatttcaaggaatacagtatctgaatcaaatc

SEQ ID NO: 263947 - DNA, 287 bp, Glycine max
gaggagatatatgtacctaaacgaagagtatttgaaagagaatccaaacatgtgtgcttacgtggcaccttctttggatgctaggcaagacatggtggtggtagaggtaccaaagctagggaaagaggctgcagtaaaggccataaaggagtggggccagccaaagtcaaagattacccacttgatcttctgcaccaccagtggtgttgacatgcctggtgctgattaccaactgaccaaacaattgggccttcgcccctatgtgaagaggtatatgatgtaccaac

SEQ ID NO: 263948 - DNA, 285 bp, Glycine max
ggctgaagcacaactacgagaccagcatggtaaccctgtcccactcaccgatcaatacggtgatccggttatcttaactgacgagcgcggtaatcccgtccaactcactggtgtcgctaccaccgctaccggcacagcaggttctgggtttgggtcctatggtaccggtgcttacggtggtggtgcaagtgcaaccaccgttgcagatcttttggcaacccaaccaaggagtggcagggaggctagagagcttcgtcgttcctccagttcaagctctagctcgtc

SEQ ID NO: 263949 - DNA, 264 bp, Glycine max
cccacgcgtgctgacagacgagagcactctatacataaccctgataacacgaaccacatgtgcaagcgagtgacattcaccacccatgattagcatgcactaggcctggtaacggtatatcctattctgctttgccctacataaggacacccgctagctagctcaagatctcttcaccagatgtggaagacaatatctgcaactttgctaataagggtttgaccccatctcagattgatgacattattcgagattctcacggca

SEQ ID NO: 263950 - DNA, 207 bp, Glycine max
ggcgggcgtgctccgaaccaatcacactgctgaattttcagagacaactatgcacacatgggtaagagtctatacctccttacacgtgataagcttctctcgcactacatccgttacaatgaaattgatattgcaatgctgtgggaagttgagggcaagtgcgttgtctaggtagcagttgatgttgacattggttcaaacccttct

SEQ ID NO: 263951 - DNA, 186 bp, Glycine max
acccacgcgtccgaaaaaaaaaaaaaaaaaaaaaaaaatttattataaaaaaaaaaaaaaaaaaaaataaagaaagaattaattataaaaaaaaaaaaaaaaaaaaaaattttttttttaaaaaaaaaaaaaaaaaaacaaaaaaaaaaaaaaaaaaaaaaaaccctccctttaaaaaaacccaaa

SEQ ID NO: 263952 - DNA, 202 bp, Glycine max
  unsure (1)..(202): unsure at all n locations
cgcgtccgcccaggcgtccggactgcccaagatgtatttacaatgttacggtgcgggcaaaaaagcgcatgatctttctgatcaacaatggtggatacaccatcgaggttgaaattcatgatgggccgtacaatgtgattaagaactggaattacactgngttgattgatgcaatccacaatggtgaaaggaaatgctggac

SEQ ID NO: 263953 - DNA, 282 bp, Glycine max
cccacgcgtccgcccacgcgtccgcccacgcgtgcgcagacgcgtgggcttcaacttggatggcgacgctaactaccctgattctgatcagattccttactttgaggatggtgattctgtgacatacaatcttgagaaggaggggatcattgagtgcttgaaaaggaatgtgggtggtgatttagatagtgaggcttcttctctgactgaatggatcccaaccaaagtgatggccaccacttggcttgctgatgcacttgagtatgaactggagctgggatg

SEQ ID NO: 263954 - DNA, 338 bp, Glycine max
gctgaacgcagtaagcactaaggagtagcgtttattggctgatacttgcaccctcttaacgataagatgagacagagaaagggttgacggaaaggaaaaccaaatcaaacccaacccaccttgtccgatctgccaccaggtgtggttgttgtgatttgaatggaggcaattggacgtggccgtggcggtgctttaccgtctgcaccagtgaagcaatatctgcacgatttctcgaagctgtttcagtactatctggataaatacactccacattccacgtacacatggattgcgactcttgtgatagcaatcatctacgctttacgcgttgtttatgt

SEQ ID NO: 263955 - DNA, 341 bp, Glycine max
ctaggctaacgcgtgcagagcagagagagacgcagccatggggcgaagacccgcgaggtcgtagtaggcaaattaagaacaaaccataccccaagtcacggttatgccgtggtgttcctgatcccaagatcaggatttacgatgttggtatgaagaagaaaggtgttgatgaatttactttctgtgtccatctgactagttgcgagaaggaaaacgtttctagttaagcccttgaagctgctcgtattgcttgcaacaagtacatggccaaatttgctggaaaggatgcttttcacttgatagtcaaggttcacccattccatggtcttaagatcaacaag

SEQ ID NO: 263956 - DNA, 275 bp, Glycine max
cacgtcgctgctccgtaccagtttcactgcatacatttgagagaaaactctgctaacatgtgagttagtatgaccttcttacaggtgatgagcttctctcggactccttccgttacactgaaattgacaatggaatgctgtgcgaagtttaggggaagcgtgctgttaaagcagcagttgatgttgacattggtgcaaacccttttgctgacggtgcagaagatgaaggaatctatgactcacctgctaaagttgttgacattgctgatacattc

SEQ ID NO: 263957 - DNA, 375 bp, Glycine max
cccagcgcgtccgagaaggcctgggcttagttgataagcataactgggtgaggaagaaagagagagagtgaagaagatggcgtcgagcggagcggtaccgttttggagggcggcggggatgacgtacataacatactcaaacatatgcgcgaatctgctcaggaattgcctcaaggaaccctacaaggccgaatccctctctcgtgagaagctccattttgttctctccaaatgggtcgacgccaagcctgaaaaacctactattcgttcagacaccccaaagcagtgatctggaatagtttgaagctataaatgcataaaatctttgagatctggaagttcattgcattttgaacccttctgtgaaggttaaat

SEQ ID NO: 263958 - DNA, 335 bp, Glycine max
tccaggcgttcgagaaggcctgggcttaggtgataagcataactgggtgaggaagaaagaggcagagtgaagaagatggcgtggagcggagcggtaccgttttggagggcggcggggatgacgtacataacatactcaaacatatgcgcgaatctgctcaagaattgcctcaaggaaccctacaaggccgaatccctctctcgtgagaagctccattttgttctctccaaatgggtcgacgccaagcctgaaaaacctactattcgttcagacaccccagagcagtgatctggaatagttggaagctataaatgcataaatttttgagatcttgg

SEQ ID NO: 263959 - DNA, 287 bp, Glycine max
cttggctctgaaaaaacatgttgagggttgtatgctagaaggctctcttcttctctctcatgttcttctccgttgcggcccaatcacgccgcttccgcttttctctctcgaaacgacgtcgtcgtcgatgaccgcagatctgctccttcctcccatccccttcttcccttcagaggttatgctactgaatccctgatccacacaaaagaaaacagcattactcctgagattccgccaactgttactgctgttaagaaccctacttctaagattgtctatgatgatca

SEQ ID NO: 263960 - DNA, 282 bp, Glycine max
gcaggctaccttactgtctatccctaatctttgatattcatctgtgcaccaagttccattgtattagagaaaacgctgactatatactccattgtggctggatataaggcgggtccaaccaatggcaacattacactggaaaacccctcaatggatattgctagtcttaacaatgctaaaaccagctatactgcctgggacaattaccagcaccatatctatgaaccaggccttaatgatatggtaaaacagtatcactgcatgaaccttttttatagcact

SEQ ID NO: 263961 - DNA, 290 bp, Glycine max
cccacgcgtccggacagaagagagcgtccttgtcgcaaccctaataagaagaaccacagctgcaagcgagtgacatccaccagccatgggtcgtatgcacagccgcggtaagggtatatcctcttctgctttgccctacaaaaggacaccccctagctggctcaagatctcttcgcaagatgtggaagaaaatatctgcaagtttgcgaagaagggtttgaccccgtctcagattggtgtcattcttcgagattctcacggtattgctcaagtcaacagcgtcactggca

SEQ ID NO: 263962 - DNA, 284 bp, Glycine max
ggctacttttgattgcttgatgaaaacctatggattcctgacaccagaattctggaaggagactcgcttctccaaatctccattccaagagtacacagatctactggcaaaaccaacaggaaagactctaatcttggaggaggaaagggtggatgcttgatttgctagttttgctttatggatgttttaggaactttattactttacatactttgttggttctgtgctttacttttggttttgatagacggtatgtctctgtatgcattttgattgtttccaag

SEQ ID NO: 263963 - DNA, 287 bp, Glycine max
ggctgaagcacaactacgagaccagcatggcaaccctgtcccactcaccgatcaatacggggatccggttatcttaactgacgagcgcggtaatcccgtccaactcactggtgtcgctaccaccgctaccggcacagcaggttctgggtttgggtcctatggtaccggtgcttacggtggtggtgcaagtgcaaccaccgttgcagatcttttggcaacccaaccaaggagtggcagggaggctagagagcttcgtcgttcctccagttcaagctctagctcgtctg

SEQ ID NO: 263964 - DNA, 426 bp, Glycine max
gtcttctcacttcgtcaaaaccaaccaaacccctccccaattctcaagccaaccatgtcttgcttcaagagcaagtaccaagatgaactcattgccaatgctgcttacattggcaccccagggaagggtatccttgctgctgatgagtcaactggtacaattggcaagcgattggccagcattaatgtcgagaatgttgaagcaaataggcgtgctcttcgtgaactcctattcaccacacctggtgcttttgagtgcctcagtggtgtgatcttgtttgaggaaaccctataccaaaagacagcttcaggaaaacccttcgtagagttgatgaaggaaggaggagttctccctggtatcaaagttgacaagggcacagtagagcttgcaggaactaatggggagactactactcaagggttggat

SEQ ID NO: 263965 - DNA, 383 bp, Glycine max
cttttctctgaaaaaacatgttgagggttgcagctagaaggctctcttcttctctctcatcttcttctccgttgcggcccaatcacgccgcttccgcttttctctctcgaaacgacgtcgtcgtcgatgaccgcagatctgctccttcctcccatccccttcttcccttcagaggttatgctactgaatccctgatccacacaaaagaaaacagcattactcctgagattccgccaactgttactgctgttaagaaccctacttctaagattgtctatgatgatcacaaccatgaaagatttcccccaggtgacccaagcaagagggcatttgcctacttcgtacttacaggtggtaggtttgcttatgcctctgtggtccgt

SEQ ID NO: 263966 - DNA, 428 bp, Glycine max
cccacgcgtccggaaaagggaagtaacttatgtgaataatatgaagggcggtcaagaaatctcaaaaacaccgtcctcttctaagagaacactaagtcagggttcagttgatatatatgctgctcagtgcaaaaattgcttgaaatggagagagattgatacacaggaagagtttgaagagattagaagtaaagttgctgaggaaccttttctttgcagcagaaaggctaatagttcctgtgatgaacctggtgatattaaatatgattcctctcggacatgggtgattgacaagcctaacctcccaaagactccacaaggttttaagaggagcttggtgcttagaaaagattactccaaattggacgcttactacatcacacctgcaggcaaaaaactgagaacccgcaatgagattgctgcgtttc

SEQ ID NO: 263967 - DNA, 450 bp, Glycine max
cccacgcgtccgtcaagcattgcatccctcttgatttgtagtttgttttgtgctttagataaaagttctgccaaatcaagaggggttttaagatcatagtgtgtgttttgcaacaatggctaagttctttgctgctatgatcttggcactctttgccatttccatacttcaaacagtggtaatggctgctaatgaacaaggaggccacttgtatgacaacaagagcaaatatggaagtggaagtgtcaagagttaccaatgcccatcacaatgctcgaggagatgtagccagacccaataccacaagccctgcatgtttttctgtcagaagtgctgcaggacatgcctgtgtgtgcccccggggtattatggtaataaagctgtgtgcccttgctacaacaactggaagaccaaagaaggaggacccaaatgcccttgagcttcaacttg

SEQ ID NO: 263968 - DNA, 203 bp, Glycine max
attccggggtcgaccgacgcgtccggtcatatgctccaagtgctctggtttcggttttaactctgatgcttcgattacggtgactggctgtcatcgaactggcattaaggtgtctataagacatcttggcccgtccatgattcatcatatgcatcatgcttgcaatcaatgcattggtactgcagaaaccatcaacgacagat

SEQ ID NO: 263969 - DNA, 341 bp, Glycine max
attgctgctgtttgcctatcggtgtactttggtgtctctaccctgctggatgcctgatctagcgatggccaaaaatcagatgaagagcataaggaggcagaactagcagtcatctgaattttctggaaatggtgctgggatactatctgctgctagcacagttgccagtacttttctattagtttttgttgctgaatggggcgacaagtcattcttctccacaattgcccttgcagcatcttcttctccccttggagtcatagctggagcactggctggtcatggtgatgcaactttgctagctgtacttgacggttctatacttgtgacgtatttgtcag

SEQ ID NO: 263970 - DNA, 220 bp, Glycine max
ggcgcatatcaacattgagtgcttgatggattatacggatgtccgtggctttatgaagcgagatgagtttgagcaactaatgctttcaattctggaacgtttgaagggacctatgcagaacgcacttgctgaagcaagtcttaccggtgaaaatgtacacacagttgatgcggttggttcacgttctcgtgtaccgtccattaacacaatattgacagag

SEQ ID NO: 263971 - DNA, 448 bp, Glycine max
  unsure (1)..(448): unsure at all n locations
attgctgctgtttgcctattggtgtactttggggtctctaccctgctggatgcctcatctagcgatggccaaaaatcagatgaagagcagaaggaggcagaactagcagtttctgaattttctggaaatggtgctgggatactatctgctgctagcacagttgccagtacttttctcttagtttttgttgctgaatggggcgacaagtcatttttctccacaattgcccttgcagcagcttcttctccccttggagtcatagctggagcactggctggtcatggtgttgcaactttgctagctgtacttgggggttctttacttgggacgtatttgtcagagaaggttattgcctacatcggaggtgttctctttctcgtctttgccgcaataaccttatttgaaaatgtgcaatangggttaaaagaaatgcaatataatcttcgtg

SEQ ID NO: 263972 - DNA, 276 bp, Glycine max
gtcatatgctccaagtgcactggtaagggttctaagtctggtgcttcgatgaagtgtgctggttgtcaaggaactggtatgaaggtttctataagacatcttggcccgtccatgattcagcagatgcagcatgcttgcaatgaatgcaagggtactggagaaaccatcaacgacagagatcgctgcccacagtgcaagggagaaaaggttgtgcaagaaaaaaaagtccttgaagttatttgggaaaaaggaatgcagaacgggcagaagattaca

SEQ ID NO: 263973 - DNA, 302 bp, Glycine max
ccaattcactctttttcttctagccctctgccgtgggaggagtttgtaacatggctgctctaccaacggcggagcttagtgacgcaaatgcaacacatgtagcaagttgtgatgtgagggtgttgcatccagtgttcaaggtttacggtggggccaccgcgttctccggccccgttgtcaccgtgaaggtgtttgaagacaacgtgttggtgagggaacttcttgagacgaaaggcgaaggaagagtattggttgttgatggaggaggaagcttgaggtgtgcattggtggaaggaaatttg

SEQ ID NO: 263974 - DNA, 459 bp, Glycine max
cgcaccagtttcaccgcacgaatatcttgttgtttggagcgatccgagaaaaactctgtaaacatgttggtttaccaggacctccttacaggtgatgagcttctctctgactccttccgttacaaggaaattgagaatggaatgctgtgggaagttgaggggaagtgggttgttaaaggagcagttgatgtagacattggtgcaaacccttctgctgagggtggaggagaagatgagggagttgatgatgcagctgttaaggttgttgacattgttgacacattcagactttaggagcaacccgcattcgataagaagcagtttggtaccttcatgaagaggtttatcaagaatttgactcccaagctcgatgcagagcaacaggaagttgttaagaagcacattgagggagcaactaaatacctggcttttaagattaaagatttccaattttttggt

SEQ ID NO: 263975 - DNA, 461 bp, Glycine max
cccacgcgtccgggacagagctctgcatgatgcattgtcaattgtcaagagaactcttgaatcaaatacggtggtagctggtggaggtgctgttgaggcagcattatcagtttatttagagtaccttgctacaactttaggatctcgggagcagttggctatagcagaatttgctgagtctctgttaattattccaaaggtgctttctgttaatgctgctaaggatgccactgagctggtcgcaaaattacgggcctaccaccattcagcacaaactaaagccgataagaaacatttatcaagtatgggtttggacctttctgaaaggaaaatcagaaacaacttggaggctggagtcattgagcctgcaatgagcaaagtaaaaattattcagtttgcaactgaagctgccattactatccttcgaattgatgacatgatcaagcttatcaaggatgaaa

SEQ ID NO: 263976 - DNA, 383 bp, Glycine max
gtcatatgctccaagtgcactggttagggttctaagtctggtgcttcgattaagggtgctggttgtcaaggaactggtatgaaggtttctataagacatcttggcccgtccatgattcagcatatgcagcatgcttgcaatgaatgcaagggtactggagaaaccatcaacgacagatatcgctgcccacagtgcaagggagaaaaggttgtgcaggagaaaaaagtccttgaagttattgtggaaaagggaatgcataacgggcagaagattacattccctggcgaatctgattaagctccagacacatttactggggattattgctttgtcctttaacaaaaggaacatcccaaatttaaaaaaaaggcttaaaatctttt

SEQ ID NO: 263977 - DNA, 277 bp, Glycine max
ggcgcctctcaacattgagtgcttgatggatgagaaggatgtccggggcttcatcaagcgagatgagtttgagcaactaagtcttccaattttggaacgtgtgaagggacctctggagaaggcacttgctgaagcaggtcttaccggtgaaaatgtacacacagttgaagtggttggttcaagttctcgggtaccggccatttacaaaatattgacagagtttttcaaaaaggagcctaagcggacaatgaatgctaatgaatgtggtgctaagggc

SEQ ID NO: 263978 - DNA, 381 bp, Glycine max
caaccctaacgcgtgcagagcagagagagactcagtcatggggcgaagacccgtgaggtgtgataggcacattaagatcaaaccataccccaagtcacggctttgccgtggtgttcctgatcccaagatcaggatttacgatgttggtatgaagaataagggtgtcgatgaatttcctttctgtgtccatctagttagttgggagaaggaaaacgtttctagtgaggccctggaagcttgctcgattgcttgcaacatgtacatggccgaatttgctggaaaggatgctttccaattgagagtcaaggtgcacccattgcatggtcttaggatcaacaagatgctttcgtgtgccggagctgataggcttcaaactggaat

SEQ ID NO: 263979 - DNA, 453 bp, Glycine max
taccggtccggactgggtggaccgacgcgtccgcaaccctaacgcgtgcagagcagagagagacgcagccatggggcgaagacccgcgaggtgttataggcaaattaagaacaaaccataccccaagtcacggttttgccgtggtgttcctgatcccaagatcaggatttacgatgttggtatgaagaagaagggtgttgatgaatttcctttctgtgtccatctggttagttgggagaaggaaaacgtttctagtgaggccctggaagctgctcgtattgcttgcaacaagtacatggccaaatttgctggaaaggatgctttccacttgagagtcagggtgcacccattccatgttcttaggatcaacaagatgctttcgtgtgccggagctgataagctccaaactggaatgagaggtgctttttgaaaaccacagggtacttgtgctaa

SEQ ID NO: 263980 - DNA, 456 bp, Glycine max
cccacgcgtccgcccacgcgtccggtgattgaagctagttagaacaagatgttgcagctactctacactgcgattttctccgaaatgcttttgattctcacgctcgtcttcaaaaccccactgagaaaactcgtcatcgtttccctcgatagtgtgaagcgcggtcgcggtcccgtggtggtttccaccgtgggcgccacattgatggtggttctcgcttcgagcctctacagcatggccaagatccagcaacgcaccctcgaggccggcatagtcaaccccaccgaccaagtcctcatgtccaagcacatgctcgaagcttctctcatggggtttctgctggtcctctctctgatgattgatagattgcaccattacataagagagcttcggtcactcaggaagaccatggaagctattaagaaacaaagccgaagttttgaagatggtaaaaat

SEQ ID NO: 263981 - DNA, 263 bp, Glycine max; identical to SEQ ID NO: 263840

SEQ ID NO: 263982 - DNA, 328 bp, Glycine max
attgctgctgtttgcctattggtgtactttggggtctctaccctgctggatgcctgatctagcgatggccaaaaatcagatgaagagcagaaggaggcagaactagcagtttctgaattttctggaaatggtgctgggatactatctgctgctagcacagttgccagtacttttctcttagtttttgttgctgaatggggcgacaagtcatttttctccacaattgcccttgcagcagcttcttctccccttggagtcatagctggagcactggctggtcatgggtgtgcaactttgctaagctgacttggggggtctttaactggga

SEQ ID NO: 263983 - DNA, 376 bp, Glycine max
caaccctaacgcgtgcagagcagagagagactcagccatggggcgaagactctctaggtgttataggctaattaagaacaaaccataccccaagtcacggttttgccgtggtgttcctgatcccaagatcaggatttacgatgttggtatgaagaagaagggtgttgatgaatttcctttctgtgtccatctggttagtttggagaaggaaaacgtttatagtgaggccctggaagctgctcgtattgcttgcatcaagtacatggccaattttgctggaaaggatgctttcctctagagagtcatggtgcacccatttcatgtgcttaagatcatcatgatgctttcgtgtgccggagcttatatgctccaaact

SEQ ID NO: 263984 - DNA, 237 bp, Glycine max
ggctacttttgattgcttgatgaaaacctatggattcctgacaccagaattctggaaggagactcgcttctccaaatctccattccaagagtacacagatctactggcaaaaccaacaggaaagactctaatcttggaggaggaaagggtggatgcttgatttgctagttatgctttatggatgttctaggaactgtattactttacatactatgttggttctgtgctttacttttg

SEQ ID NO: 263985 - DNA, 487 bp, Glycine max
ccggtccggaattcccgggtcgacccacgcagtcgtccgcattctcctctctgaattcctcttattcaggaatttggagagtattgatatatcaaggtaggataaaccagtagccaaggaagatatggagttttctatgattttcattgttagcaacattatgctgcttttcagttcagcatttgccaaaactgctagtcctccctctctgagcccaactccagcaccagccccggcaccagacttcgtgaacctcactgagttactcagtgttgctggtccgtttcacacctttcttggataccttgagtccactaaagtgattgacactttccaaaaccaagccaacaacactgaagaaggaattaccatctttagttctaaggacagtgccttcaatgctataaagaaaactaccctatccaaccttacctcttaccagctaaagcaagtgatcctcttccatgccttgccacatttctattct

SEQ ID NO: 263986 - DNA, 340 bp, Glycine max
cccacgcgtccgccacgcgtccggtttctggtggaggatccaacttcagagcaattcatgaggcctccaaaaggggatcacttcatggagatgttcttgtgttggtcacaaataaaagtgattgtggaggtgcggagtatgcaagaaataatggtatcccagttatactgtaccatatatcaaaggatgaatctaatccaagtgaccttgttgatacactaaggaaatttgaggttgattttattcttttagctggatacctcaaacttataccagtggaattgatcccagcttacaaaagatctatattcaacattcattcattaattttttcaacttt

SEQ ID NO: 263987 - DNA, 408 bp, Glycine max
ggaattgttgttttcacaatgaagacagtcctattcctccttctggtgtcagcgtgaatccgcatcgccgtcgcgcagcccaatgacttctccgacgcaaacctcaacgagttcaactcctccgtagccataatcataatcatattagtagtcgcgtttttcctcatggcctttttctccatctacgtgcgccactgcgctgattccccttccaacaccgtcaggcctctcaccaccgcacgctccaggagggccgcgcgtggccttgaccccgctctgattcaaacattccctatcctcgaatactccgttgttaagatccacaaaatcggaagagaagctttggaatgcgctgtgtgtttgtgcgagttcgaggacaccgaaacgctgcgtttggtccccaagtgc

SEQ ID NO: 263988 - DNA, 446 bp, Glycine max
  unsure (1)..(446): unsure at all n locations
ctttcaaaccctccaaccttagtttcaattctaaacttgttcaccctttattctctcctcttccaaacatcaaccatggcttcaataataaccttggtgacatccaccttgctctttctttctttcactttgtcatgtgctattgacacctncaccatcaccaactacaccgacaatgaggtcatgaccatgtacgaggagtggttggtgaagcaccaaaaggtgtacaatgggttgagagagaaagacaagaggttccaagttttcaaagacaacttggggttcatacaagagcacaacaacaaccagaacaacacttacaaacttgggttgaaccagtttgctgacatgacaaatgaggaataccgtgtcatgtattttggcaccaagagtgaatccaaacgcangctcatgaaaaccaagagcaccggtcaccggttcgcgta

SEQ ID NO: 263989 - DNA, 428 bp, Glycine max
caagaaccaacctaccttttgcaatctcaattcaatggcgtcctctctcattgcgaagcgcttcctctcctcttccctcctctccaggtccctccttcgccccgccgcttccgcttcccaccgctctttcaacaccaacgccatgcgccagtatgacaaccgcgccgacgaccacagcaccgacatcgatcgtcactccgaacgctctttccctagcactgcgcgccgcgacgatatcttctcagatgtgttggatccattttttccgactcggagtttgagccaagttctgaacatgatggaccaggtcatggacaatccgttcctctccgcgtcgcgcgggatcggagctggcgcttgagtgcgtcgcggatgggacgcgagggagacagaagatgctctgcatctgcgcgtggacatgcctgggc

SEQ ID NO: 263990 - DNA, 190 bp, Glycine max
cacgagccaacctaccttttgcaatctcaatttaatggcgtcctctctcattgcggagcgcgtcctctcctcttccctcctctccaggtccctccttcgccccgccgcttccgcttcccaccgctctttcaacaccaacgctctgcgccagtatgacaaccttgcctacgaccacatcacctacatcgat

SEQ ID NO: 263991 - DNA, 252 bp, Glycine max
attcccgggtcgacccacgcgtgcgctacgcgtccgtcactcgtccggtttctgtttgaggatccaacttcatagcagtgcatgaggcctccaaaaggggatcacttcatggagatgttcttgtgttggtcacaaataaaagtgattgtggaggtgcctagtatgcaagaaatattggtatccaattttactgtaccatttatcaaaggttgaatttaatccaatttaccttttttatactctaaggaaatt

SEQ ID NO: 263992 - DNA, 239 bp, Glycine max
cggacgcgtgggcggacgcgtgggctttgctagtacctgatgagtggttctaagattttggaggggtatatgcatagtcagaggattcatgcatgactcagactgtctaaagaaggggtatagttctttggaagctgtactgttatgtgttcctgttgattatcaatgtgtggatctgtctttgtacaaggatagtgaaatcgtcctgttactaaacaaagctactaatacatctgaaa

SEQ ID NO: 263993 - DNA, 462 bp, Glycine max
  unsure (1)..(462): unsure at all n locations
cggacgcgtgggcggacgcgtgggctttccaagtacctgatgagtgtttctcagatattgtaaattgtatatgcatagtcagaggattcatgcatgactcagactgtctaaagaaggggtatagttctttggaagctgtactgttatgtgttcctgttgattatcaatgtgtggatctgtctttgtacaaggatagtcaaatcgtcctgttactaaacaaagctactaatacatctgaaagtgctggagatggttgtatgatgattctgcaagtaagtgatctaccatatgtctctatgtcaagatctgcttgtatagatgtttggaggttaccagaactaaaggattctgtcgcttacctgaatattgnggatgagaaatctcgcaccattcgtcattctgtaattgctcccttggcatgtagtgcatcaagaggcgtggcttgtgtatttgctgcaacaa

SEQ ID NO: 263994 - DNA, 418 bp, Glycine max
  unsure (1)..(418): unsure at all n locations
ctttcaaaccctccaaccttagtttcaattctaaacttgttcaccctttattctctcctcttccaaacatcaaccatggcttcaataataaccttggtgacatccaccttgctctttctttctttcactttgtcatgtgctattgacacctccaccatcaccaactacaccgacaatgaggtcatgaccatgtacgaggagtggttggtgaagcaccaaaaggtgtacaatgggttgagagagaaggacaagaggttccaagttttcaaagacaacttggggttcatacaagagcacaacaacaaccagaacaacacttacaaacttgggttgaaccagtttgctgacatgacaaatgangaataccgtgtcatgtattttggcaccaagagtgatgccaaacgcatgctcatgaaaa

SEQ ID NO: 263995 - DNA, 260 bp, Glycine max
cctaaacaactctttctcttcttccttcgctcgttgttctccctcgcgtagatcgacaatggcggagacagagacgtttgctttccaggctgagatcaaccagcttctcagtctcatcatcaacaccttctactccaacaaggagattttccttcgtgaactcatcagcaacgccttcgatgctttggacaagattcgatttgagagtttgacagataagagcaagctcgatgctcagccagagttgttcattcatatta

SEQ ID NO: 263996 - DNA, 356 bp, Glycine max
gcgtccggtcaggaaccatcgtcgtgagcgaagatcctttttaatacagttacaaattgcaataacacgctcattgtggttatcgaaatgggatcgcaaacgtcgagaagaatgggaagtttgggagcgattctgaaacatccagatgacttttaccctctgctgaagctgaaaatggcggcgaggaacgccgagaagcagatcccgccggagccgcactgggcgttctgctacacaatgctccacaaggtttctcgaagtttcgccctcgtcattcagcaactcggcatcgagcttcgcaacgccgtttgcatattttatttggttctgcgagctttcgacaccgttgaggatga

SEQ ID NO: 263997 - DNA, 362 bp, Glycine max
cgcgggcggtcaggaaccatcttttttagctaagatccataataatacagctacaaattgcaataaccgggtagtgtggatatcgaaagggatcgcaacgtcgagaagaatgggacgtttgggagcgattctgaaacatccagatgacttttaccctgtgctgaagctgaaaatggcggccaggaacgccgagaagcacatcccgccggagccgcactgggcgatctggtacacaatgctccacaaggtttctcgaaggttcgccctcgtcattcagcaactcggcatcgagcttggcaacgccgtttgcatatttcatttggttctgcgagctatggacaccgttgaggatgatactagca

SEQ ID NO: 263998 - DNA, 448 bp, Glycine max
cggacgcgtgggctgtttttgaatctcagttggtgccagctgtcacggagcttgtcgttgcagaattgatgtacttgcagtatatggatcctaaagagccaatctatatttacataaattccactgggactacgcgagatgatggtgaaacggtaggcatggagacagaaggttttgccatttatgatgcaatgatgcagttgaaaaatgagatacacacagtggcggttggatctgctataggtcaagcctgtttgctactttcagcagggtctccgggtaaacgctttatgatgccacatgctaaagccatgattcagcaggctcggattccttcctctgggttgatgcctgcaagtgatggtcttaatcgtgcaaaggaggtgattattaacagggacaatctggttaaactactggccaaacacacgggaaattcagaggaaac

SEQ ID NO: 263999 - DNA, 315 bp, Glycine max
cggacgcgtgggctgtttttgaatctcagttggtgccatctgtcacggagcttgtcgttgcagaattgatgtacttgcagtatatggatcctaaagagccaatctatatttacataaattccactgggactacgcgagatgatggtgaaacggtaggcatggagacagaaggttttgccatttatgatgcaatgatgcagttgaaaaatgagatacacacagtggcggttggatctgctataggtcaagcctgtttgctactttcagcagggtctccgggtagacgctttatgaggccacatgctaaagccatga

SEQ ID NO: 264000 - DNA, 241 bp, Glycine max
cccacgcgtccggtgatttcagtgagtgatcggtgttcacttgatctcatcataatcgtcagcgtcaattgaagaagatgccgatcagaaacatcgccgtcggaaggcctgaagaggcgactcaccccgacacgttgaaggcggctttggctgagttcatctcaaccttcatcttcgtgttcgccggctcaggctccggcatcgcctacaacaagcttaccgacaacggcgctgccacccc

SEQ ID NO: 264001 - DNA, 231 bp, Glycine max
gtcagtaaccatcgtcgtgagcgaagatccattataatacagttacaaattgcaataacacactcattgtggttatcgaaatttgatcgcagcgtcgagaagaatgggaagtttgggagcgattctgaaacattcagatgacttttaccctctgctgaagctgaaaatggcggccaggaacgccgagaagcagatcccgccggagccgcactgggcgttctgctacacaat

SEQ ID NO: 264002 - DNA, 169 bp, Glycine max
gtcagtaaccatcgtcgtgagcgaagatccattataatacagttacaaattgcaataacacgcgtcttgggggtatcggaatttggtccgaacggccaaaaaaattggaaagttgggaaccgatcctgaaccatccaaatgactttaacctttggctgaagctgaaaat

SEQ ID NO: 264003 - DNA, 290 bp, Glycine max
tcgacccacgcgtacggtcagtaaccatcgtcgtgagcgaagatccattataatacagctacaaattgcaataacacagtcaggtgtggatatcgaaatatgatcgcatcgtcattaagaatgggatgtcagtgagcgattctgaaacattcagaagactatgaccgattgctgaatctgaaaatggctaccaggaacgccgagtaacacatcccgcacagaccagcatgggcagtctagtccacaacgctccacagggattctagtcatttctagcttaccaatctgct

SEQ ID NO: 264004 - DNA, 274 bp, Glycine max
cggacgcgtgggctgtttttgaatctcagttggtgccagctgtcacggagcttgtcgttgcagaattgaggtacttgcagtatatggatcctaaagagccaatctatatttacataaattccactgggactacgcgagatgatggtgaaacggtaggcatggagacagaaggttttgccatttatgatgcaatgatgcagttgaaaaatgagatacacacagtggcggttggatctgctataggtcaagcctgtttgctactttcagcagggtc

SEQ ID NO: 264005 - DNA, 292 bp, Glycine max
cggacgcgtgggctgtttttgaatctcagttgtgtgccagctgtcacggagcttgtcgttgcaggattgatgtacttgcagtatatggatcctaaagagccaatctatatttacataaattccactgggactacgcgagatgatggtgaaacggtaggcatggagacagaaggttttgccatttatgatgcaatgatgcagttgaaaaatgagatacacacagtggcggttggatctgctataggtcaagcctgtttgctactttcagcagggtctccgggtaaacgcttta

SEQ ID NO: 264006 - DNA, 316 bp, Glycine max
cagagtttgagtggacctgtctcagctaccctttaccttggttattcactactcatggccatggcaatcatgttgtcaaccggcaccattggcttccttatgtcattctactttgtgcactacttgttctcatcagtaaagatagattgaggttcttgttgtcattgcatattaactatgaaaaaggttgattgatataacttgatcacattgcatagtatggcaacggatgtttaattcattgtctgattttatattgcgatgggatctgcagtttgttctccttttgctgttttcctaagtagttgactcattc

SEQ ID NO: 264007 - DNA, 349 bp, Glycine max
gtcagtaaccatcgtcgtgagcgaagatccataataatacagttacaaattgcaataacacgctcattgtggttatcgaaatttgatcgcagcgtcgagaagaatgggaagtttgggagcgattctgaaacatccagatgacttttaccctctgctgaagctgaaaatggcggcgaggaacgccgagaagcagatcccgccggagccgcactgggcgttctgctacacaatgctccacaaggtttctcgaagtttcgccctcgtcattcagcaactcggcatcgagcttcgcaacgcccgttgcatattttatttggttctgcgagctctcgacaccgttgaggatgat

SEQ ID NO: 264008 - DNA, 246 bp, Glycine max
  unsure (1)..(246): unsure at all n locations
gtcagtgaccatcgtcgtgagcgaagatccataatattacagttacaaattgcaataacacggtcatggtggatatcgaaatttgatcgcatcgtccaaaaaaatgcgaagtttgggagcgattctgaaacatccagatgactattaccctctgctgaagctgaaaatggcggcgaggaacgccgagaagcagatcccgccggagccgcactgggcgttctgctacacaatgctncacaagggttc

SEQ ID NO: 264009 - DNA, 389 bp, Glycine max
aaaaaaggttcatagttgatatctccagcggttcgatgaagtttgaagatttggcagaaggatgcatggcaaaaatactgtcctacaccactcgtgcggatgtatgcaggctttctctggtttccaaagcctttcattccgcggctgaagccaacactgtgtgggattgctttctcccctctgatttgtcctctatcatctccccttcttcttccgttcctccctttcgctctattaaaggatctctatctctatctctccgatcgtcccaccatcatcgatcaagggataaagaggtttcaattggaaaaaccgaccgggaaccaggggtacatgcctttcggttgaaaactgagccttatatggggtgacacttctcattattggga

SEQ ID NO: 264010 - DNA, 375 bp, Glycine max
cccacgcgtccgcccacgcgtccgcccacgcgtccgcccacgcgtccgtctccctctttctcggcactagctctgtgcattcttctctcgctctctgccttccatcacactcggcatttcctttcccaagatagtagaagatggcagacactgaggatattcaacctcttgtttgtgacaatggaacaggaatggttaaggctggatttgctggagatgatgccccacgtgctgtgtttcccagcattgtaagtcgtcctcgtcacactggtgtgatggttggcatggcccaaaagatgcatatggtgggggtgagggccaatcttagaaggggattttgacttttaaggaccccaatggacctgggaatgggag

SEQ ID NO: 264011 - DNA, 230 bp, Glycine max
cccacgcgtccgcccacgcgtccgcccacgcgtccgcccacgcgtccgtctccctcggtctcggcactagctctgtgcattcttctctcgctctctgccttccatcacactcggcatttcctttcccaagatagtagaagatggcagacactgaggatattcaacctcttgtttgtgacaatggaacaggaatggttaaggctggatttgctggagatgatgccccacgt

SEQ ID NO: 264012 - DNA, 280 bp, Glycine max
gttgccgggctctaccgtggtttcaacatctcatgtgttggaatcatcgtgtatcgtggtctgtactttggattgtatgattctgttaaaccagttgtcctcacagggtcattgcaggatagcttttttgccagctttgcccttggatggctcatcaccaatggtgcaggtcttgcatcatacccaatagacactgttagaagaagaatgatgatgacctctggtgaagctgtcaagtacaagagctccttggatgcattcacacagatcctcaagaatg

SEQ ID NO: 264013 - DNA, 225 bp, Glycine max
cattttctggctaaccaaccctgacactccttcttctccgcttcctcttcgatcatcgcttcagaatgccgccgaagttcgacccctcccagatcgtcgacgtcttcgtacgcgtcaccggcggtgaggtcggcgcggcgagttccctcgccccgaagatcggtcccctcggtctctcccccaagaagatcggagaagatatcgccaaggaaaccggcaaggact

SEQ ID NO: 264014 - DNA, 241 bp, Glycine max
cccacgcgtccgcccacgcgtccgtccacgcttccgcccacgcgtccgtctccctcgttctcggactagctctgtgcattcttctctcgctctctgccttccatcacactcggcatttcctttcccaagatagtataagatggcagacactgacgatattcaacctcttgtttgcgacaatggaacaggaatggttaaagctggatttgctggaaatgatgccccacgtgctggggttccc

SEQ ID NO: 264015 - DNA, 334 bp, Glycine max
gggtcgagccgcgcgtccgcccacgcgtgcgcccacgcgtccgcccacgcttccgtccacgcgtgcgtctccctctttctgtcacgttctctgtgcattctgctctcgctctctgccttccatcacactcggcatttcctttcccaagatagtagaagatggcagacactgaggatattcaacctcttgtttgtgacaatggaacaggaatggttaaggctggatttgctggagatgatgccccacgtgctgtgtttcccagcattgtatgtcgtcctcgtcacactggtgtgatggttggcatgggccaaaaagatgcatatgttggtgatga

SEQ ID NO: 264016 - DNA, 273 bp, Glycine max
gttgccgggctctaccgaggtttcaacatcttatgtgttggaatcatcatgtatcgtggtctgtgcttgggaatgtatgattctgttaaaccagttgtcctcacagggtcattgcatgatagcttttttgccagctttgcccttggatggctcatcaccaatggtgcatgtctagcatcatacccaatagacactgttagaagaagaatgatgatgacctctggtgaagctttcaagtacaagagctccttttatgcattcacacagatcctc

SEQ ID NO: 264017 - DNA, 296 bp, Glycine max
ctctaattacatttctaatctcattctccttctgttcaaacactctctctcatggcatcagataagaagattaggatcggcatcaacggatttggaaggattggccgtttggtggccagggttgcccttcaaaggaatgatgttgaacttgttgctgtcaacgatcctttcatcaccactgattacatgacatacatgttcaagtacgacaccgttcatggccagtggaagcattttgatgtgaaagtgaaaggactttaaaaccttctttttggtgagaaacccgtcaaccgttt

SEQ ID NO: 264018 - DNA, 345 bp, Glycine max
  unsure (1)..(345): unsure at all n locations
cccacgcgtccggcgaaaacccccaactccaacctctgttcatcgtctaccgcgctttctttgcaacgagaactatgattaagctttttaaagtaaagganaagcagagagaacttgcagaaaatgcaagtgcggaccacctgttaagaagcaaagtgctggagagttgcgtcttcacaaagatataagtgagctgaatctaccaaaatcatgtaccatgcaattccccaatggcaaagatgatctgatgaacttttgaagttcaattcgacctgatgatggatattacttanggtgcacatttttggtttcctttcaagtgtctccatctatccacacgaagca

SEQ ID NO: 264019 - DNA, 273 bp, Glycine max
  unsure (1)..(273): unsure at all n locations
cgtccgggcaagagatggggatgtggcactcttctttgtactctcaggtaccggaaagaccactctttggagggatcacaatangtatgtgatcggagatgatgaacactgttggggtgacaatggtgtctccaacattgaaggtggttgctatgccaaatgcattgacctctcacgggagaaagagccatatatttggaatgcaatcaggtttggcacagtggttggaaaacgtggtgtttatgagcacgaccgagaagttgattactctga

SEQ ID NO: 264020 - DNA, 438 bp, Glycine max
ctatcgacccaggcgtccgtccacgcgtccggcgaaaacccccaactccatccttttttcatcgtctaccgcgctttctgggaaggttaactatgattaagctttggaaagtaaatgaaaagcatagagaacttgcagaaaatgcaagtggcggaccacctgttaagaagcaaagtgctggacagttgcgtcttcacaaagatataagtgagctgaatctaccaaaatcatgtaccatgcatttccccaatggcaaagatgatctgatgaactttgaattttcaattctacctgatgatggatattacttaggtggcacatttttgttttcctttcaagtgtctcccatctttccacacgaatcaccaaaggttaaattgtaagacaaaaggtctatcatccaaatattgacttggaaggaaattgtttgcttaacat

SEQ ID NO: 264021 - DNA, 155 bp, Glycine max
ggcaaagatggggatgtggcactcttctttgtactctcaggtaccggaaagaccactctttggacggatcacattaggtttctaatcggaaatgatgaacactgttggggtgacaatggggtttccaacattgaaggtggttgctatgccaaatg

SEQ ID NO: 264022 - DNA, 387 bp, Glycine max
ggcaaagatggggatgtggcactcttctttgttctctcaggtaccggaaagaccactctttggaccgatcacaataggtatctaatcggagatgatgaacactgttggggtgacaatggtgtctccaacattgaaagtggttgctatgccaaatgcattgacctctcacgggagaaagagccagatatttggaatgcaatcaagtttggcacaatgttggaaaacgtggtgtttgatgagcacgaccgagaagttgattactctgacaaatcagttacagaaaatactcgtgctgcttatcctatagagtacattccaaatgcaaagttaccttgcgttggcccttatccaaagaatgtcatacttttggcatgtgacgcatttggg

SEQ ID NO: 264023 - DNA, 378 bp, Glycine max
  unsure (1)..(378): unsure at all n locations
cccacgcgtccgcacgttccgagttttctgatcgctcatagagagttcgacgcggcggttgcagaagaagattgcaagatgaagttcaacatcgcgagtcccaccactggatgccagaagaagctcgagatcgacgacgatcagaaactacgagcattttgggacaagaggatctcacaggaggtcagcggagatgcacttggtgaggaatttaagggctatgtcttcaaaattactggaggttgtgacaaacaaggattcccgatgaaacagggagtgcttactcctggtcgtgttcgacttttgcttcacaggggaactccttgcttccgtggatatggaaggcgtaatggagaacgtangagaaagtctggtcgt

SEQ ID NO: 264024 - DNA, 300 bp, Glycine max
cccacgcgtccggactgcccaagatgtatcgacaatgttacggtgcgggcaaaaaaccatgatctttgggatcaacaatggtggatacaccatcgaggttgaaattcatgatgggccgtacaatgtgattaagaactggaattacactgggttgattgatgcaatccacaatggtgaagggaaatgctggactgccaaggtgttctgtgaagaggagctagttgaagcaattgccacagccacaggacccaagaaagactccttatgcttcattgaggtgattgttcataaggatgacac

SEQ ID NO: 264025 - DNA, 431 bp, Glycine max
aaaaaataacagaaaaaaaagaaaaagataattctgatttacttgttcctgagaacattttgtccgctagacgtcgtagagaattgagaattctaatttgtttaaatccaaataatataaatagtatgcatagaaacacaatattttataatccaaataaagtccaaaatggttttccacttttgactaaaaaaagaaaatattttgagaaagataaaaaaaaactaatgaatttcaaaatttttctttggccaaaatatcgattagaagatttagcttggataaatcgatattggtttaatacccataatggaagcgcgttcagtatagtaaggatacatatgtatccgcgaatgaaaattcgttatccaaattgcttctattaccatattatatggaaatagagacaaatatatcattctatctttgat

SEQ ID NO: 264026 - DNA, 359 bp, Glycine max
gctatttctgagcttgacaccttgaatgaggagtcatacaaagatagcaccttaatcatgcaacttctcagggacaacctaactttgtggacttctgacatcccagaagatggagaagatgcccagaaagtgaatggcactgccaagcttggtggaggtgaggatgcagagtgagtccgatggatgatggaatcttccataggattcgatgcatgcgtttgggaatgaaacatgagggccgattacttatctgtgtattagctagagatagggattctattggttcctctttgtttcctgttggattgcccaatacttcccgataggggaaagagatactccatttgtgctatatttat

SEQ ID NO: 264027 - DNA, 281 bp, Glycine max
gttgccgggctctaccgtggtttcaacatctcatgtgttggaatcatcgtgtatcgtggtgtgtactttggattgtatgattctgttaaaccagttgtcctcacagggtcattgcaggatagcttttttgccagctttgcccttggatggctcatcaccaatggtgcaggtcttgcatcatacccaatagacactgttagaagaagaatgatgatgacctctggtgaagctgtcaagtacaagagctccttggatgcattcacacagatcctcaagaatga

SEQ ID NO: 264028 - DNA, 570 bp, Glycine max
  unsure (1)..(570): unsure at all n locations
ggcccaaaaaannttaaattaggaaaaaaaaaaaaaaaaattataaaattattaaanaaaaaaaaaataatgagaaattgtaaaaatataaaaaacataaaaaaatcataaaataaaattaaaataataaaaaatataaaaaataaaataataaaaaaaaatattatataataataaataataaaataaaaaataatataaaaataaaataaaataataaaataataaaataaaataaaaaaaatatattaaaaatataaattaataaaaatttatatataaaaaaacaattaaataaataaaaaactaaataaaaaaatattaaaaattattatataaaaaataaaataaaataaaataataatattctaaataataaaatattataataaaaataataaaataataaataataattaaaaataataaacatatataaattaataaacataaattataaaataaaaaattaataaaaaaataaaatatattataattaatacaaaaataaataaattattaaataataaaaaataaaaaattaatatataaataaataaatatattaat

SEQ ID NO: 264029 - DNA, 407 bp, Glycine max
cttctccttctcaatcttgtaattctatttcctccaccataatgctgcgcaagcttgtgtgagggccacgcaagaacaagcctggcacagttcccgttcacctcaacgtctatgatctcaccccaatcaacggctatgcctattggcttggccttggagtctaccattctggggttcaagttcatggattggaatatggttttggtgcgcacgagcacgacacaacggggattttcgaagtccaacccaaacactgccctgggttcactttcagaaagtcaattttcatcggaacaacagatctgggtccgaaggatgttcgagcattcatggagaagctggctcaggattactccggcaacacctatcatctcatttccaagaattgcaaccatttctgtaacgat

SEQ ID NO: 264030 - DNA, 430 bp, Glycine max
cggaattcccgggtcgacccacgcgtacgcccacgcgtccgcccacgcgtccgcccacgcgtccgcccacgcgtccgcggacgcgtggggtttcggtgaataagtgtcgtttaaagatgcagagtctgcaacagaaggcttccgaatggagcggtgtttccatagacgacgctttcggcatcgacgacaccaatctcttccagaaactcggcctccaaaccttcattaacctctccaccaatttctacaacagggtttacgatgacgaggaagaatggtttcgttcaatattcgcgaattctgagaaggagaatgccattcaaaaccaatacgagttcttcgtgcagcgaatgggtggtcctcctctcttttctcagagaagaggacatcctgctctaattgctcgacatcgaccattttctgtcacgca

SEQ ID NO: 264031 - DNA, 323 bp, Glycine max
  unsure (1)..(323): unsure at all n locations
ttctgttgcgtttgcttttcctccacccatccacaaacgaacacacactttgattgaaaagggggcgtgtgggcacaaagacagtgaagaagtcctcgcggcaagtgatcgagaggtactactctcgcatgacgctggacttccacacgaacaagaaggttctggaagaggtggccatcattccctccaagaggctccgcaacaagatcgcgggattctccacccacctcatgaagcggatccagaagggtcccgtacgtggaatctccctcaagctgcangaagaggagcgcgagcgccncatggacttcgtccccgatgtc

SEQ ID NO: 264032 - DNA, 384 bp, Glycine max
ggaaaacgaccaaaacttcaactacaactcgcagcctcaggcttcgtacaaagttgcagtgcttggtgctgctggagggataggtcagccactcgcgcttctcatcaagatgtcgcctctagtttccgacctgcatctctatgatattgcgaatgtcaagggagttgctgctgatatcagtcactgcaacaccccctcacaagtcagggatttcactggagcttctgagttggcgaattgtttgaaggatgtgaatgttgttgtcatacccgccggtgttccaaggaagcctggcatgactcgtgatgaccttttcaacatcaatgccggcatagtcagggacttgggtttctgctgtgcggataaatagccctgatgctttta

SEQ ID NO: 264033 - DNA, 406 bp, Glycine max
ggcaccggtgaaatcagttatagttttcttgtgagacaggaggggcacaaacgggtgatgggtcatgttcttggaatccacatggtcacgaatttgcgacaggttcaagggataagacagtgaaaatctgggccatagagagggagtctgtcaagcagcttatgtctttacctcaatttacgagtagtgtaacagcattatcttgggttggtctccatcatcggaagaataatggacttctagctgttggaatggaaaatggccaaatagagttgtggaatctgtcttataacagagcacatgatgggagcatagcagcaccaggtttggctgcttctcttgctgtacgtatagatccttttatatgtcatgcgtctactcgtaaccgtttatcatgtagaaaaat

SEQ ID NO: 264034 - DNA, 296 bp, Glycine max
ctcttcttctcttgcggctagggctttagcgcagctccttctagatttaaggaagatggggaaggaaaaggttcacatcaatattgtggacattgtccatgtcaactctggaaaatccactaccactgatcacctgatttacaagctcggacgcattcacaagcgtgttattgagaggtcagagaacgaagctgctgacatgaacaagaggtctttcaagtatgcctgggtgctggacaaacttaaggctgagcgtgaaagaggaatcaccattgatattgctttgtggaaatttg

SEQ ID NO: 264035 - DNA, 331 bp, Glycine max
cggacgcgtgggtttcagaggcaccgaatgttcttacagttgcattaaagagatttcagggtgggaaaggtgggaagctcaacaagcctattcaatttcctgaaatacttaacttggcacctttcatgagcgggactagtgataaatcacccatatacagattgtatggggtagttgttcacttagatatcatgaatgctgccttttcgggtcactatgtgtgctatgtgaagaatatccaaaacaagtggttcaaggttgatgacagtggtggtgacagctggtgaaatggaatagaagtcttgacaaaaagggagcaatatatgccttt

SEQ ID NO: 264036 - DNA, 280 bp, Glycine max
cgatcccttggtttccaaaggcaccgaatgttcttacatttgcattaaagagatttcagtgtgggaagtgtgggaagctcaacatgcctattcaatttcctgaaatacttaacttggcacctttcatgagcggcactagtgataaatcacccatatacagattgtatggggtagttgttcacttagatatcatgaatgctgccttttcaggtcactatgtgtgctatgtgaagaatatccaaaacaagtggttcaaggatgatgacagtgtggtgacagc

SEQ ID NO: 264037 - DNA, 397 bp, Glycine max
  unsure (1)..(397): unsure at all n locations
agaaaacctaagcttagatttggaaccaaagaaaagaagaagggaaggaattgatcgttgagaatgcagggaggaaagaaagcgggagagtccattaaggaaacagctacaaacattggtgcttctgccaaggctggcatggagaagaccaaggccactgtccaagagaaggcagaaagaatgacagcacgtgatccggtgcaaaaggagttggcaacccaaaagaaagaggcaaagatgaaccaggcggagctggacaagcaggcggcgcgtcagcataacacggcggccaaacagtccgccaccacggctgggcacatgggacatggccaccacaccaccggaaccgggactggaaccgcacgtattcaccaccggngatatggcagccatgggg

SEQ ID NO: 264038 - DNA, 261 bp, Glycine max
ctccttccgttacaatgaaattgagaatggaatgctgtgggaagttgaggggaagtgggttgttaagggagcagttgatgttgacattggtgcaaacccttctgctgagggtggagaagatgagggagtcgatgacgcagctgttaaggttgttgacattgttgatacattcagacttcaagagcaacccgcttttgataagaaacagtttgttaccttcatgaagaggtttatcaagaatttgactcccaagctcgatgc

SEQ ID NO: 264039 - DNA, 357 bp, Glycine max
  unsure (1)..(357): unsure at all n locations
ccgggncgaccgacgcgtccgcggacgcgtgggtttcagaggcaccgaatgttcttacagttgcattaaagagatttcagtgtgggaaaggtgggaagctcaacaagcctattcaatttcctgaaatacttaacttggcacctttcatgagcgggactagtgataaatcacccatatacagattgtatggggtagttgttcacttagatatcatgaatgctgccttttcgggtcactatgtgtgctatgtgaagaatatccaaaacaagtggttcaaggttgatgacagtgtggtgacagctgttgaattggataaaatcttgacaaaaggagcatatatgccttttctaatccagg

SEQ ID NO: 264040 - DNA, 430 bp, Glycine max
ttcaagaacaatttattgcacaaatattgacatagaagcttactcaagccgatgtcaaacactgctttgaatctatttgtggagaggttcaacggttgaggcttcttggagattaccatcattcaactcgaattgcttttgttgagttcacagtggctgagagtgcaattgcagctctaagctgtagtggggtgattctgggttcactgcccataagggtaagtccatcgaagacaccagttcgatcacgtgctcctcgccctactatgcactgaatcaactttccatgtttctggggttgattgctgctgagatatatttacatatatatatatacatagaaacagctgtgttctaaggaacatgtggcatttagttggtacttttgtcctcatgtcttacagtatgggtactttgctttcccttgggg

SEQ ID NO: 264041 - DNA, 312 bp, Glycine max
  unsure (1)..(312): unsure at all n locations
cccacgcgtccggtgatttcagtgagtgatcggtgttcacttgatctcatcataatcgtcagcggtcgattgagaagatgccgatcagaaacatcgccgtccgaaggcctgaagaggcgactcaccccgacacgttgaaggcggctttggctgagttcatctcaaccttcatcttcgtgttcgccggctcaggctccggcatcgcctacaacaagctcaccgacaacggcgctgccacccctgccggcctcatctncgcctccatcgcccatgcattcgccctcttcgtcgccgtctccgtcggcgccaaca

SEQ ID NO: 264042 - DNA, 324 bp, Glycine max
  unsure (1)..(324): unsure at all n locations
ataatgatgatattgaggttgaggttgtggagggtgttgatctttggttgaagattcaagaggaggcaaggttagatgttgatcaagaaccaattttatccagctactatttcagttccattttgtctcacaaatctttggagagtgccttggccaaccacctctccacaaatttgagcagcttgagccttccaagcagcaccctttttgaccttttcatgggtgttttggttgatgatggagatgatgacatcgtangtgctgtgaaggatgatttgatagctgttaaggagagggaccctgcttgcataagttatgtgcatt

SEQ ID NO: 264043 - DNA, 372 bp, Glycine max
  unsure (1)..(372): unsure at all n locations
gagagttntaacagacactgcagattttttttttctacttttcgccacctctttatcgggaaggacggaaaaaagcatcgaactgacctgattattatcttctaatgatacaacaaatcacacacacacagctgttgtctccactgatttatcaagataacgattgaaaacagaacatcactaataaccttcttggagctgtcaagccatcatgataatctcttgatcccgtttaatgattggaagaaccggaagcaggttccgtttaaaaaagaaaatggtcaaatggtcacaaacccacttttccaaagtcaagaaaacattggcgtgaatattacaatagaaccaatgcaacgcaagaagattgatcac

SEQ ID NO: 264044 - DNA, 330 bp, Glycine max
aaccaacattatttcaacaaatatatttatttattttttttttaattattttttttttttaatatactctttatctctttttttttttttttatttataggatatatttttctttttaatatttatatattttttatataaatttatcttattttatttttaattttttttaataatatttttttaatttttttccttatttttattttttatataatattttctttttttttattattcctttcttttatttttttttttttattatatatattttacttttttttatatataattttaattatttatctcttatttttttcttttttt

SEQ ID NO: 264045 - DNA, 334 bp, Glycine max
cccggaattcccgggtccacccaacccgtccgcgcaaattcaaaggaggatctctcttgcgttttctctagggtttcgctatggcgtccaaacgaattttgaaggagcttaaggatttgcagaaggatccttcaacatcttgcagtgccggtcctgttgttgctgaagatatgttccattggcaagctacaattatgggtccttcagacagtccctatgcaggaagtgttttcctagagaccattcatttccctccagattattcctttaagccacccaaggttgcattcaagacaaaggttttccacccaaatataaatagcaatggaagcat

SEQ ID NO: 264046 - DNA, 211 bp, Glycine max
atgaaattgtgaaggaagtctcttcctacttgaagaaagtaggatacaaccctgacaagattgcttttgttcctatctctggttttgagggagacaacatgattgagaggtccacaaaccttgactggtacaagggtccaactcttcttgatgcacttgaccagattagtgagcccaaaaaggccttttaccagcccctcaagctttccct

SEQ ID NO: 264047 - DNA, 384 bp, Glycine max
cccacgcgtccgttctaatctcattcttcttctgttcaaacactctctctcatggcatgagagaagaagattaggatcggcatcaacggatttggaaggattggccgtttggtggccagggttgcccttcaaaggaatgatgttgaacttgttgctgtcaacgatcctttcatcaccactgattacatgacatacatgttcaagtacgacaccgttcatggccagtggaagcattttgatgtgaaggtgaaggactctaagacccttctctttggtgagaagcccgtcaccgtttttggaatcaggaaccctgaggaaattccatggggtgaggttggtgctgattatgttgttgagtcaactggtgtattcactgacaaggac

SEQ ID NO: 264048 - DNA, 216 bp, Glycine max
  unsure (1)..(216): unsure at all n locations
aagacggagttngacgtggggatgaaggagtgtgagagcaagggtggaatagcagtgattaaggcggtgagggcattgacgaaactagcgctgaaggaggcgaangagttgatcgaagggttggcgaagaagttcaaggaagggatttcaaaggacgaagctgaagatgggaagaagcaacttgaagaagaaggtgccaaggttaccattgcttaa

SEQ ID NO: 264049 - DNA, 481 bp, Glycine max
  unsure (1)..(481): unsure at all n locations
ccggatttacngggtcgacccacgcgttcgggccgggcctttgccgacccccccgccggtggttgatgataaaacggagttcgacttggtgatggaggaggtgccaaccaaccctcgaatcccgttaattaaggcggggagggcattgactaacctaccgctgaaggaggcgaaggagttgatcgaagggttgccgaagaagttcaaggaagggatttcaaaggacgaagctgaagatgcgaagaagcaactcgaagaagctggtgccaaggttaccattgcttaaacactgtttagctgcagcatatatgttctgcttcttcttttgttggttggagttgagttcaccagtacactgtaatttcatttccattttgtctggatttcaatctcttatttggcatgaggaaatatgaaggcctattttaaattattttttttaatgcgtatgaggtggttgttggaaaaaaaaatccatatt

SEQ ID NO: 264050 - DNA, 408 bp, Glycine max
caccaacgccaaacaagccctaaatctctcttctctttcttcttcttcctttaaccatgagagagatcttgcacgttcagggaggccaatgcggtaaccaaatcggttccaagttctgggaggtgatctgcgacgagcacggcatcgatcccaccggaaagtacaacgaggaaggcaacagcagcatccaactcgaaaggatcaatgtgtattacaacgaggcctctggcggaaggtacgttccccgtgccgtgcttatggatctcgaacctggaaccatggacagcatcagatctggcccctacggcaagatcttccgccccgacaacttcgtcttctgccagtccggcgccggtaacaattgggccaaaggtcattatactgaatgcgccgagctgatcgacttcg

SEQ ID NO: 264051 - DNA, 409 bp, Glycine max
cccacgcgtcctcccacgcgtccgcccacgcttccgctcgtgaactcaaagccggacttgacgggctaaagcacaagtttgtcttctggtacactcgtcgaacacctggagttcgaaatcaaacatcatatgaggacaacataaagaaaattgttgaatttagtacggttgaaggattttgggtctgctactgccatcttgctcgtcctgcttctttacctagtccaacagatttgcaccttttcaaggaaggaatccgtcctctatgggaggactctgctaactgcaatggtggtatatggattatacgattcaaaaaggttgtcctctgcccgttttgggaggaccttgttcttgcctttgtgggtgaccaattggattattgggataacatatgtggtgcagtact

SEQ ID NO: 264052 - DNA, 420 bp, Glycine max
cccacgcgtccgggaaaatggaaggcaccattgattgataacccagatttcaaggatgaccccgacctctatgttttccccaacttgaagtacgtggggattgaattgtggcaggtgaaatctggtactttgtttgacaatgtcttaattactgatgatcctgagtatgctaagcagctggttgaagaaacatggggcaagcacaaggatgctgagaaggcagcatttgaggaggccgagaagaagagggaagaggaggaatcaaaggatgacccagttgactctgatgctgatgaggaagaggaagatgctgatgaagctggcaatgactccgatgctgaatcaaagacggaagctggagaagacaccaaggaagagggtgtacatgatgaactctaggaagtttgcaaaacggataaa

SEQ ID NO: 264053 - DNA, 296 bp, Glycine max
aatacccgggtcggccgacgcgtccgggaaaactaccaaaacttcaactacaactcgtttcctcaggcttcgtacaaagttgcaggtctgggtgcttctggagggataggtcagccactcgcgcttctcatcaagatgtcgcctctagtttccgacctgcatctctatgatattgcgaatgtcaagggagttgctgctgatatcagtcactgcaacaccccctcacaagtcagggatttcactggagcttctgagttggcgaattggttgaaggatgtgaatgtttgtgtcatacc

SEQ ID NO: 264054 - DNA, 447 bp, Glycine max
ggtctttaagtttcaactttctttgcttagggcaacctcctttctctgtgactctgagtatcgtatcgttttattattatttctaattctctcttatcaggtccattgaatatgtctccgtcgttggatcttcctcccaagggtggcttcagttttgatctatgccgaagaaacgcaatgcttcaaaacaagggcctcaaagccccaacctttctcaaaactggcaccactattgtcggtttagttttccaggatggtgtcattcttggtgctgatactagggcaactgaaggacctatagtggctgataaaaactgtgagaaaattcattatatggcacccaacatatattgctgtggagcaggcacagctgctgatacagaggctgtaacagacatggttagctcacagctgcaattacatcgctaccatactggtcgagaatca

SEQ ID NO: 264055 - DNA, 356 bp, Glycine max
ccggttttgaattcccgggtcgagcccacgcgtccgcccacgcgtccgttctaatctcattctccttttgttcaaacactctctctcatggcatcagatgagatgattaggatcggcatcaacggatttggaaggattggccgtttggtggccagggttgcccttcaaaggaatgatgttgaacttgttgctgtcaacgatcctttcatcaccactgattacttgacatacatgttcaagtacgacaccgttcatggccagtggaagcattttgatgtgaaggtgaaggactctaagacccttctctttggtgagaagcccctcaccgtttttggaatcaagaaccctgaggaaat

SEQ ID NO: 264056 - DNA, 286 bp, Glycine max
  unsure (1)..(286): unsure at all n locations
ccggtcctgaattcccgggtcgagcccacgcgtccgggaaaactaccaaaacttcaactacaactcgtttcctcaggcttcgtacaaagttgcaggggggggtgctgctggagggataggtcanccactcccgcttctcatcaaaatgtcgcctctagttcccgacctgcatctttatgatattgcaaatgccaagggagttgctgctgatttcagtaactgcaacaccccctaacaggccagggatttcactggagcttctgagttggcaaattgtttgaaggat

SEQ ID NO: 264057 - DNA, 417 bp, Glycine max
gaattatcgcctcgtcgaccgactcgtccgcgcatattcaaaggaggatctctcttgcgttttctctaggttttcgctatggcgtctaagcgaattttgaaggagcttaaggatttgcagaaggatcctccaacatcttgcagtgccggtcctgttgttgctgaagatatgttccattgccaagctacaattatgggtcctccagacagtccctatgcaggaggtgttttcctagtgaccattcatttccctccagattatccctttaagccacccaaggttgcattcaggacaaatgttttccacccaaatataaatagcaatggaagcatttgccttgatatattgaatgagcagtggagccctgctctaaccatttccaaggtgttgctctcaatttgttccctattgacggat

SEQ ID NO: 264058 - DNA, 481 bp, Glycine max
  unsure (1)..(481): unsure at all n locations
ggtccgtgatttcccgggtcgacccacgcgttcgggctggcattggttgaaaattccggtccccgttttggccccggtctgcgtaagcagattaagaggagggaagttagtcaacacagcaggtttttctgtgaattttgtggaaagtatgctgtgaagaggaaacctgtgggaatatggggatgcaaggcctgtggtaaagtgaaagctggcggtgcttacactttgaataccgcaagtgccgtgactgtacggagcaccatcaggaggttgagggagcaaactgagagttaagcttttttgtttatgctatcaattactattagactttgcatgaagtgcctagtttgtattcactgaactgcactggttgtattcaaagtaaactccttaagtttaattntgagatgactcttttaattttaattggttggaactttggcggggtgattttgcttcataagttcattttattggttgc

SEQ ID NO: 264059 - DNA, 265 bp, Glycine max
  unsure (1)..(265): unsure at all n locations
aaggntcgacccacgcgtaacggaagaatcactcccttatccatttccacaccttaccatggcctaaaccaacgctctttcttgggcgtttattctacgctctcccaaccgccaatctttaaccctaagagcgaaccatattggaagagtaaattaccggaaaccgaataaccttttctccgttaaagcctaccccaaaaagattgccttttaccaacatttccacgctctgctattcatacccagcatttttcatatcttttcc

SEQ ID NO: 264060 - DNA, 371 bp, Glycine max
cggtcctgaattaccgggtcgacccaccgcgtccgattaagggttatatattgagttattcgattggagattgttagctctgcagcaacctcccagatgtgtgggctggggaaccgtaattattgaggggggtcctccacccttggaattattaaaattcgcctgggagacctggggtttcttggagttggagaacaatgggatatccatagagttgatggacaccgtggagagattgacaaaggagccctacaaaaggtgtatggagcaaaggttcaaagaaatggtagcaggcaaaggtttggagtctgctcaatctgaaatcaatgatttggattgggaaagcactttctttttcagccaccttcctg

SEQ ID NO: 264061 - DNA, 283 bp, Glycine max
  unsure (1)..(283): unsure at all n locations
cgcaccagtttcaccgcacgaatatcttgttgtttggagcgatccgagaaaaactctgtaaacatgttggtttaccaggacctccttacaggtgatgagcttctctctgactccttccgttacaaggaaattgagaatggaatgctgtgggaagttgaggggaagtgggttgttaaaggagcagttgatgtagacattggtgcanacccttctgctgagggtggaggagaagatgagggagttgatgatgcagctgttaaggttgttgacatttgtgacacat

SEQ ID NO: 264062 - DNA, 448 bp, Glycine max
ctctctgctcctagggtttctccttcgagtgagggaaatggctcccaaaccgcctagtacgggtctgtttgttggactgaacaagggtcacgtcgtcaccaagaaggaattgcccccacgcccctcagatcgtaaggggaaaacaagcaagagggtgcactttgtgaggaacctcataagagaggttgctggttttgcaccctatgaaaagcgtataactgagttgctgaaggttgggaaggataagagggcactgaaggttgcaaagagaaagcttggaacccacaaacgtgcaaagaagaagcgtgaggaaatgtccagtgttctcaggaagatgagggctggtggtggctgagacaagaagaaataagtcttatttatttactcttttccagattcactagatggacctgtgtattgatggacgagctttcatatttttgctttg

SEQ ID NO: 264063 - DNA, 440 bp, Glycine max
ggcggcgctgtggcggacgcgccggcggtggttgaggagaagacggagttcgacgtggtgatcgaggaggtgccgagcaacgctcgaatcgcggtgattaaggcggtgagggcattgacgaacctagcgctgaaggaggcgaaggagttgatcgaagggttgccgaagaagttcaaggaagggatttcaaaggacgaagctgaagatgcgaagaagcaactcgaagaagctggtgccaaggttaccattgcttaaacactgtttagctgcagcatatatgttctgcttcttcttttgttggttgtagttgagttcaccagtacactgtaatttcatttccattttgtctggatttcaatcttttatttgtaatgaggaaatatgaggtcctaattttaaaatattttttttaaatgcggatgaaggggtttgtggaaaaa

SEQ ID NO: 264064 - DNA, 163 bp, Glycine max
cgcaaattcaaaggaggatctctcttgcgttttctctaggttttcgctatggcgtcgaagcgaattttgaaggagcttaaggatttgcagaaagatcctccaacatcttgcagtgccggtcctgttgttgctgaagatatgttccattggcaagctacaatta

SEQ ID NO: 264065 - DNA, 253 bp, Glycine max
  unsure (1)..(253): unsure at all n locations
tatttcaattaataaacttttgttcattttatctcatcataatcttcagggagattttttataaaatgccggtcggaaacatcntcctcttaattccttaataatctactcacccctacacgtttaattctacttcttcttttttcattctcaaccttcatcttctttttctcctgctcaatctccctcatctcctactacaatgctacctacaacttctcttccaccccatctctaccatattcttctcctt

SEQ ID NO: 264066 - DNA, 163 bp, Glycine max
cccacgcgtccggtgatttcagtgagtgatcggtgttcacttgatctcatcataatcgtcagcgtggattgaagaagatgccgatcagaaacatctccgtccgaaggcctgaataggcgactcaccccgacacgtttaaaggcgcttttgctgagttcatctc

SEQ ID NO: 264067 - DNA, 207 bp, Glycine max
cttctccttctcaatcttgtaattctatttcctccaccataatgctgcgcaagcttgtgtgagggccacgcaagaacaagcctggcacagttcccgttcacctcaacgtctatgatctcaccccaatcaacggctatgcctattggcttggccttggagtctaccattctggggttcaaggtcatggattggaatatggttttgggg

SEQ ID NO: 264068 - DNA, 357 bp, Glycine max
ctcaaagcaacacaagaacactctcttgaacattcatggatccagtgagcgtgtggtgtaggacgcgcttggctacggtggatcccgagatccatgacctcatcgagaaggagaagcaccggcaatgccgcgggatagagctcatcgcctccgagaacttcacctacttagcagtcatcgaggccctcggcagcgccctcaccaacaaatactacgaggggcatgcccggcaaccgctctcgggggggaccaaattcatggacaagatcgaaaacttctgccgttaaccccccttcaaggccttcaacctggacgcccaatcctggggggcaaatgtcaacccttaccccggttccc

SEQ ID NO: 264069 - DNA, 263 bp, Glycine max
  unsure (1)..(263): unsure at all n locations
gaatgataaggtatatgaacaatccttaacagatacttctacaagatgttctattttgtcggagaaaaaaattcgctcaaaaaaaacgcgaaaatattttaatcgtaacttagaggatttgttacgtagaaaaagaaagatagattcatattcccatacatataaattatataggaacaaaaaaaatcttggattactttttgaaaaaaaagtagaaatccatttttttggagtaaaaatactattccaattatttatatnag

SEQ ID NO: 264070 - DNA, 285 bp, Glycine max
cctcaccccccccccccccccacccccccccccacttccctcaccccttcctttccttcccccctatattctcctccccccccccccccccccattctcccccctctctcccccacaccccttccctccccccccccccccccccctccacccccccatcccctccccccccccccccctttcccctcccccccccccccccctctcccccttccctcccaccccctcctcctcctcccccccccccctcccccccttcccccccccctcccccccccccccccc

SEQ ID NO: 264071 - DNA, 240 bp, Glycine max
  unsure (1)..(240): unsure at all n locations
cgttcttccactccttctctatcttcatcaatggtgttcgtttatgctcanaaatcaaaancctacttgaaggagattttattcaagttcaagagaacaacaaaannaaaaacccattaccnttccaaaattcnntttattaatcacnacaataacaaatataacacttccaaatacccatttttatttccctttaacaacaaagacattttttcacaaataatatcttcttacatttcc

SEQ ID NO: 264072 - DNA, 328 bp, Glycine max
gttgttttcgttcctctgaagtctggagtggtggagcttggttcgtttgaaatggtgcctgaagagcagggtgttgtggaaatggtcaggacagcatttggggaatccagtcctggacaggcaaaggtgtttccaaagatttttgggcatgagttaagcctgggggatacaaaatctcagtctataactattagtttctccccaaaggtggaagatgatccgggtttcacttcagactcctatgaagttcaagcactaggggtgaaccatgcttatggaaatctttcaatgggactttagggacggtaatgaaggaacaatggtttct

SEQ ID NO: 264073 - DNA, 249 bp, Glycine max
cccacgcgtccgcttctccgccacttctgaatctattgaatcaacaatcatgtcggacgaagggcaccatttcgagtccaaggccgacgccggagcctccaaaacctaccctcagcaagccggtaccatccgcaagaacggctacatcgtcatcaaaggccgcccctgcaaggttgtggaagtttcgacttccaaaactggaaaagaacggtcaccgctaagtgtcacttttgtggaattgatattttc

SEQ ID NO: 264074 - DNA, 427 bp, Glycine max
gagaaagtgttgacaatggagtcccaagctgaagctcttggccagttgacaagtgatgatcgggagggaaagtttgctttgcttgagggctcgtccgttgatgacgaccttgcgaatttgaaaaaagaattatctggtgcctcaaagaaaggggaccttcctcctggaagaagtaccaccagcgccaacactgggattccatttcgagatgctgagatcgagttggaacttgatcaattgaggcaaagagcaaaggaattttgaagcatggattcttttttgtttcttcatatcaaatcttcaatttagtttctttatttctgatatcaacgttgtacagctaaaggccaatcacgatattgttcgactactggccaaaaattgattagaaaaatgaactgattagctgcatgctcttgtagctcat

SEQ ID NO: 264075 - DNA, 242 bp, Glycine max
gagagggaaaacccgtttcccgtgccaggattcggttgtttaatcaggacaagaacaattttaacactccgaaataccgttttgtggttcgctttagcaacaaggacattgttgcacaaataatatctgctagcattgccggcgatttagttcttgctacagcatattcacatgagctgccacgatatggtcttgaagtaggacttacaaattatgcagcagcttattgcactgttctcctg

SEQ ID NO: 264076 - DNA, 193 bp, Glycine max
  unsure (1)..(193): unsure at all n locations
cacttttgattttattcaatcaacaatcatntcngaggaaggacaccatttatagtccaagggccacnccctatccttcaaaacctaccctcatcaaaccaaaaccatcctcaagaacggatacatcgtcatcaaatgccgcccctttaatgttgttgaattttttaaccacaaaactttttagcacaaaaat

SEQ ID NO: 264077 - DNA, 298 bp, Glycine max
  unsure (1)..(298): unsure at all n locations
cccacgcgtccgggtggagtcatgacaaagttgattcccagaaacactgttatcccaaccaggaaatctcaggtgttcaccacctatcaggaccagcagactacagtctccattcaggttttcgaaggcgagaggagtctcacaaaggattgccgccttcttgggaaatttgatctgtctggaattcctccagccccaaggggtacgcctcaaattgaagtgaccttcgaagttgatgccaacggcattctaaatgtgaaggcagaagacaagggcactggntaatcagaaaagatca

SEQ ID NO: 264078 - DNA, 350 bp, Glycine max
  unsure (1)..(350): unsure at all n locations
cgccaggctgttctnggagctacaaactcttttcctgatttgatattgactggacaccagcgtagtgcataatttgctcttgcaatgtgcccaactgaaccctatgttctttcaggaggaaaggacaaaacagtggtgttgtggagtattgaagaccatataacatctgctgccacagactccaaatctggtgggtcaattatcaaacaaaactctaaatctggagaaggcaatgataaaactgctgatggccctactgttggaccacgaggcatttattgtgggcatgaggatacagttgaagatgtgactttttgcccatctagtgcacaggagtttttgtatgttgg

SEQ ID NO: 264079 - DNA, 408 bp, Glycine max
  unsure (1)..(408): unsure at all n locations
aattcccgggtcgaccgacgcgtncgcgccatgcttgtctttgaacttccaactctttttcttgaattgaattgaactggcaacaaggagtatgcaaaatttgctcttgcaatgtccccacttgacccctatggtcttttcaggggaaaaggacaaaacagtggtgttgtggagtattgaagaccatataacatctgctgccacagactccaaatctggtgggtcaattatcaaacaaaactctaaatctggagaaggcaatgataaaactgctgatggccctactgttggaccacgaggcatttattgtgggcatgaagatacagntgaagatgtgactttctgcccatctagtgcacaggagttctgtagtgttggagatgattcttgnctcatcttatgggatgc

SEQ ID NO: 264080 - DNA, 375 bp, Glycine max
  unsure (1)..(375): unsure at all n locations
aattcccggctcgacccacgcgtgcgcgccgtgctgnncnnggagctacaaactctctatcttatttgatattnactgnacaccaaccgtcatttttaatatgcatctttcaatctccccaactgaaccctatattctttcaggaagaaaggacaaaacactggttttgtggagtattgaagaccatataacatctgctgccacagactccaaatctggtgtgtcaattatcaaacaaaactctaaatctttagaaggcaatgataaaactgctgatggccctactgttggaccacaaagcatttattgtgggcataatgatacagttgaaaatttgactttctgcccatctagtgcacaagatttctgtatttt

SEQ ID NO: 264081 - DNA, 314 bp, Glycine max
cccacgcgtccgcccacgcgtccggtgattgaagctagttagaacaagatgttgcggctagtctacactgcgattttctccgaaatgcttttgattctcacgctcgtcttcaaaaccccactgagaaaactcgtcatcgtttccctcgatagtgtgaagcgcggtcgcggtcccgtggtggtttccaccgtgggcgccacattgatggtggttctcgcttcgagcctctacagcatggccaagatccagcaacgcaccctcgaggccggcatagtcaaccccaccgaccaagtcctcatgtccaaacacatgct

SEQ ID NO: 264082 - DNA, 273 bp, Glycine max
tgcggccaatcacgcccttccctttctctctcgaacgacgtcgtcgtcgatgaccgcagatctgcttcttcctcccatccccttcttcccttcagaggttatgctactgaatccctgatccacacaaaagaaaacagcattactcctgagattccgccaactgttactgctgttaagaaccctacttctaagattgtctatgatgatcacaaccatgaaagatttcccccaggtgacccaagcaagagggcatttgcctacttcgtacttaca

SEQ ID NO: 264083 - DNA, 295 bp, Glycine max
  unsure (1)..(295): unsure at all n locations
gncaaagatggggatgtggcactctttttttgactctcaggtaccggaaagaccagtcttgcgaccgatcacaataggtatctaatcggagatgatgaacactgttggggtgacaatggtgtctccaacattgaaggtggttgctatgccaaatgcattgacctctcacgggagaaagagccagatatttggaatgcaatcaggtttggcacagtgttggaaaacgtggtgtttgatgagcacgaccgagaagttgattactctgacaaatcagttacaagaaaatactcgtgct

SEQ ID NO: 264084 - DNA, 330 bp, Glycine max
  unsure (1)..(330): unsure at all n locations
tcaaggctcanaaatcaaaagcgctcagttagatatatcaantcaacttcaacacaanaananagggaaaaacccattaccgtgccangattcngttgattaatcangacaagaacaaatataacactccgaaataccgatttgtggttcgctttagcaacaaggacattgttgcacaaataatatctgctagcattgccggcgatttagttcttgctacagcatattcacatgagctgccacgatatggtcttgaagtaagacttacaaattatgcagcagcttattgcactggtctccttttggcccgaaaaatcctcaaaacacttt

SEQ ID NO: 264085 - DNA, 390 bp, Glycine max
  unsure (1)..(390): unsure at all n locations
tccaagtgcactgggattggttcnttgtctggngctncnatnaaccgtgctgtttgatttggaactnntcccaccccttctataanacatcttnncccntccattattcancanattcatcatgctttcaatgaatgcaatggtactgtanaaaccatcaactacananatctctncccacattncaatgtataaaatgttgtgcaggagaaaaaagtccttgaagttattgtggaaaagggaatgcagaacgggcagaagattacattccctggcgaagcttatgaagcgccagacacaattactggggatattggctttgtcctttagcagaaggaacattccaaattcaaaaaaaagggctgaagattttttgtatagcacattttg

SEQ ID NO: 264086 - DNA, 470 bp, Glycine max
  unsure (1)..(470): unsure at all n locations
ggtccggaattcccgggtcgaccgcacgcgtccgcccacgcntccgagaaggcctgggcttagttgataagcataactggntgaggaagagagaggtagagtgaanaagatggcgtcnagcggaccggtaccgttttggagggcggcggggatgacgtacataacatactcaaacatatgcgcgaatctgctcaggaattgcctcaaggaaccctacaaggccgaatccctctctcgtgagaagctccattttgttctctccaaatgggtcgacgccaagcctgaaaaacctactattcgttcagacaccccagagcagtgatctggaatagttggaagctataaatgcataaatctttgagatctggaagttcattgtcattttgaacctttctgtgatgtttaattcctttgtttttttctctccatgaaatggaacatgcactggattttgatttgcacgggtaatc

SEQ ID NO: 264087 - DNA, 399 bp, Glycine max
  unsure (1)..(399): unsure at all n locations
ggatgtggcactcttcgtgtgtctctcangtaccnnnaaagaccaggtctgggttcctatcacaataggtatctaatcccacatgatgaacactgttggggtgacaatggtgtctccaacattgaaggtggttgctatgccaaatgcattgacctctcacgggagaaagagccagatatttggaatgcaatcaggtttggcacagtgttggaaaacgtggtgtttgatgagcacgaccgagaagttgattactctgacaaatcagttacagaaaatactcgtgctgcttatcctatagagtacattccaaatgcaaagttacctttcgtttgccctcatccaaagaatgtcatacttttggcatgtgacgcatttggggtactcccacccgttaacaag

SEQ ID NO: 264088 - DNA, 400 bp, Glycine max
  unsure (1)..(400): unsure at all n locations
gngacgtattgttcttctcccaggttatttatagattcaaaatggtgaagatttgctgcagggggggtggatatgtggggggtcctactatggcagtcattgcacttaagtgcccatccattgaagttgctgttgttgatatctctaaatcccgcattgcagcctggaacagtgaccagcttcctatctatgaacctggccttgatggtgttgtgaagcaatgccgtggcaagaacctcttcttcagcactgatgttgaaaagcatgtctttgaggctgacatagtgtttgtctctgtcaacaccccaaccaaaactcagggtcttggagctggtaaagcagcaaatttgacatattgggagagcgcagctcgcatgattgctgatgtttcgaagtctga

SEQ ID NO: 264089 - DNA, 359 bp, Glycine max
  unsure (1)..(359): unsure at all n locations
ctctgctacntttgcttctcctccacccattcacattttaacacacactttgattgagaagggggcgtgttcacacaaagacagtgaataaatcctcgcggcaagtgatcgacaggtactactctcgcatgacgctggacttccacacaaacaagaaggttctggaagaggtggccatcattccctccaagaggctccgcaacaagatcgcgggattctccacccacctcatgaagcgcatccagaagggtcccgtacatggaatctccctcaagcttcacgaggaggagcgcgagcgccncatggacttcgtccccgatgtctccgccatcagaaccgaccaaatcgatgtcgacaag

SEQ ID NO: 264090 - DNA, 353 bp, Glycine max
  unsure (1)..(353): unsure at all n locations
tgcttctcctgnatgtngctgcttactttctcggaattgaaactnttnnggcggtcgggtcaattttnattcccacaaacactgttatcccaaccaanaaatctcangtgttcaccacctatcangaccancatactacantctccattcangttttctaangctataggattctcacaaatgattgccgccttcttgggaaatttgatctgtctggaattcctccagccccaaggggtacgcctcaaattgaagtgaccttcgaagttgatgccaacggcattctaaatgtgaaggcagaagacaagggcactggtaaatcaaaaaagatcaccattacaaacgaaaaggga

SEQ ID NO: 264091 - DNA, 285 bp, Glycine max
  unsure (1)..(285): unsure at all n locations
caacactttcggtaacaggtttcatatgatgctgaagcttgnactgagggttggggaagatgctggtgaagcacatgctgacatgcctcctcttgaggacgctgatgcagatgctgagggtagcaagatggaagaagttgattaaatctgacttaattgcctgttacgtttttagaaacaatgattggagaaacagtctttttactatgttttatgttttttgaattttcgaaattttggaacgttggctagttaggtgccgtatgtagtagtttctttatggta

SEQ ID NO: 264092 - DNA, 434 bp, Glycine max
  unsure (1)..(434): unsure at all n locations
cggaanaacccgggcccgaccgcacgcgtggcgagaaggaacctaagcttannaattagtattctaaattatataagaagaaaggaaagaaattgagtgggttgggtaatgcatttggagagaaagaaaagnccnnanaantcccaattaaggaaacccagctaccaaacccattggtgctntctgcccaagnngctggcatggagaaagaacccccaggccactgtctcaagagaaaggcagaaagaatgaccagcacgtgatctcggtgcaaaanggagttggcaaccccaaaagaatagaaggcaaagatgaacccaggcggagcctggacccaagcaggcggcgccgtcaagcataacaacggcggcccaaacaaagtccgccactcaacggcttgggcaccatggggacatgggcccaccacaaaccac

SEQ ID NO: 264093 - DNA, 397 bp, Glycine max
gggggtcattgttcttctcccaggttattttgaaaagcaaaatggtgaagatttgctgcagtggtgctggatatgtggggggtcctactatggcagtcattgcacttaagtgcccatccattgaagttgctgttgttgatatctctaaatcccgcattgcagcctggaacagtgaccagcttcctatctatgaacctggccttgatggtgttgtgaagcaatgccgtggcaagaacctcttcttcagcactgatgttgaaaagcatgtctttgaggctgacatagtgtttgtctctgtcaacaccccaaccaaaactcagggtcttggagctggtaaagcagcagatttgacatattgggagagcgcagctcgcatgattgctgatgtttcgaagtc

SEQ ID NO: 264094 - DNA, 268 bp, Glycine max
  unsure (1)..(268): unsure at all n locations
tctaccgtggtttcaacatttatgtgttggaatcatcgtgtatcgnggggtgggtttggattgtatgattctgttaaaccanttgtcctcacagggtcattgcaggatagcttttttgccagctttgcccttggatggctcatcaccaatggtgcaggtcttgcatcatacccaatagacactgttagaagaagattgatgatgacctctggtgaagctgtcaagtacaagagctccttggatgcattcacacagatcctcaagaatg

SEQ ID NO: 264095 - DNA, 301 bp, Glycine max
gtctgtatctaatacctcgctctcctcacttttattctcatggataccttcaagggtactgatgacaatggtaagggttagggtttaaaatgatgctctgaaaagcatgtacaacgccgagaaacggggtaagcgccaagtaatgattaagcctgcctctaaggtcataataaaatctctcttggagatcgcagaagcatgggtacattggtgagttcgagtatgttgatgaccactgggctggcaaaatcgcggttgaatagaatggcaggctgaataagtgtggggatataagccctcg

SEQ ID NO: 264096 - DNA, 281 bp, Glycine max
aacccaactccctacctatgcgcggttataatacatcatgagcggaccaaagtccaagaccgaatctaatagagccgatgccaaacttgctgtgaataagaagggcgccgccaccaagactaggaaaccctccggaaaggggaaggcagcgaaagatcctaacaagccaaagaggcctccaagtgctttcttcgttttcatgtaattataatatattgttatctctacgattcatttgacttccgatgccctcttttatttttccttcgaataattttatc

SEQ ID NO: 264097 - DNA, 458 bp, Glycine max
  unsure (1)..(458): unsure at all n locations
gaataccggnccgaccacgcgtccgggcggccctgnnncnaaccccccgccggtgtttgattaaaaaacggagttcgacntggtggtcggggaggtgccnaacaacgctcgaatcncggtgattaaggcggtgagggcattgacgaacctagcgctgaaggaggcgaaggagttgatcgaagggttgccgaagaagttcaaggaagggatttcaaaggacgaagctgaagatgcgaagaagcaactcgaagaagctggtgccaaagttaccattgcttaaacactgtttagctgcaacatatatgttctgcttcttcttttggtggttgtagttgagttcaccagtacactgtaatttcatttccattttgtctggatttcaatcttttatttgtaatgaagaaatatgaagtcttatttttatattattttttttaatgcctatgaggtgtttgttg

SEQ ID NO: 264098 - DNA, 349 bp, Glycine max
  unsure (1)..(349): unsure at all n locations
cggcccaggcgtgcgcccaggcntccncccacncntccgcccacgtttccgttgacgcgtgggcttcaacttggagtaccgccctaactaccctgattctgatcaaattccttactttgaggatggtgattctgtgacatacaataatgagaaggaggggatcattgagtgcttgaaaaggaatgtgggtggtgatttagatagtgaggtttcttctctccctgattggataccaaccaaagtgatggccaccacttggcttgctgatgcacttgagtatgaactgtgggtgggatgtgatggttcctctgcttatagcatctattattctgatcttccctggcctatc

SEQ ID NO: 264099 - DNA, 438 bp, Glycine max
  unsure (1)..(438): unsure at all n locations
cccgggccgaccgacgcgggggcccaggcntccggactgcccaagattaatctataatgttacggtgcgggcaaaaggggctgtttttctgatcaacaatggtggatacaccatcgaggttgaaattcatgatgggccgtacaatgtgattaagaactggaattacactgggttgattgatgcaatccacaatggtgaagggaaatgctggactgccaaggtgttctgtgaagaggagctagttgaagcaattgccacagccacaggacccaagaaagactccttatgcttcattgaggtgattgttcataaagatgacaccagtaaagaattgcttgaatggggctcaagggtttctgctgccaatagccgtccttccaatccttagtaatcttcagaatttattctatgactaaattgctgcagttgccctttaac

SEQ ID NO: 264100 - DNA, 383 bp, Glycine max
cccacgcctccgcggacgcgtggtgttttttttggataagagtgagctataatgggtgccgtgagaccgggtttaattgctttgtttgatgttgacgggactcttacagctcccaggaaggtggtcacaccggaaatgttgacattcatgcaagaactacgaaaggttgtaacggttggagttgttgggggttctgaccttataaagatatcagagcaacttggcagcacagttaccaatgagtatgattacgtattttctgagaatggtcttgtggctcacaaggaaagaaagctcattggaactcaaagcttgaagtcattccttggtgaaaaaaagctcaagggagttattaactttacacttcattatattgctgattt

SEQ ID NO: 264101 - DNA, 304 bp, Glycine max
  unsure (1)..(304): unsure at all n locations
gcatnnaactgggtgaggaaggaangggttagagattaaaaagatgcgcgtccaaccccaccggtacccgttttggagggccggcggggatgacgtacataacatactcaaacatatgcgcgaatctgctcaggaattgcctcaaggaaccctacaaggccgaatccctctctcgtgagaagctccattttgttctctccaaatgggtcgacgccaagcctgaaaaacctactattcgttcagacaccccagagcagtgatctggaatagtttgaaactataaatgcataaatctttgagatct

SEQ ID NO: 264102 - DNA, 458 bp, Glycine max
  unsure (1)..(458): unsure at all n locations
cgggtcgagcgaggcgtccgatcgaggccttaagtttcggatcaggtctgatttatctggttggtagaacctttggtcttagggagtcttgttttatgtctgagttagacgatcaaattcctactgccttcgatccttttgctgatgcaaatgctgatgactcgggtgctgggtcaaaggagtatgtgcatattcgcgtacagcagcgaaatggaaggaaaagcctgacaaccgttcagggattgaaaaaagaattcagctataacaagatacttaaagatgttaagaaagagttctgttgcaatggaacaggtgttcaggacccagaactaggacaggttattcaacttcaaggtgatcagaggaagaatgtttctaccttnctggtccaggctggtatcgtgaagaaggagcatatcangattcatggtttctgagcggttggagtctcaagtgtc

SEQ ID NO: 264103 - DNA, 367 bp, Glycine max
cgcaccagtttcaccgcacgaatatcttgttgtttggagcgttccgagaaaaactctgtaaacgggttggttgaccaggacctccttacaggtgatgagcttctctctgactccttccgttacaaggaaattgagaatggaatgctgtgggaagttgaggggaagtgggttgttaaaggagcagttgatgtagacattggtgcaaacccttctgctgagggtggaggagaagatgagggagttgatgatgcagctgttaaggttgttgacattgttgacacattcagacttcaggagcaacccgcattcgataagaagcagtttgttaccttcatgaaaaggtttatcaagaatttgactcccaagc

SEQ ID NO: 264104 - DNA, 364 bp, Glycine max
cccccccccccagccccctcttaacacacgcacgcccaccccaaccccctcccccccctccaccccccttccccccccccccacccccccacctcctctccctcccctcccccaccacctcctctctccccccccccccccaccacccccaccctcccccctccccccccccccactccacaccccctccccctcctcccccccccctcccctcccccccccctcttccccctcccccccccaactcaccacaccaccccccccccaccacccaccccctcccccctccccccccccccccccctcccctccccccccctccccccccccctccccccctcccccctccctcacccccccctcc

SEQ ID NO: 264105 - DNA, 447 bp, Glycine max
cgcaccagtttcaccgcacgaatatcttgttgtttggagcgatccgagaaaaacgctgtaaacgtgttggtttaccaggacctccttacaggtgatgagcttctctctgactccttccgttacaaggaaattgagaatggaatgctgtgggaagttgaggggaagtgggttgttaaaggagcagttgatgtagacattggtgcaaacccttctgctgagggtggaggagaagatgagggagttgatgatgcagctgttaaggttgttgacattgttgacacattcagacttcaagagcaacccgcattcgataagaagcagtttgttaccttcatgaagaggtttatcaagaatttgactcccaagctcgatgcagagcaacaggagttgtttaagaagcacatcgagggagcaactaaatacctgctctctaagattaaagatttc

SEQ ID NO: 264106 - DNA, 444 bp, Glycine max
tcgagcacgcgtccgcgcacgagtttcaccgcacgaatatcttgttgtttggagcgttcctagaaaaactctgtaaacaggttttttggccatgacctccttacaggtgatgagcttctctctgactccttccgttacaaggaaattgagaatggaatgctgtgggaagttgaggggaagtgggttgttaaaggagcagttgatgtagacattggtgcaaacccttctgctgagggtggaggagaagatgagggagttgatgatgcagctgttaaggttgttgacattgttgacacattcagacttcatgagcaacccgcattcgataagaagcagtttggtaccttcatgaagaggtttatcaagaatttgactcccaagctcgatgcatatcaacaggagttgtttaagaagcacatctagggagcaactaaatacctgctc

SEQ ID NO: 264107 - DNA, 452 bp, Glycine max
cccacgcgtccgatgacctacattctttgatttgtccaacaccacaggggacacgcctccctcgagctcttttaagaaagtccaagaatgctctactctccactttcttgtttcttgatcaatttgtgtggcttggcagaacaggcatctaccagaataaagagcgcacctaactaattggccggatatctctttactgttggttgggatcctcggtgtgtgccaccttggttgagcttggggagcttggaagactctctgcatcaatgaagaagttagagaaagatctcaagaacaagaataaatacgatgatgatcaataccgtgccaaactaaacaagtcaaatgagaggactctatcacttatcaaagcaggaattgatactgtggtaacaatatgactgcttcaattgtcacccaatacaattactcctctcgtaacttgagctttt

SEQ ID NO: 264108 - DNA, 459 bp, Glycine max
  unsure (1)..(459): unsure at all n locations
attgtgtcttgttattttttataaaagggatttcaatgccttatattgtaattatgcntntgagtgttgctccagcaaaatcaccccacaacaaatgtttacattcataaggtggttcatcaaaccaatgtattattccccaggataactgtcatcaacatttaatcagcagcataattgtcttaaaataaaatcttctttgtcttcaaagatacactccaggtttaaactattcatttaaagacaatccaaatggtgacattctcgtctgggtggtgtagttggttatcacgctagtctcacacactagaggtccccggttcgaacccgggctcagacatttcaatattttgtagcccatgtctgtaaattactttgagatatgtttttaggtttttttttaatgctttgtaataaaattttacagattccacaatcaaagaggacatgggttgagta

SEQ ID NO: 264109 - DNA, 337 bp, Glycine max
  unsure (1)..(337): unsure at all n locations
gcgtccgcccacgcgtccgggaagatggtgctttcggtttaggaaatgggtcgtctgtaccgaatactaganggtttgatgcaaatgctgcgggacaggggttttctggtgggtgacttcgagatcaacatgtcgaagcatgagttcaagtccaagtacggcgagcacatgaagcgcgaggacctggtcatcaacaagtccaagaaggacaactccggcgaccagatctacgtcttcttccccgacgagcccaaggtcggcgtcaagaccatgaagacctacaccaaccgcatgaactccgaaaacgtctatagagccatcctcgtcacccagacca

SEQ ID NO: 264110 - DNA, 343 bp, Glycine max
  unsure (1)..(343): unsure at all n locations
ccaatttactctttttcttctcgccctctgccgtcgagggagtttgtaacatggctgggctaccaacggcggagcttagtgacgcaaatgcaacacatgtagcaagttgtgatgtgagggtgttgcatccagtgttcaaggtttacggtggggccaccgcgttctccggccccgttgtcaccgtgaaggtgtttgaagacaacgtgttggtgagggagcttcttgagacgaaaggcgaaggaagagtattggttgttgatggaggaggaagcttgaggtgtgcattggtgggagggaattttgcactgattgcacataacatgngttgggctgggattgtggt

SEQ ID NO: 264111 - DNA, 420 bp, Glycine max
  unsure (1)..(420): unsure at all n locations
cccacgcgtccgagaaggcctgggcttagtttataagcataactgggtgaggaagaaagaaagggagtgaataanatggcgtcgagcggagcggtaccgttttggagggcggcggggatgacgtacataacatactcaaacatatgcgcgaatctgctcaggaattgcctcaaggaaccctacaaggccgaatccctctctcgtgagaagctccattttgttctctccaaatgggtcgacgccaagcctgaaaaacctactattcgttcagacaccccagagcagtgatctggaatagttggaagctataaatgcataaatctttgagatctggaagttcattgtcattttgaacctttctgtgatggttaattcctttggttttttctctccatgaaatggaaacatgcactggatttt

SEQ ID NO: 264112 - DNA, 461 bp, Glycine max
cccacgcgtccgcggacgcgtgggttgaaaacgacccgttttctccctcgcacggatccaccgcggatctgagattccttcgaattgttaactctctttcagtttcaagttggaaactttttcgattttcgctttctggaggtgtgaattgttgtttgaaagtcacaagcaatggtgaaggacactgcgtattatgacatattaggtgtcaattatgatgcatctgctgcagagatcaagaaagcttattatgtcaaggctagaattgttcaccccgataaaaatcctgaggatcctaaggccgcagaaaactttcagaaacttggtgaggcttaccaggttttaagtgatcctgggaagcgtgcggcatatgatgagcatggaaaggagggagtaccacaagattccatgatggaccctacaacttgatttggaatgatttttggaagtgaaatttttga

SEQ ID NO: 264113 - DNA, 510 bp, Glycine max
  unsure (1)..(510): unsure at all n locations
attcccggtgtcgacgccacgtcgtctcgtcttctcgctgtctgcaatcgtgtgtaattctattttcctttcactcatatatgtctgtcgcaaggctttgtgtcagaggcgcacttcagagaaccaagtcctggcacccagttcccgttcatcctcatactgtctatgatctcactcccaatcaatcggctattgcctattggcnttggcccttggagtctactcattctggggttcaagttcatggattggaatatggttttggtgcgcacgagcacgacacaacggggattttcgaagtccaacccatacactgccctgggttcactttcagaaagtcaattttcatcggaacaacagatctgggtccgaaagatgttcgagcattcatggagaagctggctcaggattactccggcaacacctatcatctcatttccaagaattgcaaccatttctgtaacgatgtttgtctcaaattgaccggaaagtcaatccctcgttgggtca

SEQ ID NO: 264114 - DNA, 389 bp, Glycine max
gtcgggcgggcgtccgcttttgtctgaaaaaacatgttgagggttgcttctagaaggctctcttcttctctctcatcagcttgtctgttgcggcccaatggcgccgcttccgcttttctctctcgaaacgacgtcgtcgtcgatgaccgcagatctgctccttcctcccatccccttcttcccttcagaggttatgctactgaatccctgatccacacaaaagaaaacagcattactcctgagattccgccaactgttactgctgttaagaaccctacttctaagattgtctatgatgatcacaaccatgaaagatttcccccaggtgacccaagcaagagggcatttgcctacttcgtacttacaggtgggaggtttgcttatgcctc

SEQ ID NO: 264115 - DNA, 399 bp, Glycine max
gatcgccaactattgatctctttataggcttttgcactctccaatcttcaaagatgcctttgaaactctaaatcaagcgcaagcttgcgcaaagatcacagagagtgaaatgtgttgatctgcatccaacagatccatggattctggcgagtttatactctggaactgtctgcatctggaactaccaatctcagaccatggccaaatcttttgaggttaccgagttaccagttagatcggccaagtttattgcacgcaaacagtgtgttgttgctggagcatatgatatgtttattcgtgtatataattacaacacaattgataaagtcaaagtattttaagcacatactgattacattatgtgtgtagcaattcatccctacccttcttatgtgcttt

SEQ ID NO: 264116 - DNA, 441 bp, Glycine max
attcggaatctgatctccaacgattgatctctgtagaggctagtgcactctccaatctgcaaggatgcctctgagactctaaatcaagcgcaagcttgcgcaaagatcagagagagtgaaatgtgtggatctgcatccaacagagccatggattctggcgagtttatactctggaactgtctgcatctggaactaccaatctcagaccatggccaaatcttttgaggttaccgagttaccagttagatcggccaagtttattgcacgcaaacagtgggttgttgctggagcagatgatatgtttattcgtgtatataattacaacacaatggataaagtcaaagtatttgaagcacatactgattacattaggtgtgtggcagttcattctacccttccttatgtgctttcatcatctgatgatatgctcataaagctctg

SEQ ID NO: 264117 - DNA, 250 bp, Glycine max
aaaaactaaaaaaaataaaaaaaaaaaaataaaaataaataaaataaaaaaaaataaaaataaataaacaaaaaaataaacaataactaaaaaaaaaaaataaaaaacaaaaaataaaacaaaaacaaaataataaaaaaaaaaaaaaataaaaaaaataaaaaataaaaaaaaatatatataaaaaaaaaaaaaaaataaaaaaaaaaaaaaaaaaaaataaaaaataaaaaaaaaaaaattaatatat

SEQ ID NO: 264118 - DNA, 426 bp, Glycine max
tccgggtcgaccacgcgtccgcccacgcgtccgggaagaaccaccactaccttatccatttccactcctcaccaagccacacgatggcctcaggcaacgccctgtcttcagcttccattctacgctctcccaaccgccagtctctgaccagaagagcgaaccacaacggaagagtaaattaccgtcaaccgaatagccgtttctccgtcaaagccttcgccaaagagattgcctttgaccagcattcccgctctgctatgcaggccggcattgacaagctcgccgacaccgtctggctcactcttgggcccacggggaggaatgttgtgttggatgagattggaagtcctaaagcgtgtaaccatctgtgcaccattgcttgcgccatctagcttacagagcctatggaaaatgcccgtgcacctc

SEQ ID NO: 264119 - DNA, 455 bp, Glycine max
gattgcacaaaatcaaatctcccactaccaacaacactgccaccactaaagcactgacaacgctccttcactggaccactcctcactcttctcattcagatctacccaacacacacacaccaaaaaataaaataaaaatgcaactccaacccactctctccactctctacctctcccttttgttaacaataacgttaacatctccaaccttggcagcacaaagcaagccgcaggatctggtccggtcctcgtgcgtgcacgcgcggtacccgcgtctgtgcctgcgcaccctctcgaactacccgggtcccgccaacacgccgttagacgtggccagggcagctttgagggtaagcctggcccacacgcgccgggccttcaaattcctccatgcactttctcatggaggcgctgccgccatgagcaagcgccagcgctccgcgctgcgcgactgt

SEQ ID NO: 264120 - DNA, 479 bp, Glycine max
ccggtcttgaattcccgggtcgaccgacgcgtccgcctagacaactctttctcttcttccttcgctcgttgttctccctcgcgtagatcgacaatggcggatacagagacgtttgctttccaggctgagatcaaccagctcctcagtctcatcatcaacaccttctactccaacaaggagattttccttcgtgaactcatcagcaacgcctccgatgctttggacaagattcgatttgagagtttgacagataagagcaagctcgatgctcagccagagttgttcattcatattattccagacaagactaacaatacactgaccattgttgacagtggtattggcatgaccaaagctgatttggtgaacaacttgggtacaattgctagatctggtaccaaggaattcatggaagccttggctgctggtgctgatgttagtatgattggacagtttggtgtggggttctactctgcata

SEQ ID NO: 264121 - DNA, 420 bp, Glycine max
cgcgtcgctgctccgtaccagtttcactgcataaatttgagagaaaactgggcaaacatgggggtttatcaggacctccttacaggtgatgagcttctctcggactccttccgttacaatgaaattgagaatggaatgctgtgggaagttgaggggaagtgggttgttaagggagcagttgatgttgacattggtgcaaacccttctgctgagggtggagaagatgagggagtcgatgacgcagctgttaaggttgttgacattgttgatacattcagacttcaggagcaacccgcttttgataagaaacagtttgttaccttcatgaagaggtttatcaagaatttgactcccaagctcgatgcagagaaacaagagttgtttaagaagcacattgagggagcaactaaatacctgctc

SEQ ID NO: 264122 - DNA, 396 bp, Glycine max
ccaattcactctatttcttctcgccctctgccgtgggaggagtttgtaacatggctgctctaccaacggcggagcttagtgacgcaaatgcaacacatgtagcaagttgtgatgtgagggtgttgcatccagtgttcaaggtttacggtggggccaccgcgttctccggccccgttgtcaccgtgaaggtgtttgaagacaacgtgttggtgagggagcttcttgagacgaaaggcgaaggaagagtattggttgttgatggaggaggaagcttgaagtgtgcattgtggggagggaatttggcactgattgcacataacatggcttgggctgggatagtggtgaatggctgcatcatagatgtggatgagatcaatgcaagtgatattggcgtca

SEQ ID NO: 264123 - DNA, 455 bp, Glycine max
cccacgcgtccggcgaaaacccccaactccaacctctgttcatcgtctaccgcgctttcttttcaaccagaactatgattaagctttttaaagtaaaggaaaagcagagagaacttgcagaaaatgcaagtggcggaccacctgttaagaagcaaagtgctggagagttgcgtcttcacaaagatataagtgagctgaatctaccaaaatcatgtaccatgcaattccccaatggcaaagatgatctgatgaactttgaagtttcaattcgacctgatgatggatattacttaggtggcacatttttgttttcctttcaagtgtctcccatctatccacacgaagcaccaaaggttaagtgtaagacaaaggtctatcatccaaatattgacttggaaggaaatgtttgtctcaacatcttacgagaagattggaaacctgtccttaatataaac

SEQ ID NO: 264124 - DNA, 456 bp, Glycine max
gcacgcatgcggtcaaaactccaaactccaacctaaggtcatcgcctaccgcactttcgagtgaaccatagctctgattaagctatataacgtctacgacattcatatagaacttgccgaaaatgcaagtggcggaccacctgtctagaagctccatgcttacgaactccgtcttgacaaagatataactcagcataatctaccataatcatgtaccatgcaattccccaatggcacagatgatctgatgaactctgaagtttcaattacacctgatgattgatattacttacgtggcacatcagttgtgctactttcaagtgactcccatctatacacaccaagcaaccaaaggtaaatgctagacaaaggtctatacatccaaatgttgactcgcaatgaaatgtttgtctcaacatcttacgagaagattgaacacctgaccttaatataaac

SEQ ID NO: 264125 - DNA, 333 bp, Glycine max
gcgtccgccaggcctacgacagcttcatcaatggcgtacgtcaaggctcataaatcaaaatcctacggcaagatttatgaagtcatcatcactataagaagacaggtaaaaaccgattaccctgccaagattcggttgattaatcacgacaacaacacatataacactccgaaataccgatttgtggttcgctttaacaacaacgacattgatgcacaaataatatctgctagcattgccagcgatttagttcttgctacatcatattcacatgaactgccacgatattgtcttcaattaagacttacaaattatgcaacaacttattgcact

SEQ ID NO: 264126 - DNA, 442 bp, Glycine max
gggactcattgttcttctcccaggttatttagaaaagcaaaatggtgaagatttgctgcatgggtgctggatatgtggggggtcctactatggcagtcattgcacttaagtgcccatccattgaagttgctgttgttgatatctctaaatcccgcattgcagcctggaacagtgaccagcttcctatctatgaacctggccttgatggtgttgtgaagcaatgccgtggcaagaacctcttcttcagcactgatgttgaaaagcatgtctttgaggctgacatagtgtttgtctctgtcaacaccccaaccaaaactcagggtcttggagctggtaaagcagcagatttgacatattgggagagcgcagctcgcatgattgctgatgtttcgaagtctgacaagatcgttgtagagaaatccacagtcccggttaaaacagc

SEQ ID NO: 264127 - DNA, 444 bp, Glycine max
cctaaacaactctttctcttcttccttcgctcgttgttctccctcgcgtagatcgacaatggcggagacagagacgtttgctttccaggctgagatcaaccagctcctcagtctcatcatcaacaccttctactccaacaaggagattttccttcgtgaactcatcagcaacgcctccgatgctttggacaagattcgatttgagagtttgacagataagagcaagctcgatgctcagccagagttgttcattcatattattccagacaagactaacaatacactgaccattgttgacagtggtattggcatgaccaaagctgatttggtgaacaacttgggtacaattgctagatctggtaccaaggaattcatggaagccttggctgctggtgctgatgttagtatgattggacagtttggtgtggggttctactctgcata

SEQ ID NO: 264128 - DNA, 419 bp, Glycine max
tgaagtggaacgacatctcaagcattgagatccccaaacactccttgcacgaagctgtgagtttgcctgtgaagttccctcagatctttactgggaaaagactaccctggaaagctttcttgatgtatggacctactggaaccggaaactcatatttagccaacgcagacgcaacggaagccgactccacctttttcagcgtttcttcatcagaccttgcttcaaaccgtataggtgaaagagaaaatcttctttcataccttatcgaaatggctcgagatagtgccccttctatcatatctattgacgcaattgattccctgtgtggtcagcgtggagaacgcaacgagagtgaagctctaaaaccgattaaaacagatcttctggtgcacattcatactgtaagacactatgatcag

SEQ ID NO: 264129 - DNA, 331 bp, Glycine max
tgaaggcgaacgacatctcttggattgagatcgccaaacacgccttgcaggaggctttgagagtgcctgtaaagatccctcagatctttactgggaaaagactaccctggagagctttcttgatgtatggacctcctggaaccggaaaatcatatttagccaaggcagatgcaactgaagccgagtccacgtttttcagcgtttcttcatcagaccttgtttcaaagagtatgggtgaaagagaaaagctgacttcaaaccttttcgaaatggctcgagaaagtgccccttctatcatatctattgacgaaattgattccctgagtggtca

SEQ ID NO: 264130 - DNA, 296 bp, Glycine max; identical to SEQ ID NO: 263119

SEQ ID NO: 264131 - DNA, 339 bp, Glycine max
tcccggtcgacccacgcgtgcgctcacgcatcctgaaaaatttaatgaaccatttattgataacccaaatctcaagcataacgccgacctttgtgcacttcacaacttaaattacatctcgattgaattgtaacatgataaatatgctacttagatcgacaatgaattaattactgatgatccacattatgctaagcaacctgttgaagaaccatggaccaagcacaacgatgctgacaatgcatcatgagaggaggccgataacaacatggaaaatgaggaatcataggatgacccagttgactctgatgcacatgatgaacaggaagatgctgatga

SEQ ID NO: 264132 - DNA, 454 bp, Glycine max
cccacgcgtccgctttctttctttcttcttttttctgccgaggaaaagaaagaaatagagggggaagaagagaacacagcgtcctagatttcctcttctctgcttcggaagaaagagaaaacaaacaaaacaatggcgttcgcttctttcctcggcagagtcctcttcgcttctgtcttcatactctctgcttaccaacaatttaatgaatatggagttgatgggggacctgctacaaaagcactcagacctaagtttgatgcctttacacatcgggtgcattctcaagtgggctttcaaattccagagattaatctgaaatttttaattgctggggctattgctctgaagggtcttggaggggttcttttcatatttggcagctcttttggagctttgcttctgctcctgcaccagctgattgctactccaatccattatgatttttacaatt

SEQ ID NO: 264133 - DNA, 326 bp, Glycine max
ccaattcactctttttcttctcgccctctgccgtgggaggagtttgtaacatggctgctctaccaacggcggagcttagtgacgcaaatgcaacacatgtagcaagttgtgatgtgagggtgttgcatccagtgttcaaggtttacggtggggccaccgcgttctccggccccgttgtcaccgtgaaggtgtttgaagacaacgtgttggtgagggagcttcttgagacgaaaggcgaaggaagagtattggttgttgatggaggaggaagcttgaggtgtgcattggtgggagggaatttggcactgattgcacataacatgggt

SEQ ID NO: 264134 - DNA, 450 bp, Glycine max
attcccgggtcgacccacgcgttctcccacgcgtccgcccactctttctcagggatgttgaggaagttgttggtgggtctcaactgtggccttattggaagcaatagacaatatagtgacagggaagtttgtgtccttatctgaacaagaacttgttgactgtgacagagcctacaatgaatgatgcaatggtggccttatggactatgcattcgaattcatcattcaaaattgaggcattgacacatacaaagattacccataccgaggctttgatggcatctgtgatccaactaataaaaattcaaaggttgtgaacatttatgggttcgaagatgttccaccgtatgatgagaatgccttgaaaaaagctttcgctcatcaacccttaagcattgctattgaatcctcttgcagatatttgcaactttatcaatcgggtgtatttac

SEQ ID NO: 264135 - DNA, 435 bp, Glycine max
acgcgttatgctattgcttcctatctctttctcatgaccccttcatggagtccactttgggcaccaatctagtagtcttcaacaacaccctccaaccagagttaatgaggagtgtgcatgtgtaccgccgaggggatggagagaaaagggaagttgagagagagtttgtgttttcagagagcggctcctatggggaaatgcaggctaccccaattcctggattggtaaaatctcgtgtttctgaagtgtgtgaagggcaccgaaatggagtgtggctttgtgtctttgcgttccatgccgatcacactcctcaattttgccgcattccaccggttttgttggtcacaagaaacccaaagcttaagatgattccaaacttgcttgatgatctccatgtgatatacaagttggaccggaaggaggaagacagtgata

SEQ ID NO: 264136 - DNA, 436 bp, Glycine max
  unsure (1)..(436): unsure at all n locations
cccacgcgtccgtcaagcattgcatccctcttgatttgtagtttgttttgtgctttagataaaagttctgccaaatcaagaggggttttaagatcatagtgtgtgttttgcaacaatggctaagttctttgctgctatgatcttggcactctttgccatttccatacttcaaacagtggtaatggctgctaatgaacaaggaggccacttgtatgacaacaagagcaaatatggaagtggaagtgtcaagagttaccaatgcccatcacaatgctcgaggagatgtagccagacccaataccacaagccctgcatgtttttctgtcagaagtgctgcaggacatgcctgtgtgtgcccccggngtattatggtaataaagctgtgtgcccttgctacaacaactggaagaccaaggaaggaggacccaagtgccct

SEQ ID NO: 264137 - DNA, 440 bp, Glycine max
  unsure (1)..(440): unsure at all n locations
atggcgtcccaaaccgcctagtacgggtctgtttgttggactgaacaagggtgacgtcgtcgccaanaatgaattgcctccacgcccctcagatcgtaaggggaaaacaagcaagagggtgcactttgtgaggaacctcataagagaggtagccggttttgcaccctatgaaaagcgtataactgagttgctgaaggttgggaaggataagagggcactgaaggttgcaaagagaaagctcggaacacacaaacgcgcaaagaagaagcgtgaggaaatgtccagtgttctcaggaagatgagggctggtggtgctggagacaagaagaaataagtcttatttactgttttccagattcactagatggacctgtgtattgatggacgagctttcatatttttgctttggttcaattagtttacttcaagattttgtttga

SEQ ID NO: 264138 - DNA, 403 bp, Glycine max
acgcttcatgctattgcttcctatctctttctcatgaccccttcatggagtccactttgcgcaccaatctgctagtcttcaacaacaccctccaaccagagttaatgaggagtgtgcatgtgtaccgccgaggggatggagagaaaagggaagttgagagagagtttgtgttttcagagagcggctcctatggggaaatgcaggctaccccaattcctggattggtaaaatctcgtgtttctgaagtgtgtgaagggcaccgaaatggagtgtggctttgtgtctttgcgttccatgccgatcacactcctcaattttgccgcattccaccggttttgttggtcacaagaaacccaaagcttaagatgattccaaacttgcttgatgatctccatgtgatata

SEQ ID NO: 264139 - DNA, 447 bp, Glycine max
atggctcccaaaccgcctagtacgggtctgtttgttggactgaacaagggtcacgtcgtcgccaagaaggaattgcctccacgcccctcagatcgtaaggggaaaacaagcaagagggtgcactttgtgaggaacctcataagagaggtagccggttttgcaccctatgaaaagcgtataactgagttgctgaaggttgggaaggataagagggcactgaaggttgcaaagagaaagctcggaacacacaaacgcgcaaagaagaagcgtgaggaaatgtccagtgttctcaggaagatgagggctggtggtgctggagacaagaagaaataagtcttatttactgttttccagattcactagatggacctgtgtattgatggacgagctttcatatttttgctttggttcaattagtttacttcaagattttgtttgagaaatatg

SEQ ID NO: 264140 - DNA, 413 bp, Glycine max
cccacgcgtccgcccacgcgtccgcggacgcgtgggcgcgagtgaacacaggttacagcaggggctttctggggtagaattgggaatttattaagacagacagcaagcaggcaggttagttcagaattgcgatcatccccttcgttttttcaggctatacgcagtatgtcatctgctccaagcacaaagctgtttatcggaggtgtttcatattctactgacgagcaaagtttgagggaagctttttcaaaatatggtgaagttgttgatgctaggataattatggatcgtgaaactggtagatccagaggatttggctttattacatacacttcggttgaggaggcatcaagtgccattcaggccttggatggtcaggacctacatggtcgcccgattagggtgaattatgc

SEQ ID NO: 264141 - DNA, 445 bp, Glycine max
atcgaaaccttaagtttcggatcaggtctgagcaatctggttggtagaacctttggtctgagagagtcaagttttatgtctgaattagacgatcaaattcctactgccttcgatccttttgctgatgcaaatgctgatgactcgggtgctgggtcaaaggagtatgtgcatattcgcgtacagcagcgaaatggaaggaaaagcctgacaaccgttcagggattgaaaaaagaattcagctataacaagatacttaaagatgttaagaaagagttctgttgcaatggaacagttgttcaggacccagaactaggacaggttattcaacttcaaggtgatcagaggaagaatgtttctaccttcctggtccaggctggtatcgtgaagaaggagcatatcaagattcatggtttctgagcggttggagtctcaagtgtcaagtctt

SEQ ID NO: 264142 - DNA, 315 bp, Glycine max
  unsure (1)..(315): unsure at all n locations
gaattgacgacgtgtccgcttgatgatcccaacactttcggtaacaggattcacaggatgctgaagcttggactgagcattggggaagatgctggtgaagcagatgctgacatgcctnctcttgaggacgctgatgcagatgctgagggtagcaagatggaagaagttgattaaatctgacttaattgcctgttacgtttttagaaacaatgattggagaaacagtctttttactatgttttatgttttttgaattttcgaaattttggaacgttggctagttaggtgccgtatgtagtagtttctttatggtaa

SEQ ID NO: 264143 - DNA, 296 bp, Glycine max
  unsure (1)..(296): unsure at all n locations
cttgatgatcccaacactttctgtaacaggattcacaggatgctgaagcttggactgagcattggtgaagatgctggttaagcagatgctgacatgcctnctcttgaggacgctgatgcagatgctgagggtagcaagatggaagaagttgattaaatctgacttaattgcctgttacgtttttagaaacaatgattggagaaacagtctttttactatgttttatgttttttgaattttcgaaattttggaacgttggctaattaagtgccgtatgtagtagtttctttatggta

SEQ ID NO: 264144 - DNA, 490 bp, Glycine max
cccacgcgtacgatttattctataattggtgcctatgttataccaatcttagttacagacattcgcttgaaaattactgtgaaaacaagtgccaaagccataggcttgctgagtcactgtctataggtctttatactctactctagagccattctaagtctctcttagagtactagcttgcttctatgttcttttcatttctttaatcgatgaataatccttgaaaaattgtctcgttaaaactccattggtttagctactatttcattttttcttagtctttggatattgcttggctctatgattacttggttgtgagcttccacatcaagaattggaaacgctgattctggccatccattgaagaaatctcgtcctgattcatagagccaaccaccttaatagctatttgactaaaaatcacttcaaattgtgtgaatcaccatagagattacaaccacccaaattgtggactttttcgaatattttt

SEQ ID NO: 264145 - DNA, 428 bp, Glycine max
ccggtccacccacgcgtccggaggatttgggattgggaaggcgagggattgcgctgcgtctcttcctcttctctttggattcatgcctcattcataatcttccaatccaacaacctcagcctcacactcacacatacacacatctgaacgcgtatcgtccctcccatggcttcaaagcgcatcctcaaggagctcaaggacttgcagaaagacccaccaacttcttgcagcgctggtccagtagctgaggacatgttccattggcaagcaacgattatgggtcctgctgatagtccttatgctggaggtgtattcctagtcactattcactttcctccggattatcctttcaaacctcccaaggttgcctttaagactaaggtgtttcatccgaacatcaacagcaatggtagcatttgtcttgatat

SEQ ID NO: 264146 - DNA, 261 bp, Glycine max
ataggtctggaattcccgggtcgacgtacgtgtctgagcacttcttcttttcacactgccgctgcaacaatggcttcagagaagaaactttcgagccatatgagggagataaaagtgcagaagctcgttctcaatatctctgttggcgagagtggagatcgtctcaccagagccgccaaggtgttggaaccacttagtggccaaaccccagtgttttccaaagcaaggtccactgttcgttcctttgggattagaagaaat

SEQ ID NO: 264147 - DNA, 335 bp, Glycine max
ccaattcactctatttcttctcgccctctgccgtgggagaagtttgtaacatggctgctctaccaacggcggagcttagtgacgcaaatgcaacacatgtagcaagttgtgatgtgagggtgttgcatccagtgttcaaggtttacggtggggccaccgcgttctccggccccgttgtcaccgtgaaggtgtttgaagacaacgtgttggtgagggagcttcttgagacgaaaggccaaggaagagtattggttcgtgatggaggacgaagcttgaggtgtgcattggtgggagggaatttggcactgattgcacataacatgggttgggctggg

SEQ ID NO: 264148 - DNA, 299 bp, Glycine max
atttgaaggttgttttgtgcttatagataaaagttctgccaaatcaagaggggttttgagatcagagtgtgtgtgtgtgtgttaaacaatggctaagttctttgctgctatgatcttggcactcattgccatttccatgcttcaaacagtggttatggctgctaatgagcaaggaggccacttgtatgacaacaagagcaaatatggaagtgggagtgtcaagagataccaatgcccatcacaatgctcgaggagatgtagccagacccaataccacaagccctgcatgtttttctgtc

SEQ ID NO: 264149 - DNA, 249 bp, Glycine max
  unsure (1)..(249): unsure at all n locations
aattcccgggtcgactcacgtgtccggctgccgaaacccttccggaaccctaaggtaagtgagtaatcagtggttgagaatgaggaaaaagggcgaaggtagaaaggaggatgtggttacacgtgagtacaccattaacctncacaagcgcctncatggctgcacatttaagaagaaagctcctaaagctattaaggagataaggaaatttgcccaaaggccatggggaccaatgatgtgagggtggat

SEQ ID NO: 264150 - DNA, 368 bp, Glycine max
cccacgcgtccggtgatttcagtgagtgatcggtgttcacttgatctcatcataatcgtcagcgggaattggagaagatgccgatcagaaacatcgccgtcggaaggcctgaagaggcgactcaccccgacacgttgaaggcggctttggctgagttcatctcaaccttcatcttcgtgttcgccggctcaggctccggcatcgcctacaacaagctcaccgacaacggcgctgccacccctgccggcctcatctccgccttcatcgcccatgcattcgccctcttcgtcgccgtctccgtcggcgccaacatcttcggcggccacgtaaaccccgcgtcaccttcggcgccttcgtcggcggcaaca

SEQ ID NO: 264151 - DNA, 331 bp, Glycine max
gtccttaattcaccgatccagccacgcgtccgctctatcgctcacacacactatctctctgtctttctctcacccagatcttgtaacaagagctatgtctaccactccacgcgaaaaggtcacgtacatggccaagcataccgatcatgccaatcgctactaggagatgatgaaactcatggagaaggtatccgcctacaacgatagccatgagctcaccacggaggaacataaccttctctccgtaaactacaagaacgtgatcagcgctcgccacgcctactagcgcatcatctccataatcgagcacaaagaggataaacgcgtgaac

SEQ ID NO: 264152 - DNA, 418 bp, Glycine max
cccacgcgtacgtccacgcgttcgcccacgcgttcgcccacgcgtccgctccctctgttcgtgctagctctatacattcttctctcgctctctgccttccatcacactcggcatttcctttcccaagatagtagaagatggcagacactgaggatattcaacctcttgtttgtgacaatggaacacgaatggttaaggctggatttgctggagatgatgccccacgtgctatgtttcccagcattgtacgtcgaactcgtcacactggtgtgatggttggcatgggccaaaaagatgcatatgttggtgatgaggcacaatctaagaagggtattctgactctcaagtaccccattgaacatggaattgtgagcaattgcgatgatatggaaaagatttggcatcataccttctataa

SEQ ID NO: 264153 - DNA, 389 bp, Glycine max
gtccttaattcccgggtccacccacgcgtccgcccacgcgtccgtccacgctttcgcccacgctttctccaccgtcctctcctctgctcgggctagctctagcatgcttctgtcgctctctgccttccatcacactcggcatttcctttcccaagatagtagaagatggcagacactgaggatattcaacctcttgtttgtgacaatggaacaggaatggctaaggctggatttgctggagatgatgccccacgtgctgtgtttcccagcattgtacgtcgtcctcgtcacactggtgtgatggttggcatgggccaaaaagatgcatatgttggtgatgaggcccaatctaataggggtatcatgactctcaagtaccccattgaaca

SEQ ID NO: 264154 - DNA, 360 bp, Glycine max
tcctgaattcccgggtccacccacgcgtccgtctacctctaaaccctaaacaactctcactctttttcctacgctcgctgctctccctggcttaggtcaacatttacacagacacagacgctctctatccacgctgacatcaaccatctcctcactctcaacatcaacaccttctactccaacaaggagatcatccttcgcgaactcatcatcaaccccttctatgctatgcacaacattcgatatgcgagctcgacacataatagcaagctcaatgctcagccacagctggtcattcatattattccagacaagactaacaatacactgaccattgttgacaatcatattcacattacc

SEQ ID NO: 264155 - DNA, 417 bp, Glycine max
aattcccgactccggccgatcgcgtgcacatatcatcagtgtaaacaattgcgatcacgtttatcatgcaaactttgcctacttggctagtgacaatgttccactcacgggtcatgccaagcttatcaaggagtcaagcgaggaagaaaggtagcatgcttataaatcgatggcatatcatctcacgcgagatttagaggtgaagctacattctatagcgatgcctattactgaatttgaccatgaggaaaatgtagatgcgctatatgcaatgtaactagacctgtcaatggagacgctgacaaatgtaaagctgtttaactgcacaaggttccctcaatgaacattgatgtgcaattgtctcattttattgaaagcgagttttagggtgaccatttggactcaataaaaaaaaga

SEQ ID NO: 264156 - DNA, 471 bp, Glycine max
  unsure (1)..(471): unsure at all n locations
tccgtaattcccggggccacccacgcgtcggtcttcctctaaaccctaaacaactctttctcttcttccttcgctcgttgatctccctagtcgtntgtcgacaattgcngagacagagacgtttgctttccaggctgagatcaaccagctcctcagtctcatcatcaacaccttctactccaacaaggagattttccttcgtgaactcatcagcaacgccttcgatgctttggacaagattcgatttgagagtttgacagataagagcaagctcgatgctcagccagagttgttcattcatattattccagacaagactaacaatacactgaccattgntgacagtggtattggcatgaccaaagctgatttggtgaacaacttgggtacaattgctagatctggtaccaaggaattcatggaagccttggctgctggtgctgatgttagtatgattggacagtttggtgt

SEQ ID NO: 264157 - DNA, 451 bp, Glycine max
tcttcctgtaaaccctaaacaactctttctcttcttccttcgctcgttgatctccctggcgtagagcgacaatggcggagacagagacgtttgctttccaggctgagatcaaccagctcctcagtctcatcatcaacaccttctactccaacaaggagattttccttcgtgaactcatcagcaacgcctccgatgctttggacaagattcgatttgagagtttgacagataagagcaagctcgatgctcagccagagttgttcattcatattattccagacaagactaacaatacactgaccattgttgacagtggtattggcatgaccaaagctgatttggtgaacaacttgggtacaattgctagatctggtaccaaggaattcatggaagccttggctgctggtgctgatgttagtatgaatggacaaattggtgtggggttctactc

SEQ ID NO: 264158 - DNA, 351 bp, Glycine max
tcttcgtgtaaaccctaaacaactctttctcttcttccttcgctcgttgatctccctgacgttagtcgacattgacacagacagagacgattgctttccaggctgagatcaaccagctcctcagtctcatcatcaacaccttctactccaacaaggagattttccttcgtgaactcatcagcaacgcctccgatgctttggacaagattccatttgagagtctgacagattagagcaagctcgatgctcagccagagttgttcattcatattattccagacaagactaacaataccctgaccattgttgacagtgctattggcatgaccaaagctgatttggtgaacaact

SEQ ID NO: 264159 - DNA, 478 bp, Glycine max
caagaaccaacctaccttttgcaatctcaattcaatggcgtcctctctcattgcgaagcgcttcgtctcctcttccctcctctccaggtccctccttcgccccgccgcttccgcttcccaccgctctttcaacaccaacgccatgcgccagtatgacaaccgcgccgacgaccacagcaccgacatcgatcgtcactccgaacgctctttccctagcactgcgcgccgcgacgatatcttctcagatgtgttggatccattttttccgactcggagtttgagccaggttctgaacatgatggaccaggtcatggacaatccgttcctctccgcgtcgcgcgggatcggagctggcgctggagtgcgtcgcggatgggacgcgagggagacagaggatgctctgcatctgcgcgtggacatgcctgggctcggcaaggaagacgtgaagatctccgtggagcaaaacactctcattatc

SEQ ID NO: 264160 - DNA, 222 bp, Glycine max
attcaccgggtccacccacgcgtccgcaataaccaacctacctaacaccatctcaacttattgccttcctctctcatctccatgcgcttagtctacttttacatacactgcagctccctccttccaccctacgatcacccatcccaccactctcacaacaccaaacccatactccaacatgacaacctttcctactaccacaataaccacctccatcaacac

SEQ ID NO: 264161 - DNA, 431 bp, Glycine max
  unsure (1)..(431): unsure at all n locations
cagagtttgagtggacctgtctcagctaccctttaccttggttattcactactcatggccattgcaatcatgttgtcaaccggcaccattggcttccttatgtcattctactttgtgcactacttgttctcatcagtaaagatagattgaggttcttgttgtcattgcatattaactatgaaaaaggttgattgatataacttgatcacattgcatagtanggcaacggatgtttaattcattgtctgattttatattgcgatgggaacctcaaattggtctccctctggctggttccccaaataatggactcattcaagtattcaactagtgtttgagatcacgtttcaagagttttggtcaaatttctttagaagggtgtaattcaaactctcatctcatttcaatacttttgaaaaatgatgtttgat

SEQ ID NO: 264162 - DNA, 312 bp, Glycine max
  unsure (1)..(312): unsure at all n locations
cccacgcgtccggtgatttcagtgagtgatcggtgttcacttgatctcatcataatcgtcagcgggaattgaagaagatgccgatcagaaacatcgccgtcggaaggcctgaagaggcgactcaccccgacacgttgaaggcggctttggctgagttcatctcaaccttcatcttcgtgttcgccggctcaggctccggcatcgcctacaacaagctcaccgacaacggcgctgccacccctgccggnctcatctncgncttcatcgcccatgcattcgccctcttcgtcgccgtctccgtcggcgccaaca

SEQ ID NO: 264163 - DNA, 508 bp, Glycine max
ggtccagccgcgcgtccggatttggatgctaatttttttgatcagccagatttgcttggagagcccattgcaactgtgcgttggctgcactatgaaggtcaagggtcggatcccttgaaaggattatatggagctggagctcatactgactatggtttaattacactgttagcaacagatgatgtctcgggtcttcaaatatgcaaagatagggatgctaaacctcagaaatgggaggatgtagcaccattgaagggagcattcatagtgaatcttggtgacatgctggagcgctggagcaactgcgtttttaagtccacactgcacagagttctaggaaacggtcaaggaagatattctattgcatacttcttggagcccagtcatgattgtctagtggagtgcttgcctacctgcaaatcagacagtaatcccgccaaatttcctcccatcttatgccatgactacctaactcagcgctacaacgacactcatgctgacttgaatg

SEQ ID NO: 264164 - DNA, 471 bp, Glycine max
  unsure (1)..(471): unsure at all n locations
gtccagccacgcgtgcggatttggatgctaatttttttgatcatccagatttgcttggagagcccattgcaacgctgcgtgtgctgctctatgaaggtcaagtgtcggatcccttgaaaggattatatggagctggagctcatactgactatggtttaattacactgttagcaacagatgatgtctcgggtcttcaaatatgcaaagatagggatgctaaacctcagaaatgggaggatgtagcaccattgaagggagcattcatagtgaatcttggtgacatgctggagcgctggagcaactgcgtttttaagtccacactgcacagagttctaggaaacggtcaaggaagatattctattgcatacttcttggaacccaatcatgaatgnctagtggagtgcttgcctacctgcaaatcagacagtaatccgcccaaatttcctccaatctatgccatgactacctaac

SEQ ID NO: 264165 - DNA, 479 bp, Glycine max
  unsure (1)..(479): unsure at all n locations
atttggatgctaattcttttgatcatccagaatttcttgcagagcccattacaactggtncattgactactttataaaggtcaagggtcccatcccttaaaacgattatattgacctgcatctcatactgactantatttaattacactgttagcaacagatgatgtctaccctcttcaaatatacaaatatatggatgctaaacctcataaatgctacgatgtagcaccattgaatgcatcattcatactcaatcttggtgacattcttgaactcttgatcaactgcatttttaaatccacactgcacagatttctaggaaacggtcaatgaagatattctattgcatacttcttgaaacccattcatgattgtctagttgaatgcttgcctacctacaaatcaaacattaatccgcccaaatttcctcccatcttattccatgactacctaactcatcgctacaactacacttattc

SEQ ID NO: 264166 - DNA, 351 bp, Glycine max
  unsure (1)..(351): unsure at all n locations
tttggatgctaattcttttgatcatccagatttgcttggagagcccattcaactgctcntgtgcaactctataaaggtcaagtgcccgatcccttgaaacgattatatggacctacagctcatactgactantatttaattacactgttagcaacagatgatgtctcgggtcttcaaatattcaaatatatctatgctaaacctcataaatcgcacgatgtatcaccattgaaaggagcattcatagtcaatcttcgtgacattcttgatctcttgagcaacttcgtttttaagtccacactgcacagattctaagaaaccgtcaatgaaaatattctatttcatacttct

SEQ ID NO: 264167 - DNA, 480 bp, Glycine max
  unsure (1)..(480): unsure at all n locations
cccacgcgtccgagaaggcctgggcttagttgataagcataactgggtgaggaagaaagaaaggaggtgaagaagatggcgtcgagcggagcggtaccgttttggagggcggcggggatgacgtacataacatactcaaacatatgcgcgaatctgctcaggaattgcctcaaggaaccctacaaggccgaatccctctctcgtgagaagctccattttgttctctccaaatgggtcgacgccaagcctgaaaaacctactattcgttcagacaccccaaagcagtgatctggaataagtggaagctattaatgcataaatctttgagaacctgaagttcattgtcattttgaacctttctgggaatgttaattcctttggttttttctcttcatgaaatggaacatgcactggattttgatttgcacgggtaatcttggnataattccaggttaaacgaatgatttataacttattggc

SEQ ID NO: 264168 - DNA, 370 bp, Glycine max
  unsure (1)..(370): unsure at all n locations
cccacgcgtccggtgatttcagtgagtgatcggtgttcacttgatctcatcataatcgtcaggagtgaattgaagaagatgccgatcagaaacatcgccgtcggaaggcctgaagaggcgactcaccccgacacgttgaangcggctttggctgagttcatctcaaccttcatcttcgtgttcgccggctcaagctccggcatcgcctacaacaagctcaccgacaacggcgctgccacccctgccggcctcatctccgcctccatcgcccatgcattcgccctcttcgtcgccgtctccgtcggcgccaacatctccggcggccacgtcaaccccgccgtcaccttcggcgccttcgtcggcggcaaca

SEQ ID NO: 264169 - DNA, 295 bp, Glycine max
gtcagtcttcagagctaaaaatgttctcactcttccatctcagtatgtgttgacatggtggacgaggaatgctaaaaccggtacattgttagatgaacatgcatctgaattgccaagtacttctcgtgaatctgtaccagtttgttataacaatttacgacaagaagcaatcaaatatgttgaagaaggtgcaaaatcaatccaaatctatcatgttgccatgagagctcttaaagaagcttcttaaaaaggtttgcaccataaaaaatcagagttctggaacagcagaaggagc

SEQ ID NO: 264170 - DNA, 384 bp, Glycine max
gtctggaattcccgggtcaacccacgcgtccgcaaagacatccttctcctggatgtggctcccctcactctcggaattgaaactgttgggagatacgtgacaaagttgattgccagaaacactgttatcccaaccaagaaatctcaggtgttcaccacctatcaggaccagcagactacaggcttcattcaggttttcgaaggcgaaaagagtcttacaaaagattggcggcttcttgggaaaattgaaccggcttgaaatgcttcaaccccaaggggtaccccttaaattggagtgaccctctaagattatgcccaccgcgttctaaatgtgaaagcgcaaaacacaggcactctgtaatcacaaaagagcaccctttcacac

SEQ ID NO: 264171 - DNA, 364 bp, Glycine max
ccttaattcccgggtccagccacgcgtgcgcccacgcgtccaatgattccaaagtttgatcgtttttcacttgatctcatcataatggtcatctgcaatattttaaaatgcccatcagcaacatcgccgtcagaaggcctgaaaaggcgactcaccccgacacgtttaacgctgctttggctgatttcatctcaaccttcatcttcgtgttcgccggctcatgctccagcatcgcctacaacaagctcacctacaactgccctgccaccccttctctccttatctcctccttcatcgcccattcattccccctcttcgtctccatctccgtcggcgccaacatcttcggctgtcacattaaccc

SEQ ID NO: 264172 - DNA, 284 bp, Glycine max
  unsure (1)..(284): unsure at all n locations
tcagtcttcagagctaaaaatgttctcactctttcatctcagtatgtgttgacatgctgnattgggaattctaaaaccggtacattgttagatgaacatgcatctgaattgccaagtacttctcgtgaatctgtaccagtttgttataacaatttacgacaagaagcaatcaaatatgttgaagaaagtgcaaaatcaatccaaatctatcatgttgccatgagaactctgaaagaagctgctaaaaaagtttgcaccataaaaaatcaaaattcttgaacaac

SEQ ID NO: 264173 - DNA, 414 bp, Glycine max
cccacgcgtccggtgatttcagtgagtgatcggtgttcacttgatctcatcataatcgtcagcgtgaattgaagaagatgccgatcagaaacatcgccgtcggaaggcctgaagaggcgactcaccccgacacgttgaaggcggctttggctgagttcatctcaaccttcatcttcgtgttcgccggctcaggctccggcatcgcctacaacaagctcaccgacaacggcgctgccacccctgccggcctcatctccgccttcatcgcccatgcattcgccctcttcgtcgccgtctccgtcggcgccaacatctccggcggccacgtcaacccccgccgtcaccttcggcgccttcgtcggcggcaacatcaccttcctccgcggcatcgtctacgtcatcgcccagctcctc

SEQ ID NO: 264174 - DNA, 433 bp, Glycine max
cagagtttgagtggacctgtctcagctaccctttaccttggttattcactactcatgggcattgcaatcatgttgtcaaccggcaccattggcttccttatgtcattctactttgtgcactacttgttctcatcagtaaagatagattgaggttcttgttgtcattgcatattaactatgaaaaaggttgattgatataacttgatcacattgcatagtagggcaacggatgtttaattcattgtctgattttatattgcgatgggatctgcagtttgttctccttctgccttgtttcccaaagtagtgtactcattcaagtattcaactagtgtttgagatcatgtttcaagtattttgttcaagtttctttaaaaagttgtaattcaaactctcatctcatttcaatactttagaaaaatgatgttagatt

SEQ ID NO: 264175 - DNA, 313 bp, Glycine max
  unsure (1)..(313): unsure at all n locations
gggtcgacccagcgcgtccgcagaagtcagaacccagatgcactccaacatgttctgatgaaagctgatgagtatctgngcagacagccttcttaaactccctactcagaatttgagcacaagttccaggagattggtttggagagaggatctattgacaacgcagagcgtgttcttgagtcaattcaacttctcttggatcttcttgaggcccctgacccttgcacccttgagactttccttggaagaattcctatggtcttcaatgttggcattctttctccccttggttcctttgcccaagataatgtct

SEQ ID NO: 264176 - DNA, 432 bp, Glycine max
cagagtttgagtggacctgtctcagctaccctttaccttggttattcactactcatggccgtggcaagcatgttgtcaaccggcaccattggcttccttatgtcattctactttgtgcactacttgttctcatcagtaaagatagattgaggttcttgttgtcattgcatattaactatgaaaaaggttgattgatataacttgatcacattgcatagtaaggcaacggatgtttaattcattgtctgattttatattgcgatgggatctgcagtttgttctccttctggctggttcccaaagtagtgtactcattcaagtattcaactagtgtttgagatcatgtttcaagtattttggtcaaagttctttagaaggttgtaattcaaactctcatctcatttcaatactttagaaaaatgatgcttagat

SEQ ID NO: 264177 - DNA, 450 bp, Glycine max
  unsure (1)..(450): unsure at all n locations
gcagagcagagatctagcgtattctctcgctctttctttcactgtcacagagccacggccggaggcttcccagccaacggcgcctctgcggcccagcccctaaacttcctcatctacggccgcacgggctggattggcggcctcctcggctccctctgccgggcccagggcatctccttccattacggctcgggccgcctcgagaaccgggcctncctcgaaaccgacatagccctcctcaagccctcccacgtcttcaacgccgccggcgtcacggngccgcccaacgtcgactggtgcgagtcccacaaagtcgagaccatccgaaccaacgtcgtcggaacccttactctcgccgacgtctgccgcgaccacggcctcattctcatcaactacgccaccggttgcattttcgagtacgactccgatcacccnctcggatccggtatc

SEQ ID NO: 264178 - DNA, 458 bp, Glycine max
aatttccgggtcgacccacgcgtgcgcagaggttgagtggacctgtctcagctaccctttaccttggttattcactactcatggccatggcaatgatgttgtcaaccgggaccattggcttccttatgtcattctactttgtgcactacttgttctcatcagtaaagatagattgaggttcttgttgtcattgcatattaactatgaaaaaggttgattgatataacttgatcacattgcatagtatggcaacggatgtttaattcattgtctgattttatattgcgatgggatctgcagtttgttctccttctgcctgtttcccaaagtagtgtactcattcaagtattcaactaatggttgagatcatgtttcaagtattttgttcaagtttctttaaaaagttgtaattcaaactctcatctcatttcaatactttagaaaaatgatgttagatt

SEQ ID NO: 264179 - DNA, 456 bp, Glycine max
gaacttcagggtcgggccacgcgtacgcgtgcggctgagcgcagatctagcggattctgttgctgtgaataccactggcacagagccaggatgcggagctgctgacacaacggcgagtctaaggaccagacccctgaacttgctcagctacagccgcacgggctggattggcaggctcctatggtacctgtgccgggccaagtgcatgtccttccatcacgggtcgaaccgccttaagaaccgggcctacctcgaaaccgtcataccactgctcaagccgttacacgactgtaacgctgccggatttacgggccgccccaacgttgactggtgcgagtcccacacagtcgagaccatgcgtaccaacgtcattggaacccgaactctagccgacatatgccgtgaccacagactcattctcatgagctacgccaccggttgcattttgagtacgac

SEQ ID NO: 264180 - DNA, 249 bp, Glycine max
tagcacttcttcttttcacactgccgcttcaactatggcttcagagaataaactttcgagcccgattatttagataaaagtgcagaagctcgttctcaatatctctgttggccaaagtggagatcgtctcaccaaagccgccaaagtgtttgaacaacttagtggccaaaccccagtgttttccaaatcaaggtacactgttcgttcctttgggattagaagaaatgagaagattgcattctatgtcac

SEQ ID NO: 264181 - DNA, 143 bp, Glycine max
ggaattctccgggtcgacccacgcgtacggaaaaaaaaaaaagccttttactttttttcttttgcatgatttgaatcttgattggaaaagatgcgaatgggggtgttttacccatcaattcaattttaagccgtgccttcttc

SEQ ID NO: 264182 - DNA, 407 bp, Glycine max
cggaattccgggggggacccacgcgtccgcctaaacaactctttctcttcttccttcgctcgttgttctccctcgcgtagatcgacggtgggggagacagagacgtgggctttccaggctgagatcaaccagctcctcagtctcatcatcaacaccttctactccaacaaggagattttccttcgtgaactcatcagcaacgcctccgatgctttggacaagattcgatttgagagtttgacagataagagcaagctcgatgctcagccagagttgttcattcatattattccagacaagactaacaatacactgaccattgttgacagtggtattggcatgaccaaagctgatttggtgaacaacttgggtacaattgctagatctggtaccaaggaattcatgga

SEQ ID NO: 264183 - DNA, 446 bp, Glycine max
cctaaacaactctttctcttcttccttcgctcgttgttctccctcgcgtagatcgacggtgacggagacagagacgtttgctttccaggctgagatcaaccagctcctcagtctcatcatcaacaccttctactccaacaaggagattttccttcgtgaactcatcagcaacgcctccgatgctttggacaagattcgatttgagagtttgacagataagagcaagctcgatgctcagccagagttgttcattcatattattccagacaagactaacaatacactgaccattgttgacagtggtattggcatgaccaaagctgatttggtgaacaacttgggtacaattgctagatctggtaccaaggaattcatggaagccttggctgctggtgctgatgttagtatgattggacagtttggtgtggggttctactctgcatatc

SEQ ID NO: 264184 - DNA, 445 bp, Glycine max
ggaattcccgggtcgacccacgcgtacgggcggggctgaggcggactcgccgtgcggtggttgaggagaagacggagttcgacgtggcgagcgggagggtgccgagcaacgctcgaatcgcggcgattaatgcggtgagggcattgacgaacctagcgctgaaggaggcgaacgagttgatcgaagggttgccctagaagttcacggaagggattccataggacgaagctgaatatgcgaagaagcagctcgaagaagctggcgccactgataccatagcgtacacactgcttagctgcagcatatatgcactgcttcttctcatggtggatgtagttgagttcaccagtacactggaatttcatttccattttgtctggattgcaatcttttatttcgaatgatgaaatatgagttcttatttttatattatgttttttaatgc

SEQ ID NO: 264185 - DNA, 441 bp, Glycine max
  unsure (1)..(441): unsure at all n locations
atttgttgctgcaggaattcacagcccggcctgatatagcagatgattgttttttggggggacgaacgtgtattcgctactgtcctcaactgtttattccctcgtctgtttttccttcattagtggattgctctatgattgggatcacagtacagcatatggaggcttcgaattccatattgcatttcttggctgacatttttgatcttgcgaattcctctgtgggggagcaatttataccaataagagatagtgtaataattcctcgaggtgccagcatcaccagaattttggttgcttcattaacgggagcacttcctaaatctcgagtggatgtggcatcttatacactcctggcattaactcgatcatatgggatgcaagcgctggaatgggcaaaaaagagtgttttgttaattccatcaacagctgntacagatg

SEQ ID NO: 264186 - DNA, 307 bp, Glycine max
caattcccggctcgacctacgcgtacggtttatctctcacacacactttctctctctctctatctcacccagatcttatatcagtgacgagcgctatcactccacgctaagagttcatgtacatggcgaacctggcttactcaacctaacgctactagcatatgatgaaattcatttaaaaagtctccgactacttcgagtaccagaatctcaccgacaacgctcgtaacctcctttccctatcctaccaaaactgcatcaacgctaccctcgcctcaccactcatcatctgctcaatctatctaaa

SEQ ID NO: 264187 - DNA, 249 bp, Glycine max
gaaattccagggaaaacaattttctctttgtgatgctgaatactttgtatctcactctccgtgtgacgagcttgtacagaagagttttgctcggttgtttttcaatgacttcttgatgaattccagctctgcggatgaggttgccaaagaaaaactgggaccttttgcaactttatctggtgatgagagctaccaaagtcgggatcttgaaaaggcatcccagctacttgcaaagcctctatatgatca

SEQ ID NO: 264188 - DNA, 340 bp, Glycine max
acgaacagatcaatgtggagtacaatgtttcgtacgtttatcatgcgatgtttgcctacttggatagggacaatgttgcgctcaagggtcttgccaagtttttcaaggagtcaagcgaggaggaaagggagcatgctgagaaattgatggaatatcagaacaagcgaggtggaaaggtgaagttacaatctatagtgatgcctcttactgagtttgaccatgaggaaaagggagatgcgctatatgcaatggaacttgccctgtcgttggagaagctgacaaatgaaaagctgcttaacttgcacagggttgcctcaaagaacattgatgtgcaattggc

SEQ ID NO: 264189 - DNA, 308 bp, Glycine max
attggactggaattctgacgtacatgtacgcgtgcggctgaggcggacacaccgtctgtggttgaggataagacggacatagacttgatgaatgggaaggcgccgagcaacgctcgaagcgcggtgattaatgcggtgagggcattgacgaacctagcgctgaaggaggctaatgagttgatcgaaggggtgcccaacaagttcaaggaagggatttcaaaggacgaagctcaagatgctactatgcaactctaagaaactggtgccaaggttacgatcgcttaaacactgcatagctgcatcatata

SEQ ID NO: 264190 - DNA, 411 bp, Glycine max
actggagtttcgggctagacgtacgcgcggggctgtggcggacgcgccggcggtggttgaggagaagacggagttcgacgtggtgaacgggaaggtgccgagcaacgctcgaagtcgcggtgattaaggcggtgagggcattgacgaacctagcgctgaaggaggcgaaggagttgatcgaaggggtgcctaagaagttcaaggaagggatttcaaaggacgaagctcaggatgcgaagtagcaactctaagaaactggtgccaaggttacgattgcttaaacactgcttagctgcagcatatatgctatggttcttagcctgttggttgatgatgagttcaccagtacactgtaattccatttccatattgtctggatttcaatcttcaattggtaatgaagaaatatga

SEQ ID NO: 264191 - DNA, 319 bp, Glycine max
gtcacgcgtacgtccacgctttcggccacgcttgcgcccacgcgtccgtatacctgaggcgagagactagctctgtgcattctgctctcgctctctgccttccatcacactcggcatttcctttcccaagatcgtagaagatggcagacactgaggatattcaacctcttgcgtgcgacaatggaacaggaatggttaaggctggacttgctggagatgatgccccacgtgctgggtttcccagcattgcacgtcgtccacgtcacactggtgtgatggttggcatgggccaaaaagatgcatatgttggagatgaggc

SEQ ID NO: 264192 - DNA, 403 bp, Glycine max
cccacgcgttcgtcaagcattgcattcctcttgatttgtagtccgatttgtgctttagatgaagggtgtgccaaatcaagatgggttttaagatcatagtgtgtgttatgcaacaatggctaagttctttgctgctatgatcttggcactctgtgccatttccatacttcaaacagtgttaatggctgctcatgaacagcgaggccacttgtatgacaacatgagcacatatggaagtggaagagtcaagagttaccaatgcccatacaatgctcgaggagatgtagcctgacccaataccacaagccctgcatgtgtttctgtcacaagtgctgcatgacatgcctgtgtgtgcccatcgggtattatggttataaagctgtgtgcccttgctacaacaact

SEQ ID NO: 264193 - DNA, 212 bp, Glycine max
aattcccgggtcggccgacgcgtccggccacgcgtccggtgatttcagtgagtgatctttgttcacttgatctcatcataatcgtcgaagtcaattgaagaagatgccgggcagaaacatcgccgtcggaaggcctgaataggcgactcaccccgacactgttgaaggctgctttggctgagttcatctcaaccttcatcttcgtgttcggc

SEQ ID NO: 264194 - DNA, 294 bp, Glycine max
gatttggatgctaatttttttgatcagccagaaatgcttggagagcccattgcaagtctgggtttgctgcactatgaaggtcaagtttcggatcccttgaaaggattatatggagctggagctcatactgactatggtttaattacactgttagcaacagatgatgtctcgggtcttcaaatatgcaaagatagggatgctaaacccttaaaaatgggaggatgtagcaccattgaagggagcattcatagtgaatctttgtgacatgcctgaacgctggaacaactgcgtttt

SEQ ID NO: 264195 - DNA, 296 bp, Glycine max
cttgatgatcccaacactttcggtaacaggattcacaggatgctgaagcttggactgaggatggatggagatgctggtgaagcagatgctgacatgcctcctcttgaggacgctgatgcacatgctgagggtagcacgatggaagaagttgattaaatctgacttaattgcctgttacgtttttagaaacaatgattggagaaacagtctttttactatgtttgatgtttattgaattttcgaaattttggaacgttggctagttaggtgccgtatgtagtagtttctctatggta

SEQ ID NO: 264196 - DNA, 453 bp, Glycine max
gatttggatgctaatttttttgatcagccagaaatgcttggagagcccattgcaagtctgcgtttgctgcactatggaggtcaagtttcggatcccttgaaaggattatatggagctggagctcatactgactatggtttaattacactgttagcaacagatgatgtctcgggtcttcaaatatgcaaagatagggatgctaaacctcagaaatgggaggatgtagcaccaattgaagggagcattcatagtgaatcttggtgacatgctggagcgctggagcaactgcgtttttaagtccacactgcacagagttctaggaaacggtcaaggaagatattctattgcatacttcttggagcccagtcatgattgtctagtggagtgcttgcctacctgcaaatcagacagtaatccgcccagatttcctgccatcttatgccatgactacct

SEQ ID NO: 264197 - DNA, 419 bp, Glycine max
atcgtgagaggggcagtagccgagattccgtgagttgcaaaaatgaagacgattgtgtccagcgagaccatgaacatcccggacggcgtgagcatcaaagttcatgccaaggtcatcgaagttgagggcccccgcggaaaattggtgcgagacttcaagcatttgaatctcgattttcagctcattactgacgaaaacggtaaaagaaagctgaaaatcgacgcgtggtttggttctcggaaaacatccgccgccattcgcaccgccttgagccacgtggagaatcttatcaccggcgtcaccaagggctaccgctacaaaatgaggttcgtttatgcccattttcccatcaacgcaagcttcggcaacagcaacaagtctattgagatccgaaatttccttgcgagaagaagtgagga

SEQ ID NO: 264198 - DNA, 469 bp, Glycine max
gtcctgaattcccgggtcggccgcgcgtccgatcgtgagaggggcagtagccgagattccgttagttgcaaaaatgaagacgattctgtccagggagaccatgaacatggcggagggcgtgagcatcaaagttcatgccaaggtcatcgaagttgagggcccccgcggaaaattggtgcgagacttcaagcatttgaatctcgattttcagctcattactgacgaaaacggtaaaagaaagctgaaaatcgacgcgtggtttggttctcggaaaacatccgccgccattcgcaccggcttgagccacgtggagaatcttatcaccggcgtcaccaagggctaccgctacaaaatgaggttcgtttatgcccattttcccatcaacgcaagcattggtacaagcaacaggtcttttgagatccgaaatttccttggcgagaagaatgtgaggaaagtcgacatgcttgat

SEQ ID NO: 264199 - DNA, 344 bp, Glycine max
ggctacttttgattgcttgatgaaaacctatggattcctgacaccagaattctggaaggagacgcgggtctccaaatctccattccaagagtacacagatctactggcaaaaccaacaggaaagactctaatcttggaggaggaaagggtggatgcttgatttgctagttttgctttatggatgttttaggaactttattactttacatactttgctggttctgtgctttacttttggttttgatagacggtatgtctctgtatgcattttgattgtttccaagttttaattgactgcaaaaaaaaaaaaggcaaacaatacgaaatcaaaatagatcaagatc

SEQ ID NO: 264200 - DNA, 345 bp, Glycine max
  unsure (1)..(345): unsure at all n locations
ggctacttttgattgcttgatgaaaacctatggattcctgacaccagaattctggaaggagagtcgcttctccaaatctccattccaagagtacacagatctactggcaaaaccaacaggaaagactctaatcttggaggaggaaagggtggatgcttgatttgctagttttgctttatggatgttttaggaactttattactttacatactttgttggttctgtgctttacttttggttttgatagacggtatgtctctgtatgcattttgattgtttccaagttttaattgactgcaaaaaaaaaaaatgaatgnaaaactatcaaaagtactacatgacatc

SEQ ID NO: 264201 - DNA, 326 bp, Glycine max
  unsure (1)..(326): unsure at all n locations
cccacgcgtccgccacgcgtccggtttctggtggaggatccaacttcagagcaattcatgagacgctggaaaaggtgatcacttcatggagatgttcttgtgttggtcacaaataaaagtgattgtggaagtgcggaatatgcaagaaataatgggattccagntatactggaccatatatcaaaaggtgaatctaaatcaagtgaccctggtgattcacttagggaatttgaaggtgaatttaatcttttaacttgataccttaaacttattccaatggaattgatcccagcttaccaaagatctattttcaacattcattcatt

SEQ ID NO: 264202 - DNA, 241 bp, Glycine max
ccacgcgtccggtttctggtggattatccaacttcagagcaattcatgcagcctgctattattgatcacttggtggagatgttcttgtgttggtcacaaataaaagtgattgtggaggtgcggagtatgcaagaaataatggtatcccagttatactgtaccatatatcaaaggatgaatctaatccaagtgaccttgttgatacactaatggaatttgaagttgattttattcttttagc

SEQ ID NO: 264203 - DNA, 331 bp, Glycine max
  unsure (1)..(331): unsure at all n locations
gaattcccgggtcggcccacgcgtccgcccacgcgtccgtcacgcgtccggattctggttgattatccaacttcatagcaattcatgcatcgatcgtnatttgatcacttgacggaaaccatcttgtcttgcccacaaataaaagtgattgtccagctcccaagtctccaagaattaatggtatcccaattttactgtaccatatatcaaaggttgaatctattccaagttaccttgttaatccactaaggaaattttaggttgatttcattcttttacctggatacctcaaactttttccattggaattgatcccagcttccaaaagatc

SEQ ID NO: 264204 - DNA, 199 bp, Glycine max
  unsure (1)..(199): unsure at all n locations
cagaattcagaacccagatgcactccaacatgttctgaggaaagctgaggagtatctgggcgcaggagctcctgaaactccctactcagaatttgagcacaagttccaggagattggtttggagagagggtggggtgacaacgcanagcgtgttcttgagtcaattcaacttctcttggatcttcttgaggcccctgac

SEQ ID NO: 264205 - DNA, 428 bp, Glycine max
cccacgcgtccgcgcgtcgctgctccgtaccagtttcactgcataaatttgagagagaactgtgcaaacatgttggtttatcaggacctccttacaggtgatgagcttctctcggactccttccgttacaatgaaattgagaatggaatgctgtgggaagttgaggggaagtgggttgttaagggagcagttgatgttgacattggtgcaaacccttctgctgagggtggagaagatgagggagtcgatgacgcagctgttaaggttgttgacattgttgatacattcagacttcaggagcaacccgcttttgataagaaacagtttgttaccttcatgaagaggtttatcaagaatttgactcccaagctcgatgcagagaaacaagaattggttaagaagcacattgagggagcaacttaatacct

SEQ ID NO: 264206 - DNA, 224 bp, Glycine max
cccattttaaaatttactaaacatagttatttattagaaattatatatacatacacgaacataaactaacaatcaaaatcttcatatcatttctattataaacaacattataatttaaccatatcacatgatcactttacttataatatacctatatcatttcaataccacatcattcaattcatatcaccaaaatcaaatccttatactacaacaaactttca

SEQ ID NO: 264207 - DNA, 418 bp, Glycine max
ctcttctcttcgctcctgcacttgttgtttctttgcccttcatggcatctcaggctagcctgctccttcaaaagcagctcaaagatctttgcaaaaaccccgtcgacggcttctctgccggtttggtcgatgaaaccaacatttttgaatggagtgtcaccataattgggccgcccgatactctctacgaggggggatttttcaatgctattatgagtttcccatccaattacccaaatagtccaccttcagtgaagttcacctcagagatatggcaccccaatgtatatcctgatggccgggtttgcatatcaattcttcatcctcctggtgaggatccaaatggttatgagcttgcaagtgagcgctggacacctgttcatacggtagagagtatagtattgagtatcatatcaat

SEQ ID NO: 264208 - DNA, 311 bp, Glycine max
  unsure (1)..(311): unsure at all n locations
cctaaacaactctttctcttcttccttcgctcgttgttctccctcgcgtagatcgagaatggcggagacagagacgtttgctttccaggctgagatcaaccagctcctcagtctcatcatcaacaccttctactccaacaaggagattttccttcgtgaactcatcagcaacgccttcgatgctttggacaagattcgatttgagagtttgacagataagagcaagctcgatgctcagccagagttgttcattcatattattccagacaagactaacantacactgaccattgttgacagtggtattggca

SEQ ID NO: 264209 - DNA, 401 bp, Glycine max
atggctcccaaaccgcctagtacgggtctgtttgttggactgaacaagggtcacgtcgtgagcaagaaggaattgcctccacgcccctcagatcgtaaggggaaaacaagcaagagggtgcactttgtgaggaacctcataagagaggtagccggttttgcaccctatgaaaagcgtataactgagttgctgaaggttgggaaggataagagggcactgaaggttgcaaagagaaagctcggaacacacaaacgcgcaaagaagaagcgtgaggaaatgtccagtgttctcaggaagatgagggctggtggtgctggagacaagaagaaataagtcttatttactgttttccagattcactagatggacctgtgtattgatggacgagctttcatattttt

SEQ ID NO: 264210 - DNA, 359 bp, Glycine max
gttgaattcttatgcaaagatttctgtccatcttctctggatgatattgccgagatgagtgggccactatgtcaagaatcagctcccacttctcactccatgagattcactagaagtttgagtgggctttcggtcaggaggtctttagttggttcatttgaggagtctcttttatctggccggttcttatctggaaacaatagcaagaaaatcgatggttttcttgctgtgctaagcattactggtgggaacttttctcctaaatctcagaagcttccattctctggtactagcgtggatggagattgctatctactgtattatgcatcaatagatcttgctggaaattcctcttcaaa

SEQ ID NO: 264211 - DNA, 114 bp, Glycine max; identical to SEQ ID NO: 262864

SEQ ID NO: 264212 - DNA, 423 bp, Glycine max
cccacgcgttcgagaaggcctgggcttagttgataagcataactgggtgaggaagaaagagaggagagtgaagaagatggcgtcgagcggagcggtaccgttttggagggcggcggggatgacgtacataacatactcaaacatatgcgcgaatctgctcaggaattgcctcaaggaaccctacaaggccgaatccctctctcgtgagaagctccattttgttctctccaaatgggtcgacgccaagcctgaaaaacctactattcgttcagacaccccagagcagtgatctggaatagttggaagctataaatgcataaatctttgagatctggaagttcattgtcattttgaacctttctgtgatgtttaattcctttggttttttctctccatgaaatggaacatgcactggattttgat

SEQ ID NO: 264213 - DNA, 86 bp, Glycine max
ttgcacttgctaaaaatgctatcaaatatcattacaaagaatattactttactaacaatagtcctcttctctaataatacactctt

SEQ ID NO: 264214 - DNA, 448 bp, Glycine max
cccacgcgtccgcccacgcgtccgcagggaagttgtggaagttgttgggcgttctcaacgggggccacagtggaagcaataaacaagatagtgacagggaagtttgtgtccttatctgaacaagaacttgtggactgtgacagagcctacaatgaaggatgcaatggtggccttatggactatgcattcgaattcatcattcaaaatggaggcattgacacagacaaagattacccataccgtggctttgatggcatctgtgatccaactaagaaaaatgcaaaggttgtgaacattgatgggttcgaggatgttccaccgtatgatgagaatgccttgaagaaagctgtcgctcatcaacccgtaagcattgctattgaagcctctggcagagatttgcaactttatcaatccggtgtatttactggtaaatgtgggacaagtttag

SEQ ID NO: 264215 - DNA, 336 bp, Glycine max
cgcaccagtttcaccgcacgaatatcttgttgtttggagcgatccgagaaaaactgtgtaggcatgttggtttaccaggacctccttacaggtgatgagcttctctctgactccttccgttacaaggaaattgagaatggaatgctgtgggaagttgaggggaagtgggttgttaaaggagcagttgatgtagacattggtgcaaacccttctgctgagggtggaggagaagaatgaggaggtgatgatgcagctggtaaaggtggtgacattggtgacacattcagaatttaagggcaacccgcattcgattagaaaccatttggtaccttcatg

SEQ ID NO: 264216 - DNA, 366 bp, Glycine max
cccacgcgtccgcacgaaagccgggatctttcagaaaatggattcctattcgaagggtgcgtaaccgcatggataagctcacactaacccgtcaatttgggatccaattcggttccttaggaggtatcgggaaggaattttggaatgtaataatatcgattcatacagatacagaagaaagggttctctattgattcaaacgctctacctacgagatagggatagagaaagaggaaaaaaccgaggatttcacatagtacttttggtcgaaaaatcgatctgatttttttcgtacttttcgctcaatgatgaaatgggtcagattctacaggaccaaaccttgtgggagttaaaggatgatggaag

SEQ ID NO: 264217 - DNA, 450 bp, Glycine max
caaagacatccttctcctggatgtggctcccctcactctcggaattgaaactgttggtggagtcatgacaaagttgattcccagaaacactgttatcccaaccaagaaatctcaggtgttcaccacctatcaggaccagcagactacagtctccattcaggttttcgaaggcgagaggagtctcacaaaggattgccgccttcttgggaaatttgatctgtctggaattcctccagccccaaggggtacgcctcaaattgaagtgaccttcgaagttgatgccaacggcattctaaatgtgaaggcagaagacaagggcactggtaaatcagaaaagatcaccattacaaacgaaaagggacgtcttagccaggaagaaattgagagaatggttcgcgaagcagaggagtttgcagaagaagacaagaaggtgaaggagaggatcgatgc

SEQ ID NO: 264218 - DNA, 398 bp, Glycine max
caaagacatccttctcctggatgtggctcccctcactctcggaattgaaactgttggtggagtcatgacaaagttgattcccagaaacactgttatcccaaccaagaaatctcaggtgttcaccacctatcaggaccagcagactacagtctccattcaggttttcgaaggcgagaggagtctcacaaaggattgccgccttcttgggaaatttgatctgtctggaattcctccagccccaaggggtacgcctcaaattgaagtgaccttcgaagttgatgccaacggcattctaaatgtgaaggcagaagacaagggcactggtaaatcagaaaagatcaccattacaaacgaaaagggacgtcttagccaggaagaaattgagagaatggttcgcg

SEQ ID NO: 264219 - DNA, 302 bp, Glycine max
tccggaattgccgggtcgacccacgcgtacgctctctgctcctagggtttctccttcgagtgagggaaatggctcccaaaccgcctagtacgggtcggtttgttggactgaacaagggtcacgtcgtcaccaagaaggaattgcccccacgcccctcagatcgtaaggggaaaacaagccaagagggtgcactttgtgaggaacctcataagagaggttgctggttttgcaccctatgaaaagcgtctaactgagttgctgaacgttgggaaggataagagggcactgaaggttgcaaagag

SEQ ID NO: 264220 - DNA, 329 bp, Glycine max
cacgcgttcgcaactactccgaaccgctcacgttatccacacaacaacactccttaaaccctaaccaaccgtgggttcttccaccttcaccgcaatgtccgcttgcaagctttcctcctccgccgccatctcctccttccccacccaccgccgcaccaacgccgtccttctgtccagacgcatccgcgccgtcagggtctccgccatggccaaggagttgcacttcaacaaagactgcacctcaattaggaagctccagagcggtgtgaacaagctcgcggatctggttggggtcacgcttggtcccaagggaaggaatgttgttctcg

SEQ ID NO: 264221 - DNA, 283 bp, Glycine max
cgttcgcgaactactgcgaaaccgctcactttatccacacaacaacactccttaaaccctaaccaaccgtggggttcttccaccttcaccgcaatgtccgcttgcaagctttcctcctccgccgacatctcctccttccccacccaccgtcgcaccaacgccgtccttctgtccagactcatccgctccgtcagggtctccgccatggccaaggagttgcacttcaacaaatacgtcacctcaattaggaagcttcaaagcggtgtgaacaagctcgcggatc

SEQ ID NO: 264222 - DNA, 233 bp, Glycine max
cccacgcgtccgcgagcttcagcaatggtgtacgtcaaggctcagaaatcaaaagggtacgtcaagagatatcaagtcaagttcaagagaagaagagagggaaaaaccgattaccgtgccaggattcggttgattaatcaggacaagaacaaatataacactccgaaataccgatttgtggttcgctttagcaacaaggacattgttgcacaaataatatctgctagcattgc

SEQ ID NO: 264223 - DNA, 453 bp, Glycine max
  unsure (1)..(453): unsure at all n locations
tcccggntcgacgcacgcgttcgcgcagcagtttcaccgcacgaatatcttgttgtttggagcgatccgagaagaactctttagacatgttggtttaccaggacgtccttacaggtgatgagcttctctctgactccttccgttacaaggaaattgagaatggaatgctgttggaagttgaggggaagtgggttgttaaaggagcagttgatgtagacattggtgcaaacccttctgctgagggtggaggagaagatgagggagttgatgatgcagctgttaaagttgttgacattgttgacacattcagacttcaagagcaacccgcattcgataagaaacactttgttaccttcatgaataggtttatcaagaatttgacttccaagctcgatgcaaagcaacaggagttgtttaagaagcacatctaaggaacaacttaatacctgctct

SEQ ID NO: 264224 - DNA, 458 bp, Glycine max
  unsure (1)..(458): unsure at all n locations
cgcaccagtttcaccgcacgaatatcttgttgtttggagcgatccgagaagaactctgtagacatgttggtttaccaggacctccttacaggtgatgagcttctctctgactccttccgttacaaggaaattgagaatggaatgctgtgggaagttgaggggaagtgggttgttaaaggagcagttgatgtagacattggtgcaaacccttctgctgagggtggaggagaagatgagggagttgatgatgcagctgttaaggttgttgacattgttgacacattcagacttcaggagcaacccgcattcgataagaagcagtttgttaccttcatgaagaggtttatcaagaatttgactcccaagctcgatgcanagcaacaggagttgtttaagaagcacatcgagggagcaactaaatacctgctctctaagattaaagatttccaattttttgg

SEQ ID NO: 264225 - DNA, 329 bp, Glycine max
taatatctggttttttggaaccatccgataggaactctttggacatttttatttaccaggacctgcttacacgtgatgagcttctttcttactccttccgttacaaggaaattgataatggaatgctgtgggaagttgatgggaagtgggttgttaaaggagcaattgatgtagacattgttgcaaacccttcttctgaaggtggatgataaaattacggatttcatgatgcaacttttaaagttgtttacatttgtgacacattcatacttcatgaacaacccgcatttgataataaacatttttgtaccctcattaatatgtttatc

SEQ ID NO: 264226 - DNA, 352 bp, Glycine max
cggacgcgtgggcggacgcgtgggtcacaatctagggttttagaatttacccaaaagcctcgtccatggcagaagaagcagcactggaagtcgttgatcccaacaccgccgctgccgccgccgccgtggacatggacgtcgagaatgtcgaggccggcggcaacggcgccgagccgaaccagaagcgcgccagggaggaagaggagccccagggcggcgacgacgacgtttcgaagaagcagaaggtggacgaggaaaacgaaaagtccgtagaggaacaacgcttggagaagcgcgatgaacaagaagaagaaaaaggagaagaaaaagaagcagaaaaagaagaagaaga

SEQ ID NO: 264227 - DNA, 362 bp, Glycine max
gttgccgggctctaccgtggtttcaacatctcatgtgttggaatcatcgtgtatcgtggtgtgtactttggattgtatgattctgttaaaccagttgtcctcacagggtcattgcaggatagcttttttgccagctttgcccttggatggctcatcaccaatggtgcaggtcttgcatcatacccaatagacactgttagaagaagaatgatgatgacctctggtgaagctgtcaagtacaagagctccttggatgcattcacacagatcctcaagaatgagggtgccaagtccttgttcaagggtgccggtgccaacatcctccgtgccgttgccggtgctggtgtgcttgctggttatga

SEQ ID NO: 264228 - DNA, 399 bp, Glycine max
cccacgcgtccggtgatttcagtgagtgatcggtgttcacttgatctcatcataatcgtcagcgtcgattgaagaagatgccgatcagaaacatcgccgtcggaaggcctgaagaggcgactcaccccgacacgttgaaggcggctttggctgagttcatctcaaccttcatcttcgtgttcgccggctcaggctccggcatcgcctacaacaagctcaccgacaacggcgctgccacccctgccggcctcatctccgcctccatcgcccatgcattcgccctcttcgtcgccgtctccgtcggcgccaacatctccggcggccacgtcaaccccgccgtcaccttcggcgccttcgtcggcggcaacatcaccttccttcgcggcatcgtctacgtca

SEQ ID NO: 264229 - DNA, 274 bp, Glycine max
cacgctcggaatttcattgattatctttgttttttgatctatcataatcatcagaacagtttaattatataccgatcaggacatcacctcttaagtcctcaacatgctactcacccctacacttttaatgctactctatctcatttcatctcaaccttcatcttcatgttcaccctctcattctctctcatcaactacaacaatctcaccgacaacttctcatacaccccttccatcctaatcttcgactccatcacccatacattaaccctct

SEQ ID NO: 264230 - DNA, 416 bp, Glycine max
  unsure (1)..(416): unsure at all n locations
cttttctactttgagtcttcttgatccttctttttctccttgaactcaaacatggcagatgaggtggttctgctagatttctggccaagtccatttgggatgagggtcaggattgcacttgctgaaaagggtatcaaatatgagtacaaagaagaggacttgaggaacaagagtcctcttctcctccaaatgaacccggttcacaagaagattccggttctcatccacaatggcaaacccatttgtgaatccctcattgctgntcaatacaatgtaggaaggttggaattgccagaaatccctggtggccttttgaccttaaccaaaaagttaagcttaaatcttggcctaatatggtgattagaagatatttgaacctggaaaggagaatttgaccttcaaaggagaagaaaaag

SEQ ID NO: 264231 - DNA, 452 bp, Glycine max
gcctcagatgctgagctgaaaaagacagtcctttatgacttccatgttgctaatggagggaagatggtgccatttgctggatggagcatgccaatccaatacaaggactcaattatggactcaacccttaactgtagggagaatggtagcctttttgatgtttcccatatgtgcgggctaagcctcaagggaaaggactctgtcccattccttgaaaagcttgtcattgcagatgttgctgggcttgcccctggaactggttcgttgactgtcttcacaaatgaaaaaggaggggcaattgatgattcagtgattaccaaggtgaaggatgatcacatatacttggttgtgaatgctggatgtaaggacaaagatctggctcatattgaggaacatatgaaggcattcaaggcaaaaggtggtgatgtgtcatggcacatccatgatgagag

SEQ ID NO: 264232 - DNA, 446 bp, Glycine max
cttctccttctcaatcttgtaattctatttcctccaccataatgctgcgcaagcttgtgtgagggccacgcaagaacaagcctggcacagttcccgttcacctcaacgtctatgatctcaccccaatcaacggctatgcctattggcttggccttggagtctaccattctggggttcaagttcatggattggaatatggttttggtgcgcacgagcacgacacaacggggattttcgaagtccaacccaaacactgccctgggttcactttcagaaagtcaattttcatcggaacaacagatctgggtccgaaggatgttcgagcattcatggagaagctggctcaggattactccggcaacacctatcatctcatttccaagaattgcaaccatttctgtaacgatgtttgtctcaaattgaccggaaagtcaatccctcgttgg

SEQ ID NO: 264233 - DNA, 483 bp, Glycine max
  unsure (1)..(483): unsure at all n locations
ccggaattcccgggtcgacccacgcgtacgcccacgcgtccgcttctctctctctctctctgctttacttgcttgaagcaatggccaaagggttgggatcagtgctgctgtttctcctcgtagctgtgagtaatgtgtttgctgtagagcttgaacttgaaactcttccaccctcttaccctcaccctcaccctgttcactcccccacaccagcacctcttcacccaccagcaaatgctcctcacccacaccaccaccaccaccaccaccaccctccagcaccagcacctgttccttcaccttctcaccacaattaccctcctacccatgcccctgctaagcctgctactcaccaccatcaccatcaccctcctgctcctgttaatccacctnctgttccggttcatcctccagttaaacctcctgttccggttcaccctccagttaaacctactgttccggctgaccctcctgttaaacctc

SEQ ID NO: 264234 - DNA, 419 bp, Glycine max
gaatccagacgcttctatgtacgaacgagattatagagttaaaaaggttactactgggagggggcatagcctggagctgagctgacaaaactcccaaccccaacctcaaccttaacctctcctcactttcttttcaaccagaactatgattaagctttgtaaagtaaaggaaaaacagagagaactggcagaaaatgcgagtggcggaccacccgttaagaagcaaagtgcctgctagttgcgtcttcacaaagatataagcgagctgaatctaccaaaatcatgtaccatgcaattccccaatggcaaagatgacctgatgaactttgaagtttcaattcgacctgatgatggatattacttatgtggcacattttcgttttcctttcaagtgtcctcccattattcccatgaagcac

SEQ ID NO: 264235 - DNA, 447 bp, Glycine max
gaatccaaacgcttctatggacgaaagagaaaatagagttaaaaaggttactactcagatggtgcagagcctggagctgagctgagaaaacccccaaccccaacctcaaccttaacctctcctcactttcttttcaaccagaactatgattaagctttttaaagtaaaggaaaaacagagagaactggcagaaaatgcgagtggcggaccacccgttaagaagcaaagtgccggcgagttgcgtcttcacaaagatataagcgagctgaatctaccaaaatcatgtaccatgcaattccccaatggcaaagatgacctgatgaactttgaagtttcaattcgacctgatgatggatattacttaggtggcacatttttgttttcctttcaagtgtctcccatctatccacatgaagcaccaaaggttaaatgcaagacaaaggtcta

SEQ ID NO: 264236 - DNA, 443 bp, Glycine max
  unsure (1)..(443): unsure at all n locations
cccacgcgtccgcttctctctctctctctctgctttacttgcttgaagcaatggccaaagccttgggatcagtgctgctgttgctcctcgtagctgtgagtaatgtgtttgctgtagagcttgaacttgaaactcttccaccctcttaccctcaccctcaccctgttcactcccccacaccagcacctcttcacccaccagcaaatgctcctcacccacaccaccaccaccaccaccaccaccctccagcaccagcacctgttccttcaccttctcaccacaattaccctcctacccctgcccctgctaagcctactactcaccaccatcaccatcaccctcctgctcctgttaatccacctnctgttccggttcatcctccagttaaaccttctgttccggttcaccctccagttaaacctcctgttcccgctcaccctcct

SEQ ID NO: 264237 - DNA, 439 bp, Glycine max
cgccatgctgttcttggagctacaaactcttgtcctgatttgatattgactggacaccaagataatgcagaatttgctcttgcaatgtgcccaactgaaccctatgttctttcaggaggaaaggacaaaacagtggtgttgtggagtattgaagaccatataacatctgctgccacagactccaaatctggtgggtcaattatcaaacaaaactctaaatctggagaaggcaatgataaaactgctgatggccctactgttggaccacgaggcatttattgtgggcatgaggatacagttgaagatgtgactttctgcccatctagtgcacaggagttctgtagtgttggagatgattcttgtctcatcttatgggatgcacgtgttggctctagccctgtggttaaggttgagaaagctcataatgctgatcttcact

SEQ ID NO: 264238 - DNA, 465 bp, Glycine max
aatacccgggccgaccgcacgcgtccgcgccatgctgttcttggttctacaaactcttttcctgatttgatattgactggacaccaagataatgcagaatttgctcttgcaatgtgcccaactgaaccctatgttctttcaggaggaaaggacaaaacagtggtgttgtggagtattgaagaccatataacatctgctgccacagactccaaatctggtgggtcaattatcaaacaaaactctaaatctggagaaggcaatgataaaactgctgatggccctactgttggaccacgaggcatttattgtgggcatgaggatacagttgaagatgtgactttctgcccatctagtgcacaggagttctgtagtgttggagatgattcttgtctcatcttatgggatgcacgtgttggctctagccctgtggttaaggttgagaaagctcataatgctgatcttcac

SEQ ID NO: 264239 - DNA, 296 bp, Glycine max; identical to SEQ ID NO: 263119

SEQ ID NO: 264240 - DNA, 323 bp, Glycine max
aattaccgggtcgaccgacgcgtgcgcttgatgatcccaacactttcggtaacaggtattcacaggatgctgaagcttggactgagcgttgaggaagatgctggtgaagcagatgctgacatgcctcctcttgaggacgctgatgcagatgctgagggtagcaagatggaagaagttgattaaatctgacttaattgcctgttacgtttttagaaacaatgattggagaaacagtctttttactatgttttatgttttttgaattttcgaaattttggaacgttggctagttaggtgccgtatgtagtagtttctttatggta

SEQ ID NO: 264241 - DNA, 337 bp, Glycine max
cccacgcgtccggtgatttcagtgagtgatcggtgttcacttgatctcatcataatcgtcggcgtcaattgaagaagatgccgatcagaaacatcgccgtcggaaggcctgaagaggcgactcaccccgacacgttgaaggcggctttggctgagttcatctcaacctttaatttcgtgttcgccggctcaggcttcggcatcgcctacaacaagctcaccgacaacggcgctgtcacccctgccgggcttatcttcggcttcatcggccatgcattcgccctttttcgtcgccgtttccgtcggggccaacttttccggcgggccacttaaccccg

SEQ ID NO: 264242 - DNA, 453 bp, Glycine max
gagttccagaggttcaaccatacttctcttcttccctttacatccgcactgtttcctcgggtacagccataatggttcgcattctgacggaaaatggcggagtggaacgcatggaggagatcatcagggaccatttggaccccatttcaaagcaagtgttggggatctggttggatcattgtgcttgtgccaagcgacaagttggagaggcagaaagagcttatcttaagaaaagggatggtctcattagaaacaagaccattgagattgatcttggttcaagctttcccagattgtttggtccagaagtagcaaaccgggtactggatgctatcaaggagtattttacagtctgagatgcaaatttatttggaattggtggatattctatggattacatacacgtacctaatttgctgtgcaatctaatgaggcctcagtatttgctgaaaa

SEQ ID NO: 264243 - DNA, 391 bp, Glycine max
aattcccgggtcgaccgcacgcgtccgataatgatgatattgaggttgaggttgtggttggtgttgatctttggttgaagagtcaatgtgaggtttggttagatgttgatcaagaaccaattttatccagctactatttcagttccattttgtctcacaaatctttggagagtgccttggccaaccacctctccacaaatttgagcagcttgagccttccaagcagcaccctttttgaccttttcatgggtgttttggttgatgatggagatgatgacatcgtaggtgctgtgaaggatgatttgatagctgttaaagagagggaccctgcttgcataagttatgtgcattgcttgcttaatttcaagggttttttggcatgtcaggctca

SEQ ID NO: 264244 - DNA, 448 bp, Glycine max
  unsure (1)..(448): unsure at all n locations
gccagactgggttaagcaaattgctttaaaatttttgaagccagataagaaaactgctgaccgggttggatatacaaaaatgaaggccagcaccaatgttaggcatattgttcttccttgtactagttctgccagggcccaacttatcccagatattattcgctgctatagcagtggatgccggacaattgtatttaccgagacacaagaatgtgcttctcagcttgcagggatcttgaatggagcaaaagctctccatggtgacatacagcaatcaacacgtgaggttactctgtctggcttaggtctggaaattatgcattattgcacaatgtgcagctcgaggtcttgatatcaatgatgttcagttaattatccagtgtgaacccccacgagatgtagaagcctatatncatcgttctggacgcacaggaagagcangtaatac

SEQ ID NO: 264245 - DNA, 274 bp, Glycine max
atcgtgcgaggggcagtgaccgagattccgtttgttgtaaaaatgaagactatgctttccagcgagggtatgtacatccgggagggcgtgagcatcaaagtacatgccaaggtcatcgaagttgcaggcccccgcagaaaattggtgcgagacttcaagcatttgaatctcgattttcagctgattactgacgaatacggtaaaagacagcttcaaatcgacgcttggtttggatctcggaaatcatactgcatcattcgcaccgacttgagcc

SEQ ID NO: 264246 - DNA, 247 bp, Glycine max
aaaatgaatactatgctttccagccagggtattaacaaccaggacacagagatcatcacagatcatgccaaggtcaacaaagattaaggcccccgcataaaattgctgcgagacttaaagcatttgaatctcgattctcagctcattactgacaaaaactgtaaaacacagcttaaaatcgacgcttacccagtatctcggaaatcatactacatcattcgcaccgacttgagccaattggataata

SEQ ID NO: 264247 - DNA, 348 bp, Glycine max
  unsure (1)..(348): unsure at all n locations
atcgtgagaggggcagtagccgagattccgtgagttgcaaaaatgaagacgattctttccagcgagggcatgaacatcccggacggcgtgagcatcaaagttcatgccaaggtcatcgaagttgagggcccccgcggaaaattggtgcgagacttcaagcatttgaatctcgattttcagctcattactgacgaaaacggtaaaagaaagctgaaaatcgacgcgtggtttggttctcggaaaacatccgccgtcattcgcaccgncttgagccacgtggagaatcttatcaccggcgtcaccaaaggctaccgctacaaaaatgagggttcgttatgccccattttc

SEQ ID NO: 264248 - DNA, 289 bp, Glycine max
atcgtgagagggtcagtatccgatattccgttagtttcaaaaatgaatacgattctttccagctaagtcatgtacatcccggacggcgtcagcatcaaagttcatgccaaggtcatcgaagtttatggccccctcagaaaattggtgctagacttcaagcatttgaatctcgattttcatctcattactgactaaaactgtaaaagaaagcttaaaatcgactcgttttttggttctctgataacatcctcctccattctcaccgccttgagccacttttagaatctta

SEQ ID NO: 264249 - DNA, 313 bp, Glycine max
gaattcccgggtcggccgacgcgtccgaacgtgagaggggcagtgacccggattcggcttgtcgtacaaatgaagactatgcttagcagagacgcgattaacatccacggcggggtgagcatcagagagtatgccaaggtcatcaaagttgacgatacccgtataaaattggtgcgagacttcaagcatttgaatctggattctcagctgactactgacatatacggtagtacacagctgcttagcgacgcttggtttgtgtctcggaaatcatactacatcattcgcaccgatttgagccaactggagaata

SEQ ID NO: 264250 - DNA, 305 bp, Glycine max
atcatgagaacggcaatacccgctattacgttactttcaaaaattaagacaattctttccagcaacgccatattcatcccggacaccgtgagcatcaaagtctcattccaagatcatctaaattcaaggccccctctcaaaattgatgctagacttcaagcatttcaatctcgattttcatctcattactgacgaaaactctaaaaaaaaccttaaaatctacccatgaattgcatcacggaaaacatacaccaccattcacaccgtcttaaaccacattgataatcttatcaccggcatcacca

SEQ ID NO: 264251 - DNA, 293 bp, Glycine max
  unsure (1)..(293): unsure at all n locations
atcgtgagaggggcagtatccgagattccgttagttgcaaaaatgaagacgattctttccggcnaaagcatgatcatcccggacggcgtgagcatcaaagttcatgccaaggtcatcgaaattgaaggcccccgcagaaaattggtgcgagacttcaagcatttgaatctcgattttcaactcattactgacgaaaacggtaaaagaaagctgaaaatcgacgcgtggtttggttctcggaaaacatccgccgtcattcgcaccgtcttgaaccacgtggagaatcttatcac

SEQ ID NO: 264252 - DNA, 470 bp, Glycine max
aaaaataggttcatagttgttatctccagctttacgatgaagtttgaagatttgggagaagggtgcatttcaaaaatactgtccgacaccactcgtgcggatgtatgcaggctttctctggtttccaaagcctttcattccgcggctgaagccaacactgtgtgggattgctttctcccctctgatttgtcctctatcatctccccttcttcttccgttcctccctttcgctctattaaggatctctatctctatctctccgatcgtcccaccatcatcgatcaatgtataaagagttttcaattggagaagcggactgggaacaagtgttacatgctttccgctagagatctgagcattatatggggtgacactactcattattggtagtggacaaccctaccagagtccaggttcgaagaagttgctaggcttcgagctgtgtgttggtttgacattactgggaggat

SEQ ID NO: 264253 - DNA, 451 bp, Glycine max
  unsure (1)..(451): unsure at all n locations
ccaatttactctttttcttctcgccctctggcgtgggaggagtttgtaacatggctgctctaccaacggcggagcttagtgacgcaaatgcaacacatgtagcaagttgtgatgtgagggtgttgcatccagtgttcaaggtttacggtggggccaccgcgttctccggccccgttgtcaccgtgaaggtgtttgaagacaacgtgttggtgagggagcttcttgagacgaaaggcgaaggaagagtattggttgttgatggaggaggaagcttgaggtgtgcattggtgggagggaatttggcactgattgcacataacatgggttgggctgggattgtggtgaatggctgcatcagagatgtggatgagatcaatgcaagtgatattggcgtcagagccttggcttctcatncactcagatccaacaaaaagcgcactggtgaaaagaa

SEQ ID NO: 264254 - DNA, 440 bp, Glycine max
cttttctctgaaaaaacatgttgagggttgcagctagaatgctctcttcttctctctcatcgtcttctccgttgcggcccaatcacgccgcttccgcttttctctctcgaaacgacgtcgtcgtcgatgaccgcagatctgctccttcctcccatccccttcttcccttcagaggttatgctactgaatccctgatccacacaaaagaaaacagcattactcctgagattccgccaactgttactgctgttaagaaccctacttctaagattgtctatgatgatcacaaccatgaaagatttcccccaggtgacccaagcaagagggcatttgcctacttcgtacttacaggtggtaggtttgcttatgcctctgtggtccgtctccttgtcctcaagtttgtgctaagcatgtctgccagtaaggatgttcttgctctg

SEQ ID NO: 264255 - DNA, 476 bp, Glycine max
aaaaaaggttcatagttgatatctccagcggaacgatgaagtttgaagatttgggagaaggaggcatggcaaaaatactgtcctacaccactcgtgcggatgtatgcaggctttctctggtttccaaagcctttcattccgcggctgaagccaacactgtgtgggattgctttctcccctctgatttgtcctctatcatctccccttcttcttccgttcctccctttcgctctattaaggatctctatctctatctctccgatcgtcccaccatcatcgatcaaggtataaagagttttcaattggagaagcggactgggaacaagtgttacatgctttccgctagagatctgagcattatatggggtgacactactcattattgggagtggacaaccctaccagagtccaggttcgaagaagttgctaggcttcgagctgtgtgttggtttgacattactgggaggatgaacacc

SEQ ID NO: 264256 - DNA, 353 bp, Glycine max
attcgacccacgcgtacgcccacgcctacgctctagaatatgaccctgactaaaatttacaaaacataatcatttattatgaaagatatattatataatgagcataacctaaccatacaatcctattcttcatttcaataatatacaacactacaatttaatcatatcatataaacgatctacttataatttatgtatatcaattaaataccacataattcatgtaatatttcctacctcaaacacttactcttcatacaacattcagctacatacatcattaattacttcattcagcatatataccaacctatatctaacatacgggaaatacactcacttttacatacata

SEQ ID NO: 264257 - DNA, 472 bp, Glycine max
gttgttttcgttcctctgaagtctggagtggtggagcttggttcgtttgaaatggtgcctgaagagcagggtgttgtggaaatggtcaggacagcatttggggaatccagtcctggacaggcaaaggtgtttccaaagatttttgggcatgagttaagcctgggggatacaaaatctcagtctataactattagtttctccccaaaggtggaagatgatccgggtttcacttcagactcctatgaagttcaagcactaggggtgaaccatgcttatggaaattcttccaatgggactttaggtgacggtaatgaaggaacattgtttcctcaattgaatcaaatgatggctgggaattttaatgctcaagcaagggttccttgtctagatctcggtaatgaagactcatcatcaattcatgcagatgagcggaagcccaaaaaaagaggtaggaaacctgccaatgggagag

SEQ ID NO: 264258 - DNA, 392 bp, Glycine max
attactgggtcgaccgacgcgtccggatagctactattgaagaagcaaaacgattctacccactgttcggactcggtgccaatgtagcccttagtttctctggccggggagtcaaatacttttctaatctgaggcagaatttaggtcctggagttgatggttgggccatctctctgaaagcaatgatgagcatagttgtgggtatggggtttgcaatctgtttcctgtactggtgggtgaacaattatgttcctcttcctactcgtagcaagaagaagaaggagaagcccaaaatgggaacaatggagagcttgaagttcttggtgtcttcaaagtacatcagaaatcttgccacttttagtggttgctttatggaatcagcatcaatcttg

SEQ ID NO: 264259 - DNA, 389 bp, Glycine max
  unsure (1)..(389): unsure at all n locations
cccacgcgtccgagaaggcctgggcttagtttataagcataactgggtgaggaagaganaagtagagtttagaagatggcgtcgagcggagcggtaccgttttggagggcggcggggatgacgtacataacatactcaaacatatgcgcgaatctgctcaggaattgcctcaaggaaccctacaaggccgaatccctctctcgtgagaagctccattttgttctctccaaatgggtcgacgccaagcctgaaaaacctactattcgttcagacaccccagagcagtgatctggaatagttggaagctataaatgcataaatctttgagaactggaaagtcattgtcaattttaaacctttctgtgatgtttaatttccttggttttttc

SEQ ID NO: 264260 - DNA, 362 bp, Glycine max
gataactactattgaagaagcaaaacgattctacccactgttcggactcggggccaatgtaggccttatgttctctggccggacagtcaaatacttttctaatctgaggcagaatttaggtcctggagttgatggttgggccatctctctgaaagcaatgatgagcatagttgtgggtatggggtttgcaatctgtttcctgtactggtgggtgaacaattatgttcctcttcctactcgtagcaagaagaagaaggagaagcccaaaatgggaacaatggagagcttgaagttcttggtgtcttcaaagtacatcagagatcttgccactttagtggttgcttatggaatcagcatcaatc

SEQ ID NO: 264261 - DNA, 322 bp, Glycine max
gtcatatgctccaagtgcactggtaagggttctaagtctggtgcttcgatgaagtgtgctgggtgtcaaggaactggtatgaaggtttctataagacatcttggcccgtccatgattcagcagatgcagcatgcttgcaatgaatgcaagggtactggagaaaccatcaacgacagagatcgctgcccacagtgcaagggagaaaaggttgtgcaggagaaaaaagtccttgaagttattgtggaaaagggaatgcagaacgggcagaagattacattccctggcgaagctgatgaagcgccagacacaattactggggata

SEQ ID NO: 264262 - DNA, 401 bp, Glycine max
  unsure (1)..(401): unsure at all n locations
cccacgcgtccgcccacgcgttcgcccacgcgtccgcggacgcgtgggcttcaacttggattacgaccctaactaccctgattctgatcagattccttactttgaagatggtgattctgcgacatacaataatgagaaggatgggatcattgagtgcttgaaaaggaatgttggtggtgatttagatagtgaggtttcttctgtccctgattggataccaaccaaagtgatggccaccacttggcttgctgatgcacttgagtatgaactgtgagtgggatgtgatggttcctctgcttatagcatctattattctgatctttcctggcctatcggcaaggttctcttttggaaaaaagcttattgngtaaagcacaaacatgggataagtgaaaagaatg

SEQ ID NO: 264263 - DNA, 348 bp, Glycine max
gttcttctaccttattttctttccctagtcaaggagattcatctctgcagcaagttgttttagaaaagataaaatgctgaagatttgctgcattggggctggatatgtggggggtccaacaatggcagtcattgcactgaaatgcccctcaattgaagtggctgttgttgacatctctaaatccaggattgcagcatggaacagtgaccagctccctatctatgagccaggccttgatgatgtggtgaagcaatgtcgtggcaagaaccttttcttcagcactgatgttgagaaacatgtctatgaggccgacatagtgttcgtctgcgtcaacaccccgacaaaaac

SEQ ID NO: 264264 - DNA, 482 bp, Glycine max
  unsure (1)..(482): unsure at all n locations
ttcaagaacaatttattgcacaaatattgacaagaagcttactcaagccgatgtcaaacacttcgttgaagctatttgtggagaggttcaacggttgaggcttcttggagattaccatcattcaactcgaattgcttttgttgagttcacagtggctgagagtgcaattgcagctctaagctgtagtggggtgattctgggttcactgcccataagggtaagtccatcgaagacaccagttcgatcacgtgctcctcgccctactatgcactgaatcaactttccatgtttctggggttgattgctgctgagatatatttacatatatatatatacatagaaacagctgtgttctaaggaacatgtggcatttagttggtacttttgtcctcatgtcttacagtatggttactttgcttccccttggnggattatgggtctcttgtttagcttgtagtcggatcgaactttgaggatcttga

SEQ ID NO: 264265 - DNA, 327 bp, Glycine max
aacaatttattgcacaaattttgacaagaagcttactcaagccgatgtcgaacacgtctttgaatctatttgtggagaggttcaacggttgaggcttcttggagattaccatcattcaactcgaattgcttttgttgagttcacagtggctgagagtgcaattgcagctctaagctgtagtggggtgattctgggttcactgcccataagggtaagtccatcgaaaacaccagttcgatcacgtgctcctcgccctactatgcactgaatcaactttccatgtttctggggttgattgctgctgagatatatttacatatatatata

SEQ ID NO: 264266 - DNA, 341 bp, Glycine max
cgcgtccgttcaggaacaatttatggcacacatattgactagaagcttactcaagccgatgtcagacacgttttagtttctatttggggagggcttcaacggttgaagcctcttggagactaccattattcaactcgaattgcttttgttgagttcacagaggctgagagtgcaattgcagctctaagctcgtacggggtgattctgggctcactgcccataacggtaagtccatctcacacaccacttccatcacctgctcctcggcctactatgcactgaatcaacttttcatggttctgaccaagacgacggtgacataatttacatatatatatcta

SEQ ID NO: 264267 - DNA, 322 bp, Glycine max
gtcatatgctccaagtgcactggtaagggttctaagtctggtgcttcgatgaagtgtgctggtggtcaaggaactggtatgaaggtttctataagacatcttggcccgtccatgattcagcagatgcagcatgcttgcaatgaatgcaagggtactggagaaaccatcaacgacagagatcgctgcccacagtgcaagggagaaaaggttgtgcaggagaaaaaagtccttgaagttattgtggaaaagggaatgcagaacgggcagaagattacattccctggcgaagctgatgaaacgccagacacaattactggggata

SEQ ID NO: 264268 - DNA, 477 bp, Glycine max
  unsure (1)..(477): unsure at all n locations
ggaaaacgaccaaaacttcaactacaactcgcagcctcaggcttcgtacaaagttgcagttcttggtgctgctggagggataggtcagccactcgcgcttctcatcaagatgtcgcctctagtttccgacctgcatctctatgatattgcgaatgtcaagggagttgctgctgatatcagtcactgcaacaccccctcacaagtcagggatttcactggagcttctgagttggcgaattgtttgaaggatgtgaatgttgttgtcatacccgccggtgttccaaggaagcctggcatgactcgtgatgaccttttcaacatcaatgccggcatagtcagggacttggtttctgctgttgcggataatagccctgatgcttttattcaaatcatcagtaaccctgtgaactctaccgtgcctattgccgcanaagttttgaaaccagaaggtgtgtatgatcctaagaagctcttttg

SEQ ID NO: 264269 - DNA, 423 bp, Glycine max
cccacgcgtccgcccacgcgtccgcccacgcgtccgcggacgcgtgggcttcaacttggattacggaccctaactaccctgattctgatcagattccttactttgaggatggtgattctgtgacatacaataatgagaaggaggggatcattgagtgcttgaaaaggaatgtgggtggtgatttagatagtgaggtttcttctctccctgattggataccaaccaaagtgatggccaccacttggcttgctgatgcacttgagtatgaactgtgggtgggatgtgatggttcctctgcttatagcatctattattctgatcttccctggcctatcggcaaggttctcttttggaagaaagcttattgggtaaagcagaaacatgggataagtgaagagaatgtagaagtcaaggaagaagaga

SEQ ID NO: 264270 - DNA, 481 bp, Glycine max
  unsure (1)..(481): unsure at all n locations
cccacgcgtccgcgcgtcgctgctccgtaccagtttcactgcataaatttgagagaaaactctgcaaacatgttggtttatcaggacctccttacaggtgatgagcttctctcggactccttccgttacaatgaaattgagaatggaatgctgtgggaagttgaggggaagtgggttgttaagggagcagttgatgttgacattggtgcaaacccttctgctgaaggtggagaagatgagggagtcgatgacgcagctgttaaggttgttgacattgttgatacattcagacttcaggagcaacccgcttttgataagaaacagtttgttaccttcatgaagaggtttatcaagaatttgactcccaagctcgatgcanagaaacaagagttgtttaagaagcacattgagggagcaactaaatacctgctctctaaagataaggattttcagtttttttgttggggagagcatgaatgat

SEQ ID NO: 264271 - DNA, 353 bp, Glycine max
  unsure (1)..(353): unsure at all n locations
cccacgcgtccgcccacgcgtccgcccacgcgtccgcggacgcgtgggcttcaactgggagggcaccctaactaccctgattctgatcagattccttactttgaggatggtgattctgggacatacaataatgagaaggaagggatcattgagtgcttgaaaaggaatgtgggtggtgatttaaatagtgagggttcttctcttcctgattggataccaaccaaagtgatggccancactttggcttgctgatgcacttgagtatgaactgggggtgggatgtgatggttcctctgcttatagcatctattattctgatcttccctggcctatcggcaagggtctcttttgga

SEQ ID NO: 264272 - DNA, 378 bp, Glycine max
  unsure (1)..(378): unsure at all n locations
gaattcccgggtcgaccgcacgcgtccgcccaggcgtccgcccacgcgtccgcccactcttccgctgacgcgtgggcttcaacgtntcagaccactttaactaccctgaggctgatcagattccttactttgaggatggtgattctgtgacatacaataatgagaaggaggggatcattgagtgcttgaaaaggaatgtggatggtgatttagatagtgaggtttcttctctccctgattggataccaaccaaagtgatggccaccacttggcttgcttatgcacttgattatgaactgtgggtgggatgtgatggttcctctgcttatagcatctattattctgaactttccttgcctatctgcaaggttttctttt

SEQ ID NO: 264273 - DNA, 458 bp, Glycine max
cccacgcgtccgcccacgcgtccgcccacgcgttcgcggacgcgtgggcttcaacttggattacgaccctaactaccctgattctgatcagattccttactttgaggatggtgattctgtgacatacaataatgagaaggaggggatcattgagtgcttgaaaaggaatgtgggtggtgatttagatagtgaggtttcttctctccctgattggataccaaccaaagtgatggccaccacttggcttgctgatgcacttgagtatgaactgtgggtgggatgtgatggttcctctgcttatagcatctattattctgatcttccctggcctatccgcaaggttctcttttggaagaaagcttattgggtaaagcagaaacatgggataagtgaagagaatgtagaagtaaaggaagaagatttttatgggagagcaaactctgcatatgatgctcttg

SEQ ID NO: 264274 - DNA, 364 bp, Glycine max
cccacgcgtccgcggacgcgtgggggtttttgtggataagagtgagctataatggctgcgaggagaccgggtttaattgctttgtttgatgttgacgggactcttacagctcccaggaaggtggtcacaccggaaatgttgacattcatgcaagaactacgaaaggttgtaacggttggagttgttgggggttctgaccttataaagatatcagagcaacttggcagcacagttaccaatgagtatgattacgtattttctgagaatggtcttgtggctcacaaggaaggaaagctcattggaactcagagcttgaagtcattccttggtgaagaaaagctcaggagtttattaactttacact

SEQ ID NO: 264275 - DNA, 404 bp, Glycine max
ggtcctgaattcccgggtcgaccgacgcgtccgcccacgcgtccgcggacgcgtgggggtttttgtggataagagtgagctataatggcggccagtagactttgtctaattgctgtgtttgatgttgacgggactcttacagctcccaggaaggtggtcacaccggaaatgttgacattcatgcaagaactactaaaggttgtaaccgttggagttgttgggggttctgactcttataaagatatcagagcaacttggcagcacatttaccaatgagtatgattacttattttctgagaatggtcttgtggcttacaaggaagtaaagctcattgtaactcagagcttgaagtcattccttgttgaataaaagctcatggaatttattaactttacacttcatt

SEQ ID NO: 264276 - DNA, 378 bp, Glycine max
  unsure (1)..(378): unsure at all n locations
gaaatgtgaaagccttatcatacagtgtttgcaatatgccaaggtagaagttgaagaaataaatgatnttgtaattttatgcagatgttcttacatcccgaaggtgaaaaatcttgttactaacgtatgtaaaggcaaggaactttataaaggcatgaatcctttaaaagctgctgtttgcggtgcatcagtggaaagagctattgcttcaggcgtcaatgatccctttgggaacttggacttgttaactatccaagctacacctcttgccattgggattcgagctgatgggaacaagtttgtccctgtaattccgagggatactacaatgccaacacggaaggaactagttttcacaactactcatgacaatcaaac

SEQ ID NO: 264277 - DNA, 81 bp, Glycine max
aaaaaaaaaaaaaaaaaaaaaaaaaaaaaaaaaaaaaaaaaaaaaaaaaaaaaaaaaaagaaaaaagaaaaaaaaaaaaaa

SEQ ID NO: 264278 - DNA, 399 bp, Glycine max
gaaatgtgaaagccttatcatacagtgtttgcaagatgccaaggtagaagttgaagaagtaaatggtgtgataattgtaggcggatgttcttacatcccgagggtgaaaaatcttgttactaacgtatgtaaaggcaaggaactttataaaggcatgaatcctttagaagctgctgtttgcggtgcagcagtggaaggagctattgcttcaggcgtcaatgatccctttgggaacttggacttgttaactatccaagctacacctcttgccattgggattcgagctgatgggaacaagtttgtccctgtaattccgagggatactacaatgccagcacggaaggagctagttttcacaactactcatgacaatcaaactgaggcgttgatccttgtcta

SEQ ID NO: 264279 - DNA, 291 bp, Glycine max
ctcacgcgtccgaaaaggcctgtgctatagttgataagcataactgtgtgcggactagagagagagactgacgagaacggccttgagccaagcggtaccgacctgaacggctatgatcatgacgtacataacatacttaaacatatgctcgaatttgctcacgaatagtctcaaggaaccgtacatggactaatacatgtctcgtgagaagctgcattctgctctctgcaaatgggtcgacgccaagcctgaaaatcctactattcgacagacacccgatagcagtgatct

SEQ ID NO: 264280 - DNA, 379 bp, Glycine max
aaaaaaggttcatagttgatatctccagcggaacgatgaagtttgaagatttggcagaagggtgcatggcaaaaatactgtcctacaccactcgtgcggatgtatgcaggctttctctggtttccaaagcctttcattccgcggctgaagccaacactgtgtgggattgctttctcccctctgatttgtcctctatcatctccccttcttcttccgttcctccctttcgctctattaaggatctctatctctatctctccgatcgtcccaccatcatcgatcaaggtataaagagttttcaattggagaagcggactgggaacaagtgttacatgctttccgctagagatctgagcattatatggggtgacactactca

SEQ ID NO: 264281 - DNA, 479 bp, Glycine max
  unsure (1)..(479): unsure at all n locations
atttgaaggttgttttgtgcttatagataaaagttctgccaaatcaagaggggttttcagatcgtagtgtgtgtgtgtgtgttaaacaatggctaagttctttgctgctatgatcttggcactcattgccatttccatgcttcaaacagtggttatggctgctaatgagcaaggaggccacttgtatgacaacaagagcaaatatggaagtgggagtgtcaagagataccaatgcccatcacaatgctcgaggagatgtagccagacccaataccacaagccctgcatgtttttctgtcagaagtgctgcangaaatgcctgtgtgtgcccccggggtattatggtaataaagctgtgtgcccttgctacaacaactggaagaccaaagaaggaggacccaagtgccctttgacttcaacttcatcaaattgttgcttttcactatatttttatcatctcccttgggccaatttaatgc

SEQ ID NO: 264282 - DNA, 471 bp, Glycine max
tctgttcattattatgtgcagtcacacattcaaattaatgaatatcgtgagcgtatagtcttgccttctgcatcaaagaagcaggggcgacctattaccacttgtataaaggttttagacatgactggtctgaagttatcagccctgaatcagattaagttgctaactattatatcatccattgatgatctgaactaccctgagaagacaaatacttattacattgtaaatgctccatacatattttctgcttgttggaaggttgtgaagccacttttacaagagaggacaagaagaaaaatacaggtgttaccaggttgtggacgagatgagctattgactatcatggattactcgtctctaccacatttctgtcgaagagaaggctctggatcatccagacattctgagagtggtagtgaaaaatgctattccttggatcatcccttccatcaagagctctacaatcac

SEQ ID NO: 264283 - DNA, 414 bp, Glycine max
cttctcatcattcattcatcttcgttctaagagccatgtctagcaccgttggccagaccatgaagtgcaaagctgcgattgcatgggaggctgggaagccgctggtgattgaagaagtggaggttgcgccaccgcaagccggtgaagtccgtttgaagatcctctacacctctctttgccacactgatgtttacttctgggatgcgaagggccagactccattgtttcctcgcatttttggccatgaagcttcggggattgtggagagcgtaagcgaaggtgtgactcatctgaaaccaggtgaccatgcccttcctgtgttcacaggagagtgtggagattgcgcccattgcaagtcagaggagagcaacatgtgtgagctactcaggatcaacaccgataggggtgtcatga

SEQ ID NO: 264284 - DNA, 310 bp, Glycine max
  unsure (1)..(310): unsure at all n locations
cattattatatacattcacttatccatattaattaatatcttcatcatatggtccttgtttatatttcaaanaaccaaggtccacctattaccacttatataaaatttttatacattactcatctaaaattattaacccttaatcatattaaatttctaactattatatcatccatttattatcttaactacccttaaaatacaaatacttattacatttttaaaacttcatacatattttcatactcttttaaatttatcaatcctatttttactaatatatacaatatataaaattacaatttattac

SEQ ID NO: 264285 - DNA, 403 bp, Glycine max
acatcttaggatatagattgaattactttcgtttccacaacacgtggtatgaaatgtccctgttctatttacctatggcaaccagacaaaaatgctttttaatgggctacatctttgaaagcccctcacacatatgattcaattcgggttactcaatccacagcaaactttttcataagtgaagctatgaaatccacaaacacaccttatgctcaaaaagttcgaaataatctcatctacaattacaaacctacttttggtggaactgcttttaaaagatatgatcaaatgtatctcttttaataattctatctgtaagaggtgtcctttaattttattttattcacaataaattatgaactttggatatattttgaataaaataaaaatttttcacatttat

SEQ ID NO: 264286 - DNA, 477 bp, Glycine max
tttgaatacattccttgtagtttatactgaaagatgggtttgaagatggcgttactgatcctaggcctttccctcatgctccttttggtctcctctgaggtggcatccacgaatacaaaagaggaggcaaatggagtggatgatgccaaatatcccggtggaagctatggagggggttacccaggtcatggcggtggcggttatcctggccatggcggtggcggttatcctggccatggcggtggtggtggctatcctggtcatggtggtggccaccctggtcatggtggcggctaccctggccgtggtggtggatactgtaggcatggctgttgcggtggccggacatacaacggaggttgcagaaggtgctgctataacgcttgcgaagcttgtgctgcacaaactcaagataagactcacgattaagacgatgcagttctacttaattagtacttttgatattttaatttcatg

SEQ ID NO: 264287 - DNA, 472 bp, Glycine max
caacatctgaggatagagatggaaagactttcgtttccacagcacgtggtaggaaatgtcccgggactgtcaacctatggcaaccagagaaaaatgcttttgaatgggctacatctttgaaagcccctcacacagaggatgcaattcgggttactcagtccacagcaaactttttcataagtgaagctaggaaatccacaaacacacctgatgctcaaaaagtgcgagataatctcatctacaattacaaacctacttttggtggaacggctgggaaaggatatgatcaagtgtatctctttgaataattctatctgtaggaagtgtccttgaatttgattttatgcacaataaattatgaactggggatgtagtttgaagaaataaaaatttgtgcacagtgatgtttgtaagatgcttaatttcagggcaatgttctgcttatcaatgtgttatatcttggtattgcccc

SEQ ID NO: 264288 - DNA, 393 bp, Glycine max
cccacgcgtccgagaaggcctgggcttagttgataagcataactgggtgaggaagaaagagaaggagtgaagaagatggcgtcgagcggagcggtaccgttttggagggcggcggggatgacgtacataacatactcaaacatatgcgcgaatctgctcaggaattgcctcaaggaaccctacaaggccgaatacctctctcgtgagaagctccattttgatctctccaaatgggtcgacgccaagcctgaaaaacctactattcgttcagacaccccaaagcagtgatcttgaataagtggaagctataaatgcctaaatctttgagatccggaagttcaatgtcaatttgaacctttctgggatgttaaatcccttggttttttctcttca

SEQ ID NO: 264289 - DNA, 297 bp, Glycine max
cccacgcgtccgagaaggcctgggcttagttgataagcataactgggtgaggaagggagaagtagagttaaaaagatggcgtcgagcggatcggtaccgttttgtagggcggctgagattacgtacattacatactcaaacatatacgcgaatctgctcacgaattgcctcaaggtaccctacattgccaaatacctctctcgagagaagctccattttgatctctccaaattggtcaaccccaagcctgaaaaacctactattcggacagactccccataacagtgatctggaata

SEQ ID NO: 264290 - DNA, 286 bp, Glycine max
aattaccgggccggccgacgcgtacgcccaggcgtccgagaaggcctgggcttagtttataagcataactgggtgaggaagggagcagcagagtttaaaagatggcgtggcgcggagcggaaccgatttggaaggcggctgagatgacgtacataacatactcaaacatatgcgcgaatctgctcacgaattgccttaaggaaccctacaaggcccaatacctctcttgagagaagctccatttagatcactccaaatggcgtcgacgccaagtcctgaaaaacct

SEQ ID NO: 264291 - DNA, 396 bp, Glycine max
  unsure (1)..(396): unsure at all n locations
cggacgcgtgggcggacgcgtgggttatcatccgcagctgcttttattcgcaccgcaaacagtgagccagggccgtcggaaagaacaagcgcatctccaaggggaagaagggtggcaagaagaaggcagctgatccctttgccaagaaggattggtatgacattaaggctccttctgtttttcaagtgaaaaatgttggcaaaaccctcgtctctcgtactcagggtaccaagattgcttctgaaggactcaagcatagagtgtttgaggtctccttggctgatcttcaaggggatgaggatcatgcattcaagaagattaggttgagagctgaagatgtgcaagggaagaatgttctgacaaatttttggngaatggatttcacaacagacaagc

SEQ ID NO: 264292 - DNA, 429 bp, Glycine max
cggacgcgtgggcggacgcgtgggttatcatcctcagctgcttttattcgcaccgcaaacagttgtccatggccgtcttaaagaacaagcgcatctccaaggggaagaagggtggcaagaagaaggcagctgatccctttgccaagaaggattggtatgacattaaggctccttctgtttttcaagtgaaaaatgttggcaaaaccctcgtctctcgtactcagggtaccaagattgcttctgaaggactcaagcatagagtgtttgaggtctccttggctgatcttcaaggggatgaggatcatgcattcaagaagattaggttgagagctgaagatgtgcaagggaagaatgttctgacaaattttctgggaatggatttcacaacagacaagcttaggtcattggtacgaaaatggcaaactctta

SEQ ID NO: 264293 - DNA, 396 bp, Glycine max
cggacgcgtgggcggacgcgtgggttatcatccgcagctgcttttattcgcaccgcaaacagtgagccatggccgtcggaaagaacaagcgcatctccaaggggaagaagggtggcaagaagaaggcagctgatccctttgccaagaaggattggtatgacattaaggctccttctgtttttcaagtgaaaaatgttggcaaaaccctcgtctctcgtactcagggtaccaagattgcttctgaaagactcaagcatagagtgtttgaagtctccttggctgatcttcaaggggatgaggatcatgcattcaagaagattaggttgagagctgaagatgtgcaagggaagaatgttctgacaaatttcttgggaatggatttcacaacagacaagc

SEQ ID NO: 264294 - DNA, 420 bp, Glycine max
aataaccgggccggccgcacgcgtccgcccaggcgtccgagaaggcctgggcttagtttataagcataactgggtgaggaagaaagaagtagagttatagaagatggcggggagcggagcggtaccgttttggagggcggcggggatgacgtacataacatactcaaacatatgcgcgaatctgctcaggaattgcctcaaggaaccctacaaggccgaatccctctctcgtgagaagctccattttgttctctccaaatgggtcgactccaagcctgaaaaacctactattcgttcagacaccccagagcagtgatctggaataagtggaagctataaatgcataaatctttgagatctggaagttcattgtcattttgaacctttctgtgatgttaaattcctttggtttttttctct

SEQ ID NO: 264295 - DNA, 168 bp, Glycine max
ggctgaagcacaactacgagaccagcatggcttaccctgtcccactcaccgatcaagacgaagatcctgttatcttaactgacgagcgcggtaatcccgtccaactcactggtgtcgctaccaccgctaccggcacagcaagttctgggtttgggtcctatggtaccg

SEQ ID NO: 264296 - DNA, 353 bp, Glycine max
ataatgatgatattgaggttgaagttgtggagggtgttgatctttggttgaagattgaagatggggcatggttagatgttgatcaagaaccaattttatccagctactatttcagttccattttgtctcacaaatctttggagagtgccttggccaaccacctctccacaaatttgagcagcttgagccttccaagcagcaccctttttgaccttttcatgggtgttttggttgatgatggagatgatgacatcgtaggtgctgtgaaggatgatttgatagctgttaaggagagggaccctgcttgcataagttatgtgcattgcttgctgaatttcaagggttttttggca

SEQ ID NO: 264297 - DNA, 357 bp, Glycine max
  unsure (1)..(357): unsure at all n locations
attccctggtcgacccacgcgtgcgctcttgtctctctgtcggatttcttgcgcggtttatcatgggggatagtcagtattcgttttcgctcaccggatttagcccttctggaaagcttgttcagattgagcatgctttgacggctgtcgggtctggacaaacgtctttgggaattaaagctgcaaatggagttgtcattgctaccgagaagaaattgccatctatattggttgatgaagcatcagtccagaaaattcagttattaacaccaaatataggtgtcgtatatagtggcatgggtcctgattntcgagttttggttcggaaaagcagganacaagccgagcagtatcacc

SEQ ID NO: 264298 - DNA, 381 bp, Glycine max
  unsure (1)..(381): unsure at all n locations
cgccatgctgttcttggagctacaaactctcgtcctgatttgatattgactggacaccaagatgatgcagaatgtgctcttgcaatgtgcccaactgaaccctatgttctttcaggaggaaaggacaaaacagtggtgttgtggagtattgaagaccatataacatctgctgccacagactccaaatctggtgggtcaattatcaaacaaaactctaaatctggagaaggcaatgataaaactgctgatggccctactgttggaccacgaggcatttattgtgggcatgaggatacagttgaagatgtgactttctgcccatctagtgcacangagttctgtagtggtggagatgattcttgtctcatcttatgggatgca

SEQ ID NO: 264299 - DNA, 299 bp, Glycine max
tcctccacccacgcgtccgcccacatgctgctcttggagctacaaactctcgttctgatttgatattgactggacaccaacatagtgcatattgagctcttgcaatgcccccaactgaaccctatgttctttcaggaggaaaggacaaaacagtgatcttgtggagtattgaagaccatataacatctgctgccacagactccaaatctggtgggtcaattatcaaacaaaactctaaatctgcaaaatgcaatgataaaactgctgatggccctactgttggaccacgaagcatttat

SEQ ID NO: 264300 - DNA, 433 bp, Glycine max
  unsure (1)..(433): unsure at all n locations
ttcaagaacaatttattgcacaaatattgacaagaagcttactcaagccgatgtcaaacacttatgtgaatctagttgtggagaggttcaacggttgaggcttcttggagattaccatcattcaactcgaattgcttttgttgagttcacagtggctgagagtgcaattgcagctctaagctgtagtggggtgattctgggttcactgcccataagggtaagtccatcgaagacaccagttcgatcacgtgctcctcgccctactatgcactgaatcaactntccatgtttctggngttgattgctgctgagatatatttacatatatatatatacatagaaacagctgtgttctaaggaacatgtggcatttagttggtacttttgtcctcatgtcttacagtatggntactttgcttncccttggggaata

SEQ ID NO: 264301 - DNA, 342 bp, Glycine max
aattcccgggtcgacccacgcgttcgcccacgcgtccgcccacgcgtccgaaaaaaatgggttcttcttcttccatatggaccgtgtgtgttgatttgggcatcactggcctctgcagcactctgtgccaaccctcgtagaccagtggatgtacaatttggccgaaactacgtgcccacatgggcctttgatcacatcaaatacttcaatggaggttctgacattcagcttcatcttgacaagtacactggtactggcttccagtccaaagggtcatacttgtttggtcacttcagcatgtacataaagatggttcctggagattcagctggcacagtcact

SEQ ID NO: 264302 - DNA, 407 bp, Glycine max
  unsure (1)..(407): unsure at all n locations
ggcaaagatggggatgtggcactcttctttggactctcaggtaccggaaagaccactctttcgagcgatcgcaatangtatctaatcggagatgatgaacactgttggggtgacaatggtgtctccaacattgaaggtggttgctatgccaaatgcattgacctctcacggagaaagagccagatatttggatgcaatcaggtttggcacagtgttggaaaacgtggggtttgatgagcacgaccgaaaagttgattactctgacaaatcagttccagaaaatcctcgtgctgctaatcctatagagtccattccaaatgcaaagttaccttgcgttggccctcatccaaagaatgtcatacttttggcatgtgacgcatttggggtactcccacccgttagcaagc

SEQ ID NO: 264303 - DNA, 330 bp, Glycine max
  unsure (1)..(330): unsure at all n locations
ccacccactcgtccggccaaagatgcnnagacgcctctcttctttattctctcattttcctgatataccactctttcagcctatctgaatatatatctcaatccagatcactaacactactctcgtaacactgttgtctccaacattgaacgtaactactatcccacatgcatctacctttcactcaaaaaatacccagatatttctaatacactcatttatctcacaatgttcaaaaaccctgtctttcattaccacgacccataatttgattactcttacaaatcattcacaaaaaatactcctgcttattatgctatacaattcatt

SEQ ID NO: 264304 - DNA, 346 bp, Glycine max
  unsure (1)..(346): unsure at all n locations
cgcaaattcaaaggaggatctctcttgcgttttctctaggttttcgctatggcgtcgaagcgagttttgaaggagcttaaggatttgcagaaggatcctccaacatcttgcagtgccggtcctgttgttgctgaagatatgttccattggcaagctacaattatgggtcctccagacagtccctatgcaggaggtgttttcctagtgaccattcatttccctccagattatccctttaagccacccaaggttgcattcaggacaaaggttttccacccaaatataaatagcaatggaagcatttgccttgatatatngaaggagcagtggagccctgctctaacca

SEQ ID NO: 264305 - DNA, 407 bp, Glycine max
cccacgcgtccgattgaatatccatggttctcttagttcttttatccattaaaaagcgtctagaggaatatttctaagaagaactatagtagttgaaagatatcttttgcaaatatgcatatttaactgaggttgttataacttgttccttccctcaaaaaaaaaaaaaaaagaaagaaaaagaacctattagcctccttcattggatatattacatctataaggagtaaattctaccggttcagagaatagaaaaataatcaaaataaaagtcagcagtctcacatctctaattttggtgacagattcaaggggttaaatttgatccagaaggtgaatatgtgagacaatggctacctgagttggcaagattgccaactgagtggatcccatcatcttgggatgca

SEQ ID NO: 264306 - DNA, 449 bp, Glycine max
  unsure (1)..(449): unsure at all n locations
gagttccagaggttcaaccatacttctcttcttccctttacatccgcactgtttcctctcctagagccataatggttcgcattctgacggaaaatggcggagtggaacgcatggaggagatcatcagggaccatttggaccccatttcaaagcaagtgttggggatctggttggatcattgtgcttgtgccaagcgacaagttggagaggcagaaagagcttatcttaagaaaagggatggtctcattagaaacaagaccattgagattgatcttggttcaagctttcccagattgtttggtccagaagtagcaaaccgggtactggatgctatcaaggagtattttacagtctgagatgcaaatttatttggaatnngtggatattctatgtattacatacacgtacctaanttgctgtgcaatctaatgaggcctcagtatttgctg

SEQ ID NO: 264307 - DNA, 454 bp, Glycine max
  unsure (1)..(454): unsure at all n locations
ggcggcgctgtggcggacgcgccggcggtggttgaggagaagacggagttcgacgtggtgatgagggaggtgcggagcaacgctcgaatcgcggtgattaaggcggtgagggcattgacgaacctagcgctgaaggaggcgaaggagttgatcgaagggttgccgaagaagttcaaggaagggatttcaaaggacgaagctgaagatgcgaagaagcaactcgaagaagctggtgccaaggttaccattgcttaaacactgtttagctgcagcatatatgttctgcttcttcttttgttggttgtagttgagttcaccagtacactgtaatttcatttccattttgtctggatttcaatcttttatttgtaatgaggaaatatgaggtcttatttttatattattttttttaatgcgtatgangtgtttgtttgaaaaaaaaaatnnntnnnna

SEQ ID NO: 264308 - DNA, 428 bp, Glycine max
  unsure (1)..(428): unsure at all n locations
ctttctgcttcgtcgttcacttcagaatccaaaaacagtctaaaaaagaataataataaacaggggagttaccgggattctgttgagaagaagagcaatgccgtccaacgattccgattcgccgatgaagatcgtacatggcgacgctggttacatactcgaagacgttcctcacttcaccgactacattccaaatcttcctacgtatccgaatccgcttcgatccaatcctgcttactcggttgttaagcagtatttcgtgcacatggacgacactgttcctcagaaggttgttgttcacaaggatagtccaagaggtatacattttcgacgtgcanggcctcggcaaaaggtatactttannatcgatgaagtgcatgcatgcattgtcacgtgtggtggactctgccctgcctcaacactgtcat

SEQ ID NO: 264309 - DNA, 406 bp, Glycine max
  unsure (1)..(406): unsure at all n locations
cccacgcgtccgcgagcttcagcaatggtgtacgtcaaggctcagaaatcaaaagcctacttcgagagataggaagtcaagttcaagagaagaagagagggaaaaaccgattaccgtgccaggattcggttgattaatcaggacaagaacaaatataacactccgaaataccgatttgtggttcgctttagcaacaaggacattgttgcacaaataatatctgctagcattgccggcgatttagttcttgctacagcatattcacatgagctgccacgatatggtcttgaagtaggacttacaaattatgcagcagcttattgcactggtctcctgttggcccgaagagtcctcaaaacacttgaaatggattaggagtatgaaggaaatngtgaggctactggag

SEQ ID NO: 264310 - DNA, 357 bp, Glycine max
cgacccactcgtccgcccacgcgtccgcgagcttcagcaattgtgtacttcaatgttcataaatcaaaagcctacttcagtatatagcaagttttgttcaagacaataagagagggaaaaaccgattaccgtgccaggattcggttgattaatcatgacatgaacaaatataacactccgaaataccgatttgtggttcgctttaacaacaatgacattgttgcacaaataatatctgctatcattgccagctatttacttcttgctacatcatattcacatgagctgtcacgatatggtcttgaattatgacttacaaattatgcatcatcttattgcacttgtctcctgatggcc

SEQ ID NO: 264311 - DNA, 391 bp, Glycine max
  unsure (1)..(391): unsure at all n locations
cccacgcgtccgcacgttccgagttttctgatcgctcatagagagttcgacgcggcggttgcaggagaagattgcaagatgaagttcaacatcgcgagtcccaccactggatgccagaagaagctcgagatcgacgacgatcagaaactacgagcattttgggacaagaggatctcacaggaggtcagcggagatgcacttggtgaggaatttaagggctatgtcttcaaaattactggaggttgtgacaaacaaggattcccgatgaaacagggagtgcttactcctggtcgtgttcgacttttgcttcacaggggaactccttgcttccgtggatatggaaggcgtaatggagaacgtangagaaagtctgttcgtgggtgcattgtca

SEQ ID NO: 264312 - DNA, 427 bp, Glycine max
caccaacgccaaacaagccctaaatctctcttctctttcttcttcttcctttaaccgtgagagagatcttgcacgttcagggaggccaatgcggtaaccaaatcggttccaagttctgggaggtgatctgcgacgagcacggcatcgatcccaccggaaagtacaacgaggaaggcaacagcagcatccaactcgaaaggatcaatgtgtattacaacgaggcctctggcggaaggtacgttccccgtgccgtgcttatggatctcgaacctggaaccatggacagcatcagatctggcccctacggcaagatcttccgccccgacaacttcgtcttcggccagtccggcgccggtaacaattgggccaaaggtcattatactgaaggcgccgagctgatcgactccgttctcgacgtcgttcgcaa

SEQ ID NO: 264313 - DNA, 418 bp, Glycine max
  unsure (1)..(418): unsure at all n locations
gtcctgaattaccgggtcgagcgacgcgtgcgcaccagcgccaaacaagccctaaatctctcttctctttcttcttcttcctttaaccgtgannaagaatctttctacgttcagggagggcaatgcggtaaccaaatcggttccaagttctgggaggtgatctgcgacgagcacggcatcgatcccaccggaaagtacaacgaggaaggcaacagcagcatccaactcgaaaggatcaatgtgtattacaacgaggcctctggcggaaggtacgttccccgtgccgtgcttatggatctcgaacctggaaccatggacagcatcagatctggcccctacggcaagatcttccgtcccgacaacttcgtcttcggccagtccggcgccggtaacaattgggccaaaggtcattatactg

SEQ ID NO: 264314 - DNA, 332 bp, Glycine max
caccagcgccaaacaagccctaaatctctcttttttttcttcttcttcctttaacggtgatacagatctttttacaaacacccatggcactgccctaaccaaatcacttccaaattctccaacgtgatctgctactagcacatcatcgatcccaccggaaagtacaactaggaatgcaacatcatcatccaactcgaaaggatcaatgtatattacaacgatgcctctgaccaaaggtacattcccccttccatgcttatgtatctctaacctgcaaccatggacaccattaaatctggaccctaccgcaagatcttcctttccgacaactt

SEQ ID NO: 264315 - DNA, 414 bp, Glycine max
  unsure (1)..(414): unsure at all n locations
tcccgggtcgagccacgcgtccgcccacgcgtccggttgttttcgttcctctgaagtctggagtggtggagcttggttcgtttgaaatggtgcctggagagcanggtgttgtggaaatggtcaggacagcatttggggaatccagtcctggacaggcaaaggtgtttccaaagatttttgggcatgagttaagcctgngggatacaaaatctcagtctataactattagtttctccccaaaggtggaagatgatccgggtttcacttcagactcctatgaagttcaagcactaggggtgaaccatgcttatggaaattcttccaatgggactttaggtgacggtaatgaaggaacattgtttcctcaattgaatcaaatgatggcttggaattttaatgctcaagcaagggttc

SEQ ID NO: 264316 - DNA, 405 bp, Glycine max
cccacgcgtccgagaaggcctgggcttagttgataagcataactgggtgaggaagaaagaaagagagtgaagaagatggcgtcgagcggagcggtaccgttttggagggcggcggggatgacgtacataacatactcaaacatatgcgcgaatctgctcaggaattgcctcaaggaaccctacaaggccgaatccctctctcgtgagaagctccattttgttctctccaaatgggtcgacgccaagcctgaaaaacctactattcgttcagacaccccagagcagtgatctggaatagttggaagctataaatgcataaatctttgagatctggaattcattgtcattttgaaaccttctgtgatgttaaattcctttgttttttctctccatgaaatggacatg

SEQ ID NO: 264317 - DNA, 389 bp, Glycine max
  unsure (1)..(389): unsure at all n locations
cccacgcgtccgagaaggcctgggcttagttgataagcataactgggtgaggaagaaagaaagagagtgaagaagatggcgtcgagcggagcggtaccgttttggagggcggcggggatgacgtacataacatactcaaacatatgcgcgaatctgctcaggaattgcctcaaggaaccctacaaggccgaatccctctctcgtgagaagctccattttgttctctccaaatgggtcgacgccaagcctgaaaaacctactattcgttcagacaccccagagcagtgatctggaatagttggaagctataaatgcataaatctttgagatctggaagtcatngtcattttgaacctttctgggatgtttatttccttggtttttttctc

SEQ ID NO: 264318 - DNA, 375 bp, Glycine max
cccacgcgtccgccacgcgtccggtttctggtggaggatccaacttcagagcaatggatgagggctccaaaaggggatcacttcatggagatgttcttgtgttggtcacaaataaaagtgattgtggaggtgcggagtatgcaagaaataatggtatcccagttatactgtaccatatatcaaaggatgaatctaatccaagtgaccttgttgatacactaaggaaatttgaggttgattttattcttttagctggatacctcaaacttataccagtggaattgatccgagcttacaaaagatctatattcaacattcatccatcacttcttccagcttttggaggcaagggattctatggcatgaaagtgcaca

SEQ ID NO: 264319 - DNA, 324 bp, Glycine max
cctaagcgactctttctgttcttccttcgctcgttgttctccctcgcgtagatcgacaatggcaaagacagagaacgttgctttccaggctgagatcaaccagctcctcagtctcatcatcaacaccttctactccaacaaggagattttccttcgtgaactcatcagcaacgcctccgatgctttggacaagattcgatttgagagtttgacagataagagcaagctcgatgctcagccagagttgttcattcatattattccagacaagactaacaatacactgaccattgttgacagtggtattggcatgaccaaagctga

SEQ ID NO: 264320 - DNA, 216 bp, Glycine max
  unsure (1)..(216): unsure at all n locations
acacaatttcaaaatanacattaacaacacaccaatttcgaaacatattaaccaccacaaggaccccaactaaaccctatatacaaacactacaaatcacaaaacaaaacaattaaacaaaattaaacaccataatacacaaaaatccacatactccaacaacaactaataaactaacaaacaaaactcaaaatcttaacacaacaatcacaaaac

SEQ ID NO: 264321 - DNA, 389 bp, Glycine max
cacgcgtccgcccacgcgtccggttgtgttcgttcctctgaagtctggagtggtggagcttggttcgtttgacagcgtgccttgagagcattgtgttgcggaaatggtcaggacagcatttggggaatccagtcctggacaggcaaaggtgtttccaaagatttttgggcatgagttaagcctgggggatacaaaatctcagtctataactattagtttctccccaaaggtggaagatgatccgggtttcacttcagactcctatgaagttcaagcactaggggtgaaccatgcttatggaaattcttccaatgggactttaagtgacggtaatgaaggaacattgtttcctcaattgaatcaaatgatggctgggaattttaatgctc

SEQ ID NO: 264322 - DNA, 441 bp, Glycine max
cacgcgtccgccgacgcgtacggttgtgttcgttcctctgatgtctggagtggttgagcttggttcgtttgaaagggtgccttggaagcattgtgttgcggaaatggtcaggacagcatttggggaatccagtcctggacaggcaaaggtgtttccaaagatttttgggcatgagttaagcctgggggatacaaaatctcagtctataactattagtttctccccaaaggtggaagatgatccgggtttcacttcagactcctatgaagttcaagcactaagggtgaaccatgcttatggaaattcttccaatgggactttaggtgacggtaatgaaggaacattgttttctcaattgaatcaaatgatggctgggaattttaatgctcaagcaaaggttccttgtctagatctcggtaatgaagactcatcatcaattca

SEQ ID NO: 264323 - DNA, 234 bp, Glycine max
tcctcagtctcatcatcaacaccttctactccaacaaggagattttccttcgtgaactcatcagcaactcctccgatgctttggacaagattcgatttgaaaatttgacatataagagcaaactcgattctcagccagagttgttcattcatattattccagacaagactaaccatacacttaccattttttacaattgtatttgcattaccaaaacttatttggtgaacaact

SEQ ID NO: 264324 - DNA, 380 bp, Glycine max
acgcacgcgtccggccacgcgttcgtcaagcattgcatccctcttgatttgtagcatgttttgtgctttagatagaaattgtgccaaatcaagaggggttttaagatcatagtgtgtgttttgcaacaatggctaagttctttgctgctatgatcttggcactctttgccatttccatacttcaaacagtggtaatggctgctaatgaacaaggaggccacttgtatgacatcaagagcaaatatggaagtggaagtgtcaagagttaccaatgcccatcacaatgctcgaagagatgtagccagacccaataccacaagccctgcatgtttttctgtcagaagtgctgcacgacatgcctgcgtgtgcccgcggggtat

SEQ ID NO: 264325 - DNA, 357 bp, Glycine max
cccacgcgtccgcccacgcgtccggtgattgaagctagttagaacaagatgttgcagctaggctacactgcgattttctccgaaatgcttttgattctcacgctcgtcttcaaaaccccactgagaaaactcgtcatcgtttccctcgatagtgtgaagcgcggtcgcggtcccgtggtggtttccaccgtgggcgccacattgatggtggttctcgcttcgagcctctacagcatggccaagatccagcaacgcaccctcgaggccggcatagtcaaccccaccgaccaagtcctcatgtccaagcacatgctcgaagcttctctcatggggtttctgctgttcctctctctgatg

SEQ ID NO: 264326 - DNA, 270 bp, Glycine max
cccacgcgtccgcccacgcgtccgtagggaagttgtggaagttgttgggcgttctgaacggtggccacagtggaagcaataaacaagatagtgacagggaagtttgtgtccttatctgaacaagaacttgtggactgtgacagagcctacaatgaaggatgcaatggtggccttatggactatgcattcgaattcatcattcaaaatggaggcattgacacagacaaagattacccataccgtggctttgatggcatctgtgatccaact

SEQ ID NO: 264327 - DNA, 259 bp, Glycine max
gacccacgcgtgcgcaggggatatatgtacctaaacgaacagattttgaaatagaatccaaacatgtgtgcttacgtggcagggtctttggatgctaggcaagacatggccgtagtagaggtaccaaagctaggaaaagaggctgcagtaaaggccataaaggagtggagccagccaaagtcaaagattacccacttgatcttctgcaccaccagtggtgttgacatgccttgttctgattaccaactgaccaaacaat

SEQ ID NO: 264328 - DNA, 361 bp, Glycine max
cccacgcgtccgtcaagcattgcatccctcttgatttgtagtttgttttgtgctttagatgaaagttctgccaaatcaagaggggttttaagatcatagtgtgtgttttgcaacaatggctaagttctttgctgctatgatcttggcactctttgccatttccatacttcaaacagtggtaatggctgctaatgaacaaggaggccacttgtatgacaacaagagcaaatatggaagtggaagtgtcaagagttaccaatgcccatcacaatgctcgaagagatgtagccagacccaataccacaagccctgcatgtttttctgtcagaagtgctgcatgacatgcctgtgtgtgcccccg

SEQ ID NO: 264329 - DNA, 306 bp, Glycine max
ctccgcactccgtcttcatcaatcagcatcaccaccgctccaacacaggggaaaatgagggagatccttcacgttcagggagggcaatgcgggaaccagatcggttcgaagttctgggaagtggtgtgcgacgagcacggcatagatccgacggggaagtacgtcggaaactcagatctacaactcgagcgcgtgaacgtgtactacaacgaagcttcctgcgggcggtttgtcccacgcgcagtgctgatggacctggagcccggaaccatggacagcgtgcggactgggccgtacgggcagata

SEQ ID NO: 264330 - DNA, 244 bp, Glycine max
cccacgcgtccgcccacgcgtccggataaatggaaaacattagtgcacaccgcagcaatcgcccttcaacaaaggaggggagagccagtacctcacgagctcttggacagggttttggctgctcatgctttctggtctcagcaccaagccaagcaacatggcaagcatcaagctggaccaggaacctagaagattacagaagcctcagctgaaagaccttgtgtgtgttgaaggtgagaaggtg

SEQ ID NO: 264331 - DNA, 238 bp, Glycine max
atcaggactccgactacaccaattttcatcttcaccgctccaacacaggcgaaagtgatggggatccttcatgttcagggagggcaatgctggaaccagatcgagacgaaggtctggtaaattgtgttctacgagcacggcatagatccgacggtcaaggactgtggaaactcagatctacatcttgagcgcgtgaacgatgactacaacgaagcttcctgcgggcggttaagtgcca

SEQ ID NO: 264332 - DNA, 367 bp, Glycine max
  unsure (1)..(367): unsure at all n locations
cttttctactttgagtcttcttgatccttctttttctccttgaactcaaacatggcagatgaggtggttctgctagatttctggccaagtccatttgggatgagggtcaggattgcacttgctgaaaagggtatcaaatatgagtacaaagaagaggacttgaggaacaagagtcctcttctcctccaaatgaacccggttcacaagaagatntccgttctcatccacaatggcaaacccatttgtgaatccctcattgctgttcagtacattgaggaggtttggaatgacagaaatcccttgttgccttctgacccttaccagagagctcangctagattctgggctgattatgttgataagaaga

SEQ ID NO: 264333 - DNA, 280 bp, Glycine max
  unsure (1)..(280): unsure at all n locations
atggctcccaaaccgcctagtacgggtctgtttgttggactgaacaagggtcacgtgttcgccaanaaggaattgcctccacgcccctcagatcgtaaggggaaaacaagcaagagggtgcactttgtgaggaacctcataagagaggtagccggttttgcaccctatgaaaagcgtataactgagttgctgaaggttgggaaggataagagggcactgaaggttgcaaagagaaagctcggaacacacatacgcgcaaagaagaaccgtgaggaaatgt

SEQ ID NO: 264334 - DNA, 273 bp, Glycine max
ctcttcttctctcgcggctaggcttttagctcagcttcttctagatttaaggaagattgggcaggaaaaggttcacatcagcattgcggtcattggccatgtcaactctgggaaatccactaccactggtcacctgattacaagcttggacgcattgacacgcgagttattgcgaggttcgagaaggaagctgcttagatgaacaagaagtccaccaagtattcctgggtgctggacaaactcaaggctgctcgctaaagaggaaccaccatt

SEQ ID NO: 264335 - DNA, 242 bp, Glycine max
gaattcccgggtcgacccacgcgtacgatcgtgagaggggcagtagccgagattccgtgagttgcaaaaatgaagacgattctttccgccgagaccatgaacatcccggacggcgtgagcatcaaagttcatgccaaggtcatcgaagttgacggcccccgcggaaaattggtgcgagacttcaagcatttgaatctcgattttcagctcattactgacgaaaacggtaaaagaaagctgaa

SEQ ID NO: 264336 - DNA, 279 bp, Glycine max
cccacgcgtccgcgcgtcgctgctccgtaccagtttcactgcataaatttgagagagaactctgcaaacatgttggtttatcaggacctccttacaggtgatgagcttctctcggactccttccgttacaatgaaattgagaatggaatgctgtgggaagttgaggggaagtgggttgttaagggagcagttgatgttgacattggtgcaaacccttctgctgagggtggagaagatgagggagtcgatgacgcagctgttaaggttgttgacattgtt

SEQ ID NO: 264337 - DNA, 280 bp, Glycine max
cccacgcgtccgggaaaatggaaggcaccattgattgataacccagatttcaaggatgaccccgacctctatgttttccccaacttgaagtacgtggggattgaattgtggcaggtgaaatctggtactttgtttgacaatgtcttaattactgatgatcctgagtatgctaagcagctggttgaagaaacatggggcaagcacaaggatgctgagaaggcagcatttgaggaggccgagaagaagagggaagaggaggaatcaaaggatgacccagttg

SEQ ID NO: 264338 - DNA, 278 bp, Glycine max
atggctcccaaaccgcctagtacgggtctgtttgttggactgaacaagggtcacgtggtcaccaagaaggaattgcctccacgcccctcagatcgtaaggggaaaacaagcaagagggtgcactttgtgaggaacctcataagagaggtagccggttttgcaccctatgaaaagcgtataactgagttgctgaaagttgggaaggataagagggcactgaaggttgcaaagagaaagctcggaacacacaaacgcgcatagaagaagcgtgaggaaat

SEQ ID NO: 264339 - DNA, 193 bp, Glycine max
ctcaggaggagaataaggatgtctcacaggaagttcgagcacccaaggcacgggtgactgggatttctccccaggaagcgtgctgctcgtcacaggggaaaagtgaaggcattccccaaggatgacccatccaaggcacccaagctcactgcattcttgggttacaaggctggtatgactcacattgttagag

SEQ ID NO: 264340 - DNA, 399 bp, Glycine max
cccacgcgtccgcccacgcgtccgaaaaaaatgggttcttcttctttcatatggaccgtgtggttgattttgcaatacttggcctttgaagaactttgggcaaaccttggtaaacagtggatgtaccatttggcccgaactacctgcccacaatggcctttgatcacatcaaatacttcaatggaagttctgacattcaacttcatcttgacaagtacactggtactggctttcagtccaaagggtcatacttggttggtcacttcagcatgtacataaagatggttcctggagattcagctggcacagtcactgctttctatttatcttcccaaaatgcggagcacgacgagatagactttgagttctttgggaacagaacaggacacccttacattt

SEQ ID NO: 264341 - DNA, 319 bp, Glycine max
caagaaatgaaagatgctctggttaagaaattgaaagaccaactatttgttgccagagctgattatcctagccttgcaaaactcccagcaaatgataaattgtctcgccaactgaaacagaatatacaggagatggagcacatgcttagtgaatctaccacagatgctgatcttccaccagtggctgaaagttattcaaagaagatggaaaaaacaataaccagggtaaaatcaattcctgtggtttgcgacaatgtggacaagaaattgagacacatatttgatttgactgaggatgaagccaacttccacatgaaac

SEQ ID NO: 264342 - DNA, 356 bp, Glycine max
ttttatctttattccactgaatagaacatgagcatataaatggataccctttatattatcgatctgtatattatctataaagggtaaagatatccgatgtgaatctatttgtttagttttctatcggtatgtatataggtgaataatccaacatgcctttttgtgaagtaaaaaaactaccctcgatccatgcctcaaaagggttgataataagtaaaaaaaatcaatgaattcatgataaaacccttctgcgtttttttattataaatttttttgtcaataaagggatcaaggggttgggggatcaaatggtaaagttcttttggtggtaaattggaggattagaaacatgacta

SEQ ID NO: 264343 - DNA, 282 bp, Glycine max
gttgaatcgtgaaaatgttcagaaaccagtacgacacggacgtgaccacatggagccctgcggggaggctgttccaggtggagtacgctatggaggcggtgaagcagggctcggcggcgatagggctccgatcgaagacccacgtggtcctcgcatgcgtcaacaaggccaactccgaactctcctcgcaccagaagaagatcttcaaggtcgacaatcacatcggcgtcgccatcgctggccttaccggcgatggccgcgtcctctcccggtacatgagat

SEQ ID NO: 264344 - DNA, 289 bp, Glycine max
cccacgcgtccggacagaagagagcgtccttttcgcaaccctaataagaagaaccacagcggcaagcgagtgacatccaccagccatgggtcgtatgcacagccgcggtaagggtatatcctcttctgctttgccctacaaaaggacaccccctagctggctcaagatctcttcgcaagatgtggaagaaaatatctgcaagtttgcgaagaaaggtttgaccccgtctcagattggtgtcattcttcgagattctcacggtattgctcaggtcaacagcgtcacttgc

SEQ ID NO: 264345 - DNA, 320 bp, Glycine max
tctgtctctctctcactgcgtcctccaaactcaagtgtcttaaagtttgcttcttttccggtctgaatcaccctatttattttgggtctctcatctttcttcttccttccaagatggttttggtgttggtgttggtgttgaattgagttgagaagacatgcagaggtcatagacacacacacatgacatgtctgctgatgagtcagctgaacacaacatcatcagaggagtaccaactcatggcggacgctatgttcagtgcactatctatggcaatctcttcgaagttcccagaaagtatgtccctactatccgccctg

SEQ ID NO: 264346 - DNA, 396 bp, Glycine max
aattaccgggtcgaccgacgcgtccgggctgaagcacaactacgagaccagcatggctaccctgtcccactcaccgatcaatacggtgatccggggatcttaactgacgagcgcggtaatcccgtccaactcactggtgtcgctaccaccgctaccggcacagcacgttctgggcttgggtcctatcgtaccggtgcttacggcggtggtgcaatgtacaaccaccgttgcagatcttttggcaacccaaccaaagattgacagggaggctagacagcttcgtcgtacctccagtctaagctctatctcgattgaggatgattggcaacgtgggaagatgaagaaggtagtgaaggataatattcaagagctactaccaatggtagtacgaaggaa

SEQ ID NO: 264347 - DNA, 193 bp, Glycine max
cctttctcactctcaaatcaatactctgatcccgttatcttaacagactagcgcggtaaacccatccaacataactttatcgctaccatcaatacactcacatcatattctctatttgctttcaatcataccgctacttaccttcaacagttcaatttcaaccatcgatacatatcttttttcaacccaacca

SEQ ID NO: 264348 - DNA, 283 bp, Glycine max
gctgaagcacagctactacacagcatggctaccctgtcccactcaccgatcaatacagtgatcccgttatcttaactgacgagcgcggaaaacccatccaactcactgatatcgataccaccaataccttcacatcacattctcaatatgctctcaatcataccgctacttacaacaatcatgcatgtacaaccaccgatccatatcttttgtcaacctaaccaaatattcacatagaaactagacagcttctttctatctacatactaagctctatctctat

SEQ ID NO: 264349 - DNA, 349 bp, Glycine max
gttgtgtgcaacccattggggaagtctggagtgtgccctcatccagcaatttatgatattgacttttgggtcactagctaattcaaccccatacttgggaggagtgcttctgctgattgtttctgcctggctagcagcggcaaaatccttggatacccaatttactgcattgcgtaaagaggaagaactcgagaaagagatggaacgagcagccgccgtcaagataccagtggtggctgagactgagagtggaaatggttctcttgcaactggttcaccactgaatccatcctcaggtgactcctcaagcaatccatctgaagccttaacttctcgcaattaaaatgtg

SEQ ID NO: 264350 - DNA, 306 bp, Glycine max
tgcggttgagtgcaacgccattgatgaagtctggattttccctttatccagcaatttatgatattgacgtctttgtcactttctaattcaaccccatacttgggaggagtgcttctgctgattgtttctgcctggctagcatctgcaaaatccttgtatacccaatttacttcattgcgtaaagagtaagaactctataaagagattgaacgagcatcctccgtcaagataccaattatttcttatactgatagtgtaaactgtttctttgcaactgtttcaccactgaatccattctcatgttac

SEQ ID NO: 264351 - DNA, 184 bp, Glycine max
cgacccacgcgtgcggttgtgtgcaacccattgttgaagtctggattttccctcatccagcaatttatgatattgacgtttggttcactatctaattgaaccccatacttgtgaggagtgcttctgctgattgtttctgcctttctagcatcgtcaaaattcttggatacccaatttactgcat

SEQ ID NO: 264352 - DNA, 427 bp, Glycine max
ggagattctgatttgttctctcagatctgagcttaccgtcgccggaatccaactcaacctgggtcggattcttgggtatcatcgcatcgccattcgttttagcctctcaataagagattttagttcgcttcaaattcgaggtttgatttgaagttgaaagttggaatagcttaacttgtggtgtaaacaacccacacacacgaacatggaaagccaggacaacaacgtagaaattgtcattcaattcatttctagcttacaaatctgctaaggtgtttgttgctggtcaccggggtcttgttggctcggccattggtcgcaagctcacccaacttgggttcactaatctagtcttgcgctcccatgccgagcttgatctcactcgacaatctgatggtgaagcctctttgcttatgaaaaaccctga

SEQ ID NO: 264353 - DNA, 431 bp, Glycine max
  unsure (1)..(431): unsure at all n locations
cagagtttgagtggacctgtctcagctaccctttaccttggttattcactactcatggccgttgcaatcatgttgtcaaccggcaccattggcttccttatgtcattctactttgtgcactacttgttctcatcagtaaagatagattgaggttcttgttgtcattgcatattaactatgaaaaaggttgattgatataacttgatcacattgcatagtanggcaacggatgtttaattcattgtctgattttatattgcgatgggatctgcagtttgttctccttctgcctgtttcccaaagtagtgtactcattcaagtattcaactagtgtttgagatcatgtttcaagtattttgttcaagtttctttaagaagttgtaattcaaactctcatctcatttaatactttaaaaaaatgatgttaggat

SEQ ID NO: 264354 - DNA, 354 bp, Glycine max
  unsure (1)..(354): unsure at all n locations
ggtcgaccgacgcgtgcgcggacgcgtgggtttcagaggcaccgaatgttcttacatttgcattaaagagatttcagtcgggnaaggttgttaagctcaacaagcctattcaatttcctgaaatacttaacttggcacctttcatgagcgggactagtgataaatcacccatatacagattgtatggggtagttgttcacttagatatcatgaatgctgccttttcgggtcactatgtgtgctatgtgaagaatatccaaaacaagtggttcaaggttgatgacagtgtggtgacagctgttgaattggatagagtctngacaaaaggaacatatatgcttttctatgcaaggt

SEQ ID NO: 264355 - DNA, 344 bp, Glycine max
cgaccgacgcgtgcgctgacgcgtgggtttcagaggcaccgaatgttcttacttttgcattaaagagatttcagtcgtgtaagtttgttaagctcaacaagcctattcaatttcctgaaatacttaacttggcacctttcatgagcgggactagtgataaatcacccatatacagattgtatggggtagttgttcacttagatatcatgaatgctgccttttcgggtcactatgtgtgctatgtgaagaatatccaaaacaagtggttcaaggttgatgacagtgtggtgacagctgttgaattggatagagtctttacctaaagaacatatatgcttttctat

SEQ ID NO: 264356 - DNA, 172 bp, Glycine max
gtcatatgctccaagtgcactggtaagggttttaaagctggtgcttcgatgaaatgggctgggtgtcaacgaactgctatgaaagtttctatcaaacatctttgcccgttcacatattcaagtgatgcttccatcatgcaacgtatgcaagggctctttagaaaccattaac

SEQ ID NO: 264357 - DNA, 283 bp, Glycine max
gtcatatgctccaagtgcactggtaagggttcttaatctggggcctccattaaatgggcctggttgtaaaggaactggtttaaaggttcctttaaaacatcttggcccgcccttaatttaaccattgcaccatgcttgcaatgaatgcaagggtcctggaaaaaccatcaacgacggaaatcgctgcccccagtgcaagggagaaaaggttgtgcaggagaaaaaagtccttgaagtttttgtggaaaagggaatgcagaacgggcagaaaattacattccct

SEQ ID NO: 264358 - DNA, 465 bp, Glycine max
aattcgggggtcgactcacgcgtgcgtgttgacctcacagtgaggctggataaggattcctcctacgatgaaattaaaaatgctatcgatgaggaatcagagggcaagttgaagggaattcttggttacactgaagatgatgtggtctccacctactttgtgggcgatagcagatcaagtatttttgatgcaaaggctggaattgcattgaataagaactttgtgaagcttgtctcttggtatgacaactagtggggatacagctcacgtgtcattgacctgcttgtattcgttgccaagaagtctttttaaggttgtactgaaaaaaaagtagcttgtctagacattatgtgctggtgtctagctgcgatttagtgtctttttgctcgggcagaaatgagaagtatgaataaatctgtttttggaaccgggtttgttaaccctttaagagcattaaactttttt

SEQ ID NO: 264359 - DNA, 311 bp, Glycine max
tgttgacctcacagtgaggctggataaggattcctcctacgatgaaattaaaaatgctatcgaggaggaatcagagggcaagttgaagggaattcttggttacactgaagatgatgtggtctccaccgactttgtgggcgatagcagatcaagtatttttgatgcaaaggctggaattgcattgaataagaactttgtgaagcttgtctcttggtatgacaacgaatggggatacagctcacgtgtcattgacctgcttgtattcgttgccaaaaagtctttttaaggttgtactgaaaaaaaagtagctt

SEQ ID NO: 264360 - DNA, 326 bp, Glycine max
tgttgacctcacagtgaggctggagaaggaagcctcctacgatgaaattaaaaatgctatcaaggaggaatcagagggcaagttgaagggaattcttggttacactgaagatgatgtggtctccaccgactttgtgggcgatagcagatcaagtatttttgatgcaaaggctggaattgcattgaataagaactttgtgaagcttgtctcttggtatgacaacgagtggggatacagctcacgtgtcattgacctgcttgtattcgttgccaagaagtctttttaaggttgtactgaaaaaaaagtagcttgtctagacattatgt

SEQ ID NO: 264361 - DNA, 371 bp, Glycine max
tgttgacctcacagtgaggctggataaggtttcctcctacgatgaaattaaaaaggctatcgaggaggaatcagagggcaagttgaagggaattcttggttacactgaagatgatgtggtctccaccgactttgtgggcgatagcagatcaagtatttttgatgcaaaggctggaattgcattgaataagaactttgtgaagcttgtctcttggtatgacaactagtggggatacagctcacgtgtcattgacctgcttgtattcgttgccaataagtctttttaaggttgtactgaaaaaaaagtagcttgtctagacattatgtgctggtgtctagctgcgatttagtgtcttcttgctcgggcagaaa

SEQ ID NO: 264362 - DNA, 242 bp, Glycine max
ctccactcctgctcactcttcttctctttccactacttttacatctcatcttcttctagatttaaaggggatttgttaataaaaaattcacatcaatactttttttattttccatgtttactcttttaattccactaccacatttccaccttatctacaatcttagatgcatatacaaacttattatttaaatattttataaaaaatcttcttatatttacaatatatctttcaattattcc

SEQ ID NO: 264363 - DNA, 151 bp, Glycine max
tttcagtttattgatttttgttcacttgatctcatcatagtcatcggcgtcaattgaaaaagatgccgatcataaacatcgccgtccgaaggccctaaaaagccacttaccccgacacgtttaaagccgcctttgctgaattcaatctaac

SEQ ID NO: 264364 - DNA, 461 bp, Glycine max
gtcatatgctccaagtgcactggtaagggttctaagtctggtgcttcgatgaagtgtgctgggtgtcaaggaactggtatgaaggtttctataagacatcttggcccgtccatgattcagcagatgcagcatgcttgcaatgaatgcaagggtactggagaaaccatcaacgacagagatcgctgcccacagtgcaagggagaaaaggttgtgcaggagaaaaaagtccttgaagttattgtggaaaagggaatgcagaacgggcagaagattacattccctggcgaagctgatgaagcgccagacacaattactggggatattgtctttgtccttcagcagaaggaacatcccaaattcaaaagaaaggctgaagatctttttgtagagcacattttgtcccttactgaagccttatgtggcttccaatttgtgctgactcacttggatggccgtcagct

SEQ ID NO: 264365 - DNA, 426 bp, Glycine max
  unsure (1)..(426): unsure at all n locations
cccacgcgtccggtgatttcagtgagtgatcggtgttcacttgatctcatcataatcgtcggcgtcaattgaagaagatgccgatcagaaacatcgccgtcggaaggcctgaagaggcgactcaccccgacacgttgaaggcggctttggctgagttcatctcaaccttcatcttcgtgttcgccggctcaggctccggcatcgcctacaacaagctcaccgacaacggcgctgccacccctgccggcctcatctccgcctccatcgcccatgcattcgccctcttcgtcgccgtctccgtcggcgccaacatctccggcggccacgtcaaccccgccgtcaccttcggcgccttcgtcggcggcaacatcaccttcctncgcggcatcgtctacgtcatcgcccagctcctcggcttcatcgtcg

SEQ ID NO: 264366 - DNA, 403 bp, Glycine max
cactcttcttctcttgcggctagggttttagcgcagcttcttctagatttaaggaagatgggtaaggaaaaggttcacatcagtattgtggttattggccatgttgactctgggaagtccactaccactggccacctgatctacaagcttggaggcattgacaagcgtgttattgagagatttgagaaggaagctgctgagatgaacaagaggtctttcaagtatgcctgggtgcttgataagcttaaggctgagcgtgaaagaggaatcacaattgatattgccttgtggaagtttgaaaccaccaagtactattgcacagtcattgatgcccctggacacaaggatttcatcaagaacatgatcactgggacatcccaagcttactgtgctggtcttatca

SEQ ID NO: 264367 - DNA, 189 bp, Glycine max
aaaatatatctcttacacatatacatatataactgatgttaatataacttaatacttccctcaaaacaaaataaattataaacaaaaacaacctattaaccttcttcatttcatatattacatctataatcactaaaatctaccttatcaaaaaatttaacacatatcaaaataaaaatcattcatatt

SEQ ID NO: 264368 - DNA, 330 bp, Glycine max
gggtcgaccgagcgtccgtccacgcctccggcgatttcagtcagctattttctgatcccagctcctatcatactcaatggggatcgggtgaataaaatgccgctcataaacatcaccgattgaccgcctgaacacgcaaaataccactaccccttgccagctgatctacatgaattcatttcaaacttcactcttcacttcgatcatctcagacttcagcataccactacaatcatactcagcgactacggcaactgccaacactatcagactaacttgcagctccatctcccatgcattcaccctatattaccccgtctcacattgaac

SEQ ID NO: 264369 - DNA, 443 bp, Glycine max
cccacgcgtccgagaaggcctgggcttagttgataagcataactgggtgaggaagaaagaaagagagtgaagaagatggcgtcgagcggagcggtaccgttttggagggcggcggggatgacgtacataacatactcaaacatatgcgcgaatctgctcaggaattgcctcaaggaaccctacaaggccgaatccctctctcgtgagaagctccattttgttctctccaaatgggtcgacgccaagcctgaaaaacctactattcgttcagacaccccagagcagtgatctggaatagttggaagctataaatgcataaatctttgagatctggaagttcattgtcattttgaacctttctgtgatgtttaattcctttggttttttctctccatgaaatggaacatgcactggattttgatttgcacggttaatcttggaat

SEQ ID NO: 264370 - DNA, 364 bp, Glycine max
cccacgcgtccggcttgcgctcttgccgttcacgagcactttatgaagggctgaaggtagctgcaacatctgatctgatgctgggatatctggatttcttccttggtggggatgagaaaagacctgatctgcctcctcgtctttatcaaagatttcccatgtctataatttttgggggagatggaagttacatgagtcctttctctattcacagtgataatattcttactagcatcatgagtcagtctgttccaccaactatatggtatcgattagtggctggtcttaatgctcaactacgattggttcgccgtggacatctaaaaataactttttgtccctgtatcagctggcctgatgtata

SEQ ID NO: 264371 - DNA, 466 bp, Glycine max
aattcctcggtcgacgcacgcgtcgccacgcgtcgaaaggcctggctattgatagcttactggtgaggaagaagaggaagggagaaatggctgagcggagcggtaccgttttggaggcggcggggatgacgtacataacatactcaaacatatgcgcgaatctgctcaggaattgcctcaggaccctacaaggccgaatccctctctcggagaagctcatttgttctctcaaatgggtcgacgccaagcctgaaaaacctactattcgttcagacaccccagagcagtgatctggaatagttggaagctataaatgcataaatctttgagatctggaagttcattgtcattttgaacctttctgtgatgtttaattcctttgtttttttctctccatgaaatggaacatgcaactggatttgatttgcacggttaatcttgtaataatacaagtttaaacgaatga

SEQ ID NO: 264372 - DNA, 461 bp, Glycine max
  unsure (1)..(461): unsure at all n locations
cccacgcgtccgagcagcgcaagcacgcacgcattctgtgtgttgtggtttctctgagttccgagtggactcagttacggagcaataatgagtcaggaatcgtttatatatagcttcgtggctcgtgggacgatggtgttggctgagtacacggagttcactggaaacttccctgccattgcagctcagtgtcttcagaagcttccatcttccaacaacaagttcacttacaactgtgaccaccacaccttcaatttcctagttgaagatggttatgcttactgtgttgttgccaaggaatctngtagcaagcagatctctattgctttccttgaacgtgtcaaagctgacttcaagaaaagatatggnggtgaaaagcagatacagctattgcccagagtctgaacaaggagtttggaccaggtatgaaagagcacatgaagtacatcatcgatcatgct

SEQ ID NO: 264373 - DNA, 489 bp, Glycine max
aattcttgggtcgaccgacgcgtccgcccacgcgtccgagaaggcctgggcttagttgataagcataactgggtgaggaagaaagagggagagtgaagaagatggcgtcgagcggagcggtaccgttttggagggcggcggggatgacgtacataacatactcaaacatatgcgcgaatctgctcaggaattgcctcaaggaaccctacaaggccgaatccctctctcgtgagaagctccattttgttctctccaaatgggtcgacgccaagcctgaaaaacctactattcgttcagacaccccagagcagtgatctggaatagttggaagctataaatgcataaatctttgagatctggaagttcattgtcattttgaacctttctgtgatgtttaattcctttggtattttctctccatgaaatggaacatgcactggattctgatttgcacagttaatcttgtaataatacaagtttaaacgaatg

SEQ ID NO: 264374 - DNA, 404 bp, Glycine max
aattaccgggtcgaccgacgcgtccgcccacgcgtccgcagactcgtgggttgaaattgacccgtttcctccctcgcacggatccacgcgaagtctgagattccttcgaattgttaactctctttcagtttcaagttggaaactttttcgattttcgctttctggaggtgtgaattgttgtttgaaagtcacaagcaatggtgaaggacactgcgtattatgacatattacgtgtcaattatgatgcatctgctgcatagatcaagaaagcttattatgtcaaggctagaattgttcaccccgataaaaatcctgaggatcctaatgccgtacaaaactttcagatactcggtgaggcttaccaggttttaagtgatcctgtgaagcgtccggcatatgatgag

SEQ ID NO: 264375 - DNA, 462 bp, Glycine max
gcgcccacgcatccgcatacgcgtgggttgaaatctacccttttcctccctctcacggatccaggcgaaagctgatattccttcgaattgttaactctctttcagtttcaagttggaaactttttcgattctcgctttctggaagtgtcaattgttgtttgaaagtcacaagcaatggtgaaggacactgcgtattatgacatattacgtgtcaattatgatgcatctgctgcagagatcaagacagcttattatgtcaaggctagaattgttcaccccgataaaaatcctgaggatcctaacgccgtacaaaactttcagaaacttggtgaggcttaccaggttttaagtgatcctgggaagcgtgcggcatattatgagcatgtaaaggagggagtaccacaagattccatgattgaccctacaactgtatttggaatgatttttggaagtgaatttttt

SEQ ID NO: 264376 - DNA, 210 bp, Glycine max
cccacgcgtccgcccacgcgttcgaaaaaaatgggttcttcttcttccatatggaccgtgtgtttgattttggcatcactggcctctgcagcactctgtgccaaccctcgtagaccagtggatgtacaatttggccgaaactacctgcccacatgggcctttgatcacattaaatactctaatggagggtctgacattcaacttcatctt

SEQ ID NO: 264377 - DNA, 244 bp, Glycine max
cgtgcaaagatggggatgtggcactcttctttgttcttttaggtaccggaaagaccactcttgggacggatcacaatatgtatctggtgggagatgatgaacactgttggggtgacaatggtgtcttcaacattgaatgtggttgctatgccaaatgcattgacctctcacgggagaaagagccagatatttggaatgcaatcaggtttggcacagtgttggaaaacgtggtgtttgatgagca

SEQ ID NO: 264378 - DNA, 284 bp, Glycine max
  unsure (1)..(284): unsure at all n locations
cctaaacaactctntctnttcttccttcgctcgntgttctccctcgcgtagatcgacaatggcggagacagagacgtttgctttccaagctgagatcaaccagctcctcagtctcatcatcaacaccttctactccaacaaggagatttttcttcgtgaactcatcaacaacgcctccgatgctttggacaagattcgatttgagagtttgacagataagagcaagctcgatgctcaaccaaagntgttcattcatattatttcagacaagactaacaatacac

SEQ ID NO: 264379 - DNA, 433 bp, Glycine max
  unsure (1)..(433): unsure at all n locations
gaaaanaaaaaaaaaatttaaatttttaaaaagaaaaaaaaaaagggaaaatgaaattttaaaaaaaagggaaaaaaanaaataaaaataanatnaaaaaataaaaaaaaatataattttaaaaaaaattaaaaaaaaaattaataattaaaaaaaataaaaaaaggaaaattaaaatttaatataaaaaaatataaatgaaaaaataaaaataaaaaaaaataaattaaaattaataaaaaataaaattaaaaataaaaataattattataaaaaattaaaataaattataataaataaatatatataataaaaattaaataaataaataattataataattaaattattaaaaataaatataaaaaaataataaataaatatattaaaatataaataattttaatattatataaaatatttattttattat

SEQ ID NO: 264380 - DNA, 254 bp, Glycine max
ccaatagtatcttgaatgtctctgccgaaaataaaaccactggccagaaaaataagatcactatcaccaatgacaagggtatattgtcaaaggaagatattgagaatatggttcaagaggctgaaaagtacaagtctgatgatgaaaatcacaagaagaagtgttaagccaaaaacgctttggaaaactatgcatacaacatgaagaacaccgttaaagattaccagattggtgaaaaacttgaccccgctgac

SEQ ID NO: 264381 - DNA, 474 bp, Glycine max
  unsure (1)..(474): unsure at all n locations
aaaattttaattaaaaaaattaaaaaaaaaatttgtatttttaaaataaaaaaaaattaanaaaaacttgataaaattaaaaaaaaaaaatgtggtttaataaaaaaaaaaaaaaataaatataataattatataaataattaattaaaataaaaaaataaataaaatataaatctataaaataaaaatttaaattatatttataataaaaaatataaaaaaaaaaaataaaaaaatatatataaaaaaaaaaaaaaaaaaaatataaatttaaataaatatataaaatatattttaataataaaaataataaattaaaattataatttaaaaatatttatttttattaaaaatttatataatttaatttataattattaacaaataaattttatattataatatataaatattattaaaatataattataataatataatatattttaaataatatatataaaattttatata

SEQ ID NO: 264382 - DNA, 149 bp, Glycine max
ctctgctgcgtttgcttctcctccatccatccacaaacgaacacacactttgattgagaatggggcgtgttcgcacaaagacagtgaagaagtcctcgcggcaagtgatcgagaggtactactctcgcatgacgctggacttccacacg

SEQ ID NO: 264383 - DNA, 275 bp, Glycine max
aaaaaaaaataataaaaaaaaaatataaaaaataaaaattaaaaaaaaaaataaaaaaaaaaaaaaaaaaataaaaaaataataaaaaaactataataataaattaaaaaaataaaaaaaaaaaaataaaaaaaaaaaaaaaaaaataaaaaactaaaaataaaaaaaaaattaaatttaaaaaaaaaataaaaaaaaattaaataaaaaaataaaaaaaaaaaacaattaaaaaaaaaaaaaaataaaaaaataaaaaaaaaacttaataaaaa

SEQ ID NO: 264384 - DNA, 282 bp, Glycine max
aaaaaaaaagggaccgcaaaaaaaaaaaaaaaaacaaacaacaaaaaaaaaaaaacaaaaaaaaaaaaaaaaaagcaacaaaaaaaaactaaaaaaaaaaaaaaaaaaaaaacaaaaaaaaaaaaaaaccacaaaaaaaaaactccccaacaaaaaaaaaaacaaaccctcaaaaaaaaaaaaaacaaaaaaaaaaaaattcaaaaacaaaaaaaaaaagaaaaaaaaaaaaaaaaagcccccctaaaaaaaaaaataaaaaaatcaaaaaaaaaaaaacaa

SEQ ID NO: 264385 - DNA, 383 bp, Glycine max
attgctgctgtttgcctattggtgtactttggggtctctaccctgctggatgcctcatctggcgatggccaaaaatcagatgaagagcagaaggaggcagaactagcagtttctgaattttctggaaatggtgctgggatactatctgctgctagcacaagtgccagtacttttctcttaatttttggtgctgaatggggcgacaagtcatttttcttcacaattgcccttgcagcaacttcttcttcccttggagtcataactggagcactggcttgtcattgtgttgcaactttgctagctgtacttgggggttctttacttgggacctatttgtcagagaaagttattgcctacatcggaggtgttctctttctcgtctt

SEQ ID NO: 264386 - DNA, 444 bp, Glycine max
  unsure (1)..(444): unsure at all n locations
aaaaaaaatttataattttacaaaaaaaaaannaaaaaaaacccagacttttaaataaaaacgtgggccgccaaaaaaaaaaaaaaaaaaattgataaataaaaataacaaaataaaaaaaacataaaaaaaaatacaattaaaaaaaaactaaaaaaaaaaaaaaaaaaataatataaaaaaataaaaaaaaaacaaaatcaaaaaaattataaataaataatactaattatactttatataacaatataaattaaaaaaattacaaaaaatataattaaaaaaaaacaattaaattaaaataaatatcaaaatataataaaattaaaaaaacataatcaaaaaaaaaaataataaaaaattaataaaattatccataacaatataataaaaaatataattgcttatctttataaaaaaataataaaaataaataaaaatatt

SEQ ID NO: 264387 - DNA, 207 bp, Glycine max
  unsure (1)..(207): unsure at all n locations
acgacccacgcgttcgaccacgcgtncggactgcccaagatgtatcgtcaatgttacggtgcgggcaaaaaaccatgatctttgtgatcaacaatggtggatacaccatcgaggttgaaattcatgatgggccgtacaatgtgattaagaactggaattacactgggttgattgatgcaatccacaatggtgaaaggaaatgcttga

SEQ ID NO: 264388 - DNA, 355 bp, Glycine max
cttttctactttgagtcttcttgatccttctttttctccttgaactcaaacatggcagatgaggtggtgctgctagatttctggccaagtccatttgggatgagggtcaggattgcacttgctgaaaagggtatcaaatatgagtacaaagaagaggacttgaggaacaagagtcctcttctcctccaaatgaacccggttcacaagaagattccggttctcatccacaatggcaaacccatttgtgaatccctcattgctgttcagtacattgaggaggtttggaatgacagaaatcccttgttgccttctgacccttaccagagagctcaggctagattctgggctgattatg

SEQ ID NO: 264389 - DNA, 362 bp, Glycine max
  unsure (1)..(362): unsure at all n locations
ggcggcgctgtggcggacgcgccggcggtggttgaggagaagacggagttcgacgtggtgagcgaggaggtgccgagcaacgctcgaatcgcggtgattaaggcggtgagggcattgacgaacctagcgctgaaggaggcgaaggagttgatcgaagggttgccgaagaagttcaaggaagggatttcaaaggacgaagctgaagatgcgaagaagcaactcgaagaagctggtgccaaggttaccatngcttaanacactgttagctgcagcatatatngtctgcttcttctttgggtggttggagttgagttcaccagtacacttgaatttcatttccattttgtctggatttcaatctt

SEQ ID NO: 264390 - DNA, 284 bp, Glycine max
actttctcaaaagggtatcaaatattactacaaagaatagtactttagaaacaaaagtcctcttcttctccaaatgaaccccgttcacaaaaagattccttttctcatccacaatggcaaacccattttttaatccctcattgctgttcagtacatttatgatgtttggaatgacaaaaatcccctttttgccttctgacccttatccaaaaacttaaactaaaattcttaacttaatattcttcataaaaagataatatcatccttctaacgaaaaatttttt

SEQ ID NO: 264391 - DNA, 344 bp, Glycine max
  unsure (1)..(344): unsure at all n locations
cggacgcgtggggtcactattcctccagcctccacctgctgaaagaaactcctaattgtcaattgttgtaaagaaaagaactgaaaacactgacactgttattctctgaatnttctcaccatctacaactgaagtttaaccaatatggaaactgaaaagtctaatgtttcaaaggctgaagaatttaaactccttgccaatgaagtgttcaatgctcgaaaatactcccaagccattgatctatatacacaagcaattgagctgaacagtcaaaatgcagtttacttttctaatcgtgcctttgcccatcttcggtttgaggaatatggtagtgcaatacaaga

SEQ ID NO: 264392 - DNA, 356 bp, Glycine max
  unsure (1)..(356): unsure at all n locations
cccacgcgtncgncacgcgtncggtttctggtggaggatccaacttcagagcaattcatgaggcctccaaaaggggatcacttcatggagatgttcttgtgttggtcacaaataaaagtgattgtggaggtgcggagtatgcaagaaataatggtatcccagttatactgtaccatatatcaaaagatgaatctaatccaagtgaccttgttgatacactaaagaaatttgaggttgattttattcttttagctggatacctcaaacttataccagtggaattgatccgagcttacaaaagatctatattcaacattcatccatcacttcttccagcttttggaggcaagggattc

SEQ ID NO: 264393 - DNA, 297 bp, Glycine max
ggctacttttgattgcttgatgaaaacctatggattcctgacaccagaattctggaaggagactcgcttctccaaatctccattccaagagtacacagatctactggcaaaaccaacaggaaagactctaatcttggaggaggaaagggtggatgcttgatttgctagttttgctttatggatgttttaggaactttattactttacatactttgttggttctgtgctttacttttggttttgatagacggtatgtctctgtatgcattttgattgtttccaagttttaattgactg

SEQ ID NO: 264394 - DNA, 161 bp, Glycine max
cttttctactttgagtcttcttgatccttctttttctccttgaactcaaacatggcagatgaggtggttctgctagatttctggccaagtccatttgggatgagggtcaagattgcacttgctgaaaagggtatcaaatatgagtacaaagaagaagactt

SEQ ID NO: 264395 - DNA, 271 bp, Glycine max
cgcaaaaacgcattgtgtttctctctttccgtggcgtagatctgagcagtttgggaaaccctaactgctctcaccactctctttgctttttttcctctccgatcaacgacctctttcgtcgccctaagtcatggcaggacttgcacccgagggatcacagtttgatgctcgtcaatatgataccaagatgaatgagttgcttacatctgatggacaggattttttcacatcttatgatgaggtttatgacagttttgatgctattggcttg

SEQ ID NO: 264396 - DNA, 296 bp, Glycine max
ggctacttttgattgcttgatgaaaacctatggattcctgacaccagaattctggaaggagactcgcttctccaaatctccattccaagagtacacagatctactggcaaaaccaacaggaaagactctaatcttggaggaggaaagggtggatgcttgatttgctagttttgctttatggatgttttaggaactttattactttacatactttgttggttctgtgctttacttttggttttgatagacggtatgtctctgtatgcattttgattgtttccaagttttaattgact

SEQ ID NO: 264397 - DNA, 421 bp, Glycine max
ggcggcgctgtggcggacgcgccggcggtggttgaggagaagacggagttcgacgtggtgatcgaggaggtgccgagcaacgctcgaatcgcggtgattaaggcggtgagggcattgacgaacctagcgctgaaggaggcgaaggagttgatcgaagggttgccgaagaagttcaaggaagggatttcaaaggacgaagctgaagatgcgaagaagcaactcgaagaagctggtgccaaggttaccattgcttaaacactgtttagctgcagcatatatgttctgcttcttcttttggtggttgtagttgagttcaccagtacactgtaatttcatttccattttgtctgggattcaaatctttatttgtaatgaggaaatatgaggtcctaattttataataatttttttaatgcgtatg

SEQ ID NO: 264398 - DNA, 375 bp, Glycine max
  unsure (1)..(375): unsure at all n locations
cccacgcgtncggcttgcgctcttgccgttcacgagcactntatgaagggctgaaggtagctgcaacatctgatctgatgctgggatatctggatttcttccttggtggggatgagaaaagacctgatctgcctcctcgtctttatcaaagatttcccatgtctataatttttgggggagatggaagttacatgagtcctttctctattcacagtgataatattcttactagcatcatgagtcagtctgttccaccaactatatggtatcgattagtggctggtcttaatgctcaactacgattggttcgccgtggacatctaaaaataacttttggtcctgttatcagctggcttgatgtatatgcaaacccta

SEQ ID NO: 264399 - DNA, 412 bp, Glycine max
cccacgcgtccgagaaggcctgggcttagttgataagcataactgggtgaggaagaaagaaagagagtgaaaaagatggcgtcgagcggagcggtaccgttttggaaggcggcggggatgacgtacataacatactcaaacatatgcgcgaatctgctcaggaattgcctcaaggaaccctacaaggccgaatccctctctcgtgagaagctccattttgttctctccaaatgggtcgacgccaagcctgaaaaacctactattcgttcagacaccccagagcagtgatctggaataagttgaagctataaatgcataaatctttgagatctggaaagtcattgtcattttgaacctttctgtgatgtttaaattcctttgggtttttctctccatgaaatggaacatgcac

SEQ ID NO: 264400 - DNA, 422 bp, Glycine max
  unsure (1)..(422): unsure at all n locations
cccacgcgtncgcccacgcgtnncgccacgcgtnncgccacgcgtncgtctncctctttctggtcactagctctgtgcattcttctctcgctctctgccttccatcacactcggcatttcctttcccaagatagtagaagatggcagacactgaggatattcaacctcttgtttgtgacaatggaacaggaatggttaaggctggatttgctggagatgatgccccacgtgctgtgtttcccagcattgtaggtcgtcctcgtcacactggtgtgatggttggcatgggccaaaaagatgcatatgttggtgatgaggcacaatctaagaggggtattttgactctcaagtaccccattgaacatggaatngtgagcaattgggatgatatggaaaaagattggcatcataccttctataat

SEQ ID NO: 264401 - DNA, 432 bp, Glycine max
  unsure (1)..(432): unsure at all n locations
cagagtttgagtggacctgtctcagctaccctttaccttggttattcactactcatggccagttgcaatcatgttgtcaaccggcaccattggcttccttatgtcattctactttgtgcactacttgttctcatcagtaaagatagattgaggttcttgttgtcattgcatattaactatgaaaaaggttgattgatataacttgatcacattgcatagtagggcaacggatgtttaattcattgtctgattttatattgcgatgggatctgcagtttgttctccttctgcctgtttcccaaagtagtgtactcattcaagtattcaactagtgtttgagatcatgtttcaagtattttgttcaagtttctttagaaggttgtaattcaaactctcatctcatttcaatactttagaaaaatgatgntagat

SEQ ID NO: 264402 - DNA, 397 bp, Glycine max
atcgaaaccttaagtttcggatcaggtctgagcaatctggttggtagaacctttggtcttagagagggaagttttatgtctgaattagacgatcaaattcctactgccttcgatccttttgctgatgcaaatgctgatgactcgggtgctgggtcaaaggagtatgtgcatattcgcgtacagcagcgaaatggaaggaaaagcctgacaaccgttcagggattgaaaaaagaattcagctataacaagatacttaaagatgttaagaaagagttctgttgcaatggaacagttgttcaggacccagaactaggacaggttattcaacttcaaggtgatcagaggaagaatgtttctaccttcctggtccaggctggtatcgtgaagaaggagcata

SEQ ID NO: 264403 - DNA, 363 bp, Glycine max
caaagacatccttctcctggatgtggctcccctcactctcggaattgaaactgttggtggagtcatgacaaagttgattcccagaaacactgttatcccaaccaagaaatctcaggtgttcaccacctatcaggaccagcagactacagtctccattcaggttttcgaaggcgagaggagtctcacaaaggattgccgccttcttgggaaatttgatctgtctggaattcctccagccccaaggggtacgcctcaaattgaagtgaccttcgaagttgatgccaacggcattctaaatgtgaaggcagaagacaagggcactggtaaatcagaaaagatcaccattacaaacgaaaagggacg

SEQ ID NO: 264404 - DNA, 292 bp, Glycine max
  unsure (1)..(292): unsure at all n locations
ggggcccacccaggcttgctcaaatacatcctttttcttaatatttctcttctcactctcacaattcaaactcttgcaccttgttttttattaaatgatccccaccaacactnctatcccaaccaataaatctcacttgttcaccacctatcaccaccaacatactacattcttcacttcacttttctaaagccataaaactctcacaaataattcccatcttcttttcaaatctcatctgtctcaaattcctccaaccccaaaccatacacctcaaatctaatctaccttt

SEQ ID NO: 264405 - DNA, 222 bp, Glycine max
  unsure (1)..(222): unsure at all n locations
agaaaacctaagcttagaattagaaacaaagataagatgataggaaagaattgatcgttgagaatgcanggaggaaagaaaagcgggagaatccattaagggaaacagctacaaacattggtgcttctgccaaggctggcatggagaaagaccaaggccactgtccaagagaaggcagaaagaatgacagcacgtgatccggtgcaaaaggagttggcaacc

SEQ ID NO: 264406 - DNA, 286 bp, Glycine max
cccacgcgtccgggagaagcagaatgagcataagcaatggcgccgaagaagccgagaaccacgacaaggaaccctgatttggttagggggattggcaagtattcgaggtcgcagatgtaccacaagaggggcatttgggccatcaaggccaaaaacagtggcgttttgccccgccacgatcccaagcccaagcccgaggccccggcccagaagccgcccaagttctaccccgcggacgatgttaagaagcccctcgtcaacaagcacaagcccaaacccgcgaaac

SEQ ID NO: 264407 - DNA, 367 bp, Glycine max
gaggagatatatgtacctaaacgaagagatcttgaaagagaatccaaacatgtgtgcttacatggcaccttctttggatgctaggcaagacatggtggtggtagaggtaccaaagctagggaaagaggctgcagtaaaggccataaaggagtggggccagccaaagtcaaagattacccacttgatcttctgcaccaccagtggtgttgacatgcctggtgctgattaccaactgaccaaacaattgggccttcgcccctatgtgaagaggtatatgatgtaccaacaaggttgctttgcaggtggcacggttcttcgtttggccaaggatttggctgagaacaacaagggtgcacgtgtgcttgtt

SEQ ID NO: 264408 - DNA, 448 bp, Glycine max
gaattcccgggtcgacccacgcctccggtcttatgctccaagtgcactggtaagggttctaagtctggtgcttcgatgaagtgtgctgggtgtgaaggaactggtatgaaggtttctataagacatcttggcccgtccatgattcagcagatgcagcatgcttgcaatgaatgcaagggtactggagaaaccatcaacgacagagatcgctgcccacagtgcaagggagaaaaggttgtgcaggagaaaaaagtccttgaagttattgtggaaaagggaatgcagaacgggcagaagattacattccctggcgaagctgatgaagcgccagacacaattactggggatattgtctttgtccttcagcagaaggaacatcccaaattcaaaagaaaggctgaagatctttttgtagagcacattttgtcccttactgaagccttatgtg

SEQ ID NO: 264409 - DNA, 285 bp, Glycine max
agaaaacctaagcttagaattagaaacaaagaaaagaagaaaggaaagaattgatcgttgaaaatgcagggaggaaagaaagcgggagagtccattaaggaaacagctacaaacattggtgcttctgccaaggctggcatggagaagaccaaggccactgtccaagagaaggcagaaagaatgacagcacgtgatccggtgcaaaaggagttggcaacccaaaagaaagaggcaaagatgaaccaggcggagctggacaagcaggcggcgcgtcagcataacacg

SEQ ID NO: 264410 - DNA, 303 bp, Glycine max
  unsure (1)..(303): unsure at all n locations
ccatgttgcntaattangaggataagccattttcttnatggaccatcccaatccaatacaatgactcaattattgactcaacccttaactgtagggagaatggtagcctttttgatgtttcccatatgtgcgggctaatcctcaaaggaaaggactctgtcccattccttgaaaaacttgtcattgcagatgttgctgggcttgcccctggaactggttcgttgactgtcttcacaaatgaaaaaagaagggcaattgatgattcaatgattaccaatgttaaaagattatcacatatacttt

SEQ ID NO: 264411 - DNA, 405 bp, Glycine max
  unsure (1)..(405): unsure at all n locations
ttccggnccggaatncccgggtcgacccacgcgtgcggcgccatatcgcgtatctttctctgttctattcctacgatggagttttggggtgcggaggtgaaggttggtgagtctgttaaggtaaatccagccgaattcgaggcatgcatacacctttctcaggctgctcttggtgaggcaaagaaagacaaatcaaatgaaccagttgttctctacttgaaagttggtcaacagaaatttgtcttgggaaccctttccagggagaaaattcctcaaatacctctggaattggttttggaaaaggagtttgagctttcccacaactcaaagaatgccagtgttcatttcttgggatacaaagcattttatgattcttgcgatgatagcgaggaggatgaatttact

SEQ ID NO: 264412 - DNA, 264 bp, Glycine max
cccttatctttctctcttctctctccccgcccaaaccctaactccctaccctatggcgctggctctcatccatcatgaaaggaggaaagtccaagaccgaatctaagagagccgatgccaaacttgctgtgaataagaagggcgccgccaccaagactaggaaacccgccggaaaggggaaggcagcgaaagatcctaacaagccaaagaggcctccaagtgctttctttcgtttcatgtaattataatatattggtatctcta

SEQ ID NO: 264413 - DNA, 485 bp, Glycine max
  unsure (1)..(485): unsure at all n locations
cggnccggaattcccgggtcgaccgcacgcgtgcgcccttatctttctctcttctctctccccgcccaaaccctaactccctaccctatgccgcttgctgtcatccatcatgaaaggaggaaagtccaagaccgaatctaagagagccgatgccaaacttgctgtgaataagaagggcgccgccaccaagactaggaaacccgccggaaaggggaaggcagcgaaagatcctaacaagccaaagaggcctccaagtgctttcttcgttttcatgtaattataatatattgttatctctacgattcatttgacttccgatgcgctctcttatctttcctccgaataattttatcgtcaaaacttttatccttgtccaattgtaagtccacgcgttctttacctgttggtggttggttacctcgattgctttattgttaaaattatgttttttgagtatgctagatctagcttatgcttcgtgaaac

SEQ ID NO: 264414 - DNA, 160 bp, Glycine max
cccacgcgtccgccacgcgtccggtttctggtggaggatccaacttcagagcaattcatgaggcctccaaaaggggatcacttcatggagatgttcttgtgttggtcacaaataaaagtgattgtggaggtgcggagtatgcaagaaataatggtatccc

SEQ ID NO: 264415 - DNA, 310 bp, Glycine max
aacaatttgttgggcaaatttgagctatctggcattcctcctgcacccaggggtgttcctgagattacagtgtgctttgacattgatgccaatggtatcttgaatgtctctgccgaagataaaaccactggccagaaaaataagatcactatcaccaatgacaagggtagattgtcaaaggaagatattgagaagatggttcaagaggctgagaagtacaagtctgaggatgaagagcacaagaagatggtgatggcaaaaacgctttggaaaactatgcataccacatgaggaacaccgtgaaggatga

SEQ ID NO: 264416 - DNA, 423 bp, Glycine max
  unsure (1)..(423): unsure at all n locations
gcaagtgtaacccaaaaccctagcggcgcctgctttcttcgttcgtcttttgcatcanccatgaggatggagtctcaggtgaagcatgctcttgttgtcaaagttatgggtcgtactggatccagaggacaggtgactcaagttagagtgaagtttttggatgatcagaaccgtcatatcatgaggaatgttaaaggaccagtgagagaaggagacattctcaccctactcgagtctgaaagggaagcaagaaggttgcgctagagggtatttttttcttgatctttatggtagttagttggtgctaaaagttatagcaccccgtcttggtgtcttggatctattttcattcaaaatatgggttgaattttggatggttgggggttaatatatgattttgaattatggcttaaattttggatt

SEQ ID NO: 264417 - DNA, 429 bp, Glycine max
  unsure (1)..(429): unsure at all n locations
cgcgtgcggaagtgtacccaaaaccctancggcgccttctttcttcgttcgtcttttgcatcanccagcaggatgtagtctcangtgaagcatgctcttgttgtcaaagttatgggtcgtactggatccagaggacaggtgactcatgttagagtgaagtttttggatgatcagaaccgtcatatcatgaggaatgttaaaggaccagtgagagaaggagacattctcaccctactcgagtctgaaagggaagcaagaaggttgcgctagagggtatttttttcttgatctttatggtagttagttggtgctaaaggttatagcaccctgtcttgttgtcttggatctattttcattcaaattatgggttgaattttggatgtttggagtttaatatatgattttgaattattgcttaaattttggatt

SEQ ID NO: 264418 - DNA, 187 bp, Glycine max
  unsure (1)..(187): unsure at all n locations
acaatttnttttgcaaatttaatctatctttcattcctcctgcacccannggtgggcctagtattacattttactttcacattcattccaatcntatcttgaatttctcttcccaaaataaaaccactttccacaaaaataaaatcactatcaccaattacaaaggtagattttcaaaagaaaatat

SEQ ID NO: 264419 - DNA, 333 bp, Glycine max
ttctgaacttaaaaaaacatacctttattacttacatttttctaatttaatgaagaggatggcattttctaaatggagcatgccaatccaatacaaggactcaattatttactcaacccttaactgtaaggagaatagtagccttttttatttttcccatatgtgccgtctaagcctcaaaggaaaagactctttcccattccttgaaaagcttgtcattgcagattttgcttggctttccccttgaactggttcgttgactgtcttcacaaatgaaaaaggaggggcaatttatgattcaatgattaccaaggttaaagatgatcacatata

SEQ ID NO: 264420 - DNA, 419 bp, Glycine max
  unsure (1)..(419): unsure at all n locations
ggaattcccgggtcgacccacgcgtgcgcaaagacatncttctcctggatgtggctcccctcactctcggaattgaaactgttggtggagtcatgacgaaagttgattcccagaaacactgttatcccaaccaagaaatctcaggtgttcaccacctatcaggaccagcagactacagtctccattcaggttttcgaaggcgagaggagtctcacaaaggattgccgccttcttgggaaatttgatctgtctggaattcctccagccccaaggggtacgcctcaaattgaagtgaccttcgaagttgatgccaacggcattctaaatgtgaaggcagaagacaagggcactggtaaatcagaaaagatcaccattacaaacgaaaagggacgtcttaaccaggaagaaattgagagaat

SEQ ID NO: 264421 - DNA, 394 bp, Glycine max
  unsure (1)..(394): unsure at all n locations
cgggtcgacccacgcgtgcgtcttgttaggttacctcttttacatttgtgtttctagttcatatattngcggctgacaccgagaagtgaagcaggaaaaaaacaaaaaggagcagatgggtagctcaggtttctcatggaaattggcggatcatccaaagcttccaaagggtaagactgtggctgttgtggtattggatggttggggagaggccacacccaatgagtacaactgcatccacaaggctgaaacaccctgcatggattcacttaaaaagggtgctcctgaacggtggagattggtcagggctcatggtactgctgtaggacttccaacaaaagatgacatgggcaataatgaagttggtcacaatgcccttggggctggtcgcata

SEQ ID NO: 264422 - DNA, 339 bp, Glycine max
  unsure (1)..(339): unsure at all n locations
tacctctttnacatttatttttctagttcatatatnnacnnctnacaccgggaaagatagcttttaaaaaacaaaacgcacctcatggttccctcaagtttctcatggaaattggcggatcatccaaatcttctaatttttaagactgnggctgttgtggtattttatggctgaggagaggccacacccaatgagtacaactgcatccacaatgcttaaacaccctgcatggattcacttaaaaagggtgctcctgaacggtggatattggtcaaggctcattgtacttctttaggacttccaacagaagatgacattgtcaatagttaattttttcac

SEQ ID NO: 264423 - DNA, 363 bp, Glycine max
  unsure (1)..(363): unsure at all n locations
gcctaaaatgctgacctgaaaaaaacagtcctttatgacttccatgttgctaatggagggaagatggtgccatttgctggatggagcatgccaatccaatacaaggactcaattatggactcaacccttaactgtagggagaatggtagcctttttgatgtttcccatatgtgcgggctaagcctcaagggaaaggactctgtcccattccttgaaaagcttgtcattgcagatgttgctgggcttgcccctggaactggttcgttgactgtcttcacaaatgaaaaaggaggggcaattgatgattcagtgattaccaaggtgaaggatgatcacatatactnggttgtgaaatgctgatgt

SEQ ID NO: 264424 - DNA, 331 bp, Glycine max
  unsure (1)..(331): unsure at all n locations
cgtacgattttaaaccctccaaccttantttttattctatacttgttcaccctttattctcggctctagcaaacatcaaccatggcttcaacaataaccttggtgacatccaccttgctctttctttctttcactttgtcatgtgctattgacacctccaccatcaccaactacaccgacaatgaagtcatgaccatgtacgaagagtggttggtgaagcaccaaaaagtgtacaatgggttgagagagaaagacaaaaggttccaagttttcaaaaacaacttggggttcatacaagagcacaacaacaaccagaacaacacttacaaac

SEQ ID NO: 264425 - DNA, 373 bp, Glycine max
cccacgcgtccgcggacgcgtgggggtttttgtggataagagtgagctataatggctgccgggagaccgggtttaattgctttgtttgatgttgacgggactcttacagctcccaggaaggtggtcacaccggaaatgttgacattcatgcaagaactacgaaaggttgtaacggttggagttgttgggggttctgaccttataaagatatcagagcaacttggcagcacagttaccaatgagtatgattacgtattttctgagaatggtcttgtggctcacaaggaaggaaagctcattggaactcagagcttgaagtcattccttggtgaagaaaaactcaaagaagttattaactttacacttcattata

SEQ ID NO: 264426 - DNA, 238 bp, Glycine max
catctccaaacatcacaagattctagcatcagtaataaagcgcacccagagggaaaccaatcgacaagaaaacgacacatacataccttgttccataggcatcatccaccactaagaatattctcaaacctctacaaaaaaactcacactctccaaagatcaaccaattatcctggaagagagcttcaaataacacaacactcttaaccccccaagtcaacacacacaccccaattaa

SEQ ID NO: 264427 - DNA, 307 bp, Glycine max
gttaatctttccggccttgacctctctaaactggatttatcttatgttgatttcagctatggttggcttaaaaacgtgtttttttcacgagcaaaccttcaatgtgcaaagtttcgagatgttgatgccgagggctccatctttcacaatgcaactttgcgtgaatgtgaatttactgcggcaaatcttcgtggtgctttattggctggtgcatgccttcagagtgcaaatctacaagatgcttgcttagtagactctagcttctgtggagcagatctgcgtactgcacatctacagaatgcagatc

SEQ ID NO: 264428 - DNA, 366 bp, Glycine max
cccacgcgttcgtccacgcgtccggtgattgaagctagttagaacaagatgttgcagctacgctacacggcgattttctccgaaatgcttttgattctcacgctcgtcttcaaaaccccactgagaaaactcgtcatcgtttccctcgatagtgtgaagcgcggtcgcggtcccgtggtggtttccaccgtgggcgccacattgatggtggttctcgcttcgagcctctacagcatggccaagatccagcaacgcaccctcgaggccggcatagtcaaccccaccgaccaagtcctcatgtccaagcacatgctcgaagcttctctcatggggtttctgctggtcctctctctgatgattgataga

SEQ ID NO: 264429 - DNA, 346 bp, Glycine max
  unsure (1)..(346): unsure at all n locations
ctagttagaacaagatgtttcttcttcgctacacggcgattnncnccgaaacgcttttgattctcacgctcgtcttcaaaaccccactgagaaaactcgtcatcgtttccctcgatagtgtgaagcgcggtcgcggtcccgtggtggtttccaccgtgggcgccacattgatggtggttctcgcttcgagcctctacagcatggccaagatccagcaacgcaccctcgaggccggcatagtcaaccccaccgaccaagtcctcatgtccaagcacatgctcgaagcttctctcatggggtttctgctgttcctctctctgatgattgatagattgcaccattacat

SEQ ID NO: 264430 - DNA, 371 bp, Glycine max
  unsure (1)..(371): unsure at all n locations
atctntctttcttttttctctaatctttcctatctcgtgagaactgttttttttttatcttacccattcccacaaccatcctccaacatctttcatttcctctcctcttctttcttaaaatatattccattcacaaactacaattattgttcctccacacaatccctattcatgaaattttttcctattgaccattcatttccctccatattatccctttaaaccacccaaaatttcattcattacaaaatttttccacccaaatataaatagcaaatttaaaccatttcccttcatttaatttaactaaccaatttaacccctcctctaacccatttaccaataatttttcctttcaattttatttcccc

SEQ ID NO: 264431 - DNA, 303 bp, Glycine max
cgcaaattcaaaggaggatctctcttgcgttttctctaggttttcgctatggcgtggaagcgaattttgaaggagcttaaggatttgcagaaggatcctccaacatcttgcagtgccggtcctgttgttgctgaagatatgttccattggcaagctacaattatgggtcctccagacagtccctatgcaggaggtgttttcctagtgaccattcatttccctccagattatccctttaagccacccaaagttgcattcaggacaaaggttttccacccaaatataaatagcaatggaagcatt

SEQ ID NO: 264432 - DNA, 220 bp, Glycine max
cggaattcccgggtcgaccacgcctgcggccacgccttcggacttgccaaaatgtatcgaccatggttccgggcgggcaaaaaaacatcgtgtttgtgatcaacaatggtggatacaccatcgaaggtgaaattcatgatgggcccgacaatgtgattaaaaactggaattacactgggttgattgatgcaatccacaatggtgaaaggaaatgctggac

SEQ ID NO: 264433 - DNA, 442 bp, Glycine max
cggggggggaggcgttctactgcccaattgtatcttcaatgtttctgcgcgggcaaaaaaccatcgtctttcgtatcatcaatggtggatacaccatccacgttgaaattcatgatgggccgtacaatgtgattaagaactggaattacactgggttgattgatgcaatccacaatggtgaagggaaatgctgtactgccaaggtgttctgtgaagaggagctagttgaagcaattgccacagccacaggacccaagaaagactccttatgcttcattgaggtgattgttcataaggatgacaccagtaaagaattgcttgaatggggctcaagggtttttgctgccaatatccgtcctcccaatcctcagtaatcttcagaatttatcctatgactaaatttctgcagttgccctttatctctatgaaagtgagaatcatt

SEQ ID NO: 264434 - DNA, 195 bp, Glycine max
cccacgcgtccgtgaaaatggaaggcaccattgattgataacccagatttcaaggatgaccgcgaccgctatgttttccccaacttgaagtacgtggggattgaattgtggcaggtgaaatctggtactttgtttgacaatgtcttaattactgatgatcctgagtatgctaagcagctggttggaagaaacatg

SEQ ID NO: 264435 - DNA, 200 bp, Glycine max
atggctcccaaaccgcctagtacgggtctgtttgttggactgaacaagggtcacgtcgtcaccaagaaggaattgccttcacgcccctcagatcgtaaggggaaaacaagcaagaaggtgcactttgtgaggaacctcataagagaaggaacccgttttggaccctattaaaagcctataactgaattgctgaaaggttg

SEQ ID NO: 264436 - DNA, 279 bp, Glycine max
ggctgaagcacaactacgagaccagcatggtaactctgtcccactcaccgatcaatacggtgatcgggttatcttaactgacgagcgcggtaattccgtccaactcactggtgtcgctaccaccgctaccggcacagcatgatctgggtttgggtcctatggtaccggtgcttacggtggtggtgcaagtgcaaccaccggtgcatatgctttggcaacccaaccaaggatgggcatggaggctagagagctttgttgttcctccagttcaagctctat

SEQ ID NO: 264437 - DNA, 324 bp, Glycine max
gagtgccagaggttcaaccatacttctctttttccctttacatccgcactgtttcctctcggaggccataatggttcgcattctgacggaaaatggcggagtggaacgcatggaggagatcatcagggaccatttggaccctgtttcaaagcaagtgttggggatctggttggatcattgtgcttgtgccaagcgacaagttggagaggcagaaagagcttatcttaagaaaagggatggtctcattagaaacaagaccattgagattgatcttggttcaagctttcccagattgtttggtccagaagtagcaaaccgggtact

SEQ ID NO: 264438 - DNA, 411 bp, Glycine max
ggcggcgctgtggcggacgcgccggcggttgttgaggagaagacggagttcgacgtggtggtcgaggaggtgccgagcaacgctcgaatcgcggtgatttaaggcggtgagggcattgacgaacctagcgctgaaggaggcgaatgtgttgatcgaagggttgccgaagatgttcaaggaagggatttcaaaggacgaagctgaagatgcgaagaagcaactcgaagaagctggtgccaaggttaccattgcttaaacactgtttagctgcagcatatatgttctgcttcttcttttgttggttgtatgttgagtttaccaggtcaactgtaatttcatttccattttggtctgggatttaatcttttatttggaatgagggaatatgagtgcctaattgtaatattaatt

SEQ ID NO: 264439 - DNA, 324 bp, Glycine max
tcccgggtcgaccgacgcgtccggagaacactttcatcgactgctcagaccactattgaaattgattctctatacgagggaatgtgatggctactccactgttactcgtgccagatttgaggagctcaacatggatctcttcaggaaatgtatggagccggtggagaaatgtttgagggatgctaagatggacaaaagaagtgttgatgatgttgtccttgttggtggttctaccagaattcccaaggttcaacaactgctgcaggacttctttaatggaaaagagctttgcaggagcattaatcccgatgaggctggtgcata

SEQ ID NO: 264440 - DNA, 278 bp, Glycine max
cccttatctttctctcttctctctccccgctctaaccctaactccctaccctattccgctttcggtcatccatcatggaaagggggaaggtccagacccgattttaaaaaacccatgcccaacttgctgggaataaaaaaggcgcccgcacccagaactaggaacccccccgaaaggggaaagccagcaaagatcctaacaagccaaagaggcctccaagtgctttcttcggtttcatgtaattataatatattggtatctctacgaatcatttgact

SEQ ID NO: 264441 - DNA, 294 bp, Glycine max
cgaccacgcgtccgcccacgcgtccgcacgttccgagttttcttatcgctcatagagagttcgacgcggcggttgcagaagaagattgcaagatgaagttcaacatcgcgagtcccaccactggatgccagaagaagctcgagatcgacgacgatcagaaactacgagcattttgggacaagaggatctcacaggaggtcagcggagatgcacttggtgaggaatttaagggctatgtcttcaaaattactggaagttgtgacaaacaaggatttccgatgaaacagggagtgc

SEQ ID NO: 264442 - DNA, 356 bp, Glycine max
acactacgaagaaatgatctgcataaaattgaagtacacatcattaacaagattccaccggatcagcagcgtcttatcttcgcagggaagcagcttgaggatggacgcacgcttgcagattataatattcagaaggagtccacgcttcaccttgtcctcaggctccgtggtggtgatttctagttcagttgaatcttgctaatgagatgtttcagttctaataataatttctctttcctttttccaatttctcttgtcgccttacgctccgtggtgtccctgtctagtttcggtactggggaatttttgtaaagatgtgtacttccattttaattaatataattcttcggtttggt

SEQ ID NO: 264443 - DNA, 335 bp, Glycine max
cgcaaattcaaaggaggatctctcttgcgttttctctaggttttcgctatggcgtcgaagggaattttgaaggagcttaaggatttgcagaaggatcctccaacatcttgcagtgccggtcctgttgttgctgaagatatgttccattggcaagctacaattatgggtcctccagacagtccctatgcaggaggtgttttcctagtgaccattcatttccctccagattatccctttaagccacccaaggttgcattcaagacaaaggttttccacccaaatataaatagcaatggaagcatttgccttgatatattgaaggagcagtggagccc

SEQ ID NO: 264444 - DNA, 242 bp, Glycine max
tttcctttgtcttggctgtgactccaaagttcacgcagccaacaagcttgcctctcgccatgctcgtgtttgggtttgtgaagtctgtgagcaagctccggctcatgtaacctgtaaggctgacgctgccgctctctgcctcacttgcgaccacgatattcactctgctaatccgctcgcacgtcgtcatgaacgtgttccagttacgcctttctacgacacattcaactctgacaactcac

SEQ ID NO: 264445 - DNA, 228 bp, Glycine max
atataacaaaactattttttcaaaaaaataaattacaaatttttcatttttaatatcattaaaactataaaaaaaaactattattaacacaattttatcccttacaataaaaaaacttacttacttaaatcctatccttacaacactttttaacataacccttcatcttatatttatcattaaattaatataattcaaaaaaataaatccatttttattacaccattt

SEQ ID NO: 264446 - DNA, 397 bp, Glycine max
ctttctgcttcgtcgttcacttcaaaatccaaaaacagtctaaaaaagaataataataaacgagcgggttaccaagattctgttgagaagaagagcaatgccgtccaacgattccgattcgccgatgaagatcgtacatggcgacgctggttacatactcgaagacgttcctcacttcaccgactacattccaaatcttcctacgtatccgaatccgcttcgatccaatcctgcttactcggttgttaagcagtatttcgtgcacatggacgacactgttcctcagaaggttgttgttcacaaggatagtccaagaggtatacattttcgacgtgcagggcctcggcaaaaagtatactttaaatcggatgaagtgcatgcatgcattgtcacgtgt

SEQ ID NO: 264447 - DNA, 227 bp, Glycine max
  unsure (1)..(227): unsure at all n locations
aaangtggaaaaaaatttaattaaaaaaaaaaaaaaaaacnccgccaagctatatttttaaaangacgggcccgccccnnnaaaanaaaaaaaaaaaaaaaaaaaaaaaaaaaanaaaaaaataacaaacacataaaaaacaaacaaatacaacaacaaaacaaaaaatcaaaaataaaacaactaaaaaaaaaaaaaacaaaaaaaacaaataacaaacaaccaac

SEQ ID NO: 264448 - DNA, 437 bp, Glycine max
ctttttcagaacaagagggcattggatctgttaattctgccaaaatgtctcaaattggcggatttttatttatttttttgtgatttttgacgttgaatttggttgcaggaattccgacggggcgattctccggtcgtcggccggcgagactaggaaatcggcgtcgccggagaaggaggaccggtactacacgacgcggggttcggcggaggagaacggcaaggtcaccggcgacggcaacaacggcgaggaacgtgccctagtttggcccaagctctacatcactctctcaagcaaggaagaaagaggaagactttctcgccatgaagggttgtaagcttcctcagcgacccaaaaagagagccaaaatcatccaaagaagcttacttttggtgagtcctggggcgtggttgtctgatatgtgccaagaaagatat

SEQ ID NO: 264449 - DNA, 295 bp, Glycine max
gtccggcaaaattgcttgacaggatcagttgggattaatctcccacatagtttgtggttacaatgggttgatcaagtgatcttctctgtgcttgatgacctgcttgaaatttctcagacacactctcaaaaagacttccgcaacatagaaggaacccttgttcttgctttgaagctcttgtgtaaagttttcctccagttaatccaagacctatcacaattgccaggcttcaacaaattatggttggctgtcctaagtcggttagaaatttatatgaaggtgaaagttaggggaa

SEQ ID NO: 264450 - DNA, 371 bp, Glycine max
ctgagttgcaagattcacttcaaattatgcgtttcgctgatcggttcctcatcacatggggcgacgtcgcagatcatcgcaattccttgattatttccttttgttgatacgcggaatcgcgcacacggtgctggtgtgtgcactgaggtagaaagaagaagattgaattgtaaacagcatgaattaccttcttggagctttcaagcctgcatgtaatgtcttgatcacgtttaatgatgggaagaaccggaagcaggttccgtttaaaaaagaaaatggtcaaatggtcacagtcccacttttccaaagtcaagaaaacattggtgggaagattacaatagaaccaatgcaaggggaagaagattgatcac

SEQ ID NO: 264451 - DNA, 418 bp, Glycine max
  unsure (1)..(418): unsure at all n locations
cggaatacccggnccgaccgacgcgtccgcccacgcgtccactttctttctttcttcttttttctgccgaggaaaagaaagaaatagagggatgtgaaaaaaacacagcgtcctagatttcctcttctctgcttcggaagaaagagaaaacaaacaaaacaatggcgttcgcttctttcctcggcagagtcctcttcgcttctgtcttcatactctctgcttaccaacaatttaatgaatatggagttgatgggggacctgctacaaaagcactcagacctaagtttgatgcctttacacatcgggtgcattctcaagtgggctttcaaattccagagattaatctgaaatttttaattgctggggctattgctctgaagggtcttggaagggttcttttcatatttggcagctcttt

SEQ ID NO: 264452 - DNA, 323 bp, Glycine max
aaaacccgggtcgaccgacgcgtccggaggagatatatgtacctaaacgaatatatcttgaaagagaatccaaacatgtgtgcgtcgctggcaccttatttggatgctacgcaagacatggtggtggtagaggtaccaaagctagggaaagaggctgcagtaaaggccataaaggagtggggccagccaaagtcaaagattacccacttgatcttctgcaccaccagtggtgttgacatgcctggtgctgattaccaactgaccaaacaattgggccttcgcccctatgtgaagaggtatatgatgtaccaacaaagttgctt

SEQ ID NO: 264453 - DNA, 263 bp, Glycine max
gaatgataaggtatatgaacaatccttaacagatacttctacaagatgttctatttgttcggagaaaaaaattcgctcaaaaaaaacgcgaaaatattttaatcgtaacttagaggatttgttacgtagaaaaagaaagatagattcatattcccatacatataaattatataggaacaaaaaaaatcttggattactttttgaaaaaaaagtagaaatccatttttttggagtaaaaatactattccaattataataataag

SEQ ID NO: 264454 - DNA, 370 bp, Glycine max
gtccgttttaatctaattctccttctgttcaaacactctttctcatggcatcaggtaggaagattaggatcggcatcaacggatttggaaggattggccgtttggtggccagggttgcccttcaaaggaatgatgttgaacttgttgctgtcaacgatcctttcatcaccactgattacatgacatacatgttcaagtacgacaccgttcatggccagtggaagcattttgatgtgaaggtgaaggactctaagacccttctctttggtgagaagcccgtcaccgtttttggaatcaggaaccctgaggaaattccatggggtgaggttggtgctgattattgttgtgagtcaactgtgtatcactgaca

SEQ ID NO: 264455 - DNA, 424 bp, Glycine max
  unsure (1)..(424): unsure at all n locations
cggaattccncggtcgaccgacgcgtccggaggaaatatatgtacctaaacgaaaagatcttgaaagagaatccaaacatgtgtgcttacgtgggaccttctttggatgctaggcaagacatggtggtggtagaggtaccaaagctagggaaagaggctgcagtaaaggccataaaggagtggggccagccaaagtcaaagattacccacttgatcttctgcaccaccagtggtgttgacatgcctggtgctgattaccaactgaccaaacaattgggccttcgcccctatgtgaagaggtatatgatgtaccaacaaggttgctttgcaggtggcacggttcttcgtttggccaaggatttggctgagaacaacaagggtgcacgtgtgctttgtgtctgttctgagatcactgcaatcacat

SEQ ID NO: 264456 - DNA, 375 bp, Glycine max
ctctgctgcgtttgcttctcctccacccatccacaaacgaacacacactttgattgagagtggggcgtgttcgcacaaagacagtgaagaagtcctcgcggcaagtgatcgagaggtactactctcgcatgacgctggacttccacacgaacaagaaggttctggaagaggtggccatcattccctccaagaggctccgcaacaagatcgcgggattctccacccacctcatgaagcggatccagaagggtcccgtacgtggaatctccctcaagctgcaagaggaggagcgcgagcgccgcatggacttcgtccccgatgtctccgccatcagaaccgaccagatcgaggtcgacaaggaaacgctcgacatgc

SEQ ID NO: 264457 - DNA, 295 bp, Glycine max
gtccgttttcaatggaagtcatttctgctgggaggttgaatcccaacgctccgatgttcgtgccactcgcctatcggacggtggaggatttctccgaccagtggtgggacctcgttcactcctccccctggttccgcgactactggctccgcgagtgcttccaagatccccagttccaaaacgacgacgctttcgacttcgactttgacctagatctccaagatgaagatgaaagggaacgaaaggaagggaaagaggtggtgtcgttggggctgctgaaatggcgaagctgtgg

SEQ ID NO: 264458 - DNA, 337 bp, Glycine max
  unsure (1)..(337): unsure at all n locations
cgcaccantttcaccgcacgaatatcttgttgtttggagcgatccgagaaaaactgtgtgggcatgttggtttaccaggacctccttacaggtgatgagcttctctctgactccttccgttacaaggaaattgagaatggaatgctgtgggaagttgaggggaagtgggttgttaaaggagcagttgatgtagacattggtgcaaacccttctgctgagggtggaggagaagatgagggagttgatgatgcagctgttaaggttgttgacattgttgacacattcagacttcangagcaacccgcattcgataagaagcagtttgttaccttcatga

SEQ ID NO: 264459 - DNA, 343 bp, Glycine max
ggcaaaattgcttgacaggatcagttgggattaatctcccacatagtttgtggttacaatggggtgagcaagtgatcttctctgtgcttgatgacctgcttgaaatttctcagacacactctcaaaaagacttccgcaacatagaaggaacccttgttcttgctttgaagctcttgtgtaaagttttcctccagttaatccaagacctatcacaattgccaggcttcaacaaattatggttggctgtactaagtcggttagaaatttatatgaaggtgaaagttaggggaaggagaagtgagaagcttcaagagcttgtgcctgagcttcttaaaaacacttt

SEQ ID NO: 264460 - DNA, 427 bp, Glycine max
caccaacgccaaacaagccctaaatctctcttctctttcttcttcttcctttaaccatgagggagatcttgcacgttcagggaggccaatgcggtaaccaaatcggttccaagttctgggaggtgatctgcgacgagcacggcatcgatcccaccggaaagtacaacgaggaaggcaacagcagcatccaactcgaaaggatcaatgtgtattacaacgaggcctctggcggaaggtacgttccccgtgccgtgcttatggatctcgaacctggaaccatggacagcatcagatctggcccctacggcaagatcttccgacccgacaacttcgtcttcggccagtccggcgccggtaacaattgggccaaaggtcattatactgaaggcgccgagctgatcgactccgttcttgacgtcgttcgcaa

SEQ ID NO: 264461 - DNA, 266 bp, Glycine max
ccaattcactctttttcttctcgccctctggcgtgggaggagtttgtaacatggctgctctaccaacggcggagcttagtgacgcaaatgcaacacatgtagcaagttgtgatgtgagggtgttgcatccagtgttcaaggtttacggtggggccaccgcgttcttcggccccgttgtcaccgtgaaggtgtttgaagacaacgtgttggtgagggagcttcttgagacgaaaggcgaaggaagagtattggttgttgatggagga

SEQ ID NO: 264462 - DNA, 274 bp, Glycine max
tcccaaacctcctaataccgttctttttgtttgacttaacaaaggtcaccttgtcgggcttaaaaaattggctggacgccccttaaatcctaaagggaaaaccatccaaaaggttcacttttttaagaaccttattaaaaaagtaacccgtttttcaccctattaaaaacctattacttaatttcttaaagtttggaaagattaaaaggcacttaaagtttccaaaaaaaaacttcgaacacaccaaccccccaagaagaaaccttaagaaatt

SEQ ID NO: 264463 - DNA, 186 bp, Glycine max
  unsure (1)..(186): unsure at all n locations
atggctcccaaaccgcctagtacgggtctgtttgttggactgaacaagggtcacgtggtcgccaanaaggaattgcctgcacgcccctcagatcgtaaggggaaaacaagcaagaaggtgcactttgtgaggaacctcataagagaggtagccggttttgcaccctatgaaaagcgtataactgag

SEQ ID NO: 264464 - DNA, 411 bp, Glycine max
ttttatctttattccactgaatagaacatgagcatataaatggataccctttatattatcgatctgtatattatctataaagggtaaagatatccgatgtgaatctatttgtttagttttctatcggtatgtatataggtgaataatccaacatgcctttttgtgaagtaaaaaaactaccctcgatccatgcctcaaaagggttgataataagtaaaaaaaatcaatgaattcatgataaaacccttctgcgtttttttattataaatttttttgtcaataaagggatcaaggggttgggggatcaaatggtaaagttcttttgttggtaaattggaggattagaaacatgactattgctttccaattagctgcttttgcattaattgctatttcatttattttattgat

SEQ ID NO: 264465 - DNA, 423 bp, Glycine max
cccgtcccgacccgcgcgtcccgttcatctttattccactgaatacaacatgcacatattaacgtataccctatataatctcgatcgtcatctcatctatgacgggtgaccatatcccatgtgaatctattcattcaaatacctatccttatacatatatctcaataatctcaacattcctcattgtgaactacaaaaactaccctacatccatgcctcaccatggctgatcctaagctacaaagaccactcaattcatgataacacccttctgcgtgactctattataaattatctcgtccaccatggaatcaatgaccattcggaccaaaccgcttagatcttttcgtcatccattgcacgattacaaacatgaccattactttccaactaactgccatttcattaatttccctttcattt

SEQ ID NO: 264466 - DNA, 296 bp, Glycine max
cttgatgatcccaacactttcggtaacaggattcacaggatgctgaagcttggactgagggttgatgaagatgctggtgaagcagatgctgacatgcctcctcttgaggacgctgatgcagatgctgagggtagcaagatggaagaagttgattaaatctgacttaattgcctgttacgtttttagaaacaatgattggagaaacagtctttttactatgttttatgttttttgaattttcgaaattttggaacgttggctagttaggtgccgtatgtagtagtttctttatggta

SEQ ID NO: 264467 - DNA, 279 bp, Glycine max
atggctcccaaaccgcctagtacgggtctgtttgttggactgaacaagggtcacgtggtcggcaagaaggaattgcctccacgcccctcagatcgtaaggggaaaacaagcaagagggtgcactttgtgaggaacctcataagagaggtagccggttttgcaccctatgaaaagcgtataactgagttgctgaaagttgggaaggataagagggcactgaacgttgcaaagagaaagctcgggacacacaaacgcgcaaagaagaagcgtgaggaaatg

SEQ ID NO: 264468 - DNA, 306 bp, Glycine max
ccgggccgacccacgcgtgcgattttttttcgtggggatcagcatggattgtacccggaagctcacccacctcaaccccgggcccagtgacattgccattggccaggccatcgagcccatccccatcagccgcatcgcatagggcgctggcatcctgccggaggagctgcgcctgtacggcaacacgaagggcaaggtggccctgacggtgctggaccgcctgcatgaccgacccaatgggcggtacgtcgtggtgacggggatcaacccgaccccgctgggcgagggcaagagcaccacctccgt

SEQ ID NO: 264469 - DNA, 278 bp, Glycine max
cccacgcgtccgagaaggcctgggcttagttgataagcataactgggtgaggaagaaagagagagagtgaagaagatggcgtcgagcggagcggtaccgttttggagggcggcggggatgacgtacataacatactcaaacatatgcgcgaatctgctcaggaattgcctcaaggaaccctacaaggccgaatccctctctcgtgagaagctccattttggtctcttcaaatgggtcgacgccaagcctgaaaaacctactatttggtcagacacccc

SEQ ID NO: 264470 - DNA, 424 bp, Glycine max
  unsure (1)..(424): unsure at all n locations
gaattcccgtctcggccggcgcgtacgcccaggcgtccgataaggcctgagcttagttgattatcataactgggtgaggaagaacgagagggagtgaataanatggcgtggagcggagcggtaccgtttttgagggctgcggagatgacgtacataacatactcaaacatatgcgcgaatctgctcaggaattgcctcaaggaaccctacaaggccaaatccctctctcgtgagaagctccattttgttctctccaaatgggtcgacgccaagcctgaaaaacctactattcgttcagacaccccatagcagtgatctggaatagttggaagctataaatgcataaatctttgaaatctggaagttcattgtcattttgaacctttctgtaatgattaattcccttggttttttctctccatta

SEQ ID NO: 264471 - DNA, 396 bp, Glycine max
  unsure (1)..(396): unsure at all n locations
cgtacgcccaggcgtccganaaggcctgagcttagtttataagcataactggctgaggaagaaagaganagagttaataacatggcgtggagcggagcggtaccgttttggagggcggcggtgatgacgtacataacatactcaaacatatgcgcgaatctgctcaggaattgcctcaaggaaccctacaaggccgaatccctctctcgtgagaagctccattttgttctctccaaatgggtcgacgccaagcctgaaaaacctactattcgttcagacaccccagagcagtgatctggaatagttggaagctataaatgcataaatctttgagatctggaagttcattgtcattttgaacctttctgtgatgtttaattcctttggttttttctc

SEQ ID NO: 264472 - DNA, 363 bp, Glycine max
caaagacatgcttatactggatgtagctcccctcactctcggaattgaaactgttgatggagtcgtgacaaaattaatggccagaaacactgttatcccaaccaagaaatctcaggtgttcaccacctatcaggaccatcagactacaatctccattcacgttttccaaggccagatgagtctcacaaaggattgccgccttcttgtgaaatttgatctgtctggaattcctccagccccaaggggtacgcctcaaattgaagtgaccttcgaagttgatgccaacggcattctaaatgtgaaggcagaagacaaaggcacttgtaaatcagaaaaaatcaccattacaaacgaaaaaggacg

SEQ ID NO: 264473 - DNA, 255 bp, Glycine max
aagacattcttcacatcaatttatacattttttttctcaaaatttaaactgttatccagttagtttcaaaaccaattccgaccaaccctattatcccaaccaataaatctcaattattcaccacctatcacaaccaacacactacaatctccattctaattttctaactctatataattctcacaaattatttcctccttctttacaaatccaatctatctctaattcctccatccccaaattttacacctaaaa

SEQ ID NO: 264474 - DNA, 350 bp, Glycine max
gttcatttctacacatccctagctctgtcgttccgtcgttgacgatggcgtttcgggggcgaagccctgacctccgctgtctctttcttctctctctcttgtccatcgcttccgccaatgtcttcttcgaagagcgtttcgatgacgggtgggaaaatcgatgggttaaatcagattggaaaaaagatgagaacgtggctggggagtggaaccacacctctggtcaatggaatggagacgctaatgacaaaggtattcaaaccagtgaggattacagattctatgctatttcagctgagtaccctgaattcagcaacaagggtaagacactagtctttcaattttctggt

SEQ ID NO: 264475 - DNA, 484 bp, Glycine max
cttaattcccggaccgacccacgcgtacgatcagacgatagacatcgcaagactttcatttccacagaccgtactcacaaatatgccaggactctcaacctatggcagccagagaaaaatgcttatgaatgggctacatctttgaaagcccctcacacagaagatgcaattcgacttactcaatccacagcaaactttttcataagtgaagctaggaaatccacaaacacacctgatgctcaaaaagtgcgagataatctcatctacaattacaaacctacttttggtggaacggctgggaaaggatatgatcaagtgtatctctttgaataattctatctgtaagaggtgtccttgaatttgattttatgcacaataaattatgaactggggatgtagcttgaagaaataaaaatttgtgcacagtgaatgttggaagatgcttaatttcaaggcaatggtcttcttatcaatgggttatatc

SEQ ID NO: 264476 - DNA, 316 bp, Glycine max
ggcggcgctgtggcggacgcgccggcggtggttgaggagaagacggagttcgacgtggtgatcgaggaggtgccgagcaacgctcgaatcgcggtgattaaggcggtgagggcattgacgaacctagcgctgaaggaagcgaaggagttgatcgaagggttgccgaagaagttcaaggaaagggatttcaaaaggacgaaactgaagatgcgaaaaaagcaactcgaaaaaagctggtgccaaaggtaccattgcttaaacactgtttagctgcagcatatatgtcctgcttcttcttttgttggttgtagttgag

SEQ ID NO: 264477 - DNA, 416 bp, Glycine max
aattccctggtcgacccactcgtaactcccacgcatcctacaaggcctgatcttagtttataagcataactacctcatgaagaaggagagatattttaaaagatggcgtcgaccctatcgataccgttttgtaggtcctcgctgatgacgtacataacatactcaaacatatgctcgaatcttctcacgaatttcctcaatgaaccctacaagtcctaatccctctctcgttaaaagctccattttgttctctccaaattgatcgacgcctatccttaaaaaactactattccttcaaaccccccaaaaccactatccttaattatttgtaacctttaattccttaattttttaaaaccttaactttcattgcaattttaaacttttctttatattttaattcctttttttttttc

SEQ ID NO: 264478 - DNA, 425 bp, Glycine max
cattcgtattgtcgtagagaaagaaattcctagctcaccgtttcaagatgcagatctgcgttaagaccctcactggtgagaccatcactctcgaagtcgagagttcagataccatagacaatgtaaaggccaaaattcaagacaaggaagggatcccaccagatcagcaacggctcatttttgctggcaagcagcttgaggatggacgtacccttgctgattataacatccaaaaggagtccactctccacttggttcttcgtctccgtggtgggatgcaaatctttgttaagaccttgacgggaaagacaatcacccttgaggtcgagagctccgacaccattgacaacgttaaggctaagattcaggacaaagagggtatccctccagatcaacagaggctgatctttgctggaaagcagctt

SEQ ID NO: 264479 - DNA, 452 bp, Glycine max
cccggatggacccacgcgtccgcccacgcgtccggtactacaacactttctatatttattgtccattctctctcacgcagtccgtaattgcttcttgctttgatcgattcattcggtgatcggtgatcggtgatcagtggtttggtgttgttgatagaaaaatgcattccagccctttgcttcttgaggaacccattaggatggcatccattcttgagccatccaagcctactttctttccagctatgacaaaaattgttggcacacttggtctaaagtcacgatcagttgatacaatttcccgttgccttgatgcaggaatgtctgtggcaaggtttgacttctcatggggtgatccagaataccatcaagagacattggaaaatttgagagttgctatcaaaagtaccaagaaactctgtgcggttatgctagatactgtgggtcctgaa

SEQ ID NO: 264480 - DNA, 450 bp, Glycine max
ccggttcggaattcccggggggacccacgcgtccggtcttctcacttcgtcaaaaccaaccaaacccctccccaattctcaagccaacgatggcttccttcaagagcaagtaccaagatgaactcattgccaatgctgcttacattggcaccccagggaagggtatccttgctgctgatgagtcaactggtacaattggcaagcgattggccagcattaatgtcgagaatgttgaagcaaataggcgtgctcttcgtgaactcctattcaccacacctggtgcttttgagtgcctcagtggtgtgatcttgtttgaggaaaccctataccaaaagacagcttcaggaaaacccttcgtagagttgatgaaggaaggaagagttctccctggtatcaaggttgacaagggcacagtagagcttgcaggaactaatggggagactactactc

SEQ ID NO: 264481 - DNA, 449 bp, Glycine max
ggaattccggctgcgcgcacgcgtccgccgacgcgtccggtactacaacactttctatatttattgtccattctctctcacgcagtccgtaattgcttcttgctgtgatcgattcattcggtgatcggtgatcggtgatcagtggtttggtgttgttgatagaaaaatgcattccagccctttgcttcttgaggaacccattaggatggcatccattcttgagccatccaagcctactttctttccagctatgacaaaaattgttggcacacttggtctaaagtcacgatcagttgatacaatttcccgttgccttgatgcaggaatgtctgtggcaaggtttgacttctcatggggtgatccagaataccatcaagagacattggaaaatttgagagttgctatcaaaagtaccaagaaactctgtgcggttatgctagatactgtgg

SEQ ID NO: 264482 - DNA, 403 bp, Glycine max
gcgttggcctcacagtgatgctggagaaggattcctcctacgatgaaattaaaaatgctatcgaggaggaatcagagggcaagttgaagggaattcttggttacactgaagatgatgtggtctccaccgactttgtgggcgatagcagatcaagtatttttgatgcaaaggctggaattgcattgaataagaactttgtgaagcttgtctcttggtatgacaacgagtggggatacagctcacgtgtcattgacctgcttgtattcgatgccaagaagtctttttaaggttgtactgaaaaaaaagtagcttgtctagacattatgtgctggtgtctagctgcgatttagtgtcttcttgctcgggcagaaatgagaagtatgaataaatcggtttcgggaac

SEQ ID NO: 264483 - DNA, 400 bp, Glycine max
atcgtgagaggggcagtagccgagattccgtgagttgcacaaatgaagacgattctttccggcgagaccatgaacatcccggacggcgtgagcatcaaagttcatgccaaggtcatcgaagttgacggcctccgcggaaaattggtgcgagacttcaagcatttgaatctcgattttcagctcattactgacgaaaacggtaaaagaaagctgaaaatccacgcgtggtttggttctcggaaaacatccgccgccatttcgaacgccttgagccacgtggagaatcttatcaccggcgtcaccaagggctaccgctacaaaatgagggttcgttgatgcccattttcccatcaacgcatgcatcggcaacagctacaagtctattgagatccgaaatttc

SEQ ID NO: 264484 - DNA, 422 bp, Glycine max
cccacgcgtccggtgatttcagtgagtgatcggtgttcacttgatctcatcataatcgtcagcgtgaattgaagaagatgccgatcagaaacatcgccgtcggaaggcctgaagaggcgactcaccccgacacgttgaaggcggctttggctgagttcatctcaaccttcatcttcgtgttcgccggctcaggctccggcatcgcctacaacaagctcaccgacaacggcgctgccacccctgccgggcttatctccgcctccatcgcccatgcattcgccctcttcgtcgccgtctccgtcggcgccaacatctccggcggccacgtcaaccccgccgtcaccttcggcgccttcgtcggcggcaacatcaccttcctccgcggcatcgtctacgtcatcgcccagctcctcggctccatc

SEQ ID NO: 264485 - DNA, 351 bp, Glycine max
  unsure (1)..(351): unsure at all n locations
acgcatcccatgactcgtccgggctaatttcatgatccgtttgtacacacactctctctcatagatgataggtttnaatattaggttctgacgtgaccagatctgcaatgatagaccactcactgaccacgctaccacttctaacgtctcatcatgaactcgctatgtgtactcaagcacccatgctcactgattacatgcaagacctaccaccgttccacatctttcatcaacccaaccaagcatttgcatgtaagctagagagcttcttcgaccctactcttcaagcataaactcgtctcaagatgatgaaccatgaactctgaagaaaatccaagtgatgaatttaat

SEQ ID NO: 264486 - DNA, 399 bp, Glycine max
ggctgaagcacaactacgagaccagcatggcaaccctgtcccactcaccgatgaatggggtaatccggttatcttaactgacgagcgcggtaatcccgtccaactcactggtgtcgctaccaccgctaccggcacagcaggttctgggtttgggtcctatggtaccggtgcttacggtggtggtgcaagtgcaaccaccgttgcagatcttttggcaacccaaccaaggagtggcagggaggctagagagcttcgtcgttcctgcagttcaagctctagctcgtctgaggatgatgggcaaggtgggaggaggaagaagggagtgaaggattaaatacaagagaaactaccaagggtaggaggagggaatcataataaagagcatgcacacacaacaac

SEQ ID NO: 264487 - DNA, 483 bp, Glycine max
  unsure (1)..(483): unsure at all n locations
gaattcccggntcgagccacgccttccgcccaccagtttcaccgcccgaatatctggttgttggaaccatcccagaaaaactctttggagatggttgtttaccaaggaactcttacaagtgatgagcttctcttttactcctttccgtacaaggaaattgacaatggaatgctttgggaagttgaagggaagtgggtttgtaaaggagcagttgatgtagacattggtgcaaacccttctgctgagggtggaagagaagatgagggagttgatgatgcagctgttaaggttgttgacattgttgacacattcagacttcaggagcaacccgcattcgataagaagcagtttgttaccttcatgaagaggtttatcaagaatttgactcccaagctcgatgcagagcaacaagagtttgttaagaagcacatcgagggagcaactaaatacctgctctctaagattaaagatttccaatttttt

SEQ ID NO: 264488 - DNA, 227 bp, Glycine max
atcagacctcacactttggctgcagaaggatgacttctacaattaaatacaaaatcctatagcggggtcatcaacatgcaagtcgaagggaatattagattacactccaaatgatttggtcttcaccgactttgtggaccattgctgatcaactataagcgatgcaaactctataatcacattaaatctgacctttacgaagcttgactcttggtatgacaaccaat

SEQ ID NO: 264489 - DNA, 396 bp, Glycine max
tccggaattcccgggtgcggagtcactcgaaatcggcggagatggttgccatgaggtttcaccagtaccaggtggtgggaagggctcttccgggcgagtccgatgagcatcctaagatctaccgcatgaaactctgggccaccaacgaggtccgtgccaaatccaagttctggtattttttgagaaaattgaagaaggttaagaaaagcaatggacaagtgctagccatcaatgagatttttgagaagaatcctaccaagattaagaattatggaatttggctgccttatcagagccgcactggttatcacaatatgtacaaggaataccgagatacaactctgaatggtgcagttgagcatatgtacactgaaatggcatctcgtcataagggga

SEQ ID NO: 264490 - DNA, 389 bp, Glycine max
cgcatcccgagacatctaaagcgaaattccactacttttatcgctattctacttatttcaccaatggataggcttaatcactatctctgtttgtacacccacggtcatcttctgccactcaatcctgtcgctacacattgtcacgtcacaacattttctggttcggcacatatgttaccagatcactacaggtgtcctacaatgacctcaaccagaacagaaatctcgtgtaccacaccaaggtataagctcgattcattatgacttccattactaatacaaaccatcaaatccttgcctatcgatcctttactacttcggaatttgaagctagaagtgtcagataagttaccacagaaattactagcttttggcagacaaactttcat

SEQ ID NO: 264491 - DNA, 459 bp, Glycine max
cggtccggtattcccgggtggacccacgcgtccggagttccagaggttcaaccatacttctcttcttccctttacatccgcactgtttccggtcctacagccataatggttcgcattctgacggaaaatggcggagtggaacgcatggaggagatcatcagggaccatttggaccccatttcaaagcaagtgttggggatctggttggatcattgtgcttgtgccaagcgacaagttggagaggcagaaagagcttatcttaagaaaagggatggtctcattagaaacaagaccattgagattgatcttggttcaagctttcccagattgtttggtccagaagtagcaaaccgggtactggatgctatcaaggagtattttacagtctgagatgcaaatttatttggaattgttggatattctatgtattacatacacgtacctaatttgctgtgcaat

SEQ ID NO: 264492 - DNA, 296 bp, Glycine max
  unsure (1)..(296): unsure at all n locations
cttgatgatcccaacactttcggtaacaggtttcacaggatgctgaagcttggactgagcgttgattaagatgctggtgaagcagatgctgacatgcctnctcttgacgactctgatgcatatgctgagggtagcaagatggaatacgttgattaaatctgacttaattgcctgttacgtttttaaaaacaatgatttgagaaacagtctttttactatgttttatgttttttgaattttcgaaattttggaaccttggctaattaagtgccctatgtaatactttctttatggta

SEQ ID NO: 264493 - DNA, 345 bp, Glycine max
ggctacttttgattgcttgatgaaaacctatggattcctgacaccagaattctggagggagactcgcttctccaaatctccattccaagagtacacagatctactggcaaaaccaacaggaaagactctaatcttggaggaggaaagggtggatgcttgatttgctagttttgctttatggatgttttaggaactttattactttacatactttgttggttctgtgctttacttttggttttgatagacggtatgtctctgtatgcattttgattgtttccaagttttaattgactgcaaaaaaaaataaatgcataaatctttaaaatctaaaaaatcattaac

SEQ ID NO: 264494 - DNA, 421 bp, Glycine max
ggcggcgctgtggcggacgcgccggcggtggttgaggagaagacggagttcgacgtggtgagcgaggaggtgccgagcaacgctcgaatcgcggtgattaaggcggtgagggcattgacgaacctagcgctgaaggaggcgaaggagttgatcgaagggttgccgaagaagttcaaggaagggatttcaaaggacgaagctgaagatgcgaagaagcaactcgaagaagctggtgccaaggttaccattgcttaaacactgtttagctgcagcatatatgttctgcttcttcttttgttggttgtagttgagttcaccagtacactgtaatttcatttccattttgtctggatttcaatcttttatttgtaatgaggaaatatgagttcttatttttatattattttttttaatgcgtatg

SEQ ID NO: 264495 - DNA, 429 bp, Glycine max
cgcgtccgagcggcggtgtagcgcacgctccaactttgtttgaggataacaccgaattcgacgtgggaagctaagttttaccgagcgacggtccaatcgcgctcattaatgctgtcagggcattgacgaacctatctcttaatgaagcaaaagagttgatctaatggttgccgtagaagttcaaggtaggtatttcaaaggacgaatctctagatgcgcagaagcaactctaagaagctgttgccaatgttaccattgcttaaacactggttagctgcagcatatatgttctgcttcttcttacgttggttgtagttgagttcaccaatacactgtaatttcatttccattttgtctggatttcaatcttttatttttaatgacgaaatatgagttcttattcttatattatcatatttaatgcatatg

SEQ ID NO: 264496 - DNA, 339 bp, Glycine max
  unsure (1)..(339): unsure at all n locations
tacttttgattgcttgatgaaaacttattgattcctgacaccagaattctgnagggagactcncttctccgaatgtccattccaagagtacacagatctactggcaaaaccaacaggaaagactctaatcttggaggatgaaagggtggatgcttgatttgctagttttgctttatggatgttttaggaactttattactttacatactttgttggttctgtgctttacttttggttttgatagacggtatgtctctgtatgcattttgattgtttccaagttttaattgactgcaaaaaactataaatacataaatatttaatatctaaaaattaatt

SEQ ID NO: 264497 - DNA, 376 bp, Glycine max
cttttctactttgagtcttcttgatccttatgagtctacttgaactcaaacagggcgggtgaagttgctctgctacatttctatccaagtccatttggcatgaaggtcatgattgcacttgctgaaaaaggtatcaaatatgattacaaagaagatgacttgaagaacaaaagtactgttttcctacgaatgaacccggtatacaagaagattactggtctaatccactatggcaaacccaattgctaatacactattgatgttcagtacatataagaagcttgtaatgacagaaatcccttgttgccttactgacccttaccagagagctcatgctagatgtctggctgacaatgttgattagaagatatatgat

SEQ ID NO: 264498 - DNA, 339 bp, Glycine max
ctcgaatcgcggcgattaatgcggtgagggcattgacgaacctagcgctgaaggaggcgaatgagttgatcgaagggttgccgaagaagttcaaggaaggtatttcaaaggacgaatctgatgatgcgaagaagcaactctaagaagctggtgccaaggttaccattgcttaaacactgtttagctgcagcatatatgttctgcttcttcttttgttggttgtagttgagttcaccagtacactgtaatttcatttccattttgtctggatttcaatcttttatttgtaatgaggaaatatgagttcttatttttatattatcttttttaatgcgtatg

SEQ ID NO: 264499 - DNA, 255 bp, Glycine max
ttaaacacttatcaaatatgagtacaaataagatgacttgacgaacaatactcctcttctacttcaaatgaacccgcttcacaataagattcaccatctcatacacaatggcaaacccatttccaaatccctcattcctgttcactacatttatgaagtttgcaatgacataaatcccttgttgccttcttacccttaccacatagctcacactaaaatcttggcttattatctttataataatatatatgatct

SEQ ID NO: 264500 - DNA, 390 bp, Glycine max
agccacgcgtccgctggtctactttgagtcttcttgatacttatttgtctccttgaactcaaacatggcagatgatgtggttctgctagaggtctggccaaggccatttgggatgagggtcaagattgcacttgctgaaaagggtatcaaatatgagtacaaagaagaggacttgatgaacaagagtcctattttactccagatgaaccctgttcacaagaagattccgggtctcatccacaatggcaaacccatttgtgaatccctcattgctgatcagtacattgaagaagtttggaatgacagaaatcccttgtagccttctgacccttaccagagagctcatgctagattctgggctgattatgctgattagaagatatatgatct

SEQ ID NO: 264501 - DNA, 362 bp, Glycine max
  unsure (1)..(362): unsure at all n locations
tttcccacatcacattctacaaaatgtaccgtttcattcaacctatggcaaccatanaaaaattcttttcaatttcctacatctttcaaaccccctcacacatactattcaattcaacttactcactccacatcaaactttttcataatttaatctattaaatccacaaacacacctcattctcaaaaatttcctatataatctcatctacaattacaaacctactttttttttaacttcttataaaatatattattcaatttatctcttttaataattctatctttatcatgtctcctttaattttattttattcacaataaattatcaactttttatttacttttaataaataaaaattt

SEQ ID NO: 264502 - DNA, 223 bp, Glycine max
tcaaatatcattccaaatattatcactttattaacaatactcatctgcttctacttactaacccccctcacaatacgattccaattctcatccacattgtcaaacccatttatgaatccctcatttctcttcactacattcaataactctgtaattacacaaaatcccttctatccttcttacccttaccatataactcatactagattctagacttattatc

SEQ ID NO: 264503 - DNA, 468 bp, Glycine max
  unsure (1)..(468): unsure at all n locations
cggtccggaattcccgggtcgaccgacgcgtncgcattctactatgtgaataaaccagttaacacggacgtgaccacatggagccctagggggagtctgttccaggtggagtacgctatggaggcggtgaagcagggctcggcggcgatagggctccgatcgaagacccacgtggtcctcgcatgcgtcaacaaggccaactccgaactcttctcgcaccagaagaagatcttcaaggtcgacaatcacatcggcgtcgtcatcgctggcctcaccgccgatggccgcgtcctctaccgctacatgagatccgaatgcatcaactataattacacctacgagtcgccgctccccggcggcagactagtcgttcagctcgccgataaggctcaagtttgcacacagcggtcttggtaacgtccttatggggttggactcctggtagcttgattagatgaatcatgagct

SEQ ID NO: 264504 - DNA, 428 bp, Glycine max
  unsure (1)..(428): unsure at all n locations
gcaagtgtaacccaaaaccctagcggcgcctgctttcttcgttcgtcttttgcatcagccatgaggatggagtctcaggtgaagcatgctcttgttgtcaaagttatgggtcgtactggatccagaggacaggtgactcaggttagagtgaagtttttggatgatcagaaccgtcatatcatgaggaatgttaaaggaccagtgagagaaggagacattctcaccctactcgagtctgaaagggaagcaagaaggttgcgctagagggtatttttttcttgatctttatggtagttagttggtgctaaaggttatagcaccctgtcttggtgtcttggatctattttcattcaaattatgggttgaattttggatgtttggagtttaatatatgattttgaattatggcttanattttggattaaaaa

SEQ ID NO: 264505 - DNA, 411 bp, Glycine max
caccgcacgaatatcttgttgtttggagcgatccgagaaaaactctgtaaacatgtgggttgaccaggacctccttacaggtgatgagcttctctctgactccttccgttacaaggaaattgagaatggaatgctgtgggaagttgaggggaagtgggttgttaaaggagcagttgatgtagacattggtgcaaacccttctgctgagggtggaggagaagatgagggagttgatgatgcagctgttaaggttggtgacattgttgacacattcagacttcaggagcaacccgcattcgataagaagcagtttgttaccttcatgaagaggtttatcaagaatttgactcccaagctcgatgcagagcaacaggagttgtttaagaagcacatcgagggagcaactaaata

SEQ ID NO: 264506 - DNA, 299 bp, Glycine max
cgcgtccacagcgcacgaatatcttgctgatcgtttcgatccgagaaaaactctgtaaacatacggactgttcaatacctccttacgggtgacgagcttttctcttactccttccgttacaagctaattccaaatgacatgctactcaaagttgagggaaagtgttttattaacagagcagttaatttatacattattgcaaaccctcctgctgagaatgaaacataatatcactactctaatcatacagctaatcaagatgcttacacttgtgacacattcatacttcatcatcaacc

SEQ ID NO: 264507 - DNA, 417 bp, Glycine max
ggtcgacccacacgtccggccacgccctcggtcaattcctattatttaataatctggagagtattgatatatcacgacaggttaaaccattaggcaggcaagatatacatttaactattattctcattgttagcatcattatgctactttacactaacatcatttgccaaaactgctactccaccatctctgatcccaacttcagcaccaacccctacaccagacttcgctaacctcactgagttactaagtcatgctcatccataccacaccttccttggatacctatactccactaaattgattcacacttaccataaccaacatatcatcactgactaaggactcaccatctttgttcctaaagacagactcttcactgctctacagaaaactaccctatacaacatcacctct

SEQ ID NO: 264508 - DNA, 334 bp, Glycine max
attcccgggtcgaccaacccgtccggttgaatcgtgaaaatgttcaaaaccacatccaacacggccttaaccacatgaaccctggggggaagcctgttcaagggggagtcccctttgaagccggtgaaccaggcttcgccgccaataggcttccaaccgaaaaccaacgtggtcctcgcatccttcaacaaggccaactccgaactttcttcgcaccagaagaagatcttcaaggtcgccaatcacatcggcgtcgccatcgctggcctaaccgccgatggccgcgtcctctcccgctacatgagatccgaatgcatcaactataattacacct

SEQ ID NO: 264509 - DNA, 395 bp, Glycine max
caggttctgagctgaaaaagacattcctttatgacttccatgttgctaatgtgggaggattataccatgggcgggatggagcatgccaatccaatacaacgactcaattatggactcaacccttaactgtagagagaatggtcgccttttagatgttctccatatgtgcggtctaaacctcaagggaaaggactctgtgccattccttgaaaagcttgtcattgcagatgttagctgagcttgcccctggaactggttcaatgactgtcttcacaaatgaaaaaggatgggcaattgatgattcactgattaccaatgtgaaggatgatcacatatactaggttgagaatgctatatgtagggacaaatatctggctcatattgaggaacatatg

SEQ ID NO: 264510 - DNA, 428 bp, Glycine max
tcccggtcgaccaacccgtccgcccacgcttccaaaaaggcctggcctaatttgataaccttaactggttaaggaaaaaggagggagggttaaaaaaatggggtcaaccgaaccgatcccgttttgaagggcgtcggggatgacgtacataacatactcaaacatatgcgcgaatctgctcacgaattgcctcaaggaaccctacaaggccgaatacctctctcgtgagaagctccattttgttctctccaaatgggtcgacgccaagcctgaaaaacctactattcgttcagacaccccagagcactgatctggaatagttggaagctataaatgcataaatctttgagatctggaagttcattgtcattttgaacctttctgtgatgtttaattccttggtttttttctctccatgaaatggaaca

SEQ ID NO: 264511 - DNA, 445 bp, Glycine max
atcgaaaccttaagtttcggatcaggtctgagcaatctggttggtagaacctttggtcttagagagtcaagttttatgtctgaattagacgatcaaattcctactgccttcgatccttttgctgatgcaaatgctgatgactcgggtgctgggtcaaaggagtatgtgcatattcgcgtacagcagcgaaatggaaggaaaagcctgacaaccgttcagggattgaaaaaagaattcagctataacaagatacttaaagatgttaagaaagagttctgttgcaatggaacagctgttcaggacccagaactaggacaggttattcaacttcaaggtgatcagaggaagaatggttctaccttcctggtccaggctggtatcgtgaagaaggagcatatcaagattcatggtttctgagcggttggagtctcaagtgtcaagtctt

SEQ ID NO: 264512 - DNA, 350 bp, Glycine max
  unsure (1)..(350): unsure at all n locations
cccacgcgtccgcccacgcgtccgcagggaagttgtggaagttgttgggcgttctgaacgggggccacagtggaagcaataaacaagatagtgacagggaagtttgtgtccttatctgaacaagaacttgtggactgtgacagagcctacaatgaaggatgcaatggtggccttatggactatgcattcgaattcatcattcaaaatggaggcattgacacagacaaagattacccataccgtggctttgatggcatctgtgatccaactaagaaaaatgcanaggttgtgaacattgatggtttcgaggatgttccaccgtatgatgagaatgccttgaagaagctgtc

SEQ ID NO: 264513 - DNA, 436 bp, Glycine max
  unsure (1)..(436): unsure at all n locations
atggctcccaaaccgcctagtacgggtctgtttgttggactgaacaagggtcacgtcgtcagcaanagggaattgcctccacgcccctcagatcgtaaggggaaaacaagcaagagggtgcactttgtgaggaacctcataagagaggtagccggttttgcaccctatgaaaagcgtataactgagttgctgaaggttgggaaggataagagggcactgaaggttgcaaagagaaagctcggaacacacaaacgcgcaaagaagaagcgtgaggaaatgtccagtgttctcaggaagatgagggctggtggtgctggagacaagaagaaataagtcttatttactgttttccagattcactagatggacctgtgtattgatggacgagctttcatatttttgctttgggtcaattaggttacttcaagaatttggt

SEQ ID NO: 264514 - DNA, 298 bp, Glycine max
  unsure (1)..(298): unsure at all n locations
ggctacttttgattgcttgatgaaaacctatggattcctgacaccagaattctggaaggagactcgcttctccaaatctccattccaagagtacacagatctactggcaaaaccaacaggaaagactctaatcttggaggaggaaagggtggatgcttgatttgctagttttgctttatggatgttttaggaactttattactttacatacttntgtggttctgtgctttacttttggttttgatagacgtatggctcttgattcattttgaatggttccaaggtttaaatgactggc

SEQ ID NO: 264515 - DNA, 350 bp, Glycine max
agaaaatgtaattttcagcactgtccaggaaatttaaggattgtaattctttatgcgctcatgttattattaaaaaaaaaaaaaaaaaaaaaaaaaaaaaaaaaaaaaaaaaaaaaaaaaaaaaaaaaaaaaaaaaaaaaaaaaaaaaaaaaaaaaaaaaaaaaaaaaaaaaaaaaaaaaaaaaaaagggcgcccctttaaaagaatcaaagttaactaacccttgcatccaacgtaaaaccttttaaaaagggtaaccaaaattaaattaattgcccgtctttaaaaaactttgaaactgaaaaaaccttgccttaaccaaattaaatccctttgaagaaaatcccctt

SEQ ID NO: 264516 - DNA, 310 bp, Glycine max
gtgcgttcttagaagagctcaatcctcctaacataattcttggtcatggaaaagctaatgggatgggccagctcaagccgaagctcataagtcaatttgctgatcgcaacacttaaattcttacttcaaaaaactggcaatctggtgaaatgtatttcaattcgcagaaaatggccaaaaccatatggaagctggctgagaaaacaccacaagttggggaaactgtcaaagggttgcttgtaaaaaaaggctttacatatcagattatggcagctgatgatctccatgtcttttcacaactatcaacagc

SEQ ID NO: 264517 - DNA, 208 bp, Glycine max
cgcctacgctcatttcactcattcatctttgttcactcaatctcatcataatccttatggtcggtttaataagatgccgatcagaaacatcctcgtctcaaggcctgaaaaggccactcaccccaacacattgaaagcctctttggctgacttcatctcaaccttcatctatatattctccgactcacactcccgcatcgcctacaac

SEQ ID NO: 264518 - DNA, 448 bp, Glycine max
  unsure (1)..(448): unsure at all n locations
cccacgcgtccgagaaggcctgggcttagttgataagcataactgggtgaggaagagagagggagagtgaagaagatggcgtcgagcggagcggtaccgttttggagggcggcggggatgacgtacataacatactcaaacatatgcgcgaatctgctcaggaattgcctcaaggaaccctacaaggccgaatccctctctcgtgagaagctccattttgttctctccaaatgggtcgacgccaagcctgaaaaacctactattcgttcagacaccccagagcagtgatctggaataagtgggaagctataaatgcatanatctttgagatctggaagttcattgtcattttgaacctttctgtgatgtttaattcctttgtttttttctctccatgaaatggaacatgcactggattttgatttgcacggttaatctttgtataata

SEQ ID NO: 264519 - DNA, 341 bp, Glycine max
  unsure (1)..(341): unsure at all n locations
cccacgcgtccgcccacgcgtccgaaaacagagtagcctacacgtatcagagagagggagagaagagagagaatatttctgttcgtgcagatagatagatagatggctcggagctccacaagaatgaaatgggtctccatcttcacacttctattcctctcccactcgcccctcacaaccttcgcagaagatgggctagtggcgaatggagattttgaggttagcccatcaagtgggttccctaacgaggcgattgtngagggccccagcgaggtcccaaactggaagtcaaacggcaacgttgagctagtggaatcggggcaaaaacagggtgggatgat

SEQ ID NO: 264520 - DNA, 439 bp, Glycine max
  unsure (1)..(439): unsure at all n locations
cccacgcgtccggaaaagggaagtaacttatgtgaataatatgaagggcggtcaagaaatcgcaaaaacaccgtcctcttctaagagaacactaagtcagggttcagttgatatatatgctgctcagtgcaaaaattgcttgaaatggagagagattgatacacaggaagagtttgaagagattagaagtaaagttgctgaggaaccttttctttgcagcagaaaggctaatagttcctgtgatgaacctggtgatattaaatatgattcctctcggacatgggtgattgacaagcctaacctcccaaagactccacaaggttttaagaggagcttggtgcttagaaaagattactccaaattggacgcttactacatcacacctgcaggcaaaaaactgagaacccgcantgagattgctgcgtttctaaaagataat

SEQ ID NO: 264521 - DNA, 410 bp, Glycine max
atcgaaaccttaagtttcggatcaggtctgtatcaatctggttggtagaacctttggtcttagagagtcaagttttatgtctgaattagacgatcaaattcctactgccttcgatccttttgctgatgcaaatgctgatgactcgggtgctgggtcaaaggagtatgtgcatattcgcgtacagcagcgaaatggaaggaaaagcctgacaaccgttcagggattgaaaaaagaattcagctataacaagatacttaaagatgttaagaaagagttctgttgcaatggaacagttgttcaggacccagaactaggacaggttattcaacttcaaggtgatcagaggaagaatgtttctaccttcctggtccaggctggtatcgtgaagaaggagcatatcaagattcatg

SEQ ID NO: 264522 - DNA, 366 bp, Glycine max; identical to SEQ ID NO: 262993

SEQ ID NO: 264523 - DNA, 374 bp, Glycine max
cgcaccagtttcaccgcacgaatatcttgttgtttggagcgatccgagaaaaactctgtaagcatgttggtttaccaggacctccttacaggtgatgagcttctctctgactccttccgttacaaggaaattgagaatggaatgctgtgggaagttgaggggaagtgggttgttaaaggagcagttgatgtagacattggtgcaaacccttctgctgagggtggaggagaagatgagggagttgatgatgcagctgttaaggttgttgacattgttgacacattcagacttcaggagcaacccgcattcgataagaagcagtttgttaccttcatgaagaggtttatcaagaatttgactcccaagctcgatgc

SEQ ID NO: 264524 - DNA, 346 bp, Glycine max
ggctacttttgattgcttgatgaaaacctatggattcctgacaccagaattctggaaggaggctcggttctccaaatctccattccaagagtacacagatctactggcaaaaccaacaggaaagactctaatcttggaggaggaaagggtggatgcttgatttgctagttttgctttatggatgttttaggaactttattactttacatactttgttggttctgtgctttacttttggttttgatagacggtatgtctctgtatgcattttgattgtttccaagttttaattgactgcaaaaaaaaaaaaacacaaaacaataaacaatatataaatacaactttt

SEQ ID NO: 264525 - DNA, 380 bp, Glycine max
gaaatgtgaaagccttatcatacagtgtttgcaagatgccaaggtagaagttgaagaagtagatgatgtgataattgtaggcggatgttcttacatcccgagggtgaaaaatcttgttactaacgtatgtaaaggcaaggaactttataaaggcatgaatcctttagaagctgctgtttgcggtgcagcagtggaaggagctattgcttcaggcgtcaatgatccctttgggaacttggacttgttaactatccaagctacacctcttgccattgggattcgagctgatgggaacaagtttgtccctgtaattccgagggatactacaatgccagcacggaaagagctagttttcacaactactcatgacaatcaaactg

SEQ ID NO: 264526 - DNA, 294 bp, Glycine max
  unsure (1)..(294): unsure at all n locations
aagagaangaatttattctggacaccttgtgccacttattgtattaatcgaatgctggaaggttttactaaaataagatgtgtggaagagtgcatggaaaaggaccagaaaattaccaaactaatatacaatcaaatatggttgttaaatcttatgaaaagtgaatttaccgagggacatgagcttctaaaaccatctgccacccggtttgcctctagctttgctactctacagagcttgctggatcatcgagttggtctcagaagaatgattctttccaacaaatggatttca

SEQ ID NO: 264527 - DNA, 446 bp, Glycine max
  unsure (1)..(446): unsure at all n locations
cccacgcgtccgggtggagtcatgacaaagttgattcccagaaacactgttatcccggccgagaaatctcaggtgttcaccacctatcaggaccagcagactacagtctccattcaggttttcgaaggcgagaggagtctcacaaaggattgccgccttcttgggaaatttgatctgtctggaattcctccagccccaaggggtacgcctcanattgaagtgaccttcgaagttgatgccaacggcattctaaatgtgaaggcagaagacaagggcactggtaaatcagaaaagaatcacctttccaaacgaaaggggacgctttacccgggaggaaattgagagaatggttcgcgaagcanaggagtttgcagaggaagacaagaaggtgaaggagaggatcgatgctcgcaacagtcttgaaacctatgtatacaacatgaaga

SEQ ID NO: 264528 - DNA, 467 bp, Glycine max
cccacgcgtccgcccacgcgtccgcccacgcgtccgcccacgcgtccgcggacgcgtgggggttcggtgaataagtgtcgtttaaagatgcagagtctgcaacagaaggcttccgaatggagcggtgtttccatagacgacgctttcggcatcgacgacaccaatctcttccagaaactcggcctccaaaccttcattaacctctccaccaatttctacaacagggtttacgatgacgaggaagaatggtttcgttcaatattcgcgaattctgagaaggagaatgccattcaaaaccaatacgagttcttcgtgcagcgaatgggtggtcctcctctcttttctcagagaagaggacatcctgctctaattgctcgacatcgaccatttcctgtcacgcatcaagcttgaaagagggtgttacatcacatgcaacatgcattagacagtactacagatatagatga

SEQ ID NO: 264529 - DNA, 388 bp, Glycine max
ccaattcactctttttcttctcgccctctgccgtgggaggagtttgtaacatggctgctctaccaacggcggagcttagtgacgcaaatgcaacacatgtagcaagttgtgatgtgagggtgttgcatccagtgttcaaggtttacggtggggccaccgcgttctccggccccgttgtcaccgtgaaggtgtttgaagacaacgtgttggtgagggagcttcttgagacgaaaggcgaaggaagagtattggttgttgatggaggaggaagcttgaggtgtgcattggtgggaaggaatttggcactgattgcacataacatgggttgggctgggattgtggtgaatggctgcatcaaagatgtggatgagatcaatgcaagtgatat

SEQ ID NO: 264530 - DNA, 418 bp, Glycine max
cccacgcgtccgcccacgcgtccgctagaacttataatagaatactcgtcccacaggcaatgttcttctctctctcctgtcatcacttcatatattcgcaatttctcttccaccatgaaaccctatacccaactgcaatcgctcatccaagccatgtccctcaaccacctcctctccttctccccccgatccaaacctccaacctccaccctctcatccctcccatccctctcttcctcaccctccactttcgctacctccgcctcctcctctccaacccatctttcccccaccatcatgatctacgaccgctccttccactccgtaaaatccaagctccagcagctcaaaaaccccaaccccctctacctcaaacatggatacccccttaccaccctctattaccacacactcatac

SEQ ID NO: 264531 - DNA, 311 bp, Glycine max
gttgaatcgttaaaatgttcataaaccagttctactcttacgttaccacatggatccctgggaagggttttaatccagatggagtacgctattgaagctgtgaatcatggctcttctgctatacggctccgatctaatacccacttggtcctcgcatgcttcaacaatgccaactcctaactctcctctcaccagaataagatcttcaaagtctacaatcacatcgtcgtctccatcgctgtcctcaccgccgattgccccgtcctctccccctacatgaaatccgaattcatcaactataattacaccta

SEQ ID NO: 264532 - DNA, 301 bp, Glycine max
cattctcctctctgaattcctcttattcaggaatttggagagtattgatatatcagaggtaggataaaccagtagccaaggaagatatggagttttctatgattttcattgttagcaacattatgctgcttttcagttcagcatttgccaaaactgctagtcctccctctctgagcccaactccagcaccagccccggcaccagacttcgtgaacctcactgagttactcagtgttgctggtccgtttcacaccttccttggataccttgagtccactaaagtgattgacacttttcaaaa

SEQ ID NO: 264533 - DNA, 371 bp, Glycine max
cactccttcttttcaatttacctttttatttcctctttgtccttacactcttttactttgtaatggttattataaaacccattcttacatcttcaacattatccttcaaatcctcaaaaatttaagacttacacactattaagtcataacattcaatttcaaaaacacacttcttataattacattaaatttttcaaacaattttatttataaaagattcctccaaaatgtattttatcttcattactattaaaaatataccatttataacataatcaatatccttataacttattaacttaaacaattctttataccataatttttcaatagattttattaaattattttcttcatgcattttacaaaac

SEQ ID NO: 264534 - DNA, 420 bp, Glycine max
  unsure (1)..(420): unsure at all n locations
cggaattcccgggtcgacccacgcgtgcgcccacgcgtccgcacgttccgagttttctgatcgctcatagagagttcgacgcggcggttggagaagaagattgcaagatgaagttcaacatcgcgagtcccaccactggatgccagaagaagctcgagatcgacgacgatcagaaactacgagcattttgggacaagaggatctcacaggaggtcagcggagatgcacttggtgaggaatttaagggctatgtcttcaaaattactggaggttgtgacaaacaaggattcccgatgaaacagggagtgcttactcctggtcgtgttcgacttttgcttcacaggggaactccttgcttccgtggatatggaaggcgtaatggagaacgtangagaaagtctgttcgtgggtgcattgtca

SEQ ID NO: 264535 - DNA, 353 bp, Glycine max
tttccgggtcgacccacgcgtgcgtccacgcgttcgggtcaattgaccgaagcagttcggcttcgtccttacactgttgtactgggtgatgggattgataaagcccatcctgatgtgttcaacatgatgcttcagatcctggaagatggaagactaacagacagtaaaggcagaacagtggatttcaagaacacacttcttataatgacatcaaatgtttgaagcagtgtgattgataaaggatgccgcaaaattggatttgatctggattacgatgagaaggatagcaattataacagaatcaagaacctggtaactgatgagctaaaacaatacttcaggcctaatttttg

SEQ ID NO: 264536 - DNA, 457 bp, Glycine max
  unsure (1)..(457): unsure at all n locations
aattcccgggtcgaccgacgcgtacggttgaatcgtgaaaatgttcagaaaccagttcgacacggacgtgaccacatggagnccctgggggaggctgttccaggtggagtacgctatggaagcggtgaagcagggctcggcggcgatagggctccgatcgaagacccacgtggtcctcgcatgcgtcaacaaggccaactccgaactctcctcgcaccagaagaagatcttcaaggtcgacaatcacatcggcgtcgccatcgctggcctcaccgncgatggccgcgtcctctcccgctacatgagatccgaatgcatcaactataattacacctacgagtcgccgctccccgtcggcagactagtcgttcagctcgccgataaagctcaggtttgcacacagcggtcttggaaacgtccttatggggtttgactcctggtagctggattagatgaa

SEQ ID NO: 264537 - DNA, 374 bp, Glycine max
ggtcctgaattcggcggtcgacccacgcgtggcgccacgcgtccgagatgagtaacatcaccatctcggatctgtgtccctcctttgaggcaaaagtgatgagttgcatggtggtgctgcttccaacctctctcacgctcacaagggtgacccttgtctcgttttaacggctgatcccaagcctcgtcttcgttggactcatgacttgcatgaacgcttcgttgatgcggtcacgcaacttggtggagctagtagttctggatgttatctgcataagctacaccaaaagcaatcattctgactatgaatgtcaagggtttgactctgtttcatttgaagagtcatcttcataaatacaggcttggtaagcaatc

SEQ ID NO: 264538 - DNA, 284 bp, Glycine max
cccacgcgtccggctcaattgaccgatgcagttccacgtcgtacttacactgctgtactgggtgatgagatataaaaagcccatccttacttcttcaacactatgctacacatcctggaatacccttacctacatacactactgacacaacactctatttcaagaacacatcttcacatacttacatccatatgttgaagcagtcacgcatgataaaggaagctcgcaaatctggatgtgatctgcataacgcatcaccaagatcactcatataacactattaa

SEQ ID NO: 264539 - DNA, 183 bp, Glycine max
ctttgtgtactttgagtcttcttgatccttctttttctccttgaactcaaacatggcagatgaggtggttctgctagatttctggccaagtccatttgggatgagggtcaggattgcccttgctgaaaagggtatcaaatatgagtacaaagaagaggacttgaggaacaagagtcctcttct

SEQ ID NO: 264540 - DNA, 349 bp, Glycine max
atttgttgctgcaggaattcacattccggcctgatatagcagatgattgtttggtgttggcgtcaatgtgtattcgctactgtcctcaactgcttattccctcgtctgtttttccttcattagtggattgctctatgattgggatcacagtacagcatacggaggcttcgaattccatattgcatttcttggctgacatttttgatcttgccaattcctctgtgggggagcaatttataccaataagagatagtgtaataattcctcgaggtgccagcatcaccagaattttgttgcttcattaacgggagcacttcctaaatctcgagtggatgtggtatcttataca

SEQ ID NO: 264541 - DNA, 292 bp, Glycine max
cgctcgaccgtggtttcaacatcttatgtgttgtaatcatcgtgtatcgtggtcggtacttggggattgtatgattctgctaaaccatttgtcctcacaggctcattgcatgatatcttatgtgccagctctgcccttggatggctcatcaccaatggtgcatcgtcttgcatcatacccaatagacactgttagatgaagaatgatgatgacctctgatgaacctgtcaagcacaagagctccttggatgcattcacacagatcctcaagaatgagggtgccaagtgcttg

SEQ ID NO: 264542 - DNA, 380 bp, Glycine max
  unsure (1)..(380): unsure at all n locations
cccaggcgtccgggcgcaagagagacaggtcttcctacttttcccgccacgacgccgccaagcgcctgcgccccttgccggagcccgcggaggaggagacgtctacgatgagaccggtgccgccgtccgcgttggtcgtgatgggcctcccccaggactgctccgtcctcgatctcaagtcccgattcgagatctacggcgccatctcccgcatccgcatcgaccgcgacgccgtcggatacatcacctaccggaccaaggactccgncgacgctgncatcgccgacggcctcgaccccacctttggaatcaccgttaactctaaaatggttcaagtgttgggggcaacggaccctctagccatgtggagggaaggagtt

SEQ ID NO: 264543 - DNA, 452 bp, Glycine max
tgttgacctcacagtgaggctggagaaggaagcctcctacgatgaaattaaaaatgctagcaaggaggaatcagagggcaagttgaagggaattcttggttacactgaagatgatgtggtctccaccgactttgtgggcgatagcagatcaagtatttttgatgcaaaggctggaattgcattgaataagaactttgtgaagcttgtctcttggtatgacaacgagtggggatacagctcacgtgtcattgacctgcttgtattcgttgccaagaagtctttttaaggttgtactgaaaaaaaagtagcttgtctagacattatgtgctggtgtctagctgcgatttagtgtcttcttgctcgggcagaaatgagaagtttgaataaatcggtttcgggaaccggtgttgttaccctggtaggagcattaagctttttttggtgtctcttct

SEQ ID NO: 264544 - DNA, 444 bp, Glycine max
cccacgcgtccggacagaagagagcgtcctagtcgcaaccctaataagaagaaccacagcgtcaagcgagtgacatccaccagccatgggtcgtatgcacagccgcggtaagggtatatcctcttctgctttgccctacaaaaggacaccccctagctggctcaagatctcttcgcaagatgtggaagaaaatatctgcaagtttgcgaagaagggtttgaccccgtctcagattggtgtcattcttcgagattctcacggtattgctcaggtcaacagcgtcactggcagcaaaatccttcgcatcctcaaagctcacgggcttgcgcctgaaattccagaggatctttaccatttgattaagaaggcagtttcaattaggaagcatcttgagaggaacaggaaggacaaggactccaagttcaggttgattcttgttgagag

SEQ ID NO: 264545 - DNA, 363 bp, Glycine max
  unsure (1)..(363): unsure at all n locations
gttgccgggctctaccgtggtttcaacatctcatgtgttggaatcatcgtgtatcgtggtcggtacttgggattgtatgattctgttaaaccagttgtcctcacagggtcattgcaggatagcttttttgccagctttgcccttggatggctcatcaccaatggtgcaggtcttgcatcatacccaatagacactgttagaagaagaatgatgatgacctctggtgaagctgtcaagtacaagagctccttggatgcattcacacagatcctcaagaatgagggtgccaagtccttgttcaagggtgccggtgccaacatcctncgtgccgttgccggtgctggtgtgcttgctggttatgac

SEQ ID NO: 264546 - DNA, 445 bp, Glycine max
aaatgttcattttccagtacgacacggacgtgaccacatggagccctgcggggaggctgttccaggtggagtacgctatggaggcggtgaagcagggctcggcggcgatagggctccgatcgaagacccacgtggtcctcgcatgcgtcaacaaggccaactccgaactctcctcgcaccagaagaagatcttcaaggtcgacaatcacatcggcgtcgccatcgctggcctcaccgccgatggcccgcgtcctctcccgctacatgagatccgaatgcatcaactataattacacctacgagtcgccgctccccgtcggcagactagtcgttcagctcgccgataaggctcaagtttgcacacagcggtcttggaaacgtccttatggggttggactcctggtagctggattagatgaatcaggagctcacctctattacaact

SEQ ID NO: 264547 - DNA, 249 bp, Glycine max
  unsure (1)..(249): unsure at all n locations
aatccccggctcgacgcacgcgtgcgaatggatcgngaaaatgatcagtttccagtacgacacggacgtgaccacatggggccctggggagaggctgttccaggtggagtacgctatggaggcagtgaagcagtgcttcgcggcgataaggctccgatcgaatacccacgtggtccctcgaatgcgtcaacaatgccaactccaaactctcctcaaaccagaagaaaatcttcaagggcaacaatcaca

SEQ ID NO: 264548 - DNA, 309 bp, Glycine max
aattcccgggtcgaccacgcgtccgccaggcgtctcaccgcgattacctttttgtgacaatctcttggtaagggtcaaaaggagcaggtgttcattttccaaccactacggtttctaccgtcaggggaaaccccaccgagagggaacccatgggagagtaaaccgccccagcccaagcttgttccaaaggcttcatcaccgccaaagaagatgctgaaacctctagaaggaaccttaaactctccaaggatcagtcaatggtcctggaaaagagcttcaaggaccacaacattcttaaccccgtaggta

SEQ ID NO: 264549 - DNA, 238 bp, Glycine max
aatcgacccacgcgtgcgcccaggcgtccggggaagctcgatcattccttcgcggtttttatgtgaaccgtttaccttgggtatattggatactttgaattgtatgattctgttaaaccagtttttttcacatgttcattgcaggatatcttttttgccagctttgcccttgtatggctcatcaccaatggtgcaggtcttgcatcatacccaatagacactgatagaagaagaatga

SEQ ID NO: 264550 - DNA, 294 bp, Glycine max
  unsure (1)..(294): unsure at all n locations
gttgccgggctctaccgtggtttcaacatctcatgtgttggaatcatcgtgtatcgtggtcgggaccttggaatggtataatcctgttaaaccagttgtcctcacagggtcattgcaggatagcttttttgccacctttgcccttggatggctcatcaccaatggtgcaggtcttgcatcatacccaatagacactgttagaagaagaatgatgatgacctctggtgaagctgtcaagtacaagagcttcttggatgcattcacacagatcctcangaatgagggtgccaagtc

SEQ ID NO: 264551 - DNA, 257 bp, Glycine max
gacccactcgtccgattgcgcgcgctctaccgtggtttcaacatcttatgtgttttaatcatcgtctatcaaagtggatacttgggcatttattattctcataatactatttgtcctcacagcgccattgcatgatatcttatttgccacctttacccttgaacgtctcatcatcaatgatccatctcttgcatcatacccaatatacactgatataagaagaatcatcatcacctctgattaatctgtcaagtaca

SEQ ID NO: 264552 - DNA, 408 bp, Glycine max
cccacgcgtccggtcgcaagagagacaggtcatcctacttttcccgccacgacgccgccaagggccggcgccccttgccggagcccgcggaggaggagacttctacaatgagaccggtgccgccgtccgcggtggtcgtgatgggcctcccccaggactgctccgtcctcgatctcaagtcccgattcgagatctacggcgccatctcccgcatccgcatcgaccgcgacgccgtcggatacatcacctaccggaccaaggactccgccgacgctgccatcgccgccggcctcgaccccaccttcggaatcaccgttaactctaaaatggttcaagtgttgggggcaacggaccctctaaccatgtggaggggaagaagtgggttatagcagggaacaaaggttctat

SEQ ID NO: 264553 - DNA, 239 bp, Glycine max
  unsure (1)..(239): unsure at all n locations
atttgttgctgcaggaattcacagcccggcctgatatagcagatgattgtttgttgttggcgtcaaggtgtattcgctactgtcctcaactgtttattccctcgtctgtttttccttcattagtggattgctctatgattgggatcacagtacaacatagggaggcttcgaattccatanttgcattcttggctgacatttttgaatctgcgaaatcctctgtgggggagcaatttata

SEQ ID NO: 264554 - DNA, 436 bp, Glycine max
tctgttcattattatgtgcagtcacacatttaaattaatgaatatcgtgagcgtataatgttgccttctgcatcaaagaagcaggggcgacctattaccacttgtataaaggttttagacatgactggtctgaagttatcagccctgaatcagattaagttgctaactattatatcatccattgatgatctgaactaccctgagaagacaaatacttattacattgtaaatgctccatacatattttctgcttgttggaaggttgtaaagccacttttacaagagaggacaagaagaaaaatacaggtgttaccaggttgtggacgagatgagctattgactatcatggattactcgtctctaccacatttctgtcgaagagaaagctctggatcatccagacattctgagagtggtagtgaaaaatgctattcct

SEQ ID NO: 264555 - DNA, 377 bp, Glycine max
  unsure (1)..(377): unsure at all n locations
gttggggggctctaccgtggtttcaacatctcatgtgttggaatcatcgtgtatcgtggtcggtactttggattgtatgattctgttaaaccagttgtcctcacagggtcattgcaggatagnctttttgccagctttgcccttggatggctcatcaccaatggtgcaggtcttgcatcatacccaatagacactgttagaagaagaatgatgatgacctctggtgaagctgtcaagtacaagagctccttggatgcattcacacagatcctcaagaatgagggtgccaagtccttgttcaagggtgccggtgccaacatccttcgtgccgttgccggtgctggtgtgcttgctggttatgacaagtttgcaggttc

SEQ ID NO: 264556 - DNA, 346 bp, Glycine max
  unsure (1)..(346): unsure at all n locations
gttgccgggctctaccgtggtttcaacatctcatgtgttggaatcatcgtgtatcgtggtctgtactttggattgtatgattctgttaaaccagttgtcctcacagggtcattgcaggatagcttttttgccagctttgcccttggatggctcatcaccaatggtgcaggtcttgcatcatacccaatagacactgttagaagaagaatgatgatgacctctggtgaagctgtcaagtacaagagctccttggatgcattcacacagatcctcaagaatganggtgccaagtccttgttcaaggggtgccgtgccaacatcctncgtgccgttgccgtgctggtgt

SEQ ID NO: 264557 - DNA, 405 bp, Glycine max
  unsure (1)..(405): unsure at all n locations
ntggcgcnnnnngggcgnncgtctagcgtcacgaattcctaaccacacttgccatatcaaaggaaagagcgtcaacatcagatcaaagatacaacatggaggcacttcaatcatgggtttcaaagcacaagctcgccagcattggggcactctgggcctctggaattggagcaacacttgtggcttattcatgcaaaaagtctccaatgaagccaagtctaaggcttatccatgctaggatgcatgctcaggctctaactntagcagtgctatccggtgcagctgcttatcattattatgagaaacgtgatgttcagccaaaccagaggcagattatattattcctgctcccaatgtcacccagatggttgaatatgaacttcaatgtgccttctaaaaattaaa

SEQ ID NO: 264558 - DNA, 397 bp, Glycine max
cccacgcgtccgcccacgcgtccggtgattgaagctagttagaacaagatgttgcagctggtctacactgcgattttctccgaaatgcttttgattctcacgctcgtcttcaaaaccccactgagaaaactcgtcatcgtttccctcgatagtgtgaagcgcggtcgcggtcccgtggtggtttccaccgtgggcgccacattgatggtggttctcgcttcgagcctctacagcatggccaagatccagcaacgcaccctcgaggccggcatagtcaaccccaacgaccaaggtctcatgtccaaacacatgcttgaagcttctcttatggggtttctgctggtcctctctctgatgattgatagattgcaccattacataagagagctttggtcac

SEQ ID NO: 264559 - DNA, 459 bp, Glycine max
gcgtccgcagagtttgagtggacctgtctcagctaccctttaccttggttattcactacgcatggcgattgcaatcatgttgtcaaccggcaccattggcttccttatgtcattctactttgtgcactacttgttctcatcagtaaagatagattgaggttcttgttgtcattgcatattaactatgaaaaaggttgattgatataacttgatcacattgcatagtagggcaacggatgtttaattcattgtctgattttatattgcgatgggatctgcaggttgttctccttctgcctgtttcccaaagtagtgtactcattcaagtattcaactagtgtttgagatcatgtttcaagtattttgttcaagtttctttagaaggttgtaattcaaactctcatctcatttcaatactttagaaaaatgatgttagattaaaaaaaaaaaaaagggcgg

SEQ ID NO: 264560 - DNA, 402 bp, Glycine max
  unsure (1)..(402): unsure at all n locations
agaaaacctaagcttagaattagaaacaaagaaaagaagaaaggaaagaattgatcgttgagaatgcagggaggaaagaaagcgggagagtccattaaggaaacagctacaaacattggtgcttctgccaaggctggcatggagaagaccaaggccactgtccaagagaaggcagaaagaatgacagcacgtgatccggtgcaaaaggagttggcaacccaaaagaaagaggcaaagatgaaccaggcggagctggacaagcaggcggcgcgtcagcataacacggcggccaaacagtccgccaccacggctgggcacatgggacatggccaccacaccaccggaaccgggactggaaccgncacgtattccaccaccggggaatatggtcagcccatgggg

SEQ ID NO: 264561 - DNA, 64 bp, Glycine max
aaggaaacagctacaaacattggtgcttctgccaaggctggcatggagaagaccaaggccactg

SEQ ID NO: 264562 - DNA, 468 bp, Glycine max
atggctcccaaaccgcctagtacgggtctgtttgttggactgaacaagggtcacgtcgtcaccaagaaggaattgcctccacgcccctcagatcgtaaggggaaaacaagcaagagggtgcactttgtgaggaacctcataagagaggtagccggttttgcaccctatgaaaagcgtataactgagttgctgaaggttgggaaggataagagggcactgaaggttgcaaagagaaagctcggaacacacaaacgcgcaaagaagaagcgtgaggaaatgtccagtgttctcaggaagatgagggctggtggtgctggagacaagaagaaataagtcttatttactgttttccagattcactagatggacctgtgtattgatggacgagctttcatatttttgctttggttcaattagtttacttcaagattttgtttgagatatatggtttgcttaactgagacatga

SEQ ID NO: 264563 - DNA, 482 bp, Glycine max
aatctcgggtagacccacgcgtccgcccacgcgtccgagaaggcctgggcttagttgataagcataactgggtgaggaagaaagaaagagagtgaagaagatggcgtcgagcggagcggtaccgttttggagggcggcggggatgacgtacataacatactcaaacatatgcgcgaatctgctcaggaattgcctcaaggaaccctacaaggccgaatccctctctcgtgagaagctccattttgttctctccaaatgggtcgacgccaagcctgaaaaacctactattcgttcagacaccccagagcagtgatctggaatagttggaagctataaatgcataaatctttgagatctggaagttcattgtcattttgaacctttctgtgatgtttaattcctttgtttttttctctccatgaaatggaacatgcactggattttgatttgcacggtaaatcttgtaataatacaagtttaaa

SEQ ID NO: 264564 - DNA, 397 bp, Glycine max
  unsure (1)..(397): unsure at all n locations
cccacgcgtccgcccacgcgtccggtttcgttacgttctgcttcgcgtggaccaacaagaagtgtaagttttcattcaatggccagcgctcagctctcagcaatatcttcgtcgatctctacggcgtcgtttgaagggcttcgaccttcggctgttcagtttgcttccgcgggcagaattagaattggcaatctctcccaaaggtctttccggngcttgggtgtcaaagccgncaccgttgttgcccccaaatacaccgcgattaagcctctgggagacagaatgctggataaaattaaaggagccgaagagaaaacttgaggtgggattttgcttccatcaactgctcaaacgaagcctcaagggggtgaggtggttgctggtggagaaggaaaga

SEQ ID NO: 264565 - DNA, 463 bp, Glycine max
actaattgtgcttatccttattgagagaaaaaatggccaaatcaatcaaattctttgagttgaacacaggggccaagattccttctcttgggttagggacttggcaagctgaacctggtgttgtagctgaagctctcaccacagccattcaggttggatacaggcatattgactgtgctagtgcgtataagaatcaagcagagattggttctgctcttaagaagctttttgatgatggtgtggtgaagcgtgaggacttatggatcacttccaaactctggtgttcagatcatgcaccagaagatgtgccaaaagcattggataaaacattacaggaattgcaacttgactatcttgacctctatctgatccactggccagtccgcatgaaaagtggaacatttggactcaataaagaatatcttgagcaaccagacattcccaatacatggagagcaatgga

SEQ ID NO: 264566 - DNA, 456 bp, Glycine max
cccacgcgtccgcccacgcgtccgcccacgcgtccgcggacgcgtgggcttcaacttggatgaccacggtaactaccctgattctgatcagattccttactttgaggatggtgattctgtgacatacaataatgagaaggaggggatcattgagtgcttgaaaaggaatgtgggtggtgatttagatagtgaggtttcttctctccctgattggataccaaccaaagtgatggccaccacttggcttgctgatgcacttgagtatgaactgtgggtgggatgtgatggttcctctgcttatagcatctattattctgatcttccctggcctatcggcaaggttctcttttggaagaaagcttattgggtaaagcagaaacatgggataagtgaagagaatgtagaagtaaaggaagaagagatttatgggagagcaaactctgcatatgatgctct

SEQ ID NO: 264567 - DNA, 393 bp, Glycine max
ccaattcactctttttcttctcgccctctgccgtgggaggagtttgtaacatggctgctctaccaacggcggagcttagtgacgcaaatgcaacacatgtagcaagttgtgatgtgagggtgttgcatccagtgttcaaggtttacggtggggccaccgcgttctccggccccgttgtcaccgtgaaggtgtttgaagacaacgtgttggtgagggagcttcttgagacgaaaggcgaaggaagagtattggttggtgatggaggaggaagcttgaggtgtgcattggtgggagggaaattggcactgattgcacataacatgggttgggctgggattgtggtgaatggctgcatcagagatgtggatgagatcaatgcaagtgatattggcg

SEQ ID NO: 264568 - DNA, 333 bp, Glycine max
cccacgcgtccgcccacgcgtccgcagggaagttgtggaagttgttgggcgttctcaacggtggccacagtggaagcaataaacaagatagtgacagggaagtttgtgtccttatctgaacaagaacttgtggactgtgacagagcctacaatgaaggatgcaatggtggccttatggactatgcattcgaattcatcattcaaaatggaggcattgacacagacaaagattacccataccgtggctttgatggcatctgtgatccaactaagaaaaatgcaaaggttgtgaacattgatgggttcgaggatgttccaccgtatgatgagaat

SEQ ID NO: 264569 - DNA, 322 bp, Glycine max
  unsure (1)..(322): unsure at all n locations
gaaaaccctagctagtagtctcagttcgtttgagagagaaaaaatggcagagggtctcgttgtccgcggaaccatgcgcgcccacaccgacgtcgtgacggcgattgccactcccatcgacaactccgacatgatcgtgacggcgtcgcgcgacaaatccatcattctctggcacctcaccaaggaggacaagacctacggtgtcccccgccgncgnctcaccggacattctcacttcgtccaggacgtcgtcctctcatccgacggtcagttcgccctctccggctcctgggacggcgagctccgnctctgggacctcgcg

SEQ ID NO: 264570 - DNA, 409 bp, Glycine max
  unsure (1)..(409): unsure at all n locations
cccacgcgtccggtcgcaagagagacaggtcagcctacttttcccgccacgacgccgccaagcgccgcctccccttgccggagcccgcggaggaggagacgcctacgatgagaccggcgccgccgtccgcggtggtcgtgatgggcctcccccaggactgctccgtcctcgatctcaagtcccgattcgagatctacggcgccatctcccgcatccgcatcgaccgcgacgccgtcggatacatcacctaccggaccaaggactccgncgacgctgccatcgccgncggcctcgaccccaccttcggaatcaccgttaactctaaaatggttcaagtgttgtgggcaacggaccctctagccatgtggagggaaagagtnggtaatagcaggaacaaaggttctatgtc

SEQ ID NO: 264571 - DNA, 460 bp, Glycine max
  unsure (1)..(460): unsure at all n locations
gttgccgggctctaccgtggtttcaacatctcatgtgttggaatcatcgtgtatcgtggtctgtactttggattgtatgattctgttaaaccagttgtcctcacagggtcattgcaggatagcttttttgccagctttgcccttggatggctcatcaccaatggtgcaggtcttgcatcatacccaatagacactgttagaagaagaatgatgatgacctctggtgaagctgtcaagtacaagagctccttggatgcattcacacagatcctcaagaatgagggtgccaagtccttgttcaagggtgccggtgccaacatccttcgtgccgttgccggtgctggtgtgcttgctggttatgacaagttgcaggttcttgtgttcggcaagaagtacccgctctgtggggcttaagttctaatgctgagtcagtactaatatntgtttttagatggcgatg

SEQ ID NO: 264572 - DNA, 446 bp, Glycine max
cccacgcgtccggtgaagctggatcattcctccgcggaatcgatgtgaaccgtttaccttgtgtggttgattgcgaagaggaagcaggtgtttcatctccaaacagcacggtttctagcgtcagtggaaagcgcagcgagagggaaaccaatggagaagaaaacgacacagacagagcttgttccagaggcatcatcagcgacgaagaagatgctgaaacctctagaaagaaacttagactctccaaagatcagtcaattgtcctggaagagagcttcaaagaacacaacactcttaaccccgtaagtaaacgtacacatgccaattaattttttttgtcctgtatcagagacatagtatcctctgatctactggatcatatattaatctcactcacgatgtataggtgcgattgatcatagaaaattttgtacacaatgtgaatc

SEQ ID NO: 264573 - DNA, 299 bp, Glycine max
  unsure (1)..(299): unsure at all n locations
cccacgcgtccgagaaggcctgggcttagttgataagcataactgggtgaggaagaaagagagagagtgaagaagatggcgtcgagcggagcggtaccgttttggagggcggcggggatgacgtacataacatactcaaacatatgcgcgaatctgctcaggaattgcctcaaggaaccctacaaggccgaatccctctctcgtgagaagctccattntgttctctccaaatgggtcgacgccaagcctgaaaaacctactattcgttcagacaccccagagcaatgatctggaatagt

SEQ ID NO: 264574 - DNA, 422 bp, Glycine max
gttgtgtgcaacccattggggaagtctggaggtgccctcatccagcaatttatgatattgacgttttgggtcactagctaattcaaccccatacttgggaggagtgcttctgctgattgtttctgcctggctagcagcggcaaaatccttggatacccaatttactgcattgcgtaaagaggaagaactcgagaaagagatggaacgagcagccgccgtcaagataccagtggtggctgagactgagagtggaaatggttctcttgcaactggttcaccactgaatccatcctcaggtgactcctcaagcagtccatctgaagcctcaactcctcgcaattaaaatgtgccttctttctgtgagaaattgcctcacagaatgagcaaatagagctcttttgagagcagtgttaggtgaaact

SEQ ID NO: 264575 - DNA, 376 bp, Glycine max
gttaatctttccggccttgacctctctaaactggatttatcttatgttgatttcagctatgcttgggttaaaaacgtgtttttttcacgagcaaaccttcaatgtgcaaagtttcgagatgttgatgccgagggctccatctttcacaatgcaactttgcgtgaatgtgaatttactgcggcaaatcttcgtggtgctttattggctggtgcatgccttcagagtgcaaatctacaagatgcttgcttagtagactctagcttctgtggagcagatctgcgtactgcacatctacagaatgcagatcttaccaatgccaatctagagggagccgtcctagaaggagctaatttgaaaggtgcaaaactgaacaaag

SEQ ID NO: 264576 - DNA, 455 bp, Glycine max
aaaaaaggttcatagttgatatctccagcggaacgatgaagtttgaagatttggcagaaggatgcatggcaaaaatactgtcctacaccactcgtgcggatgtatgcaggctttctctggtttccaaagcctttcattccgcggctgaagccaacactgtgtgggattgctttctcccctctgatttgtcctctatcatctccccttcttcttccgttcctccctttcgctctattaaggatctctatctctatctctccgatcgtcccaccatcatcgatcaaggtataaagagttttcaattggagaagcggactgggaacaagtgttacatgctttccgctagagatctgagcattatatggggtgacactactcattattgggagtggacaaccctaccagagtccaggttcgaagaagttgctaggcttcgagctgtgtgttggtttgac

SEQ ID NO: 264577 - DNA, 477 bp, Glycine max
  unsure (1)..(477): unsure at all n locations
ggaattcttcggggtcgatcccacgtcgtcgcgaaaataatggggttgcgttcnnttcttctaaatgtggatcgtgtgtgttgtgaaattttggcattcaaactggcctggtgcagnggggctctgttgccaactccaacgcagggctcatgtggatggtaccaatnnttggccgaatacttatcgtgtcccacattgtgtcctttgatcatcatcnnaaatatttcaatggggtggttcntttgacattcagcttcatncttgaccaagtacccactggtactgnngcttccagtccaaaaggggtcttaacttggtttggtcacttttcagcatgtacccataaagaaatggttcctggagaattcttgctggcacaagtcacttgctttctatttatcnttcccaaatacgcggagcatgatgaagatagaactttgagttctttggggaaacagatcaaggacaacccttaca

SEQ ID NO: 264578 - DNA, 387 bp, Glycine max
cgcaccagtttcaccgcacgaatatcttgttgtttggagcgatccgagaaaaactctgtaagcatgttggtttaccaggacctccttacaggtgatgagcttctctctgactccttccgttacaaggaaattgagaatggaatgctgtgggaagttgaggggaagtgggttgttaaaggagcagttgatgtagacattggtgcaaacccttctgctgagggtggaggagaagatgagggagttgatgatgcagctgttaaggttgttgacattgttgacacattcagacttcaggagcaacccgcattcgataagaagcagtttgttaccttcatgaagaaggttatcaagaatttgactcccaagctcgatgcataacaacaggag

SEQ ID NO: 264579 - DNA, 399 bp, Glycine max
ctcaccattgtgaccgaactaatatcttgctttatttagcgatccgacaaaaactctttaggcaggtttgtttaccaggacctccttactagttataaacttctctctgactactttcattacaatgaaatcgataatagaatgctcttggaagttaagaggaagtgacttgttaaactaacaacatacgtagacacatgtacatactctattactgacgaacattgttatctataattagtggattatgcacttgtattttgtgattaacaggcttgaacagatttacgttatacttacttctcatggcatttacttcacttgggctcgttgtcaaagcatagttttccacccacacatactttgactactggaatcgacagctacttgatggctttc

SEQ ID NO: 264580 - DNA, 310 bp, Glycine max
gaggatttgggattgggaaggcgagggattgcgctgcgtctcttcctcttctctttcgatgcatccctcattcataatcttccaatccaacaacctcagcctcacactcacacatacacacatctgaacgcgtatcgtccctcccatggcttcaaagcgcatcctcaaggagctcaaggacttgcagaaagacccaccaacttcttgcagcgctggtccagtagctgaggacatgttccattggcaagcaacgattatgggtcctgctgatagtccttatgctggaggtgtattcctagtcactattcac

SEQ ID NO: 264581 - DNA, 87 bp, Glycine max
aaggagatatatgtacctaaaacgattagattttgaaagagaatacaaacatataagcttacgtggaattttaaatggatgctaagc

SEQ ID NO: 264582 - DNA, 80 bp, Glycine max
aaaaaaaaaaaaaaaaaaaaaaaaaaaaaaataaaaaaaaaaaaaaaaaaaaaaaaaaaaagggaaaaattaaaaaaaaa

SEQ ID NO: 264583 - DNA, 430 bp, Glycine max
gaggagatatatgtacctaaacgaagagatcttgaaagagaatccaaacatgtgtgcttacgtggcaccttctttggatgctaggcaagacatggtggtggtagaggtaccaaagctagggaaagaggctgcagtaaaggccataaaggagtggggccagccaaagtcaaagattacccacttgatcttctgcaccaccagtggtgttgacatgcctggtgctgattaccaactgaccaaacaattgggccttcgcccctatgtgaagaggtatatgatgtaccaacaaggttgctttgcaggtggcacggttcttcgtttggccaaggatttggctgagaacaacaagggtgcacgtgtgcttgatgtctgttctgagatcactgcagtcacattccgtggaccaagtgacactcaccttgatagtctt

SEQ ID NO: 264584 - DNA, 448 bp, Glycine max
  unsure (1)..(448): unsure at all n locations
gcaaacatgtccaccgcaacaactcacgtgctcgcttatcccttccctacctccggtcacgtgatccctctcttagacttcaccaaaaccctagtctctcgcggcgtccatgtcaccgttctggtcacaccctacaacgaagccttacttccaaaaaactattcccctcttctccaaacgcttctcctccccgaacctcagttcccgaacccgaagcaaaacaggctcgtatccatggtaaccttcatgcggcaccaccactacccgatcattatggactgggcccaggcccagcccattcctcctgcggctattatatcagatttcttcctcggttggacccacctcctcgcacgtgacctccacgtgccgcgcgtagtcttctccccctccggcgccttcgcgctctccgtctnctactccctctggcgcgacgccccccaaaacg

SEQ ID NO: 264585 - DNA, 298 bp, Glycine max
ggctacttttgattgcttgatgaaaacctatggattcctgacaccagaattctggaaggagactcgcttctccaaatctccattccaagagtacacagatctactggcaaaaccaacaggaaagactctaatcttggaggaggaaagggtggatgcttgatttgctagttttgctttatggatgttttaggaactttattactttacatactttggtgggtctgggctttacttttggttttgatagacggtatgtctctgtatgcattttgattgtttccaagttttaattgactgc

SEQ ID NO: 264586 - DNA, 420 bp, Glycine max
ggagattctgatttgttctctcagatctgagcttaccgtcgccggaatccaactcaacctgggtcggattcttgggtatcatcgcatcgccattcgttttagcctctcaataagagattttagttcgcttcaaattcgaggtttgatttgaagttgaaagttggaatagcttaactgttgtgtaaaacaaccaacacacacgagcatgggaagccaagacaacaacgtagaattgtcatccaattcatttctagcttacaaatctgctaaggtgtttgttgctggtcaccggggtcttgttggctcggccattggtcgcaagctcacccaacttgggttcactaatctagtcttgcgctcccatgccgagcttgatctcactcgacaatctgatgttgaagccttctttgcttatgaaaa

SEQ ID NO: 264587 - DNA, 384 bp, Glycine max
cgggccgacccacgcgtgcgcccaggcgttctgtgaagctggatcattccttcgcggaatcgatgtgaaccgttgacctttgatggtttattgcgaagaggaagcaggtgtttcatcttcaaacagcacggtttctagcgtcagtggaaagcgcatcgagagggaaaccaatggataagataacgacacagacagagcttgttccaaaagcatcaatagcgacgaagaagatgctgaaacctctataatgaaacttagactcttcaaagatcattcaattgtcctggaagagagcttcaaagaacacaacactcttaaccctcttagtaaaacttcacatgccaattaattttttctgtcctgtatcataaacatagtattctc

SEQ ID NO: 264588 - DNA, 120 bp, Glycine max
ttttttttctttttttttttttttttttttttttttttttttttctttttttttttttttttctttttttttttattttttttcttttttttttttttttttttattttttttttttttt

SEQ ID NO: 264589 - DNA, 329 bp, Glycine max
cccacgcgtccggtgaagctggatcattccttcgcggaatcgatgtgaaccgtggaccttcgttggttgattgcgaagaggaagcaggtgtttcatctccaaacagcacggtttctagcgtcagtggaaagcgcatcgagagggaaaccaatggagaagaaaacgacacatacagagcttgttccagaggcatcatcagcgacgaagaagatgctgaaacctctataaagaaacttatactctccaaagatcagtcaattggcctggaagaagagcttcaaagaacacaacacttttaaccccgtaagtaaacgtacacatgccaatta

SEQ ID NO: 264590 - DNA, 442 bp, Glycine max
cccacgcgtccgtcaagcattgcatccctcttgatttgtagtttgttttgtgctttagatagaagttctgccaaatcaagaggggttttaagatcatagtgtgtgttttgcaacaatggctaagttctttgctgctatgatcttggcactctttgccatttccatacttcaaacagtggtaatggctgctaatgaacaaggaggccacttgtatgacaacaagagcaaatatggaagtggaagtgtcaagagttaccaatgcccatcacaatgctcgaggagatgtagccagacccaataccacaagccctgcatgtttttctgtcagaagtgctgcaggacatgcctgtgtgtgcccccggggtattatggtaataaagctgtgtgcccttgctacaacaactggaagaccaaggaaagatgacccaagttgccctttttt

SEQ ID NO: 264591 - DNA, 390 bp, Glycine max
aaaaaaggttcatagttgatatctccagcttaacgatgaagtttgaagatctggcacaagggtgcatgtcttaaatactgtcctacaccactcgtgctgatgtatgcatgctctctctggcttccaaagcctttcattccgcggctgaagccaacactgcgtgcgattgcttcctaccctctgatatgtcctctatcatcttcccttcttcttccgttccttcctttcggtctattaaggatctctatctctatctatccgatctgcccaccatcatcaatcaaggtataaatagttatcaattggagaatctgactgggaacatgtgttacatgctctccggtagagatctgagcattatatggggcgacactactcattattgggagt

SEQ ID NO: 264592 - DNA, 353 bp, Glycine max
cccacgcgtccgtccagttcatacttcatcctattattactttccctctttgcattccaaagggccagtgttgatgttgcacagcaaacaccaacaactgtgacagagaatgaaacaacgactgaggtaaccaagattgaggaaactaccccagaacagccagccaccgaggttactgccccagaaacagtcaacgaagaagcaaaagaggaagcagcagttgagactaatgaggcaacagaagttacagaggaagggaaggctgagaaaacagaagaagaagaagaagtgaaagaagagactaaagaaaccgaatcagcaccaatggaagaagagaagcaggaagagaacaa

SEQ ID NO: 264593 - DNA, 407 bp, Glycine max
gaggatttgggattgggaaggcgagggattgcgctgcgtctcttcctcttctcgttcgatgcatccctcattcataatcttccaatccaacaacctcagcctcacactcacacatacacacatctgaacgcgtatcgtccctcccatggcttcaaagcgcatcctcaaggagctcaaggacttgcagaaagacccaccaacttcttgcagcgctggtccagtagctgaggacatgttccattggcaagcaacgattatgggtcctgctgatagtccttatgctggaggtgtattcctagtcactattcactttcctccggattatcctttcaaaccttccaaggttgcctttaggactaaggtgtttcatccgaacatcaacagcaatggtagcatttgtcttgata

SEQ ID NO: 264594 - DNA, 386 bp, Glycine max
tcttgcttcaccactttccgtatccctcagcttcacgacaacaatggatttcacttaccctgcacttgtctccattttccttctcctactacttccttctctgatctcatcacaaatctgccagaaaaactgtggcaaagaaactgtcaagtacccttttggcagtggtcctggttgtggagaccctcgtttccaaccacatgtgacatgtagcaaccaaaagctcacattcaccactcacacaggctcctaccctgttacctcaattgactacaccaaccaagtcatatacatctcagatcccaccatgtcaacatgctcttgcactgtccctagcaaagggcttggccttaactgggatgcaccatttacctttgctgatagca

SEQ ID NO: 264595 - DNA, 403 bp, Glycine max
cgcaccagtttcaccgcacgaatatcttgttgtttggagcgatccgagaaaaactctgtaagcatgttggtttaccaggacctccttacaggtgatgagcttctctctgactccttccgttacaaggaaattgagaatggaatgctgtgggaagttgaggggaagtgggttgttaaaggagcagttgatgtagacattggtgcaaacccttctgctgagggtggaggagaagatgagggagttgatgatgcagctgttaaggttgttgacattgttgacacattcagacttcaggagcaacccgcattcgataagaagcagtttgttacctttatgaagaggtttatcaagaatttgacttccaagctcgatgcagagcaacaggagttgtttaagaagcaca

SEQ ID NO: 264596 - DNA, 420 bp, Glycine max
cgcgtgcgggcggggctgtggcggacgcgccgtcggtgtatgaggagaagacggagttcgacgtggaggggcgatttgtgccgagcaacgctcgaatcgcggtgattaaggcggtgagggcattgacgaacctagcgctgaaggaggcgaaggagttgatcgaagggttgccgaagaagttcaaggaagggatttcaaaggacgaagctgaagatgcgaagaagcaactcgaagaagctggtgccaaggttaccattgcttaaacactgtttagctgcagcatatatgttctgcttcttcttttgttggttgtagttgagttcaccagtacactgtaatttcattttcaatttgtctggatttcaatcttttatttgtaatgaggaaatattagttcttaattgtataattatctttttt

SEQ ID NO: 264597 - DNA, 323 bp, Glycine max
cgcaccagtttcaccgcacgaatatcttgttgtttggagcgatccgagaaaaactctgtaggcatgttggtttaccaggacctccttacaggtgatgagcttctctctgactccttccgttacaaggaaattgagaatggaatgctgtgggaagttgaggggaagtgggttgttaaaggagcagttgatgtagacattggtgcaaacccttctgctgagggtggaggagaagatgagggagttgatgatgcagctgttaaggttgttgacattgttgacacattcagacttcaggagcaacccgcattcgataagaagcagtt

SEQ ID NO: 264598 - DNA, 377 bp, Glycine max
acccacgcgtccgcacctttgttcactcttcttctcttgcggtttgggttttagcgcagcttcttctagatttggtgaatatgggtaaggaaaaggttcacatcagtattgtggtcattggccatgtcgactctgggaaatccactaccactggtcacctgatttacaagcttggaggcattgacaagcgtgttattgagaggtttgagaaggaagctgttgatatgaacaagaggtctttcaagtatgcctgggtgctggacaaacttaaggctgatcgtgaaagatgaatcaccattgatattgctttgtggaagtttgaaacaacaaagtattattgcacagttattgaagcccctggacattaggattttcat

SEQ ID NO: 264599 - DNA, 423 bp, Glycine max
ttctccttctcaatcttataattctatttccttcaccataatacttctcaatcttaagtcagtttcattcaaaagacaatcctaacacatttcccgttcacctcaacatctataatctcaccccaatcaacttctatacctatttacttatccttcaactctaccattctactgttcaacttcatctattttaatattcttttatatctcactatcactacacaactttcattttctaaatccaacccaaacactacccttttttcactttcacaaattcaattttcattctaacaacatatctatctcctatatatcttctatcattcatttataactttctcattatttactccttaacacctattatctcattttcaacaaattcaaccattttttctaaccatatttttttcaaattta

SEQ ID NO: 264600 - DNA, 449 bp, Glycine max
ctctctgctcctagggtttctccttcgagtgagggaaatggctcccaaaccgcctagtgcgggtctgtttgttggactgaacaagggtcacgtcgtcaccaagaaggaattgcccccacgcccctcagatcgtaaggggaaaacaagcaagagggtgcactttgtgaggaacctcataagagaggttgctggttttgcaccctatgaaaagcgtataactgagttgctgaaggttgggaaggataagagggcactgaaggttgcaaagagaaagcttggaacccacaaacgtgcaaagaagaagcgtgaggaaatgtccagtgttctcaggaagatgagggcttgtggtgctggagacaagaagaaataagtcttatttatttactcttttccagaatcactagatggacctgtgtattgatggacgagctttcatattttttgctttg

SEQ ID NO: 264601 - DNA, 319 bp, Glycine max
  unsure (1)..(319): unsure at all n locations
attcccgctggacgcacgcatccnctggatgatcccaacactttctctaactggattcacaggatgctgaaacttgtactggtcagttttgaatatgcgggtgaagcacatgctcacattcctcctcttgaagacgctgatgcatatgctgaaggtatcaagatcgaagaagttgattaaatctgacttaattgcctgttacttttttataaacaatgattgtagaaacaaactttttactatgttttatgttttttgaattttcgaaattttgcaacgctggctatttagatgccgcatgtattaattactttatcgt

SEQ ID NO: 264602 - DNA, 411 bp, Glycine max
ccaattcactctttttcttctcgccctctgccgggggaggagtttgtaacatggctgctctaccaacggcggagcttagtgacgcaaatgcaacacatgtagcaagttgtgatgtgagggtgttgcatccagtgttcaaggtttacggtggggccaccgcgttctccggccccgttgtcaccgtgaaggtgtttgaagacaacgtgttggtgagggagcttcttgagacgaaaggcgaaggaagagtattggttgttgatggaggaggaagcttgaggtgtgcattggtgggagggaatttggcactgattgcacataacatgggttgggctgggattgtggtgaatggctgcatcagagatgtggatgagatcaatgcaagtgatattggcgtcagagccttggcttctc

SEQ ID NO: 264603 - DNA, 475 bp, Glycine max
  unsure (1)..(475): unsure at all n locations
gttcggaattcccgggtggacccacgcgtccgaaaaaatgggttcttcttcttctatgtggacggtgtgtgtgattttggcatcactggcctcggcagcactctgtgccaacccacgcaggccagtggatgtacaatttggccgaaactacgtgcccacatgggcctttgatcacatcaaatatttcaatggtggttctgacattcagcttcatcttgacaagtacactggtactggcttccagtccaaagggtcttacttgtttggtcacttcagcatgtacataaagatggttcctggagattctgctggcacagtcactgctntctatntatctttccaaaacgcggagcatgatgagatagactttgagttcttggggaacaagaacaggacaaccttacattctgcaaacaaatgtgttcaccggaagcaaaggtgatagagagcaaagaatctatctctggtttgatcc

SEQ ID NO: 264604 - DNA, 435 bp, Glycine max
cccacgcgtccgagaaggcctgggcttagttgataagcataactgggtgaggaagaaggaaggatagtgaagaagatggcgtcgagcggagcggtaccgttttggagggcggcggtgatgacgtacataacatactcaaacatatgcgcgaatctgctcaggaattgcctcaaggaaccctacaaggccgaatccctctctcgtgagaagctccattttgttctctccaaatgggtcgacgccaagcctgaaaaacctactattcgttcagacaccccagagcagtgatctggaatagttggaagctataaatgcataaatctttgagatctggaagttcattgtcattttgaacctttctgtgatgtttaattcctatgtttttttctctccatgaaatggaacatgcactggattttgatttgcacggttaat

SEQ ID NO: 264605 - DNA, 417 bp, Glycine max
  unsure (1)..(417): unsure at all n locations
ctgttctactttgagtcttcttgatccttctttttctccttgaactcaaacatggcggatggggtggttctgctagatttctggccaagtccatttgggatgagggtcaggattgcacttgctgaaaagggtatcaaatatgagtacaaagaagaggacttgaggaacaagagtcctcttctcctccaaatgaacccggttcacaagaagattccggttctcatccacaatggcaaacccatttgtgaatccctcattgctgttcagtacattgaggaggtttggaatgacaganatcccttgttgccttctgacctttaccagagagctcangctagattctgggctgattatgttgataagaagatatatgatctttggaaggaggattttgacatcaaaaggtgaagaaaaaga

SEQ ID NO: 264606 - DNA, 440 bp, Glycine max
  unsure (1)..(440): unsure at all n locations
cccacgcgtccgcggacgcgtgggggtttttgtggataagagtgagctataatggcggccaggagaccgggtttaattgctttgtttgatgttgacgggactcttacagctcccaggaaggtggtcacaccggaaatgttgacattcatgcaagaactacgaaaggttgtaacggttggagttgttgggggttctgaccttataaagatatcagagcaacttggcagcacagttaccaatgagtatgattacgtattttctgagaatggtcttgtggctcacaaggaaggaaagctcattggaactcagagcttgaagtcattcttggtgaagaaaagctcaaggagtttattaactttacacttcattatattgctgattnggacatccncattaagaggggaacatttatggagttccngtatgggatgctgaatgtc

SEQ ID NO: 264607 - DNA, 445 bp, Glycine max
gtcatatgctccaagtgcactggtaagggttctaagtctggtgcttcgatgaagtgtgcgtggttgtcaaggaactggtatgaaggtttctataagacatcttggcccgtccatgattcagcagatgcagcatgcttgcaatgaatgcaagggtactggagaaaccatcaacgacagagatcgctgcccacagtgcaagggagaaaaggttgtgcaggagaaaaaagtccttgaagttattgtggaaaagggaatgcagaacgggcagaagattacattccctggcgaagctgatgaagcgccagacacaattactggggatattgtctttgtccttcagcagaaggaacatcccaaattcaaaagaaaggctgaagatctttttgtagagcacattttgtcccttactgaagccttatgtggcttccaaattgtgctgactcac

SEQ ID NO: 264608 - DNA, 461 bp, Glycine max
tccggaattcccgggtcgacccacgcgttcgcccacgcgtccggcgaaaacccccaactccaacctctgttcatcgtctaccgcgctttgttttgaaccagaactatgattaagctttttaaagtaaaggaaaagcagagagaacttgcagaaaatgcaagtggcggaccacctgttaagaagcaaagtgctggagagttgcgtcttcacaaagatataagtgagctgaatctaccaaaatcatgtaccatgcaattccccaatggcaaagatgatctgatgaactttgaagtttcaattcgacctgatgatggatattacttaggtggcacatttttgttttcctttcaagtgtctcccatctatccacacgaagcaccaaaggttaagtgtaagacaaaggtctatcatccaaatattgacttggaaggaaatgtttgtctcaacatcttacgagaaga

SEQ ID NO: 264609 - DNA, 467 bp, Glycine max
  unsure (1)..(467): unsure at all n locations
ttcccggtggagccacgcgtccgctgagttgcaagattcacttcaaattatgcgtttcgctgatcggttcctcatcacatgaaaggacgtcgcagatgatcgcaattccttgattatttccttttgttgatacgcggaatcgcgcacacggtgctggtgtgtgcactgaggtagaaagaagaagattgaattgtaaacagcatgaattaccttcttggagctttcaagcctgcatgtaatgtcttgatcacgtttaatgatgggaagaaccggaagcaggttccgtttaaaaaagaaaatggtcaaatggtcacagtcccacttttccaaagtcaagaaaacattggttggaagattacaatagaaccaatgcaagggaagaagattgatcacaatggtgtaaaagttgagctccttggacagatagagatgtattttgacagangaaatttttatgactttacttc

SEQ ID NO: 264610 - DNA, 432 bp, Glycine max
cttttctactttgagtcttcttgatccttctttttctccttgaactcaaacgtggcagatgaggtggttctgctagatttctggccaagtccatttgggatgagggtcaggattgcacttgctgaaaagggtatcaaatatgagtacaaagaagaggacttgaggaacaagagtcctcttctcctccaaatgaacccggttcacaagaagattccggttctcatccacaatggcaaacccatttgtgaatccctcattgctgttcagtacattgaggaggtttggaatgacagaaatcccttgttgccttctgacccttaccagagagctcatgctagattctgggctgattatgttgataagaagatatatgatcttggaaggaagatttggacatcaaaaggagaagaaaaagaagctgccaagaaggag

SEQ ID NO: 264611 - DNA, 215 bp, Glycine max
attcccttctggacccactcatcctaagaatcaaataaagtactcatttctgtttctaaagcttaataatttctttatgtccgtatcatctataatttcgcagcatcatactaacaaattactcatatcatataataacatttcccattctctctcacaagccaaacatattcttctccttattactcaatctatctccctaattccctttcatc

SEQ ID NO: 264612 - DNA, 436 bp, Glycine max
gcgccatatcgcgtatctttctctgttctattcctacgatggagttttggggtgccgaggttaaggttggtgagtctgttaaggtagatccagccgaattcgaggcatgcatacacctttctcaggctgctcttggtgaggcaaagaaagacaaatcaaatgaaccagttgttctctacttgaaagttggtcaacagaaatttgtcttgggaaccctttccagggagaaaattcctcaaatacctctggaattggttttggaaaaggagtttgagctttcccacaactcaaagaatgccagtgttcatttctgtggatacaaggcattttatgatgctggcgatgatagcgaggaggatgaatttactgatagcgaagaggatgttccattgcttaaagcagagaatggaaaacctgaaacaaaagctgaagagtt

SEQ ID NO: 264613 - DNA, 415 bp, Glycine max
cccacgcgtccgagaaggcctgggcttagttgataagcataactgggtgaggaagagagaaagagagtgaagaagatggcgtcgagcggagcggtaccgttttggagggcggcggggatgacgtacataacatactcaaacatatgcgcgaatctgctcaggaattgcctcaaggaaccctacaaggccgaatccctttctcgtgagaagctccatttggttctctccaaatgggtcgacgccaagcctgaaaaacttactattcgttaaaacacccaaaagcatggacctggattagttggaactcttaaatgcataaatctttgagatctggaagttcattgtcattttgaacctttctgagatgtttaattcctttgtttttttctctccatgaaatggaacatgcactgga

SEQ ID NO: 264614 - DNA, 463 bp, Glycine max
ggaattcccgggtggagcgacgcgtccgctgagttgcaagattcacttcaaattatgcgtttcgctgatcggttcctcatcacatgaaaggtcgtcttagatcatcggaattccttgattatttccttttgttgatacgcggaatcgcgcacacggtgctggtgtgtgcactgaggtagaaagaagaagattgaattgtaaacagcatgaattaccttcttggagctttcaagcctgcatgtaatgtcttgatcacgtttaatgatgggaagaaccggaagcaggttccgtttaaaaaagaaaatggtcaaatggtcacagtcccacttttccaaagtcaagaaaacattggtgggaagattacaatagaaccaatgcaagggaagaagattgatcacaatggtgtaaaagttgagctcttggacagatagagatgtattttgacagatgaaatttttatgac

SEQ ID NO: 264615 - DNA, 388 bp, Glycine max
ccacgcgtccgaccacgcgttcgctgactgaagctagttacaacaagatgctgcaggtgctctacactgcgattttctcctaaatgcttctgcttctcacgctcgtcttcaaaacacccactagagaataactcacacatcgacatccctcgatagtgtcgaaccgcggactcggtcccctggcggcttccaccgtgggcgccacattgatggaggatctcgcttctagcctctacagcatggccaagatccagcaactcaccctcaaggcctccatagtcaaccgcaccgaccaagtcctcatgtccaagcacatgctcgaagcttctctgatgggctttctgctggtcctatctctgatgattcatacattgcaccattacataat

SEQ ID NO: 264616 - DNA, 429 bp, Glycine max
gaccgacgcgtacgcttttctctgaaaaaacatgttgagggttgcagctagaaggctctcttcttctctgtgatcttcttctccgttgcggcccaatcacgccgcttccgcttttctctctcgaaacgacgtcgtcgtcgatgaccgcagatctgctccttcctcccatccccttcttcccttcagaggttatgctactgaatccctgatccacacaaaagaaaacagcattactcctgagattccgccaactgttactgctgttaagaaccctacttctaagattgtctatgatgatcacaaccatgaaagatttcccccaggtgacccaagcaagagggcatttgcctacttcgtacttacaggtggtaggtttgcttatgcctctgtggtccgtctccttgtcctcaagtttgtgctaagcatgtc

SEQ ID NO: 264617 - DNA, 199 bp, Glycine max
cttcttctctggttgattcggatctagagtcttcagtttctcctcgttgttcttcgcgttcctgttttcaatttcgattctttcgttaatttaataagatgtttgggagggcaccgaagaagagcgataatacgaggtactacgaaatcctcggcgtctccaaagacgcttcgcaggatgatctgaaaaaaggcttaca

SEQ ID NO: 264618 - DNA, 274 bp, Glycine max
ttcccgctggacccactcgtcccttcttctctgttgattcggatctattatcttcagtttctcctcgttgttgttcagtttcctgttttcaattgggattctttcgttaatttaataagatgtttgggagggcacctaataataccgataatacgaggtactactaaatcctcggcgtctccaaaaacgcttctcatgatgatctgaacaaggcttacaataaagcctccattaagaatcacccctacaagggcggttatccctataattttaa

SEQ ID NO: 264619 - DNA, 175 bp, Glycine max
ccgtgctaacctcacaatgaggctctataattaagcctcctacgatcaaattaggaatcgtttcaattctaaatcagggggcatctaaaagggaattcttaactacactgaagatgatatggtctccaccaactttatagtcgatagcatatcaagtatttttgattcaaacgct

SEQ ID NO: 264620 - DNA, 376 bp, Glycine max
tttttctcccttttagggtaaaaatatttccatttccatttcctctctctcagtttggaggaatcttaagctatgggaaagtcttacccaaccgtgagcgctgattaccagaaggccgttgagaaggcgaagaagaagctcagaggcttcatcgctgagaagagatgcgctcctctaatgctccgtttggcatggcactctgctggaacttacgacgtgagctcgaagaccggtggtcccttcggaaccataaagcacccctccgaactcgctcacggcgctaacaacggtcttgacatcgctgttaggcttttggagccactcaaagcggagtttcctattttgagctacgccgatttctaccaattggctggcg

SEQ ID NO: 264621 - DNA, 315 bp, Glycine max
  unsure (1)..(315): unsure at all n locations
cccacgcgtncgatgacctacatgctttgataagtccaacaccacaggggacacccctgcccctagctctgttgggaaagtccaagaatgctctactctccactttcttgtttcttgatcaatttgtgtggcttggcagaacaggcatctaccagaataaagagcgcaccgaactaattggccggatatctctttactgttggttgggatcctcggtgtgtgccaccttggttgagcttggggagcttggaagactctctgcatcaatgaagaagttagagaaagatctcaagaacaagaattaatacgatgatg

SEQ ID NO: 264622 - DNA, 382 bp, Glycine max
atcagttcttctttcctcaaccttctttcttcttatatatcgaacatggctaagtatgattcaagtgggaaaagctcttccatgactgctatagccttcctgtttatccttctaatcacttatacaggcacaacagatgcacaatccggggtatgttatggaagacttggcaacaacttaccaacccctcaagaagttgtggccctctacaatcaagccaacattcgcaggatgcgaatctacggtccaagcccagaagtcctcgaagcactaagaagttccaacattgagcttttgctagacattccaaatgacaacctcaaaaacctagcatctagccaagacaatgcaaacaaatgggtgcaagacaacatcaaaaact

SEQ ID NO: 264623 - DNA, 436 bp, Glycine max
cggaattcccgggtcggcccaagcgttcggccacgccttccgtcttaatttaatcctccttttgttcaaacactctttctcatggcatcagggaagaagattaggatcggcatcaacggatttggaaggattggccgtttggtggccagggttgcccttcaaaggaatgatgttgaacttgttgctgtcaacgatcctttcatcaccactgattacatgacatacatgttcaagtacgacaccgttcatggccagtggaagcattttgatgtgaaggtgaaggactctaagacccttctctttggtgagaagcccgtcaccgtttttggaatcaggaaccctgaagaaattccatggggtgaggttggtgctgattatgttgttgagtcaactggtgtattcactgacaaggacaaggctgctgctcacttgaaag

SEQ ID NO: 264624 - DNA, 351 bp, Glycine max
cccacgcgtccgcccacgcgtccgatcaaagtttcacttcagccttatccggtttaggggggcggtttttgacccaacctttgacgtatcgaaaccttaagtttcggatcaggtctgagcaatctggttggtagaacctttggtcttagagagtcaagttttatgtctgaattagacgatcaaattcctactgccttcgatccttttgctgatgcaaatgctgatgactcgggtgctgggtcaaaagagtatgtgcatattcgcgtacagcagcgaaatggaaagaaaagcctgacaaccgttcaaggattgaaaaaagaattcaactattacaagatacttaaagatgtt

SEQ ID NO: 264625 - DNA, 445 bp, Glycine max
cagaattcaaaacccagatgcactccaacatgttctgaggaaagctgaggagtatctgggcgcagtgcctcctgaaactccctactcagaatttgagcacaagttccaggagattggtttggagagagggtggggtgacaacgcagagcgtgttcttgagtcaattcaacttctcttggatcttcttgaggcccctgacccttgcacccttgaaactttccttggaagaattcctatggtcttcaatgttgtcattctttctccccatggttactttgcccaagataatgtcttgggataccctgacactggtggccaagttgtttacattttggatcaagttcgtgctttggaaaacgagatgctccatcgcattaagcaacaaggattggacattgtacctcgtattctcattatcacccgtcttcttcccgatgcaatcgga

SEQ ID NO: 264626 - DNA, 274 bp, Glycine max
cccccaaaataaaaattacctttctttccatatttctccttcaaacgaatgatcttcaacttctcgctttcaacaatcctttcatcaccacttattacatgacatacatgttcaagtaccacacccttcattcccaatttaaacattttaatcttaaccctaacgactctaatacccttctctttcattaaaaccccctcacccttttttaaatcaataaccctcacgaaattccatttcattaaattcctcctcattattttcctccatcaac

SEQ ID NO: 264627 - DNA, 339 bp, Glycine max
  unsure (1)..(339): unsure at all n locations
gttcttaaaaaacctcaatcctcctatcataattcttgttcatggagaaactaattctgctcttattctcaagcagaagctcataanacaatttgctgatcgcaacactaaaattcttactccaaaaaactgtcaatctcttcaaatgtatttcaattcgcagaaaatggcaaaaaccataattaagctgcctcaaaaaacaccaaaatttgatcaaactgtcaataatattcttgtaaaaaaatgcttcacatatcatattatcccagctcatgatctccatgtcttttcacaactatcaacaacaaacattactcaaaagattaccatcccttattc

SEQ ID NO: 264628 - DNA, 382 bp, Glycine max
cattctcctctctgaattcctcttattcatgaatttggagagtattgatatatcaagggaggataaaccagtagccaaggaagatatggagttttctatgattttcattgttagcaacattatgctgcttttcagttcagcatttgccaaaactgctagtcctccctctctgagcccaactccagcaccagccccggcaccagacttcgtgaacctcactgagttactcagtgttgctggtccgtttcacaccttccttggataccttgagtccactaaagtgattgacactttccaaaaccaagccaacaacactgaagaaggaattaccatctttgttcctaaggacagtgccttcaatgctataaagaaaactacccta

SEQ ID NO: 264629 - DNA, 435 bp, Glycine max
gaaaaaaagggcggacccacgcgtccgcattctcctctctgaattcctcttattctttttatttggagagtattgatatatcaaggtggtatatatcaatagccaaggaggatatgcagatttctataattttcattgttagcaacattatgctgcttttcacttcaacatttgccaaaactgctagtcctccctctctgaacccaactccaacaccagccccggcaccaaacttcgtgaacctcactgaattactcagtgttgctggtccgtttcacaccttccttggataccttgagtccactaaagtgattgacacttttcaaaaccaaaccaacaacactgaaaaaagaattaccatctttgttcctaaagacaatgtcttcaatgctataaaaaaaactaccctattcaacctcacctttaaccaactta

SEQ ID NO: 264630 - DNA, 434 bp, Glycine max
  unsure (1)..(434): unsure at all n locations
ggcggcgctgtggcggacgcgccggcggtggttgaggagaagacggagttcgacgtggggagcgangaggtgccgagcaacgctcgaatcgcggggattaaagcggggagggcattgacgaacctaacgctgaaagaagcgaaagaattgatcgaaaggttgccgaaaaagttcaaggaaaggatttcaaaggacgaaacttaagatgcgaaaaaacaactcgaaaaaactggtgccaaaggtaccattggttaaacactggttaactgcaacatatatggtccgcttcttcttttggtgggtggaagtgaagtcaccaagacactggaatttcaattccattttggccggaattcaatcttttatttggtatgaagaaatatgaaggcctaattttaatataatttttttaaatgcggatgacgggtttgttg

SEQ ID NO: 264631 - DNA, 148 bp, Glycine max
gcgtccgctcaggaggagaataaggatgtctcacaggatgttctagcacccaaggcacgggtcacttgcatttcttcccaagaagcgggctgctcttacaagggaaaaagtaaagccattccccaaggataacccatccaaggcaccc

SEQ ID NO: 264632 - DNA, 432 bp, Glycine max
  unsure (1)..(432): unsure at all n locations
ttaaccaaacaaatatcttgtttttttaaccaaaccaaaaaaaactctcttcgcttgtttttttaccaggacctccttacaaataatgagcttctctctgactccttcctttacaaagaaattgataatggaatgctgtaggaagttgacgggaagtcggttattaaactaacagtttatgtaaacattaatgcaaacccttctactaagcgtttaagaaaaaattaagcaattgatcattcatctagaaacgttgttgacattgttgacacattcacacttcantatcaacccccattcgataaaaaacaatttgctaccttcatgaaaaagattatcaaaaattttactccccatctttatgcaaaacaacaagaagtttttaaaaaacacantcacgtaacaactaaataccctctctctaagattaaa

SEQ ID NO: 264633 - DNA, 455 bp, Glycine max
cccacgcgtccgggtggagtcatgacaaagttgattcccagaaacactgttatcccaaccaagaaatctcaggtgttcaccacctatcaggaccagcagactacagtctccattcaggttttcgaaggcgagaggagtctcacaaaggattgccgccttcttgggaaatttgatctgtctggaattcctccagccccaaggggtacgcctcaaattgaagtgaccttcgaagttgatgccaacggcattctaaatgtgaaggcagaagacaagggcactggtaaatcagaaaagatcaccattacaaacgaaaagggacgtcttagccaggaagaaattgagagaatggttcgcgaagcagaggagtttgcagaggaagacaagaaggtgaaagaaaggatcgatgctcgcaacagtcttgaaacctatgtatacaacatgaagaaccagatcag

SEQ ID NO: 264634 - DNA, 358 bp, Glycine max
  unsure (1)..(358): unsure at all n locations
aaaaaaccgggtcggccgacgcgtacgcccacacctacctntgtactcataacaaattttattcccagaaacactgatatcccgccgctgatattttaaatgttcaccacctatcanaaccaccaaactacaatctccattcaacttttcgaaaacgaaatgaatctcacaaaagattacctccttcttatgaaatttgatctttcttgaatttctccaaccccaaagtatacgcctcaaattaaaaccacctttcaaattcattccaactgcattctaaatttgaaagcaaaaaacaatggcacttgttaatcaaaaaatatcaccattacaaacgaaaacctacttcttaaccaac

SEQ ID NO: 264635 - DNA, 354 bp, Glycine max
  unsure (1)..(354): unsure at all n locations
gtccggatcccgggtcgacgagcctccccaacctccgaccctggtgctattgaaccttggcaactttcaactttgttcttttattactgtgaattcnacagttagaccatgttggtgngtgtatttgctctnaaaggttgtttactgcttttgttttctttttctcttcttttttgtnttctttttagctttctttattttttatataatttctttttttttttaattttatctttttcttttctattatttttatttttttatatttttttttgtggttgtttttttttattcattattttttatttttatcacttattttatttctttttcatttttatattttaaattttt

SEQ ID NO: 264636 - DNA, 297 bp, Glycine max
cgcttgatgatcccaacactttcggaacaggtttcacaggatgctgaatcttgtactgagcctgcctgaagatgctggtgaagcagatgctgacatgcctcctcttgaggacgctgatgcagatgctgagggtagcaagatggaagaagttgattaaatctgacttaattgcctgttacgtttttagaaacaatgattggagaaacagcctttctactatagaacatgttttctgaatcctcgaaattttggaacgttggctagttaggcgccgtatgtagtagtttctttatggta

SEQ ID NO: 264637 - DNA, 407 bp, Glycine max
gaatacccgggtcgaccgacgcgtgcgcccacgcgtccgcccacgcgtccggtgattgaagctagttagaacaagatgttgcagctaggctgcactgcgattttctccgaaatgcttttgattctcacgctcgtcttcaaaaccccactgagaaaactcgtcatcgtttccctcgatagtgtgaagcgcggtcgcggtcccgtggtggtttccaccgtgggcgccacattgatggtggttctcgcttcgagcctctacagcatggccaagatccagcaacgcaccctcgaggccggcatagtcaaccccaccgaccaagtcctcatgtccaagcacatgctcgaagcttctctcatggggtttctgctgttcctctctctgatgattgatagattgcaccattacat

SEQ ID NO: 264638 - DNA, 431 bp, Glycine max
cagagtttgagtggacctgtctcagctaccctttaccttggttattcactactcatggccattgcaatcatgttgtcaaccggcaccattggcttccttatgtcattctactttgtgcactacttgttctcatcagtaaagatagattgaggttcttgttgtcattgcatattaactatgaaaaaggttgattgatataacttgatcacattgcatagtacggcaacggatgtttaattcattgtctgattttatattgcgatgggatctggaagttggtcttcttctgccttgttcccaaagtagtgtactcattcaagtattcaactagtgtttgaaatcatgtttcaagtattttgttcaaggttctttaaaaagttgtaattcaaactctcatctcatttcaatactttagaaaaatgatggtagat

SEQ ID NO: 264639 - DNA, 452 bp, Glycine max
  unsure (1)..(452): unsure at all n locations
gggggggaaaggaaaaaaaatgaaaaatataataattttttttttttatanaaaaaataaaacctttcgttttttttaaaaaaaaggtccgcccaccttaaaattttatttttttaaatttttttccattttctaacttaattttttaccattttatcactcttaactcctctttttttttattcttaattattaaaacatctttcccattatattttccctttctctattcttctcttctcctccttcatcttatttacacaatctttttatcttatcttttataatatattttttttttacatttattcctttctccatcttttctttccttatttttttactactcatataatatcccattttattctctctcatatttattttaatttatctcttacttcttttattttcttaatacttctttatctatctatttcaccaattttctt

SEQ ID NO: 264640 - DNA, 501 bp, Glycine max
  unsure (1)..(501): unsure at all n locations
aaaaaaaaattttttttnaaaaaaaaaaaaaaaataaaaaaatttgtttttttttaaaaaaaatgtgttgggccccaaaaaaaaataaaaattttattaaattaaatttactataattcaataaattatagaaaatattactaatatataataatttaattaaatatatttaattttaaattattctttttataaaaatatttttttttatttgtaaaaaaattttaatataataattcgtatttgataaaatactattaatttattttattaataaatttattaattttaattatataaaataaataaaatatatatttaaattaatattttaatattttttataaaaattataattttttattaaatatataatataatattaatttattaaaatataatatttataattatttttctatatttaaaaaaataatatatataaataaatcattttatataaatattttatataaatttaattatatatacttatattaa

SEQ ID NO: 264641 - DNA, 222 bp, Glycine max
aattcccgggtcgacccactcgtccgaaaaaaaaaaaaaaaaaaaaaaaaaaaaaaaataaaaaaaaaaaaaaaaaaaaaaaaaaaaagggaaaatttaaaaaaaaatatgcgtaaataaaaaatattataaaaaaaaaaatttttgtttttaaaaaaaaataaatttaaaaatattataaaaaaaaaaaaaagggcccccctttaaaaacacccaatttta

SEQ ID NO: 264642 - DNA, 299 bp, Glycine max
aatttccgggtcgaccacgcgtccggataactactattgaagaagcaaaacgattctacccactgttcggactcggggccaatgtagcccttattttctctggccggacagtcaaatacttttctaatctgaggcagaatttaggtcctggagttgatggttgggccatctctctgaaagcaatgatgagcatagttgtgggtatggggtttgcaatctggttcctgtactggtgggtgaacaattatgttcctcttcctactcgtagcaagaaagaagaaggagaagcccaaaatggg

SEQ ID NO: 264643 - DNA, 314 bp, Glycine max
cggacgcgtgggttatcctaagtctttgggaatagtgctgcaatggcttcaagtcaggaggaggtgacccttttgggagctactggaagcccatttgtgtgcagggttcatattgccctcaagttgaagggagttcaatacaaatatgtcgaagaaaatttgaggaacaagagtgaactgcttctcaaatccaacccagttcacaagaaggttccagtgtttattcacaatgagaagcccatagcagagtctcttgtgattgttgaatacattgatgagacatggaagaccaaccccatcttgccttctgatcc

SEQ ID NO: 264644 - DNA, 290 bp, Glycine max
ggaattcccgggtcgaccacactcattcgtgcaaattcaatggtaggatctctattgcgacttatgtatgcatgcgatatggcatctaagcgattgtggaacgagcttacagatcagtagacggatccttccacatcttgcactgccagaactgttgctgctgaagacatgatccattggcaagctacaattatggttcctgcagacagtccatatgcaagacgcgtactgatagtgaccattcatagccgtgcagactatacgtttaaggcaaccaacgctgcattcag

SEQ ID NO: 264645 - DNA, 374 bp, Glycine max
acctttcactctcgagtccaaactctccgcctacggtaaatttatgcaagggcatgatcttcttcagcttcctcgattcttttccttgcagcaattgtagctgcttatttctattcatcagaagcagctgtgtccaaaggatcttttgaggacaatttcagcataatgtggtctgaggaccattttactacctctaaagatggacagatctggtatctctcactagacaaagacacaggatgtggatttcaaacaaaacaacgctacagatttgggtggttcagtatgaagctgaagttggtagcaggtgactctgctggtgttgtgacaacttattatatgtgctcagaaaatggtgccggaccagaaagaga

SEQ ID NO: 264646 - DNA, 426 bp, Glycine max
cccacgcgtccgattttaactgtgtgtgtgtgacaaacgtgaaaagtacttttttttatgaggttaactcaactttgctatttataatctactatgcagctgagaagctaaacttgccatacttaagtgcttatctgaattcccttggaaccaattaccggcatggggcaaattttgccactgggggatccaccattaggaagcagaatgaaaccatatttcaatatggaataagtcctttctctcttgacattcagattgtgcaatttaaccagtttaaagcacgcaccaaacaactctatgaagaagccaaggccccacatgaaaagagcaagcttccagtgcctgaggagttctctaaggctctctacacatttgacattggtcaaaatgatctctctggtgggtttaggaagatgaattttg

SEQ ID NO: 264647 - DNA, 453 bp, Glycine max
ctcggtttctgagatctagctgagaaaccctccactctcgagtccaaactctcctcctacgcaaaatggatgcaagggcatcatcttcttcagcttcctcgattcttttccttgcagcaattgtagctgcttatttctattcatcagaagcagctgtgtccaaaggatcttttgaggacaatttcagcataatgtggtctgaggaccattttactacctctaaagatggacagatctggtatctctcactagacaaagacacaggatgtggatttcaaacaaaacaacgctacagatttgggtggttcagtatgaagctgaagttggtagcaggtgactctgctggtgttgtgacagcttattatatgtgctcagaaaatggtgcgggaccagaaagagatgagcttgattttgagtttttggggaacagaacaggagagccttatttgattc

SEQ ID NO: 264648 - DNA, 310 bp, Glycine max
cttttctctgaaaaaacatgttgagggttgcagctagaaggctctcttcttctctctcatcgtcttctccgttgcggcccaatcacgccgcttccgcttttctctctcgaaacgacgtcgtcgtcgatgaccgcagatctgctccttcctcccatccccttcttcccttcagaggttatgctactgaatccctgatccacacagaagataacagcattactcctgagattccgacaactgttactgctgttaagaaccctacttctaagattggctatgatgatcacaaccatgaaagatttcccccaag

SEQ ID NO: 264649 - DNA, 416 bp, Glycine max
tgaagtggaacgacgtcgcagggttggagagtgccaaacaggccttgcaggaggctgtgattttgcctgtaaagttccctcagttctttactgggaaaagacgaccctggagagctttcttgttgtatggacctcctggaacgggaaaatcatatttagccaaggcagttgcaacggaagccgagtccacgtttttcagtggttcttcatcagaccttgtttcaaagtggatgggtgaaagtgaaaagctggtttcaaaccttttcgaaatggctcgagaaagtgccccttctatcatatttattgacgaaattgattccctgtgtggtcagcgtggagaaggcaacgagagtgaagcttcaagacggattaaaacagagcttctggtgcaaatgcaaggtgtaagacacaatgat

SEQ ID NO: 264650 - DNA, 363 bp, Glycine max
ctcaggaggagaataaggatgtctcacaggaagttcgagcacccaaggcacgggtcactgggatttctccccaggaagcgtgctgctcgtcacaggggaaaagtgaaggcattccccaaggatgacccatccaaggcacccaagctcactgcattcttgggttacaaggctggtatgactcacattgttagagaggtcgagaagccaggatcaaagcttcacaagaaggaaacatgtgagcctgttacaattattgagacccctccaatggttattggtggtgttgtgggttatgtgaaaactccccgtggtctccgaacattgaacactgtatgggctcagcacttgagtgaggaactgaaa

SEQ ID NO: 264651 - DNA, 325 bp, Glycine max
tcaagtggaacgacctcgcatgcttgcagagtgccatttacgccttgcccgaagctgtgaggctcccgtgtaagttccctcaggtctttactgggaaaacacgaccctgcagagctttcttgatgtatggaccttctggaacgggaaaatcatatttagccaaggcagtgtcaacggaagccaagtacacgttatgcactgtatcactatcagaacttggttcaaagtggacggcacaaagtgaaaagctggactcaaaccttttcgaaatgactcgagagagtgccccttctatcatacttactgacaaaattgattccctgtg

SEQ ID NO: 264652 - DNA, 298 bp, Glycine max
ggctacttttgattgcttgatgaaaacctatggattcctgacaccagaattctggaaggagactcgcttctccaaatctccattccaagagtacacagatctactggcaaaaccaacaggaaagactctaatcttggaggaggaaagggtggatgcttgatttgctagttttgctttatggatgttttaggaactttattactttacatactttgttggttctgtgctttacttttggttttgatagacggtatgtctctgtatgcattttgattggttccaaagtttaattgactgc

SEQ ID NO: 264653 - DNA, 367 bp, Glycine max
cccacgcgtccgcccacgcgtccggtgattgtatctagttacaacaagatgttgcagctacgctacactgcgattttctccgaaatgcttttgattctcacgctcgtcttcaaaaccccactgagaaaactcgtcatcggttccctcgatagtgtgaagcgcggtcgcggtcccgtggtggattccaccgggggcgccacattgatgcggcttctcgctttgagcctctacagcatgggcaagatccagcaacgcaccctcgaggccggcatattcaaccccaccgaccaagtccctatgtccaagcacatgctcgaagcttctctcatggggtttctgctgatactctctctgatgattgatagat

SEQ ID NO: 264654 - DNA, 80 bp, Glycine max
aaaaaaaaaaaaaaaaaaaaaaaaaaaaaaattaaaaaaaaaaaaaaaaaaaaaaaaaaaaaagaaaaaataaaaaaaaa

SEQ ID NO: 264655 - DNA, 343 bp, Glycine max
cgcgtgcggccggctctagggctgaccctcctgcagagtctgagttttacgacggagttcgacgtactagtccagggggagcttatcaacgctctactcctggtgattaaggcactgagggcattgacgaacctaacgctggacgatgctaccgactagaacgcatggatccctaaacacttcaaggaatggatttcatatgaccaagctgaagatgcgaagaagcaactggcagaatctattgccaatgtctaccattgtttaaacacatgattagctgacagcatctatcgaactgcttattctttagatatttgtacttgatttcagcacttcactgtaa

SEQ ID NO: 264656 - DNA, 337 bp, Glycine max
  unsure (1)..(337): unsure at all n locations
gttgaattcttatgcaaagatttctgtccatcttctctggatgatattgccgagatgagttggccactatgtcaagaatcagctcccacttctcactccatgagattcactagaagtttgagtgggctttcggtcaggaggtctttagttggttcatttgaggagtctcttttatctggccggttcttatctggaaacaatagcaagaaaatcgatggttttcttgctgtgctaagcattactggtgggaaactttctnctaaatctcagaagcttccattctctggtactagcgtggatggagattgctatctactggattatgcatcaatagatc

SEQ ID NO: 264657 - DNA, 433 bp, Glycine max
  unsure (1)..(433): unsure at all n locations
cagagtttgagtggacctgtctcagctaccctttaccttggttattcactactcatggccattgcaatcatgttgtcaaccggcaccattggcttccttatgtcattctactttgtgcactacttgttctcatcagtaaagatagattgaggttcttgttgtcattgcatattaactatgaaaaaggttgattgatataacttgatcacattgcatagtanggcaacggatgtttaattcattgtctgattttatattgcgatgggatctgcagtttgttctccttctgcctgtttcccaaagtagtgtactcattcaagtattcaactagtgtttgagatcatgtttcaagtattttgttcaagtttctttagaaaggttgtatttcaaactctcatctcatttcaatactttagaaaaatgatggtagatt

SEQ ID NO: 264658 - DNA, 463 bp, Glycine max
  unsure (1)..(463): unsure at all n locations
attgaatcaacgtatccaatcatcatcatcacatcacgacgacgacgacgacgcatgattgtggtctttctctgctccaaaaaaactgaatcccaatcgcgaagaaaagaatccctcgcttggatcttgcaacatcgccagagggatccatgatactcctgcagtctcattcaagattcctgctccagaccttgttgaatcgggcccaaaatctcgagaaaggagttgaactggatcaccactgggttgagtttgatgatgttcgatatcatattcaggtgtcaatgaagaatcctcatgttttgttgctatcagtatcgttgcctactccttcttcagaaactatttttgtctgtggacttccttttggagccattgaagcaataaaagctgcatatggtaatcttgtgcanattcttgatcctncaagggatggctntaatctcacattaaaaataaatct

SEQ ID NO: 264659 - DNA, 427 bp, Glycine max
gtccggaattcccgggtcgacccacgcgtgcgctccgcactccgtcttcatcaatttgcatcaccaccgctccaacacaggggaagaggagggagatccttcacgttcagggagggcaatgcgggaaccagatcggttcgaagttctgggaagtggtgtgcgacgagcacggcatagatccgacggggaagtacgtcggaaactcagatctacaactcgagcgcgtgaacgtgtactacaacgaagcttcctgcgggcggtttgtcccacgcgcagtgctgatggacctggagcccggaaccatggacagcgtgcggactgggccgtacgggcagatattccggcccgacaacttcgtgttcgggcagtccggcgcgggcaacaactgtgccaaggggcactacacggagggcgccgagctcatcga

SEQ ID NO: 264660 - DNA, 368 bp, Glycine max
cccacgcgtccgggaagatggtgctttcggaggaggaaatgggtcgtctgtaccgggtaaggaagacggtgatgcaaatgcttcgggacaggggttttctggtgggtgacttcgagatcaacatgtcgaagcatgagttcaagtccaagtacggcgagcacatgaagcgcgaggacctggtcatcaacaagtccaagaaggacaactccggcgaccagatctacgtcttcttccccgacgagcccaaggtcggcgtcaagaccatgaagacctacaccaaccgcatgaactccgaaaacgtctatagagccatcctcgtcacccagaccaacctcacccccttcgcccgcacctgcatcagcgaaatc

SEQ ID NO: 264661 - DNA, 257 bp, Glycine max
atcccaacactttcagttacaggtttcactttatgctgaagcttggactgatcagtgatgtttaaactttcagagcggatgctcacatgcctcctcttgaggactcttatgcatattctgatggtagcaagatggaataagttgattaaatctgacttaattgcctgttacgtttttataaacaatgattggagaaacattctttatactatgttttatgttttttgaattttctaaaattttaaacgttggctatt

SEQ ID NO: 264662 - DNA, 418 bp, Glycine max
  unsure (1)..(418): unsure at all n locations
cccacgcgtccgtcaagcattgcatccctcttgatttgtagtttgttttgtgctttagataagaagttctgccaaatcaagaggggttttaagatcatagtgtgtgttttgcaacaatggctaagttctttgctgctatgatcttggcactctttgccatttccatacttcaaacagtggtaatggctgctaatgaacaaggaggccacttgtatgacaacaagagcaaatatggaagtggaagtgtcaagagttaccaatgcccatcacaatgctcgaggagatgtagccagacccaataccacaagccctgcatgtttttctgtcagaagtgctgcangacatgcctgtgtgtgcccccgggtattatggtaataaagctgtgtgcccttgctacaacactgaaagaccaaggaag

SEQ ID NO: 264663 - DNA, 343 bp, Glycine max
gtcgacccacgcgtgcgcccacgcgttcttacggagtgtcttctgctttgtccaagacagctgcggctccaggcgaaggttttaagttgctcatgcaaaaccacgatgaaatgatcaagagtggtcggttgtctgaaccatacaaaggaattggcgattgtttcactcgaaccatgaaggatgaacgggtgattgctctttggagaggaaacactgctaatgttatcagatacttccctactcaggctctgaattttgcttttaaggattattttaagaggcttttcaacttcaaaaaggataaagatggctactggaaatggtttgcttgcaatttatcatc

SEQ ID NO: 264664 - DNA, 371 bp, Glycine max
cccacgcgtccgcgagcttcagcaatggtgtacgtcaaggctcagaaatcaaaagcctacttgaagagatatcaagtcaagttcaagagaagaagagagggaaaaaccgattaccgtgccaggattcggttgattaatcaggacaagaacaaatataacactccgaaataccgatttgtggttcgctttagcaacaaggacattgttgcacaaataatatctgctagcattgccggcgatttagttcttgctacagcatattcacatgagctgccacgatatggtcttgaagtaggacttacaaattatgcagcagcttattgcactggtctcctgttggcccgaagagtcctcaaaacacttgaaatgga

SEQ ID NO: 264665 - DNA, 338 bp, Glycine max
cgcgtacgcccaggcatccgctagcttcagcaatggtgttcgtctaggctcataaatcaaaagcctactggaatagttatcaagtcaagttcaagagaagaagagagtgaaaaaccgattaccgtgccatgattcggttgattaatcatgacaagaacaaatataacactccgaaataccgatttgtggttcgctttagcaacaatgacattgttgcacaaataatatctgctatcattgccggctatttaattcttgctacagcatattcacatgagctgccactatatggtcttgaagtatgacttacaaattattcaccagcttattgcactggt

SEQ ID NO: 264666 - DNA, 412 bp, Glycine max
gttgccgggctctaccgtggtttcaacatctcatgtgttggaatcatcgtgtatcggggtctgtactttggattgtatgattctgttaaaccagttgtcctcacagggtcattgcaggatagcttttttgccagctttgcccttggatggctcatcaccaatggtgcaggtcttgcatcatacccaatagacactgttagaagaagaatgatgatgacctctggtgaagctgtcaagtacaagagctccttggatgcattcacacagatcctcaagaatgagggtgccaagtccttgttcaagggtgccggtgccaacatcctccgtgccgttgccggtgctggtgtgcttgctggttatgacaagttgcaggttcttgtgttcggcaagaagtacggctctggtggggctt

SEQ ID NO: 264667 - DNA, 249 bp, Glycine max
tccaataccaacataaacctatcaacagttatctcttgtcttaaccatacaaaaaaattttctattatttcactccaaccattaattattaaccagtaattgctcttttcataccaaacacttctaatgttatcatatacttccctactcatactctaaatttttcttttaacaattatttcaacatgcttttcaacttccaaattgataaacatttctactttaaatagcttgctcccaatttaccat

SEQ ID NO: 264668 - DNA, 370 bp, Glycine max
cccacgcgtccgtcaagcattgcatccctcttgatttgtagtttgttttgtgctttagatagaagttctgccaaatcaagaggggttttaagatcatagtgtgtgttttgcaacaatggctaagttctttgctgctatgatcttggcactctttgccatttccatacttcaaacagtggtaatggctgctaatgaacaaggaggccacttgtatgacaacaagagcaaatatggaagtggaagtgtcaagagttaccaatgcccatcacaatgctcgaggagatgtagccagacccaataccacaagccctgcatgtttttctgtcagaagtgctgcaggacatgcctgtgtgtgcccccggggtattat

SEQ ID NO: 264669 - DNA, 340 bp, Glycine max
taattacataaaaaatcatactttcactaggagacgttccaaatcaaaaagggtcataatatcatcatatgtgcacaccaacaataactcagtccttccctgctattaactcttcactctctaccatcttcattcttcaaacaatcaacatccctgctaatcaacaaagaggccacttacctcacaacaataacaaatattgcactttaaatatcaaaaattaccaatgcccatcacaaatctccatgatatgtaaccagacccaataccacaagccctgcatcgttttctgtcaaaagtgctgcaacacattcctttcttttccctcagggtattatcc

SEQ ID NO: 264670 - DNA, 404 bp, Glycine max
  unsure (1)..(404): unsure at all n locations
cccacgcgtccgtcaagcattgcatccctcttgatttgtagtttgttttgtgctttagatagaagttctgccaaatcaagaggggttttaagatcatagtgtgtgttttgcaacaatggctaagttctttgctgctatgatcttggcactctttgccatttccatacttcaaacagtggtaatggctgctaatgaacaaggaggccacttgtatgacaacaagagcaaatatggaagtggaagtgtcaagagttaccaatgcccatcacaatgctcgaggagatgtagccagacccaataccacaagccctgcatgtttttctgtcagaagtgctgcaggacatgcctgtgtgtgcccccggngtattatggtaataaagctgtgtgcccttgctacaacaact

SEQ ID NO: 264671 - DNA, 434 bp, Glycine max
gatttgaagcctgatttgccaagggaagcagaacgaatcaaacagtgcaagggtagggtatgtgcattacaagatgagccagaagttcatagggtatggttgccttttgatgatgcaccaggattagcaatggctagagcatttggagatttttgcttgaaggaatatggtgtgatttctataccagaattttctcatcggctgctaacagacaaagatcagttcattgttcttgcctcagatggggtctgggatgttttgagcaatgaagaggtggttaggatagtatcttcagcgccaactcgatcatcagcagcgaggactctggtggattccgcagctcgtgagtggaaacttaaatatcctacttcaaaaatggatgactgtgcagttgtgtgcctatttttggatggaaaaatggcctcagaatctga

SEQ ID NO: 264672 - DNA, 339 bp, Glycine max
gaaatgtgaaagccttatcatacagtgtttgcaagatgccaaggtagaagttgaagaagtagatgatgtgataattgtaggcggatgttcttacatcccgagggtgaaaaatcttgttactaacgtatgtaaaggcaaggaactttataaaggcatgaatcctttagaagctgctgtttgcggtgcagcagtggaaggagctattgcttcaggcgtcaatgatccctttgggaacttggacttgttaactatccaagctacacctcttgccattgggattcgagctgatgggaacaagtttgtccctgtaattccgagggatactacaatgccagcacg

SEQ ID NO: 264673 - DNA, 439 bp, Glycine max
cggacgcgtggggtaaggaagaaagaagatgagcagcaactcaggaaaagtggtgtgtgtgactggtgcttctggtttcattgcttcatggatcatcaaactgcttctccaacgtggttacactgtcagggccactgttcgcgacccatctaaacccgaaaaggttgatcacttgctcaaacttgatggtgcaaaggagaggctacatctctttaaggcagatctgctggaagaaagttcctttgactctgcttttgagggttgtgatggtgtctttcatactgcttcacccgttcatttcattggtactgatccacagaatcagttaattgatccagcgattaaaggaacccttaacgttgttaaatcatgtgccaaatcgccatctgtgaaacaagttattttaacttcttctggtgcttgccgtttatataatgga

SEQ ID NO: 264674 - DNA, 421 bp, Glycine max
ggcggcgctgtggcggacgcgccggcggtggttgaggagaagacggagttcgacgtggtgatcgaggaggtgccgagcaacgctcgaatcgcggtgattaaggcggtgagggcattgacgaacctagcgctgaaggaggcgaaggagttgatcgaagggttgccgaagaagttcaaggaagggatttcaaaggacgaagctgaagatgcgaagaagcaactcgaagaagctggtgccaaggttaccattgcttaaacactgtttagctgcagcatatatgttctgcttcttcttttgttggttgtagttgagttcaccagtacactgtaatttcatttccattttgtctggatttcaatcttttatttgtaatgaggaaatatgagttcttatttttatattattttttttaatgcgtatg

SEQ ID NO: 264675 - DNA, 400 bp, Glycine max
actctcctattacactttctctttacatttatcatatatcacatcatccttaggtaagttttaaattttagcaaggcttcactacttaatttctacaaatatcaaatatccccctttctcttttattcaaaccatatttcatattttcaccaaattttttttaccaacatttctaatatcacaattcacaaaccccatataataaaatctaaaataaatcctttaaaatttcattttttacaaatacaatttaatcaaaaatttaatcatataatatctatctctttcaatacattattatatgctattttaaactctttcttcttatatttctttcaaaatttctcttttaaaaatatcaaatactttttcacctaatattacatttaataatttttat

SEQ ID NO: 264676 - DNA, 413 bp, Glycine max
  unsure (1)..(413): unsure at all n locations
cccacgcgtccggggcgattcgcggcggagattcgagatccgtggaagaagcagcgcgtgtggctggggacgttcgattccgccgaggatgccgcgcgggcttacgacaaggctgcccgatccttccgcgggcccaaggccaagaccaatttcccctccttccccggcccgacggaccaccactcctcgcagcagattccgccgctctaccaggcccacgggctttccaccaagttcgagcccgcccaggtgaaccggcccaccaccagcggcatgagcagcaccgtggagtccttcagcgggcctagggttcccccctcctgctnctcctctcgcaagccccttgtggttgttaaccctatcatccctctcgacgacgacgacgacgattgccacagcgattgcgactcttc

SEQ ID NO: 264677 - DNA, 340 bp, Glycine max
  unsure (1)..(340): unsure at all n locations
cgaagatgccttcttcgctgattacgctgaggctcaccaaaagctttctgagcttgngtaagtcttgatatttcttacattgataatttataaattcatgattttatgaagcttttctctccgttttacttgacatgttttgcgttgttaattgggtggttctgattcgtgtcatgactgttgcctctcaggtttgctgaagcctaagcaacgttttggggattgttggagaggcacggtgcccataatatttctctcataaattctatggtcatggtttctaatgcgccactgtgggttcctcanatttttagatagctnttgaatgtattttgcttga

SEQ ID NO: 264678 - DNA, 354 bp, Glycine max
ctgagttgcaagattcacttcaaattatgcgtttcgctgatcggttcctcatcacatcaaaggacgtcgcagatcatcgcaattccttgattatttccttttgttgatacgcggaatcgcgcacacggtgctggtgtgtgcactgaggtagaaagaagaagattgaattgtaaacagcatgaattaccttcttggagctttcaagcctgcatgtaatgtcttgatcacgtttaatgatgggaagaaccggaagcaggttccgtttaaaaaagaaaatggtcaaatggtcacagtcccacttttccaaagtcaagaaaacattggtgggaagattacaatagaaccaatgcaagg

SEQ ID NO: 264679 - DNA, 326 bp, Glycine max
cccacgcgtccggactgcccaagatgtatcgacaatgttacggtgcgggcaaaaaaccatcatctttgtgatcaacaatggtggatacaccatcgaggttgaaattcatgatgggccgtacaatgtgattaagaactggaattacactgggttgattgatgcaatccacaatggtgaagggaaatgctggactgccaaggtgttctgtgaagaggagctagttgaagcaattgccacagccacaggacccaagaaagactccttatgcttcattgaggtgattgttcataaggatgacaccagtaaagaattgcttgaatggggct

SEQ ID NO: 264680 - DNA, 377 bp, Glycine max
atttgaaggttgttttgtgcttatagataaaagttctgccaaatcaagaggggttttcagagcatagggtgtgtgtgtgtgttaaacaatggctaagttctttgctgctatgatcttggcactcattgccatttccatgcttcaaacagtggttatggctgctaatgagcaaggaggccacttgtatgacaacaagagcaaatatggaagtgggagtgtcaagagataccaatgcccatcacaatgctcgaggagatgtagccagacccaataccacaagccctgcatgtttttctgtcagaagtgctgcaggaaatgcctgtgtgtgcccccggggtattatggtaataaagctgtgtgcccttgctacaacaact

SEQ ID NO: 264681 - DNA, 200 bp, Glycine max
acttcccaatatttatctttaattttactgtgcgggcaaaaaaccattggcttgtttatacatcaatggtgggtacaccatctatgtttaaattcattatttgccctacaatgttattaataactttaattacacttttttgattgattcaatccacaatttttaatgtaaattcttgactttcaaagtttttttttaat

SEQ ID NO: 264682 - DNA, 409 bp, Glycine max
ttttatctttattccactgaatagaacatgagcatataaatggataccctttatattatctggcttgatattatctatagagggtaaagatatccgatgtgaatctatttgtttagttttctatcggtatgtatataggtgaataatccaacatgcctttttgtgaagtaaaaaaactaccctcgatccatgcctcaaaagggttgataataagtaaaaaaaatcaatgaattcatgataaaacccttctgcgtttttttattataaatttttttgtcaataaagggatcaaggggttgggggatcaaatggtaaagttcttttgttggtaaattggaggattagaaacatgactattgctttccaattagctcgttttgcattaattgctatttcatttattttattg

SEQ ID NO: 264683 - DNA, 429 bp, Glycine max
  unsure (1)..(429): unsure at all n locations
cagagtttgagtggacctgtctcagctaccctttaccttggttattcactactcatggccagtgcaatcatgttgtcaaccggcaccattggcttccttatgtcattctactttgtgcactacttgttctcatcagtaaagatagattgaggttcttgttgtcattgcatattaactatgaaaaaggttgattgatataacttgatcacattgcatagtagggcaacggatgtttaattcattgtctgattttatattgcgatgggatctgcagtttgttctccttctgcctgtttcccaaagtagtgtactcattcaagtattcaactagtgtttgagatcatgtttcaagtattttgttcaagtttcttaagagggtgtaatcaaactcttatctcatttcaatactttagaanaattgtgttggat

SEQ ID NO: 264684 - DNA, 351 bp, Glycine max
cagagtttgagtggacctgtctcagctaccctttaccttggttattcactactcatggccattgcaatcatgttgtcaaccggcaccattggcttccttatgtcattctactttgtgcactacttgttctcatcagtaaagatagattgaggttcttgttgtcattgcatattaactatgaaaaaggttgattgatataacttgatcacattgcatagtagggcaacggatgtttaattcattgtctgattttatattgcgatgggatctgcagtttgttctccttctgcctgtttcccaaagtagtgtactcattcaagtattcaactagtgtttgagatcatgtttcaa

SEQ ID NO: 264685 - DNA, 391 bp, Glycine max
cgcgtcgctgctccgtaccagtttcactgcataaatttgagagaaaactctgcaaacatgtgggtttatcaggacctccttacaggtgatgagcttctctcggactccttccgttacaatgaaattgagaatggaatgctgtgggaagttgaggggaagtgggttgttaagggagcagttgatgttgacattggtgcaaacccttctgctgagggtggagaagatgagggagtcgatgacgcatctgttaaggttgttgacattgttgatacattcagacttcaggagcaacccgcttttgataagaaacagtttgttaccttcatgaagaggtttatcaagaatttgactcccaagctcgatgcataagaatcaagagttgtttaagaag

SEQ ID NO: 264686 - DNA, 114 bp, Glycine max; identical to SEQ ID NO: 262864

SEQ ID NO: 264687 - DNA, 434 bp, Glycine max
  unsure (1)..(434): unsure at all n locations
ggcggcgctgtggcggacgcgccggcggtgtgttgaggagaagacggagttcgacgtggtgagcgaggaggtgccgagcaacgctcgaatcgcggtgattaaggcggtgagggcattgacgaacctagcgctgaaggaggcgaaggagttgatcgaagggttgccgaagaagttcaaggaagggatttcaaaggacgaagctgaagatgcgaagaagcaactcgaagaagctggtgccaaggttaccattgcttaaacactgtttagctgcagcatatatgttctgcttcttcttttgttggttgtagttgagttcaccagtacactgtaatttcatttccattttgtctggatttcaatcttttatttgtaatgaggaaatatgagttcttattnttatattattttttttaatgcgtatgangtgtttgttg

SEQ ID NO: 264688 - DNA, 420 bp, Glycine max
gaaaaacaagagcaaattgggatcgaagaatttgaagaacaccacaagcaagatgcatgttggtgtggtgctcaacacgcaatcctactgcagaggcctagaacctccttcatcttctccttccgtcgtttccaacaagggaacaaggactttgagtttcaggaggctgctgctgcgtccttctcttgggattcatttatcgcgtagctttgctttaaagtgtgttgttactccgaacccagctgtggaattgccattaactgctgaaaatgtagaaagtgtattggatgaaattcgaccctatctcattgcagacggtgggaatgtggctttacatcaaattgatggcaatgttgtgcgcttgaagctacagggcgcatgtggttcctgtccaagttctgttaccaccatgaaaatggg

SEQ ID NO: 264689 - DNA, 339 bp, Glycine max
cgcggggctgctccgtaccagtgtcactgctttaatttgagagaaaactctgcaaacatgtgtgtgtgtcatgacctccttacaggtgatgagcttctctcggactccttccgttacaatgaaattgagaatggaatgctgtgggaagttgaggggaagtgggttgttaagggagcagttgatgttgacattggtgcaaacccttctgctgagggtggagaagatgagggagtcgatgacgcagctgttaaggttgttgacattgttgatacattcagacttcaggagcaacccgcttttgataagaaacagtttgttaccttcatgaagaggtttatc

SEQ ID NO: 264690 - DNA, 330 bp, Glycine max
tcttctgagagaacactaagtcaagtttcatttgatatatatgctgctcaatgcaaaaattgcttgaaatggagagagattgatacacaggaagagtatgaagagatttgaagtaaagttgctgatgaaccttttctttgcagcataaaggctaatagttcctgtgatgaacctggtgatattaaatatgattcctctcggacatgggtgattgacaagcctaacctgccaaagactccacatggttttaagaagagcttggtgcttaaaaaagattacttcaaattggactcttactacattacacctgcaggcttaaaactgtaaacc

SEQ ID NO: 264691 - DNA, 421 bp, Glycine max
cccacgcgtccgagaaggcctgggcttagttgataagcataactgggtgaggaagaaagaaagagagtgaagaagatggcgtcgagcggagcggtaccgttttggagggcggcggggatgacgtacataacatactcaaacatatgcgcgaatctgctcaggaattgcctcaaggaaccctacaaggccgaatccctctctcgtgagaagctccattttgttctctccaaatgggtcgacgccaagcctgaaaaacctactattcgttcagacaccccagagcagtgatctggaatagttggaagctataaatgcataaatctttgagatctggaagttcattgtcattttgaacctttctgtgatgtttaattcctttggttttttctctccatgaaaggaacatgcactggaatttgat

SEQ ID NO: 264692 - DNA, 410 bp, Glycine max
cccacgcgtccgggcggagtgtcggcggctgtgtccaagacagctgcggctccagtcgaacgagttaagttgctcatccaaaaccaggatgaaatgatcaagagtggtcggttgtctgaaccatacaaaggaattggcgattgtttcactcgaaccatgaaggatgaaggggtgattgctctttggagaggaaacactgctaatgttatcagatacttccttactcaggctctgaattttgcttttaaggattatttcaagaggcttttcaacttcaaaaaggataaagatggctactggaaatggtttgctgggaatttagcatctgggggggctgctggggcttcctccctcttgtttggctattctttggactatgcccgaacacgtttagcaaatgatgcaaaggc

SEQ ID NO: 264693 - DNA, 356 bp, Glycine max
ttttatctttattccactgaatagaacatgagcatataaatggataccctttatattatctagctttatattatctataaagggtaaagatatccgatgtgaatctatttgtttagttttctatcggtatgtatataggtgaataatccaacatgcctttttgtgaagtaaaaaaactaccctcgatccatgcctcaaaagggttgataataagtaaaaaaaatcaatgaattcatgataaaacccttctgcgtttttttattataaatttttttgtcaataaagggatcaaggggttgggggatcaaatggtaaagttcttttgttggtaaattggaggattagaaacatgacta

SEQ ID NO: 264694 - DNA, 415 bp, Glycine max
  unsure (1)..(415): unsure at all n locations
cttttctctgaaaaaacatgttgagggttgctgctagaaggctctcttcttctctctcatcgtcttctccgttgcggcccaatcacgccgcttccgcttttctctctcgaaacgacgtcgtcgtcgatgaccgcagatctgctccttcctcccatccccttcttcccttcagaggttatgctactgaatccctgatccacacaaaagaaaacagcattactcctgagattccgccaactgttactgctgttaagaaccctacttctaagattgtctatgatgatcacaaccatgaaagatttcccccaggtgacccaagcaagagggcatttgcctacttcgtacttacaggtggtaggtttgcttatgcctctgtggtccgtctncttgtcctcaagtttgtgctaagcatgtc

SEQ ID NO: 264695 - DNA, 338 bp, Glycine max
cttttctctgaaaaaacatgtagagggttgctgctagaaagctctcttcttctctgtgatagtcttctccgttgcggcccaatcacgccgcttccgcttttctctctcgaaacgactacctcgtcgatgaccgcagatctgctccttcctcccatccccttcttcccttcacaggttatgctactgaatccctgatccacactaatgaaaacagcattactcctgagattccatcaactgctactgctgttaagaaccctacttctaagattgtctatgatgatcacaaccatgaaagatctcccccaggtgacccaagcaagatggcatttgcctac

SEQ ID NO: 264696 - DNA, 376 bp, Glycine max
ctttggtctgagaaaacatgttgagggttgttgctataaggctctcttcttctctctcatcgtcttggccgttgcggcccaatcacgccgcttccgcttttctctctcgaaacgacgtcgtcgtcgatgaccgcagatctgctccttcctcccatccccttcttcccttcagaggttatgctactgaatccctgatccacacacaagaaaacagcattactcctgagattccgccaactgttactgctgctaagaaccctacttctaagattgtctatgatgatcacaaccatgaaagatttcccccaggtgacccatgcaagagggcatttgcctacttcgtacttacaggtgggaggtttgcttatgcctctgt

SEQ ID NO: 264697 - DNA, 371 bp, Glycine max
aattcccgggtcgacgcacgcgtccgctttgctctgaaaaaacatgttgatgtttgtttctagaaggctctcttcttctctagcatagtcttctccgttgcggcccaatcacgccgcttccgcttttctctctcgaaacgacgtcgtcgtcgatgaccgcagatctgctccttcctcccatccccttcttcccttcagaggttatgctactgaatccctgatccacacaaaagaaaacagcattactcctgagattccgccaactgttactgctgttaagaaccctacttctaagattggctatgatgatcacaaccatgaaagatttcccccatgtgacccaagcaagatggcatttgcctacttcgtac

SEQ ID NO: 264698 - DNA, 312 bp, Glycine max
cccacgcgtccgccacgcgtccggtttctggtggaggatccaacttcagagcaattcatgaggcctccaaaaggggatcacttcatggagatgttcttgtgttggtcacaaataaaagtgattgtggaggtgcggagtatgcaagaaataatggtatcccagttatactgtaccatatatcaaaggatgaatctaatccaagtgaccttggtgatacactaaggaaatttgaggttgattttattcttttagctggataccttaaacttataccagtggaattgatccgagcttacaaaagatctatattca

SEQ ID NO: 264699 - DNA, 313 bp, Glycine max
cccacgcgtccgcccacgcgtccgcactttctctctctataactctttctcacccgctagggtttccttttcatcgcatcttgagtttgcaacctcgtcttgtgatttccatggagggtgctgggatggaagagaataatattattaatgatgatgataataataacaagtctgaggcgcatttgacttctgccgctgcttttgtggagggtggaattcaggacgcttgtgatgatgcttgcagtatatgccttgaagctttctgtgatagtgatcctttcacggtgacgagctgcaagcatgagtttcatct

SEQ ID NO: 264700 - DNA, 361 bp, Glycine max
cccacgcgtccgagaaggcctgggcttagttgataagcataactgggtgaggaagaaagagagagagtgaagaagatggcgtcgagcggagcggtaccgttttggagggcggcggggatgacgtacataacatactcaaacatatgcgcgaatctgctcaggaattgcctcaaggaaccctacaaggccgaatccctctctcgtgagaagctccattttgttctctccaaatgggtcgacgccaagcctgaaaaacctactattcgttcagacaccccagagcagtgatctggaatagttggaagctataaatgcataaatctttgagatctggaagttcattgtcattttgaacctttct

SEQ ID NO: 264701 - DNA, 408 bp, Glycine max
  unsure (1)..(408): unsure at all n locations
ctacctctcaagtttttgaagtatagagatggcagagacattcctatttacctcagagtcagtgaacgagggacaccctgacaagctctgtgaccaaatctctgatgctgtcctcgacgcttgcctcgaacaggacccagacagcaaggttgcctgcgaaacatgcaccaaaaccaacttggtcatggtcttcggagaaatcacgaccaaggccaatgttgactacgagaagatagtgcgtgacacctgcaggaacatcggctttgtctcaaacgatgtgggactggatgccgacaactgcaaggtcctcgtcaacattgagcagcagagccctgatattgctcaaggtgtacacggncacctnaccaaaaaacctgaagaaattggtgctggtgaccagggtcacat

SEQ ID NO: 264702 - DNA, 318 bp, Glycine max
ctacgtctcaagtttttgaagtatagagatttcagttacattcctatttacctcagagtcggagaaggagggacaccctgacaggctctgtgaccaaatctctgatgctgtcctcgacgcttgcctcgaacaggacccagacagcaaggttgcctgcgaaacatgcaccaaaaccaacttggtcatggtcttcggagaaatcacgaccaaagccaatgttgactaccagaagatagtgcgtgacacctgcaggaacatcggctttgtctcaaacgatgtgggactggatgccgacaactgcaaagtccttgtcaacat

SEQ ID NO: 264703 - DNA, 425 bp, Glycine max
tttgaatacattccttgtagtttatactgaaatgatgggtttgaagatggcgttactgatcctaggcctttccctcatgctccttttggtctcctctgaggtggcatccacgaatacaaaagaggaggcaaatggagtggatgatgccaaatatcccggtggaagctatggagggggttacccaggtcatggcggtggcggttatcctggccatggcggtggcggttatcctggccatggcggtggtggtggctatcctggtcatggtggtggccaccctggtcatggtggcggctaccctggccgtggtggtggatactgtaggcatggctgttgcggtggccggacatacaacggaggttgcagaaagtgctgctattacgctggcgaagctgttgctgcacaaactcaagataggactcacg

SEQ ID NO: 264704 - DNA, 370 bp, Glycine max
cgcaagatcctgtttcctgatacactgaggctcacttaaagctttctgagcttgggtaaggctttgtatttcttacattgataatttataaattcatgattttatgaaacttttctctccgttttacttgacatgttttgcgttgttaattgggtggttctgattcgtgtcatgactgttgcctctcaggtttgctgaagcctaagcaacgttttggggattgttggaaaggcaccgtgcccataatatttctctcataaattctatggtcatggtttctaatgcgccactgtgggttcctcaaatttttagatagctcttgaatgtattttgctggacatggtgatgatgatttgagtttgggttgttt

SEQ ID NO: 264705 - DNA, 404 bp, Glycine max
caagatcctgtttccttatactcttatctcactaaaactttctagcttgctaaggcttgggtttacttacattgatatttatcaattcatgattttatgaagcttttctctccgttttacttgacatgttttgcgttgttaattgggtggttctgattcgtgtcatgactgttgcctctcaggtttgctgaagcctaagcaacgttttggggattgttggaaaagcacggtgcccataatatttctctcataaattctatggtcatggtttctaattgcccactagtggttccttcaaattttaaaatatcttttgaatttatttttgcttcacaattgtgatgattaatttgagttgggttcgttttaatttgagtctatccttttgttaaataacaattttt

SEQ ID NO: 264706 - DNA, 440 bp, Glycine max
  unsure (1)..(440): unsure at all n locations
ctacctctcaagtttttgaagtatagagatggcagagacattcctatttacctcagagtcagtgaacgagggacaccctgacaagctctgtgaccaaatctctgatgctgtcctcgacgcttgcctcgaacaggacccagacagcaaggttgcctgcgaaacatgcaccaaaaccaacttggtcatggtcttcggagaaatcacgaccaaggccaatgttgactacgagaagatagtgcgtgacacctgcaggaacatcggctttgtctcaaacgatgtgngactggatgccgacaactgcaaggtcctcgtcaacattgagcagcagagccctgatattgctcanggtgtacacgggcacctnacccaaaaaacctgaagaaattggtgctggtgaccagngtcacatgtttggctatgccactgatgaaacccctgaa

SEQ ID NO: 264707 - DNA, 307 bp, Glycine max
ctttgctctgaaaaaacatgttgagggttgctgctagaaggctctcttcttctctgtcatcgtcttctccgttgcggcccaatcacgccgcttccgcttttctctctcgaaacgacgtcgtcgtcgatgaccgcagatctgctccttcctcccatccccttcttcccttcagaggttatgctactgaatccctgatccacacaaaagaaaacagcattactcctgagattccgccaactgttactgctgttaagaaccctacttctaagattgtctatgatgatcacaaccatgaaagatttccccc

SEQ ID NO: 264708 - DNA, 281 bp, Glycine max
ctcaggaggagaataaggatgtctcacaggaatgttcgagcacccaaggcacgggtcactgggatttctccccaggaagcgtgctgctcgtcacaggggaaaagtgaaggcattccccaaggatgacccatccaaggcacccaagctcactgcattcttgggttacaaggctggtatgactcacattgttagagaggtcgagaagccaggatcaaagcttcacaagaaggaaacatgtgagcctgttacaattattgagacccctccaatggttattggtg

SEQ ID NO: 264709 - DNA, 452 bp, Glycine max
  unsure (1)..(452): unsure at all n locations
tttgaatacattccttgtagtttatactgaatgatgggtttgaagatggcgttactgatcctaggcctttccctcatgctccttttggtctcctctgaggtggcatccacgaatacaaaagaggaggcaaatggagtggatgatgccaaatatcccggtggaagctatggagggggttacccaggtcatggcggtggcggttatcctggccatggcggtggcggttatcctggccatggcggtggtggtggctatcctggtcatggtggtggccaccctggtcatggtggcggctaccctggccgtggtggtggatactgtaggcatggctgttgcggtggccggacatacaacggaggttgcagaaggtgctgctataacgctggcgaagctgntgctgcacaaactcaagataagactcacgattaagacggatgcagtctacttaatta

SEQ ID NO: 264710 - DNA, 396 bp, Glycine max
cggacgcgtgggcggacgcgtgggttatcatccgcagctgcttttattcgcaccgcaaacggtgagccatggccgtcggaaagaacaagcgcatctccaaggggaagaagggtggcaagaagaaggcagctgatccctttgccaagaaggattggtatgacattaaggctccttctgtttttcaagtgaaaaatgttggcaaaaccctcgtctctcgtactcagggtaccaagattgcttctgaaggactcaagcatagagtgtttgaggtctccttggctgatcttcaaggggatgaggatcatgcattcaagaagattaggttgagagctgaagatgtgcaagggaagaatgttctgacaaatttctggggaatggatttcacaacagacaagc

SEQ ID NO: 264711 - DNA, 290 bp, Glycine max
  unsure (1)..(290): unsure at all n locations
atggaacactttcggtaacaggtttcacttgatgctgaagcttggactgagcagttnatagtagatgctggtgaagcagatgctgacatgcctcctcttgaggacgctgatgcagatgctgagggtagcaagatggaagaagttgattaaatctgacttaattgcctgttacgtttttagaaacaatgattggagaaacagtctttttactatgttttatgttttttgaattttcgaaattttggaacgttggctagttaggtgccgtatgtagtagtttctttatggta

SEQ ID NO: 264712 - DNA, 407 bp, Glycine max
gttcgacccacgcgtacgcccacgcgtacgggttcttttcatggttgatgccatttatgaatatgctgttggccagctggaggagtttgagggcaagaagcttgtctctgccaccaaggagggtctcaaacttgacgagagtgaagatgagaagaagaagcaagaggagttgaaggagaagtttgacaacctatgcaaggtgatcaaggatgttttgggtgacaaggttgagaaggttgtagtctctgaccgtgttgttgattcaccatgctgtctggtgactggagaatacggttggactgcaaacatggaaaggatcatgaaagctcaagccctaagggacaacagcatggcaggatacatgtcaagcaggaagacaatggagatcaaccctgagaacccaatta

SEQ ID NO: 264713 - DNA, 296 bp, Glycine max
cttgatgatcgcaacactttcggtaacaggtttcacaggatgctgaagcttggactgagcgttgatgaagatgctggtgaagcagatgctgacatgcctcctcttgaggacgctgatgcagatgctgagggtagcaagatggaagaagttgattaaatctgacttaattgcctgttacgtttttagaaacaatgattggagaaacagtctttttactatggtttatggtttttgaattttcgaaatattggaacgttggctagttaagtgccctatgtaagaggttctttatgggt

SEQ ID NO: 264714 - DNA, 321 bp, Glycine max
  unsure (1)..(321): unsure at all n locations
cgcgtccggattttctggcgtaaccaaccctgacactccttcttcttcgcttcctcttcgatcatcgcttganaaggccgccgaagttcgacccctcccagatcgtcgacgtcttcgtacgcgtcaccggcggtgaggtcggcgcggcgagttccctcgccccgaagatcggtcccctcggtctctcccccaagaagatcggagaagatatcgccaaggaaaccgccaaggactggaagggcctccgcgtcaccgtcaagctcaccgtgcagaaccgtcaggccaaggtcacggtggtcccatccgncgncgcgctcgtca

SEQ ID NO: 264715 - DNA, 425 bp, Glycine max
  unsure (1)..(425): unsure at all n locations
gcaagtgtaacccaaaaccctagcggcgcctgctttcttcgttcgtcttttgcatcagccatgangatggagtctcaggtgaagcatgctcttgttgtcaaagttatgggtcgtactggatccagaggacaggtgactcangttagagtgaagtttttggatgatcagaaccgtcatatcatgaggaatgttaaaggaccagtgagagaaagagacattctcaccctactcgagtctgaaagggaagcaagaaagttgcgctagagggtatntttttcttgatctttatggtagttagttggtgctaaaggttatagcaccctgtcttggtgtcttggatctattttcattcaaattatgggttgaatttttggaatgttggagtttaatatatgattttgaattatggccttaaaatttggaat

SEQ ID NO: 264716 - DNA, 424 bp, Glycine max
cattttctggcgtaaccaaccctgacactccttcttcttcgatgcctaactgggtgaggaagaaagggagagagtgaagaagatggcttccagctgcacgacaccgttttgcacggcggcggggatgacgtacataacatactcaaacatatgcgcgaatctgctcaggaattgcctcaaggaaccctacaaggccgaatccctctctcgtgagaagctccattttgttctctccaaatgggtcgacgccaagcctgaaaaacctactattcgttcagacaccccagagcagtgatctggaatagttggaagctataaatgcataaatctttgagatctggaagttcattgtcattttgaacctttctgtgatggttaattctttgtttttttctcttcatgaaatggaacatgcactggattt

SEQ ID NO: 264717 - DNA, 390 bp, Glycine max
  unsure (1)..(390): unsure at all n locations
attccggggtcgacccacgcgtgcgtccacgcgtncgtcaagcattgcattcctcttgattagtagtttgatttgtgcttgagatgggagttctgccaaatcaagaggggttttaagatcatagtgtgtgttttgcaacaatggctaagttctttgctgctatgatcttggcactctttgccatttccatacttcaaacagtggtaatggctgctaatgaacaaggaggccacttgtatgacaacatgagcaaatatggaagtggaagtgtcaagagttaccaatgcccatcacaatgctcgaggagatgtacccagactcagtaccacaagccctgcatgtttatccttcagaagtgctgcaggacatgcctgtgtgtccccccgggta

SEQ ID NO: 264718 - DNA, 428 bp, Glycine max
atttccggtcgacccacgcgttcgatgaaatcagagtgaggtttgacatgccggttcttgtcaaggaagatgttaaggtatcaggggagggtgatatgcttgttataaaaggtggccacaaaagtgaacaagaacatggtggagatgattcttggtcaagcaggacctatagttcctatgatacccgtttaaagctgccggataattgcgagaaggacaaggttaaggcagagttgaaaaatggtgtgctttatatcaccattcctaagaccaaggttgaacgtaaggttattgatgtccaagttcagtgagatatgcttgggctttgtattatgcaacacgggtttttaccatgtttttacgtttttaacatatatacacccattattaaggttaaatattttgtattaagcgtagagaagtttaaa

SEQ ID NO: 264719 - DNA, 328 bp, Glycine max
cccacgcgtccgtcaaaattcttctgcctttccctactaattctttctctcaaccgatttggctgaaggaggtgtttggccaatgacgagtggttttggtgaatcaacgagagcgtctgcaccgagcccatcatgctcggggaacagttcaaacgatgccggtgattttgaatgcaacatatgcttcgatttggcgcaagaccctgtgatcacactctgtggtcacctattctgttggccatgcctttataggtggctccaccattactcccattctcaggaatgcccctgtttgcaaggccctttgtcatgaaagagaaattgggtt

SEQ ID NO: 264720 - DNA, 345 bp, Glycine max
cgaagtggaacgacgtctcagggttggagtatcgccaaacaggccttgcaggagggggtgagtttgcctgtaaagttccctcagttctttactgggaaaagacgaccctggagagctttcttgttgtatggacctcctggaacgggaaaatcatatttagccaaggcagttgcaacggaagccgagtccacgtttttcagcgtttcttcatcagaccttgtttcaaagtggatgggtgaaagtgaaaagctggtttcaaaccttttcgaaatggctcgagaaagtgccccttctatcatatttattgacgaaattgattccctgtgtggtcagcgtggagaaagc

SEQ ID NO: 264721 - DNA, 314 bp, Glycine max
cccacgcgtccgcggacgcgtgggggtttttgtggattatagcgagctataatggctgcggggatagggggtttaattgctgggtttgatgttgactggactcttacagctcccaggaaggtggtcacaccggaaatgttgacattcatgcaagaactacgaaaggttgtaacggttggagttgttgggggttctgaccttataaagatatcagagcaacttggcagcacagttaccaatgagtatgattacgtattttctgagaatggtcttgtggctcacaaggaatgaaagctcattggaactcagaactt

SEQ ID NO: 264722 - DNA, 373 bp, Glycine max
  unsure (1)..(373): unsure at all n locations
cccacgcgtccgcggacgcgtgggggtttttgtggataagagtgagctataatggctgccggganagcgggtttaattgctttgtttgatgttgacgggactcttacagctcccaggaaggtggtcacaccggaaatgttgacattcatgcaagaactacgaaaggttgtaacggttggagttgttgggggttctgaccttataaagatatcagagcaacttggcagcacagttaccaatgagtatgattacgtattttctgagaatggtcttgtggctcacaaggaaggaaagctcattggaactcaaagcttgaagtcattccttggtgaagaaaaactcaaggagtttattaactttacacttcattata

SEQ ID NO: 264723 - DNA, 388 bp, Glycine max
cgcgtgggctcaggaggagaataaggatgtcttataggaagttcgagcacccaaggcacgggtgactgggatttctccccaggaagcgtgctgctcgtcacaggggaaaagtgaaggcattccccaaggatgacccatccaaggcacccaagctcactgcattcttgggttacaaggctggtatgactcacattgttagagaggtcgagaagccaggatcaaagcttcacaagaaggaaacatgtgagcctgttacaattattgagacccctccaatggttattggtggtgttgtgggttatgtgaaaactccccgtggtctccgaacattgaacactgtatgggctcagcacttgagtgaggaactggaacgtaggttttataagaa

SEQ ID NO: 264724 - DNA, 296 bp, Glycine max
ggtctggaattcccgggtcgacccacgcgtacgcttttaatttaaaagaaaaagttcgaaaacatgtctattctgacttagaaggagaaatgcggtggagtaccgatgtgtaccatgcatcagaatttagatatagtaatgtccatatcttaccaaaaacaagtcatttatggattttatcaggaaaatcatacaggtccggttcagtctctttttcaatccgaaaagatcaagatcaaatgaacattcattatctttctactggagaaagagatttttgtaaccttttagcaagt

SEQ ID NO: 264725 - DNA, 404 bp, Glycine max
  unsure (1)..(404): unsure at all n locations
tttcgtggctgcggaggacccttatagattcttcgactggaccattacctatggtgacattgatcccctaggagttaaacaacagggtattcttatcaatggccaattcccaggccctgaaatctattctgttaccaatgacaatttgatcattaacgtgcacaataacttgaccgagccgtttcttctatcatggaatggtgttcaacanaggagaaattcttatcaagatggagtttatggcaccacatgccccatccctcctgggaagaacttcacctacacacttcaagtcaaagatcanattggaagtttcttctatttcccatctcttgctttccacaaggcaactggtggttttggagccatcaaaatcctttacaggccaaggatccctgtcccgt

SEQ ID NO: 264726 - DNA, 360 bp, Glycine max
cccacgcgtccgcccacgcgtccgcccacgcgtccgcggacgcgtgggcttcaacttggaggaccacgctaactaccctgattctgatcagattccttactttgaggatggtgattctgtgacatacaataatgagaaggaggggatcattgagtgcttgaaaaggaatgtgggtggtgatttagatagtgaggtttcttctctccctgattggataccaaccaaagtgatggccaccacttggcttgctgatgcacttgagtatgaactgtgggtgggatgtgatggttcctctgcttatagcatctattattctgatcttccctggcctatcggcaaggttctcttttggaagaaagc

SEQ ID NO: 264727 - DNA, 368 bp, Glycine max
cgacccacgcttacgtttggatactctcactgacccttatacagtttttcatcgattccatatcctattgcggacggtacctttataatctaacttcgtcatcactacactgacgtagcaactcaccaataccttaaattctacttatagttccacatatcaatcccgatcattcacatgcacaataacttgaccgatccttatgttctatcacggaatggtattcaacaaaggacaaattcttatcaagatggagtttatggcaccacatgccccatccctcctgtgaagaacttcacctacacacttcaagtcaaagatcaaattggaagtttcttctattttcccatctcttgctttcaacaagc

SEQ ID NO: 264728 - DNA, 377 bp, Glycine max
cttctccttctcaatcttgtaattctatttcctccaccataatgctgcgcaagcttgtgtcggggccacgcaagaacaagcctggcacagttcccgttcacctcaacgtctatgatctcaccccaatcaacggctatgcctattggcttggccttggagtctaccattctggggttcaagttcatggattggaatatgggtttggtgcgcacgagcacgacacaacggggattttcgaagtccaacccaaacactggcctgggttcactttcagaaagtcaattttcatcggaacaacagatctgggtccgaaagatgttcgagcattcatggagaagctggctcaagattactccggcaacacctatcatctcatt

SEQ ID NO: 264729 - DNA, 281 bp, Glycine max
gtcggcgctgtggcggacgcgccggcggtggttgacgagaacacggacttcgacgtgctgagtcgactacgtgccgagcaacgctagaatcgccgtgattgatgctgtgacggcattgtccaacctagcgctgaaggaggccattgagttgatcgaagggttgccgaagaagttcaaggaatggatttcaaaggactaagcttgagatgcgaagaagcaactcgaagaagctggtgccaagggtaccatcgcttaaacactgtctagctgcagcatatatg

SEQ ID NO: 264730 - DNA, 364 bp, Glycine max
ggcggcactgtggcagacgcgccggcggcgtttgaggagaagacggacttcgacgtggtgagcgcagaagcaccgatcaacgctcgaatcgtcacgataacggctatgatctcaccgacaaacacagctctgcctaatgccaaggacttgaacgactccattccgaagaacatcatcgatggtattacaaaggactaaggctcactatgccaacaatcaactcgaaaaatctggagccaacgctaccattgcttatacactgactaactgcaagatatatgttctgcttcctctattgttggttgcaaatgagttcaccatttcactggaatatcattttcattttgtctggatttcaactttt

SEQ ID NO: 264731 - DNA, 421 bp, Glycine max
gttgaattcttatgcaaagatttctgtccatcttctctggatgatattgccgagatgagtgggccactatgtcaagaatcagctcccacttctcactccatgagattcactagaagtttgagtgggctttcggtcaggaggtctttagttggttcatttgaggagtctcttttatctggccggttcttatctggaaacaatagcaagaaaatcgatggttttcttgctgtgctaagcattactggtgggaacttttctcctaaatctcagaagcttccattctctgttactagcgcggatggagattgctatctactgtattatgcatcaatagatcttgctggaaattcctcttcaaacaagttaagaggccaattgctgaaacgagggtttggaaaagatgattccccaaattgtaaaa

SEQ ID NO: 264732 - DNA, 395 bp, Glycine max
attcccgggtcgacccacgcgtgcgcccacgcttccttccacgcgtccttctacgctttcgcccactcgtccgtctccctgtttctggtcactatctctgtgcattcttctctcgctctctgccttccatcacactctgcatttcctttcccaagatagtttaagatggcagacactgacgatattcaacctcttgtttgtgacaatggaacacgaatggttaaggctggatttgctggagatgatgccccacgtgctgtgtttcccagcattgtatgtcttcctcgtcacactggtgtgatggttgtcattttccaaaaataatcatatgttggtgatgatgcacaatttaatatgtgtatttcgactctcaagttccccattgaacatggaat

SEQ ID NO: 264733 - DNA, 383 bp, Glycine max
cccacgcgtccgcacgttccgagttttctgatcgctcatagagagttcgacgcggcggttgcgagaagaagattgcaagatgaagttcaacatcgcgagtcccaccactggatgccagaagaagctcgagatcgacgacgatcagaaactacgagcattttgggacaagaggatctcacaggaggtcagcggagatgcacttggtgaggaatttaagggctatgtcttcaaaattactggaggttgtgacaaacaaggattcccgatgaaacagggagtgcttactcctggtcgtgttcgacttttgcttcacaggggaactccttgcttccgtggatatggaaagcgtaatggagaacgtaggagaaagtctggtcgtgggt

SEQ ID NO: 264734 - DNA, 415 bp, Glycine max
cccacgcgtccggagggctcagaggaacttctatgcgagtagggaccggtcgttgccggtgtgtggtgttggagttgtgtttattgatgagagtgccgtgttgccgattccttctaatgaaatggaggaagcggttgaagttgttagtgaggttgtgtcgagtttggccccaccaaggaaggagttgcatattgttcctattgagaccgtttattcctcggattctggtgatgggaaggagaggataaccaaggtagtgaacacagtgattgatccaacgggaagggaggatgtattgctctgtctgcgaatgttggcgctacaaaaggttgcttctgaatttggtataacaggatcattctggggtcatgcatttcgaggattgcttgccatgtcatttcagccactgtgaagg

SEQ ID NO: 264735 - DNA, 359 bp, Glycine max
cccacgcgtccggagggctcagaggaactgtgatgcgagtagggaccggtcgttgccggtgtttagtgttagagttgtgttgattgatgagagtgccgtgttgccgattccttctaatgaaatgtatgaagcggttgaagttgttacttaggttgtgtcgagtttggccccaccaaggaaggagttgcatattgttcctattgagaccgtttattcctcggattctggtgatgggaaggagaggataaccaaagtagtgaacacagtgattgatccaacgggaagggaggatgtattgctttgtcttcgaatgttggcgctacaaaaggttgcttctgaattttggtataacaggatca

SEQ ID NO: 264736 - DNA, 400 bp, Glycine max
ccggaattcccgggtcgacccacgcgtacgcccacgcgtccgcacccgaggtattataagacgaaactgtgctatggatacattatttttcggtgagatagactaattaatctactctatctaacatatatcccttgtgtagtcattaatacgaattaggaggcattattataagtattagaagcagctattcttatttatatagatatattgtacccaggtcatggcggtggcggttatcctggccatggcggtggcggttatcctggccatggcggtggtggtggctatcctggtcatggtggtggccaccctggtcatggtggcggctacccttgccgtggtggaggatactgtaggcatggctgttgcggtggccggacatacaacggtgggttgc

SEQ ID NO: 264737 - DNA, 410 bp, Glycine max
gttgaattcttatgcaaagatttctgtccatcttctctggatgatattgccgaggggagttggccactatgtcaagaatcagctcccacttctcactccatgagattcactagaagtttgagtgggctttcggtcaggaggtctttagttggttcatttgaggagtctcttttatctggccggttcttatctggaaacaatagcacgaaaatcgatggttttcttgctgtgctaagcattactggtgggaacttttctcctaaatctcagaagcttccattctctggtactagcgtggatggagattgctatctactgtattatgcatcattagatcttgctggaaattcctcttaaacaagttaagaggccaattgctgaaaccagggtctgaaaagatgattccccaa

SEQ ID NO: 264738 - DNA, 456 bp, Glycine max
gataactactattgaagaagcaaaacgattctacccactgttcggactcggggccaatgtagcccttattttctctggccggacagtcaaatacttttctaatctgaggcagaatttaggtcctggagttgatggttgggccatctctctgaaagcaatgatgagcatagttgtgggtatggggtttgcaatctgtttcctgtactggtgggtgaacaattatgttcctcttcctactcgtagcaagaagaagaaggagaagcccaaaatgggaacaatggagagcttgaagttcttggtgtcttcaaagtacatcagagatcttgccactttagtggttgcttatggaatcagcatcaatcttgttgaggttacctggaagtctaagctcaaagctcagtttcctagtcccaacgagtacctctcttttatgggtgacttctcaactgcaactgg

SEQ ID NO: 264739 - DNA, 318 bp, Glycine max
  unsure (1)..(318): unsure at all n locations
cgcgtgcggatagctactattgaagaagcaaaacgagttttcccactgttcggactcggngccaatgtggcccttgttttctctggtcggggagtcaaatacttttctaatctgaggcagaatttaggtcctggagttgatggttgggccatctctctgaaagcaatgatgagcatagttgtgggtatggggtatgcaatctgtttcctgtactggtgggtgaacaattatgttcctcttcctactcgtagcaagaagaagaaagagaagcccaaaatgggaacaatggagagcttgaaggtcttgggggcttcaaag

SEQ ID NO: 264740 - DNA, 363 bp, Glycine max
gatttggatgctaatttttttgattagccataaatgcttggagagcccattgcaggtctgcgtttgctgcactatgaaggtcaagtttcggatcccttgaaaggattatatggagctggagctcatactgactatggtttaattacactgttagcaacagatgatgtctcgggtcttcaaatatgcaaagatagggatgctaaaccttaaaaatgggaggatgtaacaccattgaaaggagcaatcatagtgaatcttggggacatgccggagcgcttgaaccactgcgtttttaagtccacactgcacagagttctaggaaacggtcaaagaagatattctattgcatacttcttggagccc

SEQ ID NO: 264741 - DNA, 228 bp, Glycine max
cccacgcgtccgggttcttttcatggttgatgccattgatgaatatgctgttggccagctgagggaatttgagggcaagaagcttgtctctgccaccaaggagggtctcaaacttgacgagagtgaagatgagaagaagaagcaagaggagttgaaggagaagtttgacaacctatgcaaggtgatcaaggatgttttgggtgacaaggttgagaaagttgtagtctc

SEQ ID NO: 264742 - DNA, 392 bp, Glycine max
  unsure (1)..(392): unsure at all n locations
cttcttctctggttgattcggatctagagtcttcagtttctcctcgttgttcttcgcgtgtgtgttttcaatttcgattctttcgctaatttaataagatgtttgggagggcaccgaagaagagcgataatacgaggtactacgaaatcctcggcgtctccaagaacgcttcgcaggatgatctgaagaaggcttacaagaaagccgccattaagaatcaccccgacaagggcggtgatcccgagaagtttaaagagctggcgcaagcttatgaggttctgagtgaccctgagaagcgtgagatatatgatcagtatggtgaagatgcgcctaangaatgaatgggtggtggcggtgggccatgatccatttgatatcttttcatctttctt

SEQ ID NO: 264743 - DNA, 296 bp, Glycine max
cttgatgatcccaacactttcggtaacaggattcacaggatgctgaagcttggactgagcggggatgaagatgctggtgaagcagatgctgacatgcctcctcttgaggacgctgatgcagatgctgagggtagcaagatggaagaagttgattaaatctgacttaattgcctgttacgtttttagaaacaatgattggagaaacagtctttttactatgttttatgttttttgaattttcgaaattttggaacgttggctagttaggtgccgtatgtagtagtttctttatggta

SEQ ID NO: 264744 - DNA, 446 bp, Glycine max
ctctctgtgtatttccctacctctcccttcaagatgcagatcttcgtcaagaccctcaccggcgggaccatcacccttgaggtggaaagctctgacaccatcgacaacgtcaaggccaagatccaggacaaggaaggaatccccccggaccagcaacgtctcattttcgccggaaagcaacttgaggacggccgtacccttgctgactacaacattcagaaggagagtactcttcacctcgtcctccgtctccgtggtggcatgcagatcttcgttaagacactcaccggcaagaccataaccctagaggttgaaagctccgacaccatcgataacgtcaaggccaagatccaggacaaggagggtatccccccggaccagcaacgtctcatcttcgccggaaagcagctcgaggacggccgcaccctcgccgactacaacatcca

SEQ ID NO: 264745 - DNA, 290 bp, Glycine max
aatccagtcctggacaggcaaaggtgtttccaaagatttttgggcatgagttaagcctgggggatacaaaatctcagtctataactattagtttctccccaaaggtggaagatgatccgggtttcacttcagactcctatgaagttcaagcactatgggtgaaccatgcttatggaaattcttccaatgggactttatgtgaccgtaatgaaagaacattgtttcctcaattgaatcaaatgatggctgggaattttaatgctcaagcaagggtttcttgtctagatctc

SEQ ID NO: 264746 - DNA, 466 bp, Glycine max
cgggccgagccacgcgtccgcccacgcgtccgagaaggcctgggcttagttgataagcataactgggtgaggaagaaagagggagagtgaagaagatggcgtcgagcggagcggtaccgttttggagggcggcggggatgacgtacataacatactcaaacatatgcgcgaatctgctcaggaattgcctcaaggaaccctacaaggccgaatccctctctcgtgagaagctccattttgttctctccaaatgggtcgacgccaagcctgaaaaacctactattcgttcagacaccccagagcagtgatctggaatagttggaagctataaatgcataaatctttgagatctggaagttcattgtcattttgaacctttctgtgatgtttaattcctttgtttttttctctccatgaaatggaacatgcactggattttgatttgcacggttaatctttgaataat

SEQ ID NO: 264747 - DNA, 416 bp, Glycine max
gcgtccgctctctgggcctccacttacgaatccattgaatatacaatcatgccggacgaccatcaccgtgtagagtattaggccggcggcggagccttcaaaccctaccctcagcatgccggtcccatcccaaagaacggatacattgccatcaaacgccgaccctgcaatgttgtgcaaattgcaacttgcaaacctgcaaaccacggccaccctcaacgtcactatggagaaatcgatatacccactgccaagaatcttgaggatattgcacactcttctcacaactgtgacggtcctcacgataatcgtactgattaccagctcattcaccttgcttaagatggatgccagaatccactcactgaaaatggtcacactaaagatgaacctaagctttccactgataagagtct

SEQ ID NO: 264748 - DNA, 435 bp, Glycine max
  unsure (1)..(435): unsure at all n locations
ctgagttgcaagattcacttcaaattatgcgtttcgctgatcggttcctcatcacatggggcgacgtcgcagatcatcgcaattccttgattatttccttttgttgatacgcggaatcgcgcacacggtgctggtgtgtgcactgaggtagaaagaagaagattgaattgtaaacagcatgaattaccttcttggagctttcaagcctgcatgtaatgtcttgatcacgtttaatgatgggaagaaccggaagcaggttccgtttaaaaaagaaaatggtcaaatggtcacagtcccacttttccaaagtcaagaaaacattggtgggaagattacaatagaaccaatgcaagggaagaagattgatcacaatggtgtaaaagttgagctncttggacagatagagatgtattttgacagaggaaatttttatga

SEQ ID NO: 264749 - DNA, 391 bp, Glycine max
  unsure (1)..(391): unsure at all n locations
tcttcttcttcaatattttcttttttcacaaancannacatcactgagaagaatgttttttataataggcagcccgccccctccattcttttttcaatttttcctatactactttcccacattttcctttgatcacatcaaatatgtcaatgctgtttcttacattcagcttcatctttacaattacacttttactgccttccatttcaataattcttacttttttttttcacttcatcatctacataatatattcttcctttaaatttttctttatacaatcacttctattttatttatttttcccaaaactctttatctattaatatatataacttttatttcttctttaacattaacaacacaaccttttcattctccaaaacaaatt

SEQ ID NO: 264750 - DNA, 446 bp, Glycine max
ggcaccggtgaaatcagttatagtcttcttgtgagacaggaggggcacaaacggattagggggtcatgttcttggaatccacatggtcacgaatttgcgacaggttcaagggataagacagtgaaaatctgggccatagagagggagtctgtcaagcagcttatgtctttacctcaatttacgagtagtgtaacagcattatcttgggttggtctccatcatcggaagaataatggacttctagctgttggaatggaaaatggccaaatagagttgtggaatctgtcttataacagagcagatgatgggagcatagcagcaccaggtttggctgcttctcttgctgtacgtatagatccttttatatgccatgcgtctaccgtaaaccgtctagcatggaagaaaaatgaggatgatcaaacgagtatgcaacttgcttcatgtgg

SEQ ID NO: 264751 - DNA, 261 bp, Glycine max
cccctacacttttctctctcaaaacgacctcttcctctataaccgcatatctgctccttcctcccatccccttcttcccttcataggttatactactgaatccctgacccacacaaaacaaaacagcattactcctgatattccgccaactgttactgctattaagaaccctaactctaagattgtctatgatgatcacaaccataaaatatttcccccaggtgacccaagcaagacggcatttgcctacttcttacttac

SEQ ID NO: 264752 - DNA, 413 bp, Glycine max
gtccgccctgtgttccgccacttatgaatctattgattttacaatcatgccggacgaacagcaccagatggagttaaggccgacggcggagcctccaaaccctaccctcagcatgccggtcccatccgcacgaacggctacatcgtcaccaaacgacgaccctgcaaggttgcggaggatgcaacttgcaaaccggcaaagcacggtcacgctcagcgtcactctggagaaatcgatatacctactgccacgaaacctgaggatattgggccctcttgtcacaactgtgacgttcctcatctgaatcgtactggttacaagctcattcatcttgctgaagatggatgtccgagtccgcttactgaaagtggtcacactaacgatgaccttatgctatccactgaagagagtct

SEQ ID NO: 264753 - DNA, 354 bp, Glycine max
cccacgcgttcgagaaggcctgggcttagttgataagcataactgggtgaggaagagagaggagagagtgaagaagatggcgtcgagcggagcggtaccgttttggagggcggcggggatgacgtacataacatactcaaacatatgcgcgaatctgctcaggaattgcctcaaggaaccctacaaggccgaatccctctctcgtgagaagctccattttgttctctccaaatgggtcgacgccaagcctgaaaaacctactattcgttcagacaccccagagcagtgatctggaatagttggaagctataaatgcataaatctttgagatctggaagttcattgtcatttttg

SEQ ID NO: 264754 - DNA, 435 bp, Glycine max
gcagagcagagatctagcgtattctctcgctctttctttcactgtcacagagccacatccgtgggcttcccagccaacggcgcctctgcggcccagcccctaaacttcctcatctacggccgcacgggctggattggcggcctcctcggctccctctgccgggcccagggcatctccttccattacggctcgggccgcctcgagaaccgggcctccctcgaaaccgacatagccctcctcaagccctcccacgtcttcaacgccgccggcgtcacgggccgccccaacgtcgactggtgcgagtcccacaaagtcgagaccatccgaaccaacgtcgtcggaaccctcactctcgccgacgtctgccgcgaccacggcctcattctcatcaactacgccaccggttgcattttcgagtacgactccgatcacccc

SEQ ID NO: 264755 - DNA, 350 bp, Glycine max
aaaaaatggggtcctcctcctccaatggggacggtgtgggtgattttggcatcactggcctggggagcactctgtgccaacccacgcaggccagtggatgtacaatttggccgaaactacgtgcccacatgggcctttgatcacatcaaatatttcaatggtggttctgacattcagcttcatcttgacaagtacactggtactggcttccagtccaaagggtcttacttgtttggtcacttcagcatgtacataaagatggttcctggagattctgctggcacagtcactgctttctatttatcttcccaaaacgcggagcatgatgagatagactttgagttcttggg

SEQ ID NO: 264756 - DNA, 361 bp, Glycine max
tgaatatggcatcactttccaagacggctttatattccaaccgacgcagcccactttatttctatttttccaaaactacttccccacatgttccttttttcacatcaaatatgtcaatattgaatctgacatttatcttcatcttaacaagtacacttttactttctttcattctcaaatttcttacttgtttagtcactacaacaattacataaaatatttcaatttatatatttctactacacattctcttgttattatttatcttcccaattcacattgcatttatatatagtacattttctattttgttaaacaaaacaaattcaacctttcataattttcaaaatattcttttcac

SEQ ID NO: 264757 - DNA, 263 bp, Glycine max
gaatgataaggtatatgaacaatccttaacagatacttctacaagatgttctattttttcagagagaaaaattcgctcaaaaaaaacgcgaaaatattttaatcgtaacttagaggatttgttacgtagaaaaagaaagatagattcatattcccatacatataaattatataggaacaaaaaaaatcttggattactttttgaaaaaaaagtagaaatccatttttttggagtaaaaatactattccaattataataataag

SEQ ID NO: 264758 - DNA, 350 bp, Glycine max
gaccctccaaaacctaccctcatcaagccggtaccatccgcaagaacggctacatcgtcatcaaaggccgcccctgcaaggttgtggaagtttcgacttccaaaactggaaagcacggtcacgctaagtgtcactttgttggaattgatattttcactgccaagaaacttgaggatattgtgccctcttctcacaactgcgatgttcctcatgtgaatcgtactgattaccagctcattgatattgctgaggatggatttttgagtccgcttactgaaaatggtaacactaaagatgacctcaagcttcccactgatgaaagtctgctcactcagaaaaagatggatttg

SEQ ID NO: 264759 - DNA, 444 bp, Glycine max
  unsure (1)..(444): unsure at all n locations
ggctgaagcacaactacgagaccagcatggctaccctgtcccactcaccgatcaatacggtagtccggttatcttaactgacgagcgcggtaatcccgtccaactcactggtgtcgctaccaccgctaccggcacagcaggttctgggtttgggtcctatggtaccggtgcttacggtggtggtgcaagtgcaaccaccgttgcagatcttttggcaacccaaccaaggagtggcagggaggctagagagcttcgtcgttcctccagttcaagctctagctcgtctgaggatgatgggcaaggtgggaggaggaagaagggagtgaaggataaaataaaagagaaactaccaggggtaggaggagggaataataataaggagcatgcacacacaacaactgctccaaccaccgncactaaccaccctgctgatcagcatgagaa

SEQ ID NO: 264760 - DNA, 475 bp, Glycine max
  unsure (1)..(475): unsure at all n locations
cggaanncccgggtcgaccgaagcgttccggcctgaagcacacctccaagaccagcatggctcccctgtcccactcaccgatcaatacgggggggcggttatcttaactgacgagcgcggtaatcccgtccaactcactggtgtcgctaccaccgctaccggcacagcaggttctgggtttgggtcctatggtaccggtgcttacggtggtggtgcaagtgcaaccaccgttgcagatcttttggcaacccaaccaaggagtggcagggaggctagagagcttcgtcgttcctccagttcaagctctagctcgtctgaggatgatgggcaaggtgggaggaggaagaagggagtgaaggataaaataaaagagaaactaccaggggtaggaggagggaataataataaggagcatgcacacacaacaactgctccaaccaccgccactaaccaccctgctgatcagcatgagaag

SEQ ID NO: 264761 - DNA, 386 bp, Glycine max
ggccttcggggatcctcgtttttgctgcagtgaggcgtactcgacgcctgacatgtgtgggcgcttctccttattcgttgttcttcaagcacgcttgcccacgcgcgtatagctacgcgtacgatgacaagaccagcacctacacatgtgccaatgctaactatttgattattttctgccccttcccctataccagccaaaaactgttgggagtacgaaaagatggggcacagcttcctctggtaaataaaactatgatgtacttatcaaggctacaatcaggtggttcttcaccatcagggtagacacttacaccaaaaatagctgcttcttagtataaccgtgtaagcttttcatgctgtctccctttgatcttactattttac

SEQ ID NO: 264762 - DNA, 472 bp, Glycine max
ggtcttgaaaacccgcggcgggccacgcgtccgggctgaatcacaactactagaccagcatgttttccctgtcccactcaccgatcaatagaagaatctttttatatgaacgggggagcgcagtaatcccgtccaactcactggtgtcgctaccaccgctaccggcacagcaggttctggggttgggtcctatggtaccgttgcttacggtggcggtgcaagtgcaaccaccgtttcagatcttttggcaacccaaccaatgagtggcatggaggctagagagcttcatccttcctacaggtcaagctctagctcgtctgaggatgatgggcaaggtgggaggaggaaaaaaggagcaatgataaaataatatagaaactaccaagggtaggatgtgggaataataattatgagcatgcacacacaacaactgttccaaccaccgtcactaaccacccttgtgatcagcatg

SEQ ID NO: 264763 - DNA, 425 bp, Glycine max
acaactcactttcttcttatcccttccctacctccggtcaagtaatccttatattagacttgaccaaaaccctagtctctcgcggcgtccatgtcaccgttctggtcacaccctacaacgaagccttacttccaaaaaactattcccctcttctccaaacgcttctcctccccgaacctcagttcccgaacccgaagcaaaacaggctcgtatccatggtaaccttcatgcggcaccaccactacccgatcattatggactgggcccaggcccagcccattcctcctgcggctattatatcagatttcttcctcggttggacccacctcctcgcacgtgaccttcacgtgccgcgcgtagtctttctccccttcggcgcctttcggctctccgtcttctacttcctctggcgcgacgccccccaa

SEQ ID NO: 264764 - DNA, 443 bp, Glycine max
  unsure (1)..(443): unsure at all n locations
atttgttgctgcangaattcacagcccggcctgatatagcagatgattgttttttgttggcggggaggtgtattcgctactgtcctcaactgtttattccctcgtctgtttttccttcattagtggattgctctatgattgggatcacagtacagcatagggaggcttcgaattccatattgcatttcttggctgacatttttgatcttgcgaattcctctgtgggggagcaatttataccaataagagatagtgtaataattcctcgaggtgccagcatcaccagaattttggttgcttcattaacgggagcacttcctaaatctcgagtggatgtggtatcttatacactcctggcattaactcgatcatatgggatgcaagcgctggaatgggcaaaaaagagtgttttgttaattccatcaacagctgttacagatgta

SEQ ID NO: 264765 - DNA, 417 bp, Glycine max
  unsure (1)..(417): unsure at all n locations
ggtctggaaaacccgggccggccgacgcgtncggcaaggatgtccaccgcaacaactcacgtgctctcttatcccttccctacctccggtcacgtaatccttctattagacttgggcacaaccctantctctcgcggcgtccatgtcaccgttctggtcacaccctacaacgaagccttacttccaaaaaactattcccctcttctccaaacgcttctcctccccgaacctgagttcccgaacccgaagcaaaacaggctcgtatccatggtaaccttcatgcggcaccaccactacccgatcattatggactgggcccaggcccagcccattcctgctgcggctattatatcagatntcttcctcggttggacccacctcctcggacgtgaccttcacgtgccgtgcgtagtcttt

SEQ ID NO: 264766 - DNA, 308 bp, Glycine max
cccataacccttccttccaaactctcctctctccgactccccacccgccgccaccccaagccactcagattctcctcctccaccatcaccgccaccatctccgtcggcgacaagctcccggaggccaccttctcctacctggactcgtccggcgaggtgcagacgacgacggtgtcggaactgacgaaggggaagaaggcggtgctgttcgcggtccccggcgctttcacccccacgtgctcgcagaagcacgtgccgggcttcgtggagaaatcgggggagcctgaggcgaaagggatcgacacaat

SEQ ID NO: 264767 - DNA, 307 bp, Glycine max
  unsure (1)..(307): unsure at all n locations
gcgtacgttttggtactttnaatcctcttgatccttttttttgtactaaaacacaaacatgtcagaagatgtgtttataatagatggaggcccaactccatttgttaatagggtcattattgaacttgctgaaaacggaatcaattacgattacaaagaacaggacactgaggaacaatacatctattgaactacaatgaacccactgtacatgaatattccggttctaataaacattattcaacctatctttaaatccactaatgctgctcatctcatttaagaggaccttaatgacagcaaatcc

SEQ ID NO: 264768 - DNA, 434 bp, Glycine max
cagtaactcacctcaccatggccgcatccattacattgtccaggctcgtctcttccacgctggccactgcctctttcttcccacccataaccctgccttccaaactctcctctctccgactccccacccgccgccaccccaagccactcagattctcctcctccaccatcaccgccaccatctccgtcggcgacaagctcccggaggccaccttctcctacctggactcgtccggcgaggtgcagacgacgacggtgtcggaactgacgaaggggaagaaggcggtgctgttcgcggtccccggcgctttcacccccacgtgctcgcagaagcacgtgccgggcttcgtggagaaatcgggggagctgagggcgaaggggatcgacacaatcgcatgcatttcggtcaacgacgccttcgtcatgaaggcatgg

SEQ ID NO: 264769 - DNA, 449 bp, Glycine max
cccacgcgtccgtcaagcattgcatccctcttgatttgtagtttgttttgtgctttagatagaagttctgccaaatcaagaggggttttaagatcatagtgtgtgttttgcaacaatggctaagttctttgctgctatgatcttggcactctttgccatttccatacttcaaacagtggtaatggctgctaatgaacaaggaggccacttgtatgacaacaagagcaaatatggaagtggaagtgtcaaaagttaccaatggccattcacaatgctcgaggagatgtagccagacccaataccacaagccctgcatgtttttctgtcagaagtgctgcaggacatgcctgtgtgtgcccccggggtattatggtaataaagctgtgtgcccttgctacaacaactggaagaccaaggaaggaggacccaagtgcccttgagcttcaact

SEQ ID NO: 264770 - DNA, 402 bp, Glycine max
cccacgcgtccgaaaagaaggaagaaccagctgaagaatctgatgatgacatgggtttcagtgtgtttgactaatttatgtaatgcttttgttgagtttatttggttagaattgaagttgtgtttgcctttcatttcaggtgttattttagtgtattcatgttacattgcaactacttttaatttccatagttaattaaagcttcaacgtttctgtctcttgtggttttaaattgtgatacctgataaatttacaattccccatctttgtgaagatggcaggagtgatgataagatgcctaatagcattaaacttcaacctcaaatgtcttgaagcaagcaatgttgctctagctttcgcgattacttcccgctatgaaatgagatctctaacaatgcctcg

SEQ ID NO: 264771 - DNA, 415 bp, Glycine max
cgcgtcgctgctccgtaccagtttcactgcataattttgagagaaaactctgcaaacatggtggtgtatcatgacctccttacaggtgatgagcttctctcggactccttccgttacaatgaaattgagaatggaatgctgtgggaagttgaggggaagtgggttgttaatggagcagttgatgttgacattggtgcatacccttctgctgagggtggagaagatgagggagtcgatgacgcatctgttaaggttgttgacattgttgatacattcagacttcaagagcaacccgcttttgataagaaacaagtttgtaccttcatgaagaggtttatcaagaatttgacttccaagctcgatgcaaagaaacaagagtttgttaagaagcacatttgtgggagctactaaatta

SEQ ID NO: 264772 - DNA, 466 bp, Glycine max
attgctgctgtttgcctattggtgtactttggggtctctaccctgctggatgcctcatctagcgatggccaaaaatcagatgaagagcagaaggaggcagaactagcagtttctgaattttctggaaatggtgctgggatactatctgctgctagcacagttgccagtacttttctcttagtttttgttgctgaatggggcgacaagtcatttttctccacaattgcccttgcagcagcttcttctccccttggagtcatagctggagcactggctggtcatggtgttgcaactttgctagctgtacttgggggttctttacttgggacgtatttgtcagagaaagttattgcctacatcggaggtgttctctttctcgtctttgccgcaataaccttatttgaaattgtgcaataagggttaaaagaaatgcaatataatctccgtgcaaagggttcaagaacgt

SEQ ID NO: 264773 - DNA, 454 bp, Glycine max
attgctgctgtttgcctattggtgtactttggggtctctaccctgctggatgggtcatggagcgatggccaaaaatcagatgaagagcagaaggaggcagaactagcagtttctgaattttctggaaatggtgctgggatactatctgctgctagcacagttgccagtacttttctcttagtttttgttgctgaatggggcgacaagtcatttttctccacaattgcccttgcagcagcttcttctccccttggagtcatagctggagcacttgctggtcatggtgttgcaactttgctagctgtacttgggggctctttacttgggacgtatttgtcagagaaggatattgcctacatcggatgtgttctctttctcgctttgtcgaaataaccttatttgaaattgtgcaatatgggttaaaagtaatgcaatataattcttcgtgccaagg

SEQ ID NO: 264774 - DNA, 413 bp, Glycine max
cccacgcgtccggtgatttcagtgagtgatcggtgttcacttgatctcatcataatcgggagcgtcaattgaagaagatgccgatcagaaacatcgccgtcggaaggcctgaagaggcgactcaccccgacacgttgaaggcggctttggctgagttcatctcaaccttcatcttcgtgttcgccggctcaggctccggcatcgcctacaacaagctcaccgacaacggcgctgccacccctgccggcctcatctccgcctccatcgcccatgcattcgccctcttcgtcgccgtctccgtcggcgccaacatctccggcggccacgtcaaccccgccgtcaccttcggcgccttcgtcggcggcaacatcacctttctccgcggcatcgtctacgtcaatcgccagctcctc

SEQ ID NO: 264775 - DNA, 377 bp, Glycine max
ggcaaagatggggatgtggcactcttctttggactctcaggtaccggaaagaccactctttcgagcgatcacaataggtatctaatcggagatgatgaacactgttggggtgacaatggtgtctccaacattgaaggtggttgctatgccaaatgcattgacctctcacgggagaaagagccagatatttggaatgcaatcaggtttggcacagtgttggaaaacgtggtgtttgatgagcacgaccgagaagttgattactctgacaaatcaggtacagaaaatactcgtgctgcttattctatagagtacatttcaaatgccaagataccttgcgttggcccttattcaaagaatgtcatacttttggcatgtga

SEQ ID NO: 264776 - DNA, 426 bp, Glycine max
attgtatcttgttatatcgtataaatgggtggccaatgccttatatatgaattatacgtgggaatgttgctacagcagattcaccctacaacaaatgtttacattcataaggtggttcatcataccaatgtattattcactatgataactgtcatcaacatttactcatcagcataattgactcaaaatagaatcttctatgtcttcaatgatacacttcaaggctaaactatacagttaaagactatccaaatggtgacattctcgtctgggtggtgtatgatggttatcacgctagtctcacacactacaggtcccaggctcgaactctgactcatacatttcaatattctgtagacgatgtctgtgaactactatgagatatgtaaataggaataattttaatgctttggaaaagaattttac

SEQ ID NO: 264777 - DNA, 468 bp, Glycine max
  unsure (1)..(468): unsure at all n locations
gtgcgttcttagaagagctcaatcctcctaacataattcttgttcatggagaagctaatgagatgggcaggctcaagcagaagctcataagtcaatttgctgatcgcaacactaaaattcttactccaaaaaactgtcaatctgttgaaatgtatttcaattcgcagaaaatggcaaaaaccatagggaagctggctgaaaaaacaccagaagttggtgaaactgtcagtggtttgcttgtaaaaaaaggcttcacatatcagattatggcagctgatgatctccatgtcttttcacaactatcaacagcaaacattactcagaggattaccatcccttattcaggtgcctntaatgtcatacagcatagactcaaacagatatatgaaagtgtagctcagtcagtggatgaagaatctggagttcccacattgcaagtccatgagntgtgtactgtgaaacatgaat

SEQ ID NO: 264778 - DNA, 448 bp, Glycine max
cccacgcgtccgggaagatggtgctttcggaggaggaaatgggtcgtctgtaccgaataaggaagacggtgatgcaaatgcttcgggacaggggttttctggtgggtgacttcgagatcaacatgtcgaagcatgagttcaagtccaagtacggcgagcacatgaagcgcgaggacctggtcatcaacaagtccaagaaggacaactccggcgaccagatctacgtcttcttccccgacgagcccaaggtcggcgtcaagaccatgaagacctacaccaaccgcatgaactccgaaaacgtctatagagccatcctcgttacccagaccaacctcacccccttcgcccgcacctgcatcagcgaaatcttcttcaaattccacctcgaggtctttcaggaggccgaacttctcggtaacattaaagagcatgagcttgtccccgaaca

SEQ ID NO: 264779 - DNA, 415 bp, Glycine max
gacccagacgtacgcgttcgacggcgcgtacgtcaagcattgcatccattcttgatttgtaagctgttttgagctttagagaaaagttgtgccatatcaagaggggttctaagatcatagtgtgtgttttgcaacaatggctaacttctttgctgctatgatcttggcactctttgtcatttccatacttcaaacagtggcaatggctgctaatgaacatggaagccacttgtatgacaacatgagcaaatatggaagtggaagctgtaatagttaccaatgcccatcacaatgctcgaggagatgtagccagacaccataccacaagccctgcatgtttttctgtcagaagtgctgcaagacatgcctgtgtgtgccccccgagtattatggtaattaagctgtgtgcccttgc

SEQ ID NO: 264780 - DNA, 331 bp, Glycine max
ctctttatgcccccactctctcgtacgcgttcattctgcgttcgaaactgtcgaaatcgggacggagccaatggccaccgatcggtggaccacacttcacagactgcgtgagaggctcgatgaaacccttactgccaacaggaatgaaatcttggcccttctgtcaaggatcgaacccaaaggcaagggcatactgcaacaccaccaagtcattgatgattttgagcgaaatgcctcacgagaacagacagaagcttactgatggtgcctttggagaagtcttgcaatctacacatgaagccatacttttgccaccatgggtcgcttttgc

SEQ ID NO: 264781 - DNA, 311 bp, Glycine max
ggatcgacccacgcgtacgctttttatggctcctctctcacgtatgcgttcattctggattcgaaactggtgatggcggtaccgagccattgtccaacgatcggaggaccacaatgaacagactgcgtgagaggctacattaaacaactacttggctcaggagagaaatctcgtcccttcagttaacgtactgaacacaaggctagggcatactgcagcaccaccaagtcattgctgagtttgaggaaatacctgtcgaaaatcaacagaacctcactgatagtgcccttggagaagccttgagatctaca

SEQ ID NO: 264782 - DNA, 367 bp, Glycine max
gaatacccggctcgacgcacgcgtccgtgtggacctcacagtgaggctggattaatttgccttctacaatgaaattaacaatgctagcatgctttaatcacagggcaagttgactggaatacttcattacactgaagatgatgaggtctacaccgactttgaagaccatctcatatcaagtattactgatgcataggctataatagcattgaataacaactttgagaaacttgactatagttatgacatcgagtggcaatacagcttacttatccttaacctaacttgaaatctctgacaacaaatctttctatggttctactgaaacaaaagtcgcttctctaaacattgagacatggtgtctagc

SEQ ID NO: 264783 - DNA, 370 bp, Glycine max
cccacgcgtccgtcaagcattgcatccctcttgatttgtagtttgttttgtgctttagataaaagttctgccaaatcaagaggggttttaagatcatagtgtgtgttttgcaacaatggctaagttctttgctgctatgatcttggcactctttgccatttccatacttcaaacagtggtaatggctgctaatgaacaaggaggccacttgtatgacaacaagagcaaatatggaagtggaagtgtcaagagttaccaatgcccatcacaatgctcgaagagatgtagccagacccaataccacaagccctgcatgtttttctgtcaaaagtgctgcaagacatgcctgtgtgtgcccccggggtattat

SEQ ID NO: 264784 - DNA, 465 bp, Glycine max
cccacgcgtgcgagaaggcctgggcttagttgattagcataactgggtgaggaagaaagaaagggagtgaataagatggcgtcgagcggagcggtaccgttttggagggcggcggggatgacgtacataacatactcaaacatatgcgcgaatctgctcaggaattgcctcaaggaaccctacaaggccgaatccctctctcgtgagaagctccattttgttctctccaaatgggtcgacgccaagcctgaaaaacctactattcgttcagacaccccagagcagtgatctggaatagttggaagctataaatgcataaatctttgagatctggaagttcattgtcattttgaacctttctgtgatgtttaattccttttgttttttctctccatgaaatggaacatgcactggattttgatttgcacggttaatcttgtaataatacaagtttaaacgaaatga

SEQ ID NO: 264785 - DNA, 374 bp, Glycine max
gtggctcagggttcttgttccaggatacttacattcgcaaaatggtgaagattagctgggggggggctatatatgtactgggccctactatggcactcattgcacttaagagcccattcattgaacaagctgatgttgatatctctaaatcccgcattgcaacctggaacagtgaccaacttgctatctatgaacctggccttgaaagagttgtgaagcaatgccgggacaagaacctcttctttaacactgattttgaaacgcatgtctttgaggctcacatacagtttgactctgtcaacaccctaaccaaaactcacggtcttggagcttgtaaagcatcacatttgacatattgtgacagctcaactcgc

SEQ ID NO: 264786 - DNA, 383 bp, Glycine max
ctctttataccccccctctcttttttgcgttcattctgttttcgtaactgttgaagtcgttcccgagccaatggccaccgatcgtttgacccgggttcacagtctccgtgagaggcttgatgaaaccctcactgccaacaggaatgaaattttggcccttctgtcaaggatcgaagccaagggcaagggcatcctgcaacaccaccaggtcattgctgagtttgaggaaatccctgaggagaacagacagaagctcactgatggtgcctttggagaagtcttgagatctacacaggaagccatagttttgccaccatgggttgctctggctgttcgtccaagacctggtgtgtgggagtacctgagagtgaatgtgcacgctc

SEQ ID NO: 264787 - DNA, 469 bp, Glycine max
  unsure (1)..(469): unsure at all n locations
ggaatccccggctcgacccacgcgtgcgggaagcagaatcagcgtgatggctagaaactgggtggttcgatccttggcgctgggtcgcgcaatgaagaatagggttctcacactctccttcaaccgaattcttccctcactcccatcaaaatcctctctcttagccaccaccgccgccgccactgcctcctctcagctctccctcctcccctccttccaccactctcgctccctctcctccgcctcagctccttccgacgttgtccttgttaattccgaagaagagttcaacaatatccttaccaaagtccgagatgacttcgtgcaccccgtcttctatttcactgccgcttggtgtggaccttgcaagtttatttcacctatcgntggggagctcagtaagaagtaccctcatgtaacaaccatatagattgacattgatcaagaagcactttaaagcacactgggc

SEQ ID NO: 264788 - DNA, 457 bp, Glycine max
gaattcccggctctacccacgcgtccgaaaggatgggttcttcttcttctatgtcgtccgtgcgtgtgattttggcatcacgggccgatgcatcactctgtgccaacccacgcaggccagtggatgtacaatttgcccgaaactacgtgaccacatgggcctttgatcacatcaaatatttcaacggtggctctgacattcagcttcatcttgacaagtacactggtactggcttccagtccaaagggtcttacttgattcgtcactataccatgtacataaagatggttcctggagattatgactgcacagacactgatatctatccatcttcctaaaacgctgagcatgacgagatatactttcagtacttgctgaacagaacacgataaccttacattctgaaaacaaatgtgttcatcagatgcaaggttcatagatagcacagaatctatct

SEQ ID NO: 264789 - DNA, 459 bp, Glycine max
  unsure (1)..(459): unsure at all n locations
ggaagcagaatcagcgtgatggcgagaaactgggtggttcgatccttggcgctgcgtcgcgcactgaagaatagggttctcacactctccttcaaccgaattcttccctcactcccatcaaaatcctctctcttagccaccaccgccgccgccactgcctcctctcagctctccctcctcccctccttccaccactctcgctccctctcctccgactcagctgcttccgacgttgtcctcgttaattccgaggaagagttcaacaatatccttaccaaagtccgagatgactcgttgcacgcggtcttctatttcactgcggcttcgggtggaccttgcaggtttatttcacctatcgttggggagctcagtaagaagtaccctcatgtgacaacatataagattgacattgatcaggaagcacttcaaggcacactgggcaagntgcagatttcatct

SEQ ID NO: 264790 - DNA, 471 bp, Glycine max
ggaatatcccggctcgacccacgcgtgcgccgacgcgtccggacagaagagatcgttttagtcgcaaccctaataagaagaacgacagcttcaatcgagtgacatccaccagccatgggtcgtatgcacagccgtggtaagggtatatcctcttctgctttgccctacaaaaggacaccccctagctggctcaagatctcttcgcaagatgtggaagaaaatatctgcaagtttgcgaagaacggtttgaccccgtctcaaatcggtgtcattcttcgagattctcacggtattgctcaggtcaacagcgtcactggcagcaaaatccttcgcatcctcaaagctcacggtcttgcccctgaaattccagaggatctttaccatttgattaataatgcagtttcaattaggaagcatttttgagaggaacaaggaatgacaaagtactccaatttcaaggttgattcttgt

SEQ ID NO: 264791 - DNA, 390 bp, Glycine max
gggacacagggtgcttttacacgggtatttaaattcgcaacatgcagcatattacctgcgtggggactaagatacgtagggggcccaactatggcagtcattgaactaaaccgcccatccatggaacttgctgttgctgatatctctaaataccgcatcgcatatctggaacattgaccaacttgctatctatgaacctgaccttgatggtgtagcgaagcaatgccggggcaagaacctgttcttgagcactgatgtctaaaagcatgtctttgaggctcacatagtgtttggctctgtcaacacgcgaaccaaaactcatggtcttggagcttgtaaagcagcagacttgacatattgatagagcgcatctggcatgattgctgatgc

SEQ ID NO: 264792 - DNA, 449 bp, Glycine max
gggaaacctgctgttcttacacgtgttgtggatagcatgactgacaacttgagaccaactcgtgctgaagcaacagatgtcgccaatgctgttttagatggaagtgatgccattcttctgggtgctgagactttacgtgggttgtaccctattgagactatatctactgttggcagaatttgttcagaggctgagaaagttttcaatcaagacctttattttaaaaggacagtcaagtatgttggagaacccatgactcacttggaatctattgcatcctctgcggtacgagctgcaattaaggtgaaagcatctattataatttggtttacttcatctggaagggctgcaagattgattgcaaagtataggccaacaatgccagtactatcttgtgtgatcccccgacttaagacaaaccagctaaaagtgagctttagtggagcttt

SEQ ID NO: 264793 - DNA, 414 bp, Glycine max
gggactcattgttcttctcccaggttatttagaatagcaaaatggtgaagatttgctgcgttggggctggatatgtggggggtcctactatggcagtcattgcacttaagtgcccatccattgaagttgctgttgttgatatctctaaatcccgcattgcagcctggaacagtgaccagcttcctatctatgaacctggccttgatggtgttgtgaagcaatgccgtggcaagaacctcttcttcagcactgatgttgaaaagcatgtctttgaagctgacatagtgtttgtctctgtcaacaccccaaccaaaactcatggtcttggagctggtaaagcagcagatttgacatattgggagagcgcaacttgcatgattgctgatgtttcgaagtctgacaagatcgttgtat

SEQ ID NO: 264794 - DNA, 366 bp, Glycine max
cccacgcgtccggacagaagagagcgtcctagtcgcaaccctaataagaagaaccacagcgttcaagcgagtgacatccaccagccatgggtcgtatgcacagccgcggtaagggtatatcctcttctgctttgccctacaaaaggacaccccctagctggctcaagatctcttcgcaagatgtggaagaaaatatctgcaagtttgcgaagaagggtttgaccccgtctcagattggtgtcattcttcgagattctcacggtattgctcaggtcaacagcgtcactggcagcaaaatccttcgcatcctcaaagctcacgggcttgcgcctgaaattccagaggatctttaccatttgattaaga

SEQ ID NO: 264795 - DNA, 268 bp, Glycine max
cgacccacgcgtacgcgggctcagggttcttctacacactatttacatttccatactggcacagatccgctagctcggggctctatatgagtggcgtcctactattgcaggcattgcactcaagtacccatccatcgaatgtgctggtgtcgatatctgtaaatcccgcattgcactctggaacagggaccatcttcctatctatgaacctgtccttgatggtgatgagaagctacgccatggcatgaacctattcttcagcactgat

SEQ ID NO: 264796 - DNA, 444 bp, Glycine max
cgacgttctcgataagcacttggaacgatcctctccttccacttctcgccccatcacctgcgcctccaagaattccaacctccaagtggaggaatctgaaacggagagtgaagagtctgatgttagtggctctgatggggatgacacctcttggatctcgtggttctgtaatctcagagggaatgagttcttttgtgaagtggatgatgattacatacaggatgactttaacctatgtgggttgagcagtcaagtgccctactatgattatgcccttgatttgattctcgacgtcgagtcgtcccatggtgacatgttcacggaggaacagaatgagttgattgaatcagcggcggaaatgctttatggtctgattcatgccagatatgtgttgaccagcaaagggatggctgccatgcttgacaaatacaagaactatgattt

SEQ ID NO: 264797 - DNA, 491 bp, Glycine max
cccggctcgacgcacgcgtgcgcccacgcgtccgattgaatatccatggttttcttagttcttttatccattaaggaactggggattaatatttctaagaagaactatagtagttgaaagatatcttttgcaaatatgcatatttaactgaggttgttataacttgttccttccctcaaaaaaaaaaaataaagaaagaaaaagaacctattagcctccttcattggatatattacatctataaggagtaaattctaccggttcagagaatagaaaaataatcaaaataaaagtcagcagtctcacatctctaattttggtgacagattcaaggggttaaatttgatccataaggtgaatatgtgagacaatggctacctgagttggcaagaatgccaactgagtggatccatcatccttgggatgcaaccgttactgttcttagagcaacatgagttgagctgggtcaaaattatccaaagcccataatt

SEQ ID NO: 264798 - DNA, 468 bp, Glycine max
gggactcattgttcttctcccaggttatttagaatagcaaaatggtgaagatttgctgcgttggtgctggatatgtggggggtcctactatggcagtcattgcacttaagtgcccatccattgaagttgctgttgctgatatctctaaatcccgcattgcagcctggaacagtgaccagcttcctatctatgaacctggccttgatggtgttgtgaagcaatgccgtggcaagaacctcttcttcagcactgatgttgaaaagcatgtctttgaggctgacatagtgtttgtctctgtcaacaccccaaccaaaactcagggtcttggagctggtaaagcagcagatttgacatattgtgagagcgcagctcgcatgattgctgatgtttcgaagtctgacaagatcgttgtagagaaattcacagtcccggttaaaacagctgaggcaatagagaagattctgaccc

SEQ ID NO: 264799 - DNA, 388 bp, Glycine max
ggggctcattgttcttctaccaggttatttagaatcgcaaaatggtgcagatgagctgcgttggtgctggatatgtggggggtcctactatggcagtcattgcacttaagtgcccatccattgaagttgctgttgctgatatctctaaatcccgcattgcagcctggaacagtgaccagcttgctatctatgaacctggccttgatggtgtagtgaagcaatgccggggctagaacctgttcttcagcactgatgttgaaaagcatgtctttgaggctgacatagtgtttgactgtgtcaacaccccaaccaaaactcatggtcttggagctggtaaagcaacacatttgacatattgtcagagcgcatgtcgcatgattgctgatgt

SEQ ID NO: 264800 - DNA, 460 bp, Glycine max
  unsure (1)..(460): unsure at all n locations
cccgcgcgtccgattgaatatccatggttttcttagttcttttatccattaaaaagctcgagattaatatttctaagaagaactatagtagttgaaagatatcttttgcaaatatgcatatttaactgaggttgttataacttgttccttccctcaaaaaaaaaaaaaaaagaaagaaaaagaacctattagcctccttcattggatatattacatctataaggagtaaattctaccggttcagagaatagaaaaataatcaaaataaaagtcagcagtctcacatctctaattttggtgacagattcaaggggttaaatttgatccaaaaggtgaatatgtgagacaatggctacctgagttggcaagaatgccaactgagtggatccatcattcttgggatgcaccgnttactgttcttagagcaacaagagttgagctgggtcaaaattattcaaag

SEQ ID NO: 264801 - DNA, 453 bp, Glycine max
cccgcgcgtccgattgaatatccatggttttcttagttcttttatccattaaaagactcgagattaatatttctaagaagaactatagtagttgaaagatatcttttgcaaatatgcatatttaactgaggttgttataacttgttccttccctcaaaaaaaataaatacagaaagaaaaagaacctattagcctccttcattggatatattacatctataaggagtaaattctaccggttcatagaatagaaaaataatcaaaataaaagtcagcagtcttacatctctaattttggtgacagattcaaggggttaaatttgatccataaggtgaatatgtgagacaatggctacctgagttggcaataatgccaactgagtggatccatcatccttgggatgcaccgtttactgttcttagaacagcatgagttgagctgggtcaaaatta

SEQ ID NO: 264802 - DNA, 412 bp, Glycine max
cccacgcgtccggaaaagggaagtaacttttgtgaataatatgaagggcggtcaagaaaggtcaagaacaccgtcctcttgtaagagaacactaagtcagggttcagttgatatatatgctgctcagtgcaaaaattgcttgaaatggagagagattgatacacaggaagagtttgaagagattagaagtaaagttgctgaggaaccttttctttgcagcagaaaggctaatagttcctgtgatgaacctggtgatattaaatatgattcctctcggacatgggtgattgacaagcctaacctcccaaagactccacaaggttttaagaggagcttggtgcttagaaaagattactccaaattggacgcttactacatcacacctgcaggcaaaaaactgagaacccgcaat

SEQ ID NO: 264803 - DNA, 327 bp, Glycine max
cccacgcgtccggtgatttcagtgagtgatcggtgttcacttgatctcatcataatcgtgagcgtcaattgaagaagatgccgatcagaaacatcgccgtcggaaggcctgaagaggcgactcaccccgacacgttgaaggcggctttggctgagttcatctcaaccttcatcttcgtgttcgccggctcaggctccggcattgcctacaacaagctcaccgacaacggcgctgccacccctgccggcctcatcttgcgctccatcgcccatgcattcgccctcttcgtcgccgtctgcggcggcgccaacatctccggcgggcacg

SEQ ID NO: 264804 - DNA, 367 bp, Glycine max
cccacgcgtccggcgaaaacccccaactccaacctctgttcatcgtctaccgcgctttcttttcaagcagaactatgattaagctttttaaagtaaaggaaaagcagagagaacttgcagaaaatgcaagtggcggaccacctgttaagaagcaaagtgctggagagttgcgtcttcacaaagatataagtgagctgaatctaccaaaatcatgtaccatgcaattccccaatggcaaagatgatctgatgaactttgaagtttcaattcgacctgatgatggatattacttaggtggcacatttttgttttcctttcaagtgtctcccatctatccacacgaagcaccaaaggttaagtgtaagac

SEQ ID NO: 264805 - DNA, 297 bp, Glycine max
tgttgacctcacagtgaggctggagaaggaagcctcctacgatgaaattaaaaatgctatcaaggaggaatcagagggcaagttgaagggaattcttggttacactgaagatgatgtggtctccaccgactttgtgggcgatagcagatcaagtatttttgatgcaaaggctggaattgcattgaataagaactttgtgaagcttgtctcttggtatgacaacgagtggggatacagctcacgtgtcattgacctgcttgtattcggtgccaaaaagtctttttaaggttgtactgg

SEQ ID NO: 264806 - DNA, 264 bp, Glycine max
gaatgataaggtatatgaacaatccttaacagatacttctacaagatgttctatgggtttgatagaaaaaaattcgctcaaaaaaaacgcgaaaatattttaatcgtaacttagaggatttgttacgtagaaaaagaaagatagattcatattcccatacatataaattatataggaacaaaaaaaatcttggattactttttgaaaaaaaagtagaaatccatttttttggagtaaaaatactattccaattataataataag

SEQ ID NO: 264807 - DNA, 383 bp, Glycine max
cggactggaattcccggctacgacgtcacgcgtacatgggtctcttcttcttctatgtggacggtgtgtgtgattttggcatcactggccgctgcagcactctgtgccaacccacgcaggccagtggatgtacaatttggccgaaactacgtgcccacatgggcctttgatcacatcaaatatttcaatggtggttctgacattcagcttcatcttgacaagtacactggtactggcttccagtccaaagggtcttacttgtttggtcacttcagcatgtacataaagatggttcctggagattctgctggcacagtcactgctttctatttatctttccaaaacgcggagcatgatgagatagactttgagttcttggggaa

SEQ ID NO: 264808 - DNA, 365 bp, Glycine max
ccggaccgacccacgcgtacgcccgggcgtgcgaaaagaaggaagaaccagctgaagaatctgatgatgacatgggtttcgggctggttgactaatttatgtaatgcttttgttgagtttatttggttagaattgaagttgtgtttgcctttcatttcaggtgttattttagtgtattcatgttacattgcaactacttttaatttccatagttaattaaagcttcaacgtttctgtctcttgtggttttaaattgtgatacctgataaatttacaattccccatctttgtgaagatggcaggagtgatgataagatgcctaattgcattaaacttcaacctcaaatgtctttgagcaagcaatg

SEQ ID NO: 264809 - DNA, 372 bp, Glycine max
  unsure (1)..(372): unsure at all n locations
ccgggccgacccacgcgtgcgatttgttgctgcaggaattcacagcccggcctgatatagcagatgattgttttttgttggcctcaaggtgtattcgctactgtcctcaactgtttattccctcgtctgtttttccttcattagtggattgctctatgattgggatcacagtacagcatagggaggcttcgaattccatattgcatttcttggctgacatttttgatcttgcgaattcctctgtgggggagcaatttataccaataagagatagtgtaataattcctcgaggtgccagcatcaccagaattttggttgcttcattaacgggagcacttnctaaatctcgaatggatgtgggatcttatacac

SEQ ID NO: 264810 - DNA, 369 bp, Glycine max
atggctcccaaaccgcctagtacgggtctgtttgttggactgaacaagggtcacgtcgtcaccaagaaggaattgcctccacgcccctcagatcgtaaggggaaaacaagcaagagggtgcactttgtgaggaacctcataagagaggtagccggttttgcaccctatgaaaagcgtataactgagttgctgaaggttgggaaggataagagggcactgaaggttgcaaagagaaagctcggaacacacaaacgcgcaaagaagaagcgtgaggaaatgtccagtgttctcaggaagatgagggctggtggtgctggagacaagaggaaataagtcttaattactggtttccagattcactagatggac

SEQ ID NO: 264811 - DNA, 305 bp, Glycine max
cttcttctctggttgattcggatctagagtcttcagtttctcctcgttgttcttcgctttcgtgttttcaatttcgattctttcgttaatttaataagatgtttgggagggcaccgaagaagagcgataatacgaggtactacgaaatcctcggcgtcttcaagaacgcttcgcaggatgatctgaagaaggcttacaagaaagccgccattaagaatcaccccgacaagggcggtgatcccgagaagtttaaagagctggcgcaagcttatgaggttctgagtgacccttagaagcgtgagata

SEQ ID NO: 264812 - DNA, 376 bp, Glycine max
tgttgacctcacagtgaggctggagaaggaagcctcctacgatgaaattaaaaatgctatcaaggaggaatcagagggcaagttgaagggaattcttggttacactgaagatgatgtggtctccaccgactttgtgggcgatagcagatcaagtatttttgatgcaaaggctggaattgcattgaataagaactttgtgaagcttgtctcttggtatgacaacgagtggggatacagctcacgtgtcattgacctgcttgtattcgttgccaagaagtctttttaaagttgtactgaaaaaaaagtagcttgtctagacattatgtgctggtgtctagctgcgatttagtgtcttcttgctcgggcagaaatgaga

SEQ ID NO: 264813 - DNA, 431 bp, Glycine max
cagagtttgagtggacctgtctcagctaccctttaccttggttattcactactcatggccattgcaatcatgttgtcaaccggcaccattggcttccttatgtcattctactttgtgcactacttgttctcatcagtaaagatagattgaggttcttggtgtcattgcatattaactatgaaaaaaggtgaatgatataacttggatcacattggataagtaagggcacgggaggttaaattcaatggctgatttaaattgcgaagggatctgcaagttggtcttcttctggctggtttccaaagtaatggactcattcaaggattccactaagggttgaaaacatggttcaaggattttggtcaaggttctttaaaagggtggattcaaacctctatttaattcaaaaccttagaaaaaaggaggtaggt

SEQ ID NO: 264814 - DNA, 444 bp, Glycine max
accgacgcgtgcgcagagtttgaggggacctgtctcagctaccctttaccttggttattcactactcatggccagtgcaagcatgttgtcaaccggcaccattggcttccttatgtcattctactttgtgcactacttgttctcatcagtaaagatagattgaggttcttgttgtcattgcatattaactatgaaaaaggttgattgatataacttgatcacattgcatagtagggcaacggatgtttaattcattgtctgattttatattgcgatgggatctgcagtttgttctccttctgcctgtttcccaaagtagtgtactcattcaagtattcaactagtgtttgagatcatgtttcaagtattttgttcaagtttctttaaaaggttgtaattcaaactctcatctcatttcaatactgtagaaaaatgatgttagat

SEQ ID NO: 264815 - DNA, 476 bp, Glycine max
  unsure (1)..(476): unsure at all n locations
ctgagttgcaagattcacttcaaattatgcgtttcgctgatcggttcctcatcacatcaaacgacgtcgcagatcatcgcaattccttgattatttccttttgttgatacgcggaatcgcgcacacggtgctggtgtgtgcactgaggtagaaagaagaagattgaattgtaaacagcatgaattaccttcttggagctttcaagcctgcatgtaatgtcttgatcacgtttaatgatgggaagaaccggaagcaggttccgtttaaaaaagaaaatggtcaaatggtcacagtcccacttttccaaagtcaagaaaacattggtgggaagattacaatagaaccaatgcaagggaagaagattgatcacaatggtgtaaaagttgagctccttggacagatagagatngtatttgacagaggaaatttttatgactntacttnccttgtacgagaactagacgttcctggagaaa

SEQ ID NO: 264816 - DNA, 296 bp, Glycine max
  unsure (1)..(296): unsure at all n locations
cttgatgatcccaacactttcggtaacaggattcacaggatgctgaagcttggactgagcattgatgaagatgctggtgaagcagatgctgacatgcctnctcttgaggacgctgatgcagatgctgagggtagcaagatggaagaagttgattaaatctgacttaattgcctgttacgtttttagaaacaatgattggagaaacagtctttttactatgttttatgttttttgaattttcgaaattttggaacgttggctagttaggtgccgtatgtagtagtttctttatggta

SEQ ID NO: 264817 - DNA, 263 bp, Glycine max
  unsure (1)..(263): unsure at all n locations
gaccgacgcgtacgcccacgcgtccggtgaagctggatcattccttcgcggtatcgatatgaaccgtttaccttgggtngtggaaaactaagagggggcaggtgtttcatctccaaacagcacggtttctagcgtcagtgtaaagcgcatcgagagggaaaccaatgtataataaaacgacacatacagagcttgttccataagcatcattatcgactaacaatatgctgtaacctctataaagaaacttatactctccaaat

SEQ ID NO: 264818 - DNA, 403 bp, Glycine max
cccacgcgtccggtgaagctggatcattcctccgcggaatcgatgtgaaccgtttaccttctgtggttgattgcgaagaggaagcaggtgtttcatctccaaacagcacggtttctagcgtcagtggaaagcgcagcgagagggaaaccaatggagaagaaaacgacacagacagagcttgttccagaggcatcatcagcgacgaagaagatgctgaaacctctagaaagaaacttagactctccaaagatcagtcaattgtcctggaagagagcttcaaagaacacaacactcttaaccccgtaagtaaacgtacacatgccaattaattttttttgtcctgtttcagagacatagtatcctctgatctactggatcatatattaaatctcactcacgatgt

SEQ ID NO: 264819 - DNA, 296 bp, Glycine max
catctccaaacatcacattttctatcttcaatataaatctcagctatatataaaccaatttataataaaactacacatacagatcttattccataatcatcatcatctactaacaaaatgctcaaacctctataaataaacttatactctccaaatatcattcaatatttcctgtaataaatcttcaaagaacacatctcatttaaccccatatgtaaacttacacattccaattaaatttatatatcctttatcatatacatattattctctaatctactttatcatatattaat

SEQ ID NO: 264820 - DNA, 441 bp, Glycine max
cacgcgttcggtcaagctaaatcattccttccagtttatcacgtgaaccgtcataccttgggccgtggattactaagaggaagcaggtgtttcatctccaaacagcacggtttctagcgtcagtggaaagcgcaccgagagggaaaccaatggacaagaaaacgacacagacagagcttgttccagaggcatcatcagcgacgaagaagatgctgaaacctctagaaagaaacttagactctccaaagatcagtcaattgtcctggaagagagcttcatagaacacaacactcttaaccccgtaagtaaacgtacacatgccaattaattatttttgtcctctatcagatacatagtatcctctgatctactggatcatatattaatctcactcaccatgtatatgtgcgattgatcatagaaaattttgttcacaatgtg

SEQ ID NO: 264821 - DNA, 383 bp, Glycine max
gttgaatcgtgaaaatgttcagaaaccagtacgacacggacgtgaccacatggagccctgcggggaggctgttccaggtggagtacgctatggaggcggtgaagcagggctcggcggcgatagggctccgatcgaagacccacgtggtcctcgcatgcgtcaacaaggccaactccgaactctcctcgcaccagaagaagatcttcaaggtcgacaatcacatcggcgtcgccatcgctggcctcaccgccgatggccgcgtcctctcccgctacatgagatccgaatgcatcaactataattacacctacgagtcgccgctccccgtcggcagactagtcgttcagctcgccgataaggctcaggtttgcacacagcggtct

SEQ ID NO: 264822 - DNA, 343 bp, Glycine max
acccacgcgtgcgatagagacctaaactaagaataaatttcaatttatacgaagacaggaccaaattgagggcatggtgtacatttaagaaagaaagcgacacattccattaatgaaacacatacatacattgctacttctgtcaaatctaacatgcataagaccattgcctccgtccacgagaacgcctacagaatgacatcacatcatccgatgcacatggagttcgacactcacatcaaagacgccatcattaaccatactgagcttgacaagcatgcgtcgcgttaccttaacacctcattcatacactatcataacacttatgagcacatgttacatg

SEQ ID NO: 264823 - DNA, 400 bp, Glycine max
cccacgcgtccgcccacgcgtccgaaaaaaatgggttcttcttcttccatatggaccgtgtgtttgattttggcatcactggcctctgcagcactctgtgccaaccctcgtagaccagtggatgtacaatttggccgaaactacgtgcccacatgggcctttgatcacatcaaatacttcaatggaggttctgacattcagcttcatcttgacaagtacactggtactggcttccagtccaaagggtcatacttgtttggtcacttcagcatgtacataaagatggttcctggagattcagctggcacagtcactgctttctatttatcttcccaaaatgcggagcacgaccagatagactttgagttcttggggaacaaaacaagaccaccttacattt

SEQ ID NO: 264824 - DNA, 402 bp, Glycine max
  unsure (1)..(402): unsure at all n locations
cccacgcgtccggccacgcttccgaaaaaatttgagactttttcttccatatggaccgtgtggttnatggttacatcactggggtctgcagcactctgagccaaccctcgtagaccagtggatgtacaatttggccgaaactacgtgcccacatgggcctttgatcacatcaaatacttcaatggaggttctgacattcagcttcatcttgacaagtacactggtactggcttccagtccaaagggtcatactttgttggtcacttcagcatgtacataaagatggttcctggagattcaactggcacagtcacttgctttctaattatcttcccaaaatgccgtatcacgactagatagactttgaattccttggtaacataacaggaccaccttacattt

SEQ ID NO: 264825 - DNA, 386 bp, Glycine max
gcgtccgcccaggcgttcggtgaagctggatcattccttcgaggtattcatggcaaccatcatacctgcgccctggtgattagccaataggaggcagaggactcatttgcagacatcacgcattgtaccgtcagtataaagctcagatcgaggacccacattgtcctagaatgcgtcaacaacgccaactgctaactctgctatcaccacaagaagatcttcaacttcgaccattacatcgaaagtcaccattcttcagcctaaccgccaatggcctcgtactctgccgctacatgctaaccaattgcatcaactataattacacctaccattcgactctacctatcttcagactaatcatacacatagccgattatgctctactt

SEQ ID NO: 264826 - DNA, 286 bp, Glycine max
agaaaacctaagcttagaattagaaacaaagaaaagaagaaaggaaagaattgatcgttgaaaatgcagggaggaaagaaagcgggagagtccattaaggaaacagctacaaacattggtgcttctgccaaggctggcatggagaagaccaaggccactgtccaagagaaggcagaaagaatgacagcacgtgatccggtgcaaaaggagttggcaacccaaaagaaagaggcaaagatgaaccaggcggagctggacaagcaggcggcgcgtcagcataacacgg

SEQ ID NO: 264827 - DNA, 296 bp, Glycine max; identical to SEQ ID NO: 263119

SEQ ID NO: 264828 - DNA, 308 bp, Glycine max
ggcaaagatggggatgtggcactcttctttggactctcaggtaccggaaagaccactctttcgaccgatcacaataggtatctaatcggagatgatgaacactgttggggtgacaatggtgtctccaacattgaaggtggttgctatgccaaatgcattgacctctcacgggagaaagagccagatatttggaatgcaatcaggtttggcacagtgttggaaaacgtggtgtttgatgagcacgaccgagaagttgattactctgacaaatcagttacagaaaatactcgggctgcttatcctataga

SEQ ID NO: 264829 - DNA, 279 bp, Glycine max
gcgtacgctttgctactttgagtcttcttgatccttcttattcttcttgaactcaaacatgtcagatggggtgggtcatatagatttctggccaagtccatttgggatgagggtcatgattgcacttgctgaaaagggtatcaaatatgagtacaaaaaataagacttgagtagcaatagtcctcttctacttcaaatgaacccggttcacaagaagattccggttctcatccacaatggcaaacccatttgtgaatccctcattgctgttcagtacat

SEQ ID NO: 264830 - DNA, 209 bp, Glycine max
aatttgctcttgcaatgttcccaacttaaccctatattctttcatgaagaaaatacaaaacaatgctacttttgaaaatttaagaccatataacatcttctgccacatactccaaatctagtggggcaatcattaaacaaaactctaaatcttaagaaagcaatgataaaactgcttatggccctactgttttaccactaagcatttat

SEQ ID NO: 264831 - DNA, 387 bp, Glycine max
caaagacatccttctcctggatgtggctcccctcactctcggaattgaaactgttggtggagtcatgacaaagttgattcccagaaacactgttatcccaaccaagaaatctcaggtgttcaccacctatcaggaccagcagactacagtctccattcaggttttcgaaggcgagaggagtctcacaaaggattgccgccttcttgggaaatttgatctgtctggaattcctccagccccaaggggtacgcctcaaattgaagtgaccttcgaaagttaatcccaccgcattctaaatgtgaaagccgaagacaagggcccttggtaatcagaaaagatcaccattaccaacgaaaagggacgtcttaaccaggaagaaattgagag

SEQ ID NO: 264832 - DNA, 313 bp, Glycine max
cgccatgctgttcttggagctacaaactctcgtcctgatttgatattgactggacaccaagataatgcagaatttgctcttgcaatgtgcccaactgaaccctatgttctttcaggaggaaaggacaaaacagtggtgttgtggagtattgaagaccatataacatctgctgccacagactccaaatctggtgggtcaattatcaaacaaaactctaaatctggagaaggcaatgataaaactgctgatggccctactgttggaccacgaggcatttattgtgggcatgaggatacagttgaagatgtgactt

SEQ ID NO: 264833 - DNA, 274 bp, Glycine max
cttttgtactttgagtcttcttgatccttctttttctccttgaactcaaacatggcagatgaggtggtgctgctagatttctggccaagtccatttgggatgagggtcaggattgcacttgctgaaaagggtatcaaatatgagtacaaagaagaggacttgaggaacaagagtcctcttctcctccaaatgaacccggttcacaagaagattccggttctcatccacaatggcaaacccatttgtgaatccctcattgctgttcagtacattg

SEQ ID NO: 264834 - DNA, 353 bp, Glycine max
cccacgcgtccgcttctctctctctctctctgctttacttgcttgaagcaatggccaaagcgttggcatcagtgctgctgtttctcctcgtagctgtgagtaatgtgtttgctgtagagcttgaacttgaaactcttccaccctcttaccctcaccctcaccctgttcactcccccacaccagcacctcttcacccaccagcaaatgctcctcacccacaccaccaccaccaccaccaccaccctccagcaccagcacctgttccttcaccttctcaccacaattaccctactaccccttgccctgctaagccttctactcaccaccatcaccatcacccttctgctcctgtt

SEQ ID NO: 264835 - DNA, 284 bp, Glycine max
cctaaacaactctttctcttcttccttcgctcgttgttctccctcgcgtagatcgacaatggcggagacagagacgtttgctttccaggctgagatcaaccagctcctcagtctcatcatcaacaccttctactccaacaaggagattttccttcgtgaactcatcagcaacgcctccgatgctttggacaagattcgatttgagagtttgacagataagagcaagctcgatgctcagccagagttgttcattcatattattccagacaagactaacaatacac

SEQ ID NO: 264836 - DNA, 421 bp, Glycine max
atgaaatcagaatgaggtttgacatgccgggtcttgccaaggaagatgttaaggtatcagtggaggatgatatgcttgttataaaaggtggccacaaaagtgaacaagaacatggtggagatgattcttggtcaagcaggacctatagttcctatgatacccgtttaaagctgccggataattgcgagaaggacaaggttaaggcagagttgaaaaatggtgtgctttatatcaccattcctaagaccaaggttgaacgtaaggttattgatgtccaagttcagtgagatatgcttgggctttgtattatgcaacacggttttttaccatgtttttacgtttttaacatatatacacccattataagggttaaatattttgtattaagcgtagagaagtttaaataaaactgctgttgtat

SEQ ID NO: 264837 - DNA, 375 bp, Glycine max
  unsure (1)..(375): unsure at all n locations
cttttctactttgagtcttcttgatccttctttttctccttgaactcaaacatggcagatgaggtggttgtgctagatttctggccaagtccatttgggatgagggtcaggattgcacttgctgaaaagggtatcaaatatgagtacaaagaagaggacttgaggaacaagagtcctcttctcctccaaatgaacccggttcacaagaagattccggttctcatccacaatggcaaacccatttgtgaatccctcattgctgttcagtacattgaagaagtttggaatgacagaaatcccttgttgccttctgacccttaccagagagctcaggctagattctgggctgattatngtgataagaagatatatgat

SEQ ID NO: 264838 - DNA, 447 bp, Glycine max
  unsure (1)..(447): unsure at all n locations
cccacgcgtccgcggacgcgtgggtgctattgaagcctctggcagagctttgcaactttatgaatcgggtgtatttactggtgaatgtgggacaagtttagaccatggtgtggttgttgttggatatggctctgaaaatggtatggattactggctagtgaggaattcatggggcactggatggggtgaggatggctatttcaagatgcaacgcaatgtgagaacccccacgggcaagtgtggaattacaatggaggccttctacccagtgaagaatggtttaaactctgctaattcagtttatgaaagcactgangtgtatgttagcagtgcttgatataacaaccttcatcgnntattatgatctttggaaattgggaagaggaacaagtgctcaagttgcaaatgtttctggtatctttgatgcttctattgaatatggtctgt

SEQ ID NO: 264839 - DNA, 473 bp, Glycine max
  unsure (1)..(473): unsure at all n locations
ggctgaagcacaactacgagaccagcatggcaaccctgtcccactcaccgatcaatacggggatccggttatcttaactgacgagcgcggtaatcccgtccaactcactggtgtcgctaccaccgctaccggcacagcaggttctgggtttgggtcctatggtaccggtgcttacggtggtggtgcaagtgcaaccaccgttgcagatcttttggcaacccaaccaaggagtggcagggaggctagagagcttcgtcgttcctccagttcaagctctagctcgtctgaggatgatgggcaaggtgggaggaggaagaagggagtgaaggataaaataaaagagaaactaccaggggtaggaggagggaataataataaggagcatgcacacacaacaactgctncaaccaccgncactaaccaccctgctgatcagcatgagaagaaggcactatggagaagatcaaagaaaa

SEQ ID NO: 264840 - DNA, 399 bp, Glycine max
attgctgctgtttgcctattggtgtactttggggtctctaccctgctggatgcctcatctagcgatggccaaaaatcagatgaagagcagaaggaggcagaactagcagtttctgaattttctggaaatggtgctgggatactatctgctgctagcacagttgccagtacttttctcttagtttttgttgctgaatggggcgacaagtcatttttctccacaattgcccttgcagcagcttcttctccccttggagtcatagctggagcactggctggtcatggtgttgcaactttgctagctgtacttgggggttctttacttgggacgtatttgtcagagaaggttattgcctacaatcgagtgttctctttctcgtctttgccgcaataaccttat

SEQ ID NO: 264841 - DNA, 296 bp, Glycine max; identical to SEQ ID NO: 263119

SEQ ID NO: 264842 - DNA, 301 bp, Glycine max
cgaccgacgcgtgcgcttggtgatcccaacacttttcggttacagtgtatcacaggatgctgaagcttggagtgagcgttgattaatatgctggtcaaggatatgctgacatgcctccttttgatgactctgatgcatatgctgacggtagcaagatggaataagttcgttaaatctgacttaatcgcctgttacgcttttacaaacactgattggagaaacagtctttctactatgttgtatgtcttttgaattttcgaacttttggaacgttgcctagttaggtgccgcatgtattagg

SEQ ID NO: 264843 - DNA, 427 bp, Glycine max
cccacgcgtccgcccacgcgtccgcccacgcgtccgcccacgcgtccgtctccctctttctcgtcactagctctgagcattcttctctcgctctctgccttccatcacactcggcatttcctttcccaagatagtagaagatggcagacactgaggatattcaacctcttgtttgtgacaatggaacaggaatggttaaggctggatttgctggagatgatgccccacgtgctgtgtttcccagcattgtaggtcgtcctcgtcacactggtgtgatggttggcatgggccaaaaagatgcatatgttggtgatgaggcacaatctaagaggggtattttgactctcaagtaccccattgaacatggaatggtgagcaattgggatgatatggaaaagatttggcatcataccttctataatgagct

SEQ ID NO: 264844 - DNA, 499 bp, Glycine max
  unsure (1)..(499): unsure at all n locations
ggaatctgccgggtcgacccacgcgtgcgtttgaatacattccttgtagtttatactgaaagatgggtttgaagatggcgttagtnatcctaggcctttccctcatgctccttttggtctcctctgaggtggcatccacgaatacaaaagaggaggcaaatggagtggatgatgccaaatatcccggtggaagctatggagggggttacccaggtcatggcggtggcggttatcctggccatggcggtggcggttatcctggccatggcggtggtggtggctatcctggtcatggtggtggccaccctggtcatggtggcggctaccctggccgtggtggtggatactgtangcatggctgttgcggtggccggacatacaacggaggttgcagaaggtgctgctataacgctggcgaaactgttgctgcacaaactcaagattagactcacgattaagacgatgcagttctacttaattagtactttttatattttaa

SEQ ID NO: 264845 - DNA, 116 bp, Glycine max
gaaaaaaaaaaaagccttttactttttttcttttgcatgatttgaatcttgattggaaaagcttcgaattggggtgttttacccatcaattcaattttaagccgtgccttcttcag

SEQ ID NO: 264846 - DNA, 351 bp, Glycine max
cgcgtcgctgctccgtaccagtttcactgcataaatttgagagaaaactctgcaaacatgggggtttatcaggaccttcttacaggtgatgagcttctctcggactccttccgttacaatgaaattgagaatggaatgctgtgggaagttgaggggaagtgggttgttaagggagcagttgatgttgacattggtgcaaacccttctgctgagggtggagaagatgagggagtcgatgacgcagctgttaaggttgttgacattgttgatacattcagacttcaggagcaacccgcttttgataagaaacagtttgttaccttcatgaagaggtttatcaagagattgact

SEQ ID NO: 264847 - DNA, 470 bp, Glycine max
cgcaaattcaaaggaggatctctcttgcgttttctctaggttttcgctatggcgtggaagcgaattttgaaggagcttaaggatttgcagaaggatcctccaacatcttgcagtgccggtcctgttgttgctgaagatatgttccattggcaagctacaattatgggtcctccagacagtccctatgcaggaggtgttttcctagtgaccattcatttccctccagattatccctttaagccacccaaggttgcattcaggacaaaggttttccacccaaatataaatagcaatggaagcatttgccttgatatattgaaggagcagtggagccctgctctaaccatttccaaggtgttgctctcaatttgttccctattgacggatccaaatcctgatgatcctttggtccctgaaattgcacacatgtacaagacagataggaacaagtacgagtcaaatgcaagaag

SEQ ID NO: 264848 - DNA, 273 bp, Glycine max
gccaaaatgaacatgccccctaaagtgagtgctccatcgccgttcacgatcgtgaagggagctctggactcgcacgggccggatctgaagcgtatctactgcaactaagaggtgagcatctacgtgatgcggttgttgacccctgaggacgaggattccgccatcgaccagctcttcattcacgtcgatgtctccaaaccttagcagaacgaatccttgattttcctctgcggtttggacgaggtttctcttgggatttactctggttccatg

SEQ ID NO: 264849 - DNA, 462 bp, Glycine max
cgccatgctgttcttggagctacaaactctcgtcctgatttgatattgactggacgccaagagaatgcagaatttgctcttgcaatgtgcccaactgaaccctatgttctttcaggaggaaaggacaaaacagtggtgttgtggagtattgaagaccatataacatctgctgccacagactccaaatctggtgggtcaattatcaaacaaaactctaaatctggagaaggcaatgataaaactgctgatggccctactgttggaccacgaggcatttattgtgggcatgaggatacagttgaagatgtgactttctgcccatctagtgcacaggagttctgtagtgttggagatgattcttgtctcatcttatgggatgcacgtgttggctctagcccttgggttaagggtgagaaagctcataatgctgatcttcacttggtggacttgaatccacatgat

SEQ ID NO: 264850 - DNA, 141 bp, Glycine max
gaaaaaaaaaaaagccttttactttgtttcttttgcatgatttgaatcttgattggaaaagcttcgaattggggtgttatacccatcaattcaattttaagccgtgccttatgtaaaaaaaaaaaaatattgtaaataaat

SEQ ID NO: 264851 - DNA, 358 bp, Glycine max
gcaccagtttcaccgcacgaatatcttgttgtttggagcgatccgagaaaaactctgtagacatgttggtttaccaggacctccttacaggtgatgagcttctctctgactccttccgttacaaggaaattgagaatggaatgctgtgggaagttgaggggaagtgggttgttaaaggagcagttgatgtagacattggtgcaaacccttctgctgagggtggaggagaagatgagggagttgatgatgcagctgttaaggttgttgacattgttgacacattcagacttcaggagcaacccgcattcgataagaagcagtttgttaccttcatgaaaaggtttatcaagaatttgac

SEQ ID NO: 264852 - DNA, 328 bp, Glycine max
attgctgctgtttgcctattggtgtactttggggtctctaccctgctggatgcctcatctagcgatggccaaaaatcagatgaagagcagaaggaggcagaactagcagtttctgaattttctggaaatggtgctgggatactatctgctgctagcacagttgccagtacttttctcttagtttttgttgctgaatggggcgacaagtcatttttctccacaattgcccttgcagcagcttcttctccccttggagtcatagctggagcactggctggtcatggtgttgcaactttgctagctgtacttgggggttctttacttggga

SEQ ID NO: 264853 - DNA, 454 bp, Glycine max
cccacgcgtccggactgcccaagatgtatcgacaatgttacggtgcgggccaaaaaaccatagtttttctgatcaacaatggtggatacaccatcgaggttgaaattcatgatgggccgtacaatgtgattaagaactggaattacactgggttgattgatgcaatccacaatggtgaagggaaatgctggactgccaaggtgttctgtgaagaggagctagttgaagcaattgccacagccacaggacccaagaaagactccttatgcttcattgaggtgattgttcataaggatgacaccagtaaagaattgcttgaatggggctcaagggtttctgctgccaatagccgtcctcccaatcctcagtaatcttcagaatttatcctatgactaaattgctgcagttgccctttagctctatgaaagtgagaatcatttgagatgatgccctt

SEQ ID NO: 264854 - DNA, 272 bp, Glycine max
gtcttcttctctaaaataaaaaaccctaacttctgaacctttcaccgcatcgccaccgatgccctatctccactaatcaaagaaaagaaaatgagtagacgctcgagcagaactgtctacgttgggaatctacccggtgatatccgtgaaagagaagttgaagatttgtttctgaagtacggacacataacacacatcgacctaaaggttcccccaagaccacctggttatgcatatggagagtttgaagatgctcaagatgctgaggatgc

SEQ ID NO: 264855 - DNA, 296 bp, Glycine max; identical to SEQ ID NO: 263119

SEQ ID NO: 264856 - DNA, 361 bp, Glycine max
cggacgcgtgggttatcctaagtctttgggaatagtgctgcaatggcttcaagtcaggaggaggtgacccttttgggagctactggaagcccatttgtgtgcagggctcatattgccctcaagttgaatggagttcaatacaaatatgtcgaagaaaatttgaggaacaagagtgaactgcttctcaaatccaacccagttcacaagaaggttccagtgtttattcacaatgagaagcccatagcagagactctcgagattgctgaatacattgatgagacatggaagaacaaccccatcttgccttctgatccttaccaaaaagccttggcttgtttctggtcccaattcattgatgata

SEQ ID NO: 264857 - DNA, 364 bp, Glycine max
atgaaatcagaatgaggtttgacatgccgggtcttgccaaggaagatgttaaggtatcagtggaggatgatatgcttgttataaaaggtggccacaaaagtgaacaagaacatggtggagatgattcttggtcaagcaggacctatagttcctatgatacccgtttaaagctgccggataattgcgagaaggacaaggttaaggcagagttgaaaaatggtgtgctttatatcaccattcctaagaccaaggttgaacgtaaggttattgatgtccaagttcagtgagatatgcttgggctttgtattatgcaacacggttttttaccatgtttttacgtttttaacatatatacacccattat

SEQ ID NO: 264858 - DNA, 263 bp, Glycine max
cttttaatttaaaagaaaaagtgcttaaacatgtctattctgacttagaaggagagatgcattggagtaccgatgtgtaccatgcatcagaatttagatatagtaatgtccatatcttaccaaaaacaagtcatttatggattttatcaggaaaatcatacaggtccggttcagtctctttttcaatccgaaaagatcaagatcaaatgaacattcattatctttctactggagaaagagatttttgtaaccttttagcaagt

SEQ ID NO: 264859 - DNA, 307 bp, Glycine max
  unsure (1)..(307): unsure at all n locations
cgcgaccgaatttatccattcaccacanagtttcttcaatggtccagcctcaaccagagtcccacgccgccagtggctcacacgagccagtgctcaaaatcccaaagctccaccaaaacggcgacgtttccgcaaccgctccctttctccgcgtcaagaagctctccgacaaggccgttttgccctctaaggcttcccctctctccgccggttacgatctctctagcgcggtggagacgaaggtcccggcgagagggaaggctctggtggccactgacatcagcatcgcgattccagaaggcacata

SEQ ID NO: 264860 - DNA, 398 bp, Glycine max
attcccggtcgaccacgcgtacgacacgcgtccggaccacccaaaaacctactagttccatggtgggctatggaaccacctgccggcaaagggttcatcacagaggttcatccattgtttccatcaaggttaacccttcatttgtaagctgccgtggaggttatgctacatggtttagcagcaaaaggagcgaccccaacctgctcactggtgctcttgttggtggacctgatgcatatgatgactttgctgatgaaagagataactatgagcagacagagccagcaacatataacaatgctcctcttattggtattctggcaagactaggtggaggtcatggtggctataaccagcttcttccagttgttgttccagctcctaagcctgctgttacc

SEQ ID NO: 264861 - DNA, 353 bp, Glycine max
  unsure (1)..(353): unsure at all n locations
aaattctccagccatgacagtttcttctttatctgcttcctccaaacttatactagtgncgccatgcttcatggtttggcctgatctccacaccctttcgttncttcaccaacacccacaaactatcccctctttcctccttcttcctccaccactaccaccaccttcccgtgccgtcccctcaccgtccgcgccgcccgcggcaagttcgagcgcaagaagccccacgtgaacatcggcaccatctgccacgtggaccactgcaagaccacccttaccgccgtcctcaccattgtccttgccgccctcggcaacaactcccccaaaaaatacgaacagatccaccccccccc

SEQ ID NO: 264862 - DNA, 399 bp, Glycine max
  unsure (1)..(399): unsure at all n locations
ggaatttccggggggacggacgcgtncgaagaataataagaagaagcaagagatagagaggagagaatatggcgaccacacgcggttggtttggcactatgttgagcacctccttccttaanaggcaggcatcantgaacatgacaagcttcaaggctaacgctgctgtctttggtgtaaaaagaggacgaggaggtcgtgtgagggccatggcaacttacaaggtgaagctgataactccagagggagagcaagaatttgaatgcccacatgatatatacattcttgatcaggcagaggaaaatggcattgatcttccctactcatgcagggctggttcttgctctgcatgtgctgccaaagttgtgagtggcaaactggaccagtcagatggtagct

SEQ ID NO: 264863 - DNA, 356 bp, Glycine max
acgcccactcgtccggttccagacagtgtcgaataataagaagaagaagatggcattgggtagtccggctcttcccctgagatacgtggctcacgttctggcacttgttgccagcatcttggtcgtgctctgggtcctcaattttaggggtggcttggcttgggattcttataacaaggccctcatcttcaatcttcatccagttcttattgtcattggcttactagtccttgggggtgaagctattataagctacaaagcattacccctgaagaaggaagtgaagaaattgattcaccttgttttccatgccgtcgcattaatacttgtaataatttggaatttattctgccttt

SEQ ID NO: 264864 - DNA, 364 bp, Glycine max
acgcagatttggttattctctatttgtgtgctcaatatggagggaatcttttcgttgattacggggagaccgtaatgtaggggagtcggatcttcctcaactgctgaacaggttatcgaaggaattgatgccagcaacctcactgcaatcatcacaggaagagccagtgtcatatggttggagacagcacgtgttctggcaattttaaaggcccatgtcataattgctgccagaaacatggagtctgcaaaggaagctaaacaactcatacttgaagaagacgaatcatctcgtgtggacataatgaagcgtgacctatgctcattgaaatctttcagaacctttgttgacaactttattactc

SEQ ID NO: 264865 - DNA, 371 bp, Glycine max
caataatcatgtaccacctgaagtgtctgttcccagaggcggatgataccgggacagatttattgatggatttgttggccctctgacaagtgttgctccaatgtttccctgttatgagaatacatcagagtgggatgattttggagaggtcataaatccagatgattatgtaattaaggatgaagacatggaccagacagcaatgcatggaggtgatataaatggaaaactagatgaaggtgctgcaagtttgatactcgatacaaatccatcaaaagttgtatctgacgaaaggactgtgcaagtgaggtgctcattggtttacatggattttgaaggacgttcagatggaatatccattaaaaatattc

SEQ ID NO: 264866 - DNA, 444 bp, Glycine max
cactattatacaactataataataacggctgcatagatagcacacttagccattagtatgcaacgaaaaccgcaacactttgatttttctcttatctccttttctcttctataaatatggctcatctgagccacaagaccttggtttatcttccagaaatgaggcctgaacatgaagctgaggaaggccaacccagaaaaagtcttggttctttttcttcttggcctcatcgtttggagaatgttttccccgtttatgccatgggaacttccaaccctgcagtcttggattcttcacttcacacttctgattgtcttgatcctatttgggatgctgtcagagaagaagccaagttagaggcagaaaaggagccaattttgagtagcttcttctatgccactattctgtctcatgattgcttggagcaagcattggcttttgctc

SEQ ID NO: 264867 - DNA, 398 bp, Glycine max
  unsure (1)..(398): unsure at all n locations
caccattaatgtcnaacaaatttaccatttcaagtccaaggccgacgccggggcctccaaaacctaccgtcagcaagccggtaccatccgcaagaacggctacatcgtcatcaaaggccgcccctgcaaggttgtggaagtttcgacttccaaaactgtaaagcacggtcacgctaagtgtcactttgttggaattgatattttcactgccaagaaacttgaggatattgtgccctcttctcacaactgcgatgttcctcatgtgaatcgtactgattaccagctcattgatattgctgaggatggatttttgagtctgcttactgaaaatggtaacactaaggatgacctcaagcttcccactgatgagagtctgctcactcaaataaaggtatgat

SEQ ID NO: 264868 - DNA, 409 bp, Glycine max
  unsure (1)..(409): unsure at all n locations
cccacgcgtccggatcgagataactagaaacagtgtgatgaaaatgaaggtccttggtgggttcgttgctacaattgtgggagcatggcaatgccatgcgtacgatatgttccctctccgaatgaacactggctatggtgcccgtactccggaggtgaaatgcgcaagttggaggcttgctgtggaagcacacaacatctttggctttgagaccattcctgaagagtgcgttgaagcaacaaaggaatacatccatggcgaacaatatagatcagactccaaaacagttaaccaacaagcttacttttatgccagagacctcgaagtccatcccaaggacacatttgtgttcagtatagatggcaccgtactctctaatattccatactacanaaaacatggatattgg

SEQ ID NO: 264869 - DNA, 280 bp, Glycine max
tgctacaagatttacccatacttaaactacacctagtcaaccaccaccgataccttggtcatgggagtggcaccaattaaggctcaattcaagagtgcttaatatgatgttcccactcagaacgatcgctgctaattttgatctaactgcacctacaacccctgcacttgcaagtgaagtgttggaaagctaaatcttcaaacatatatcgcccttagaaataatgataaaaactatatgtaatttcaaaacttcaaaaatatgtaatatgtattatgtt

SEQ ID NO: 264870 - DNA, 350 bp, Glycine max
  unsure (1)..(350): unsure at all n locations
tcttctctttnctcctttttttttccccccctaaccccctcccncacgaagatttttttaatagtccgcccccccccccccccccctntncccttctttcttttctcccttcttcctccccctctcccctttccctccaccaccacattctctttttttcctccccccatctcccccctctcccccctttttcttntccttcccctcccccctctctctcccccctctttcccctctctcccctctcccccctttcctctccccccttctccccctctttctcctccctccctcactcctccttctctctcccccctccctctccctttttctttccactctcctccctc

SEQ ID NO: 264871 - DNA, 398 bp, Glycine max
cccacgcgtccgctagaaacagtgtgatgaaaatgaaggtccttgttttcttcggtgctgcaattttggtagcatggcaatgccatgcgtacgatatgttccctctccgaatgaacactggctatggtgcccgtactccggaggtgaaatgcgcaagttggaggcttgctgtggaagcacacaacatctttggctttgagaccattcctgaagagtgcgttgaagcaacaaaggaatacatccatggcgaacaatatagatcagactccaaaacagttaaccaacaagcttacttttatgccagagacctcgaagtccatcccaaggacacatttgtgttcagtatagatggcaccgtactctctaatattccatactacaaaaaacatggatatggg

SEQ ID NO: 264872 - DNA, 262 bp, Glycine max
cttctctctctttcccctttctttctttcttcttcctccccccccttttttttttacctctcttcccccctcacccaccccctttcctccctcttctttctttttcttctctctctctcttcttttttcctttcctccttcttccctctttctttctttttcctcttttctttttctctctttcctctcttccctctctcttttcttctctctcttttctttcccttcctcctttcttcttcttctttttcttccccttttc

SEQ ID NO: 264873 - DNA, 425 bp, Glycine max
  unsure (1)..(425): unsure at all n locations
aaaacaagcagtgtcacgcagctgaatcatattcactccaaaaaattaaaaaaagctcagagagagagaatgggggggagacaaatcccagaccctgggaactttaanaaatacggcgttcctttctactccgttgcgtggattccccaacacgttgtcaaatcgcgccaaatcgaaaccgccggtaactacctgctgttcgccggcggcggcggagcaggccacagcggtatccccaatgctttggttattgcgcacttcgatgtcgcgtcgaattctctctctgatcaaccggtgtgtaagctaggaactgattctgaattgccttataggatggcacttaactctaatggtgatggccttatttgtgcaatggaaacgcccatggtttgcaaatggtttgactgggatcaaaacaagagctc

SEQ ID NO: 264874 - DNA, 380 bp, Glycine max
  unsure (1)..(380): unsure at all n locations
cttcttcnttccccggttgacatccattaatatgtgcgaatgcccacnataaccatattttcctaccgagtcaactccatgacgatgactcattgagttgcactgctaccgacccaaaccttaactacaagccggtgatcggaatcctgacccaccccggctacagtgcctctggcctgctcatcaacgccaccggtgtttcttacatctccgcctcctacgttaaattcgtggagtccagtggtgctagagttattccccttatctacaatgagtcacctgaaaaccttaacaagaagctcgatttggtcaatggaatgctcttcactggtaggtgggctgttttctgtccatatttagatacttttggaaacattttt

SEQ ID NO: 264875 - DNA, 331 bp, Glycine max
  unsure (1)..(331): unsure at all n locations
tcatttttggaacgcctcttatacctgacctcttaggtatcattgcaggacatctgtactacttttttacagtgttgcatccactagcaggtggaaagaacattttgaagactccaatgtgggtacataaattaattgcaagatggagaattggagtgcaaccaattagccgtgggccggctgctaataaccctcagcaagagaggggttcgggagttgctttcangggaagatcctatcgacttggtggatagatgcaattacctgatcagctggttcatcttcacttattggttatagacatgacaccactgacaaatgaagctggaca

SEQ ID NO: 264876 - DNA, 202 bp, Glycine max
ccaaaaaaactacggtccctggttctcgcacttgccgtgtgtgtggggaaccacatggactgatcaggaagtatggccttatgtgctgcatgcagtgcttccgtagcaatgccaaggaaattggcttcatcaagtatcgctaaaagagcagttgtcaactactgaccaatattgtgttctggcactaggatgttttgaggat

SEQ ID NO: 264877 - DNA, 391 bp, Glycine max
ttcccggcggacgcacgcgtacgcccactctttctcctacgcgttcttgaatatttacctcatctgcaacgtatcaatgggagactgcttcatatagaactctgacccaaaaaactactgtcctgattctcgcacatgccgtacctgtctgaatacacatgtactgatcaagaaaaatgaccttatgtgctgctatcactgcttccttaacaataccaaggaaatactcttcatcaagtacatctaaaagagcacttgtcaactactgaccaatatccaattctgccactactatatttttaaaaccttatgtttgaagaaacttgagactgtattttttaatctaagtaactatcatactttatttgtgatactattacacactctatat

SEQ ID NO: 264878 - DNA, 346 bp, Glycine max
  unsure (1)..(346): unsure at all n locations
cccacgcgtccggcactctgcaactccctccaatttagtttgagccttanaggcattgttgtttggttggatagatgtctgatctgaagatgagtgcgtcgaggttcattaagtgcgtcaccgtcggcgacggcgctgtcggcaaaacctgcttgttgatttcctacaccagcaacacttttcccacggactacgtgcccacggtttttgacaatttcagtgctaatgttgtggtggatggaagcaccgtaaacttggcatttggggatactgctggtcaggaagattataataggcttagacccttgagctatcgaggagcttgatgttttatacttgccttttc

SEQ ID NO: 264879 - DNA, 154 bp, Glycine max
catgatctcgattcccattccatggcttccattgaatcatcccctttcaagaaaattcagattcagagtggttacactacatatgactgatatgtggatggaaaagaggatgctcctggaattgttgtgattcaggagtggtggggtgtgaatt

SEQ ID NO: 264880 - DNA, 222 bp, Glycine max
aaacagagcaaagagagagtgtgtgaaaagtgaaacaatttacagaacaacaatggcgacacttaatgttcctgcacctgttccaaccgttgcggaggattgtgagcagctccgaaaagccttctcaggttggggaactaacgaggagctgattgtatcgatcttggctcataggaatgctgctcataggaagcttatcagagaaacttatgcccataccta

SEQ ID NO: 264881 - DNA, 189 bp, Glycine max
aataatggaaacagaagtggttgaagatattgtgatttttggagctggaattgctggccttacagcatcctgaggacttcacaagttgggtatgagaagtttgatgctagaatcttcatacactttgagtgtcactggtttttgctcgtcaatattgtaaaatgcttgcaaggcattgcatactttttt

SEQ ID NO: 264882 - DNA, 319 bp, Glycine max
actcatacttttgtcctctttgatgctgcattagcgttgttagcatggccattccatgaccgatactgccaaaatttccctgctccaaatgaaaactggctattgtgacccttcttctcatgtaaaatgcacatgtcttacgcttgctgcgtaagcccacaacatcctatcctttaaaaccattccttgatagcgcttttaaccaacatattactacattaatctctaacaattaatatcacactcttaaacatttaaccaacaatctttcttttatgctacttaactcctaattcatcacatctacatatttatattc

SEQ ID NO: 264883 - DNA, 463 bp, Glycine max
cccacgcgttctaccgtgttgcctctctgctatctacagccaaaatgcctttcgagaggggcgttgatatcgggagggttgcccaaatcaactactgcaaggaatatggcaggctcgtcgtcattgtctacgtcattgaccagaacagagctcttgtcgatgcccctgatatggtgaggtcccaagtcaatttcaaaaggctttccctaaccgatattaagattgacattaagagggtccctaagaagaaagatcttgtcaaagccatggaggatgctgatgttaagaccaagtgggagaagagttcatggggcaggaaactcattgtcagaaagagaagggcatccctcaatgattttgataggttcaagataatgttggccaagatcaagaaggcagcggttgtaaggcaagagcttgctaagctgacatagagcgcttaagcatagcttcacattatagt

SEQ ID NO: 264884 - DNA, 199 bp, Glycine max
tcttcctaaaaaaaaatataaaaaaaaaatttaaaaatttataaaaaaaaattataaaaaaaagattaaggaataaatttaaatagaataaagactaaaaaataaaaaataaaaattataaactaaattaatatcaaaattctacattatacattaataaaaaaaattactaatataacacaaatatattaaaaatatc

SEQ ID NO: 264885 - DNA, 305 bp, Glycine max
tccacgcgtacggtgaaatccctgatcctgaattctcgtaatcctactgtctgtcacgaccatccactacaacgactccgacatacccaaaaaaccgaaactctcttccttggaaatcgaatcagaattcggccaccacgactcctccgtcgcccgcattaacaacggcagcttcaggtgctgcccggcctccatcctctccgctcaacgccgctggcagctccagtaccttcgccagcccgaccacttctacttcaacgacctcaaatccgacgtcctccaatcccgaaccttaatcaaggacc

SEQ ID NO: 264886 - DNA, 351 bp, Glycine max
gcgcccacgcgtacggttaccacaggagaccaagaatggtatctaccacctagaaaaggattccgatctcctaatggcaacgtaaaaattatacagttgcgtacagacattaggataacgggaattccaaaccccactgcccaccccatgttatcttgaatatagacaacaacagttaaacctatcagtgatgacattgcaacaatagcatagtaccagctgaagtagctctctttgattcctgcatttttgtccctcttactcaactgatcaacaccaaaggccaaggaggatgatcttatgccttcagcttcaatggacatgagggcaaaaaaggaatgcagaatcaaa

SEQ ID NO: 264887 - DNA, 200 bp, Glycine max
agtcgtgcgcccacgcgtccggaacaccatgatgaagcgctctgtcatgatgcacgctgagaaaaccggaaacagtgcctagctcaaccttatacccgtggttggcggcaatgtgggattgattttcaccaagggtgacctgaatgaggtcagtgaggaggctgctaagtacatggttggagctactgctcacgttggtt

SEQ ID NO: 264888 - DNA, 423 bp, Glycine max
cccacgcgtccgcccactcgtcctgatgtatctcgatcttcttcttttgttgtggtgcgcgtgtgcttgttttgggtctcacctgaaactgtcttgctgcggtggtcactgttgttgccgaagctcctgcccgtgccgcaacggctcctgaggctgcacgctgcacccacacttcagctaccctgaccgaaccaccaccgacacctcggtcatggtagtggcacctgttaacgctcaatttcacggcgctgaaacgggagtgcccgctgagaacgacggctgccactgtggaccatactgcatctgcaacacctgcactagcaactgaactgttaccagagcacagctacacgcatagctagccctaaattcgcaataatgatcaactcataatcgtgtaatcataacctatgcattatgtat

SEQ ID NO: 264889 - DNA, 469 bp, Glycine max
tacgattcgttttgccccttttgttgccctaatttcaaccatgcctcgccgtagctccggtggaagatctgcccgtcctgctcctcggtcagctcctcgtcctgctccagttcaccatgctcctcctccagcccctgctcagagtggcggtggatctatgcttggtggcattggttcaaccatatctcaaggtatggcttttggcaccggaagtgcagtggcacacagggctgtggatgcagtcatgggtcctcgtaccattcaacatgaaacagatgttacagaggctgctgctgctgcccctgcacccactgcaaatacttttggtggcgatgcatgcagcattcatacaaaggcattccatgattgcctgaacggctatgggaatgacattagcaagtgccagttttacatggatatgcttgcagaatgcacaaagaactctggagccacgttgagcatgtaactg

SEQ ID NO: 264890 - DNA, 355 bp, Glycine max
tccctatcgaccaggcgtccgaatataaaaaaaaaaaaaaaaaaaaaaaaaaaaaaaaaattaaaaataaaaaaaaaaaaaaaaaaaaaaaaaaagaaaaagttaaaaaaaaaaagaaaaaccaaaaaaaaaaaaaaaaaaaaaaaaaaaaaaaaaaaaaaaaaaaaaaaaaaaaaaaaaaaaaaaaatcccccccttaaaaaaacccaaaattaccaaacccttatatcaaaacaaaaaaattctaaaaactacccccaaatataaataaaataccacaaataaaaaaactctcccccataaaaaccctaaaaaaccccaaaaaaaaccacttccaaaaaaaccccatttcccc

SEQ ID NO: 264891 - DNA, 391 bp, Glycine max
cccacgcgtccgcaaattttttggtttggggatagatagagtgatacgcgtcacattttcataatagtaaaggaatggcagcggcggcggcagtgactgtgctactcccacctaggattccgaccaccaccaacgttacccgctgctctgctttgccttctctccctcctcgcgtctccaacaccaaaaccactttgttctcaccttccctcaacaacttttcagtgtcccgaaaatcttctctgcttcagaccagagcttcttcagaggaatcatcctcagtagatgccaatgaggtgttcacaagattgaaagaaaagtgggatgctcttgaaaacaagtccacagtacttctttatgggggaggggctataggtgctatttggctatc

SEQ ID NO: 264892 - DNA, 414 bp, Glycine max
aatcctgagagcatgccttgctctagctgaacatgcatcatcgatcttgcctgcgaataagaacatatcatttaggaataaggagagatgaggaaactcttcagccaactatatatttgaacaagttacccgagaaatttccagaaggatcgaaagtttttgtggttgatcctattctggcaacaggtggcactatagtggcagctgtaagcctcttaaaggaacgtggacttggcaacaagcagattaaagcgatatctgctgactctgaccctccagatcttcaaaagctgatcgaacagttccctgggcttcatgtgtataactggaataattgacccccaacttaatgaaatagggctcataattcctggccttggacatgctcaggaccgtagctttggtacatataca

SEQ ID NO: 264893 - DNA, 443 bp, Glycine max
cccactcgttcgtccacgcgtccgttttgctctttcttcaagccaacctcttcgcaactgggtgttcctttcttgctctcactctcaccatgattacagtaagcgtaagatggcaaaaggagattttcaaagatgtagaacttgacactacccagtctccttatgtttttaaatgccaattgtatgatttgactggtgtgcctcccgaaagacaaaaaattatggtcaagggtggtcttttgaaggatgatgctgattggtcaacagtaggggtgaaagagggtcaaaagctaatgatgatgggtacagctgatgaagttgtaaagactcctgagaagggaactgtttttgttgaagatcttcctgaagaagaacaagtagttgctgctgggcatactgctggtcatttcaacttgtgaaacacatgttatatgaattcaaca

SEQ ID NO: 264894 - DNA, 469 bp, Glycine max
  unsure (1)..(469): unsure at all n locations
cccacgcgtccggttttcttcagaaatttgccatcgttgagagaagcgtgagagccttaggcgttcaagatgagagctaagtggaagaagaagcgcatgaggaggttgaagaggaagcgccgaaagatgagacaaagatctaagtaggtgcttgagcaggagttgagatgagctttccatctgctaccagcctcatgacattttaggctgttatggctcttatgatcttgaggtctagtcgctaggggagcttcactcttgacttagtttgctttactggtcctggtcctggtccaagactattgagtgtgggttaagttgtgatgtttagtgttttgtggtatctaattatgtactggtntttatactttttggttgaatagctatatattagtatcgagacttncatgaaaaattgatcctattgtatgcttgaagtgacctctaatcgttagctcatatataatgc

SEQ ID NO: 264895 - DNA, 290 bp, Glycine max
gtaagactatattgtatatgctaactcagactgaatatccatatataggatgattactatcatctcttagctcatgttatctgacatctttctaccaatgaatgcatattatctaccatacattcactttaataatgccagaatacgcaagactgtcagaacaaaccaagccaaagttgggtacattgagcctgctactgatttcaactatgaccacaaacatcttggtactggccctcaaacacttctcgaaattgctgaaggtcgtcacccaattttcaagacactct

SEQ ID NO: 264896 - DNA, 300 bp, Glycine max
tccacctctacccagctcgtcctcccacacttccacccactcatccactaacacgtttacattactcaaccacctagccataaaaaaccgtaacgtttacaaacaacaactactgctggcatccaacccacttactcttacaaacttatttacacaccatcaacaacaacatcttcaacattttctaccatcactcattcaactatccattattaacccttcctcctacctacaacaacaacaactactatcatctaccccactcattcttaccaattcacctacataccatccacaaca

SEQ ID NO: 264897 - DNA, 339 bp, Glycine max
tctttatgtcctgctggatataacagggaccgagtgcttattcatccaccggacgtttactatatcagtcttgggctaattgatgaggatgcaatccccaaatatgaactcacaaaccatgatggtcggccacttgctaaataatacagcactgtactaatgctgcaacaccttgcaaagcaaacagcatactcaatgcttctaaccctaaaaaaagacgccgtttatgctctccctaataagctaccaactgctgctatagtacctgacatgacaccattccctgcaaacctttacatttctacactcacaccaccaatttaatgatatatttaaaaa

SEQ ID NO: 264898 - DNA, 401 bp, Glycine max
tcgggccaccataaaccctataagagcatcaggatccagaaaccctgacggctgcggaccacgccgaattgaacggcggctatggaggaaacaacgattaagaggaagaggaggatctcactctcgaagaagagcccgtggagaagctcctggaaccgttcacaaaggatcatgctccactctatcgtcacgcacgccgtggatatgtttcccgaattcgtcgatagcgtgcgcctgcttgctgacgtggaccctgcgcacaggaaaatcttcgtccatggcacttggctgggacgccactgccgatactctaaccgacgtgttctggaaatacagcgagatcgaggattgcaaggccgtcacctacaaggtctccggtaaatcaaagggttacgccttta

SEQ ID NO: 264899 - DNA, 368 bp, Glycine max
  unsure (1)..(368): unsure at all n locations
ggaatttcgatgctcagtcatctcttttaccattctcttctctcttgctcttgcaggagagagccatgtccgtgcatggctacctgaggaagattgttgggaagctgtttggccaaacactcccattcccactgcactgcgagagcttctaaagcctctccctgcaggtgttgaaatcgatgaactccctaagcaaattgatgatacacagtacccaaaaacattcttctataaagaagaccttcatccaggcaaaacaatgaaagtacaattcaccaagcgtncctatgcacaaccttatggtgtatatacatggntaacggatattaaagacacctctaaagaaagatatagttttgaagagatat

SEQ ID NO: 264900 - DNA, 467 bp, Glycine max
ctccatttctcactcgccgtcgtctcttccgtctagggtttctcctcttcacaaaaatggttgccggaaaaggaactaagaagacccatgagagcatcaacaacaggctcgctctcgtcatgaagagtggcaaattcaccctcggttacaagaccgttctcaaatctcttaggagctccaaagggaaattgattatcattgctaacaactgcccccctttgaggaagtcagagattgaatactatgctatgttggcaaaggttggggttcatcattacaatgggaacaatgtggatttgggcactgcatgtggcaaatattacagagtgtgctgccttagcattattgatcctggtgattcggatatcatcaagacactgcctggtgaacagtaaagtattcttgaagttccttggcttgtattttctggtttaagttgtgattaaaactttgaagaatatcttgtt

SEQ ID NO: 264901 - DNA, 461 bp, Glycine max
  unsure (1)..(461): unsure at all n locations
tcttaattcatagtctcttggtccttacttccttcttctgctcaataagtgtgggccacggtaattaattaccacccgcttgtagacatagctcttctccctctgttctctattctctacactgtgaaaccaagatgaaggtagcatttgcagctgctctacttatatgccttgtcctcagctcctccttgttcgaggtgtcaatggctggttctgctttctgatcctccaagcgctcgaagaggcgttctagagctgggatgaatgacaggtgcatgaagttctgcgggatttgctgcaacaagtgcaactgtgtgccatcttggacttatggcaacaagcattagtgcccttgctacagagacatgacgaactncagggcaaagaccaatgcccttgatattcattttttcaccatcacacatagctttaaacctttgattcatcactaccgtgcatgt

SEQ ID NO: 264902 - DNA, 294 bp, Glycine max
cgtcgcagtagtcatgggtaaggttcatggatcacttgtatcgtgctggtaaggttagagggcaaaccccgagggtgggcaagcaggataagaagaagaagccacgtggccgcgcccacaagaggatgcagtacaatcgccgattcgtcaccgccgtggtgggattcggcaagaagaggggacccaactcgtctgagaagtgaggccgaggcttgaggaatatgttgctactctatttgatttatctctgttgttttttattaatttttaatctgtatgttttgattgtgttct

SEQ ID NO: 264903 - DNA, 312 bp, Glycine max
acgcaacgatggagttgcgtttatcaattctgttcctgaggtcacttactatgtcattatatcggatacgtttcgagcaatattgcatagtgcggatggtcttgctgatgaatgcttcttagaatcagtagcaaaggctcttctacccgtatgagtgttctctgctccagcagacagcctgtggcataagaactttgtggttgcagacaccatatcaaattgcatgaagatattcaaaggctccgttaactatgctcgcaccacggttcctacatatgcaagtgtcgtgattgcattcatccttcgctctac

SEQ ID NO: 264904 - DNA, 502 bp, Glycine max
actcttaggatccccatccgtagcctcttaatattcagcaccatcaacagccatatcaacatcttattcaacgcgaacaccttttagatctcgtttatcttcctcagtaacccggctagtcattaaaattttaataccgatctcacaaaggtttttattggtaacagaaataatataacgcgttgccgctgtcacatctctagcaactgtaatttcgctggctgtatcagtaaacccctgaatataatcctgcgtttgcgtccctggtctgaattctgccttaacattctgaaagtttagtgaaccatcctgattcataacctgaacgtcatcaaaatataaatctttcaatgaaaagtctggatcaacttcaccatcataaacggctaaaagaattctgatcctgttaattgaaattatgttatcttccatttcaacaggtgtatgacgctttgaagaaccgcccttacttccatttatcatatttttgatcataactttt

SEQ ID NO: 264905 - DNA, 472 bp, Glycine max
ctctatatattcagcaccatcaacatccatatcaacatcatattcaacgccaacacctgttagatctcgtttatcttactgagtaaccgggctaggcattaaaattttaataccgatctcacaaaggtttttattggtaacagaaataatataacgcgttgccgctgtcatatcgctagcaactgtaatttcgctggctgtatcagtaaacccctgaatataatcctgcgtttgcgtccctggtctgaattctgccttaacattctgaaagtttaatgaaccatcctgattcataaccggaacgtcatcaaaatataaatctttcaatgaaaagtctggatcaacttcaccatcataaacggctaaaagaattctgatcctgttaattgaaattatgttatcttccatttcaacaagtgtatgatgctgtgaagaaccgcccttactgccaattatcatatttttgatcata

SEQ ID NO: 264906 - DNA, 463 bp, Glycine max
aagcaagcctgccctaaaaattgaacagggcagagagcaagggcaagcgagtgaacatgggaacctctgcgaacgctgtcgcaggtggtcgtggcggcgcccctgtccccaaagacgtcgactacgctaattacttctgcacctatgctttcctctaccaccagaaggagatgctctccgaccgcgttcgcatggacgcttacttcgacgccatttttcaaaacaaacgccacttcgctggcaagactgtttcggatgtggggactggaagtggcattcttgctatatggtcggcacaagcgggtgcgaggaaggtgtatgcagtggaagcaaccaagatgtcagaacatgcgcgtgcacttgtcaaagcgaataatctccaggatgtagttgaggtcattgagggatcgatggaggaaattaccttgccagagaaagttgatgtgatcatctctgaatggat

SEQ ID NO: 264907 - DNA, 354 bp, Glycine max
aaacagtgtgatgaaaatgaaggtccttgatttcttcgttgctacaattttggtagcatggcaatgccatgcgtacgagatgttccctctacgaatgaacagtggctatggtgcccgtactccggaggtgaaatgcgcaagttggaggcttgctgtggaagcacacaacatctttggctttgagaccattcctgaagagtgcgttgaagcaacaaaggaatacatccatggcgaacaatatagatcagactccaaaacagttaaccaacaagcttacttttatgccagagacctcgaagtcattccaaggacacatttgtgttcagtatagatggcaccgtactctctaatatt

SEQ ID NO: 264908 - DNA, 365 bp, Glycine max
agaaagagaagcattagcaaaagcatgatgaactagtctaagcagaaatggcctcttcagggatggcgtctgtggccctcaaacgcggcccctttcactgttgagaagtcctcagttagaggccttccctccctctcaaggaactcctcttcattcagagttgtggccagtggtggcaagaagatcaagactgacaagccttatggaattaatggtggcatggctttgagggaaggagttgatgcatctggcatgaaaggaaagggaaagggcgtttaccagtttgtagacaaatacggtgctaatgtcgatggttacagtcctatctacgacaccaaagactggtcttcaaccggtgatgtcta

SEQ ID NO: 264909 - DNA, 306 bp, Glycine max
ctcacctacttattcgcttttcgctctatttcttaaattattaaccctattatatcactcttacatttttctttaaaataatctccatcctataccctcactatttcatcattttactctttatcatattactctaattcctccacttacttccatatattctactattatctattaccatattactattcaacctactacctcaatttcataattccaatataacccttcacatcttcatttactctcatcttactttctccaaaatattttaataactcctttttaatctctttatcattatta

SEQ ID NO: 264910 - DNA, 437 bp, Glycine max
gcgattactatgaccttcataagggaggatgatgatgatcaagttgatgatgatgatgatcatgatcgtgtggatggtggtggatcacaaaacagtgccagcaacatcactgaaattgtgaccaccccagaaggggaaaacttaggagaatggctgagtctaggcctcaaaggagacatcaacatgccagcagaagaacaaaactcatcatcaaggcctctccacagcaacaacaacaaggtattctcatgcaacttctgcatgagaaagttttacagttcacaagccttagggggtcaccagaatgcacacaagagggagagagaagctgctagaagctaccaccaatctcatcatcacagaattgggttttcttacactacttctctggcaactaggtcactgggaattaagcctcactctcttgtgcacaggcc

SEQ ID NO: 264911 - DNA, 432 bp, Glycine max
ttggaacacccccccaaaacaagccccaattatggctctgaatctttgtatctcaccgaactgtaaatgggtttcatctcctgcttccttagatagtgcatcttctttgagatcttcacttggttcttgttttggtaacataaacattgctagtgtgagtttaagcactagtagaagtttgagtttgaggaggagtgggagtgttagtgtaagatctagtttggaaactgcggggcccacagttacagtgggacaggtcactgaggttaacaaggataccttctggccgatcgttaaggctgccggggataaaaccgttgtccttgacatgtacacacaatggtgtggcccttgcaaagtgatggctccaaagtttcaagaattatctgaaaagtatctggatgttgtctttctaaagcttgattgcaacca

SEQ ID NO: 264912 - DNA, 429 bp, Glycine max
gtagcatggcaatgccatgcgtacgatatgttccctctccgaatgaacactggctatggtgcccgtactccggaggtgaaatgcgcaagttggaggcttgctgtggaagcacacaacatctttggctttgagaccattcctgaagagtgcgttgaagcaacaaaggaatacatccatggcgaacaatatagatcagactccaaaacagttaaccaacaagcttacttttatgccagagacctcgaagtccatcccaaggacacatttgtgttcagtatagatggcaccgtactctctaatattccatactacaaaaaacatggatatggggtggagaaatttaactcgaccttgtatgatgaatgggttaacaagggcaatgcaccggcactgcccgagactcttaagaattacaacaagctggtgtct

SEQ ID NO: 264913 - DNA, 347 bp, Glycine max
tcgcccacgcgtccggagctccagcagttttcaactgtgtggttgaaattggcaaaggaagtaaggttaagtatgagctggacaagacaagtggacttataaaggttgatcgtattctttactcatcagtagtctacccacacaactatggttttatcccaagaaccatttgtgaagacagtgatcctatggacgtgctggttctaatgcaggaacccgtgcttcctggttccttccttcgtgctcgtgctattggactaatgcctatgattgaccaaggtgagaaggatgacaagatcatagcagtttgtgctgatgaccctgagttccggcattacacagacatt

SEQ ID NO: 264914 - DNA, 375 bp, Glycine max
gaaagaatggctgccaacacattgatgagttctgccatctcagccttcccatctctcgtttcctcctgaaaatccagatttgccgcagcagttcctctttccagctttgttgtcaccaatgcctcttcttctcgcttttccatgagtgctgattggatgcctggccagcctagacccccctaccttgatggttcagcacctggtgactttggattcgaccctcttcgtcttggtgaagtaccagagaatcttgagaggttcaaagagtcagaactcattcactgcagatgggccatgcttgctgttccagggattttggttccagaggcattgggcttaggcaactgggtaaaggctcaggaatgggctgcaatt

SEQ ID NO: 264915 - DNA, 337 bp, Glycine max
  unsure (1)..(337): unsure at all n locations
catttttgcccaggtctgaagatgaaagggagatgtgctcaagaacaatctattgcaganatatcgacgagaaagcttacttcaaccgaagtcaaacccttctttcaatctaattgccgaaaaggtcattggttgaagcttcttggggaataccattattcaacttcaattggatttggtgaagtcccacttgccgaaaatgccattgccacttttaacctgaaccgggtgaacctggggtcaactgccattaagggtaagtccttcaagacccccatgcgcccttgggcctcttggtcccccaatgccctgaataatccttcttcgggttcctgct

SEQ ID NO: 264916 - DNA, 433 bp, Glycine max
acagtttgctattggacggtatggaaatggcttcaagaccagtagtatgaggcttggtgcagatgtcatagtcttcagttgccatctaaataataggattttgactcaaagcattggacttctgtcatatacatatttgataaaaacacagcttgacagaatagtagtacccatggtgaattatgagtttgatacatcaactggatcattgaaaatattaaatggcaatgagcattttgtgtctaatttatccttgctgttgcgttggtcaccatattcatcagaagcagatcttctgaaacaatttgatgacattggatctcatggtactaaagttattatctataatttgtggtgcaatgatgatgcaaatttggagctagactttgatacagatcctacggatattcgtattgctggggatgtcaagcag

SEQ ID NO: 264917 - DNA, 433 bp, Glycine max
cccacgcgtccgagcagatctttcaagaatggcacaaattaacaacatggcacaagggatacaaacccttaatcccaattccaatttccataaaccccaagttcctaaatcttcaagttttcttgtttttggatctaaaaaactgaaaaattcagcaaattctatgttggttttgaaaaaagattcaatttttatgcaaaagttttgttcctttaggatttcagcatcagtggctacagcctgcatgcttcacggtgcaagcagccggcccgcaaccgcccgcaaatcctctggcctttccggaaccgtccgcattcccggcgacaagtcgatctcccaccggtccttcatgttcggcggtctcgcgagcggtgaaacgcgcatcaccggccttctggaaggcgaggacgtcatcaatacgggcaaggccatg

SEQ ID NO: 264918 - DNA, 435 bp, Glycine max
gcaaattgcaagaagatattcaaaggctccgttaactatgcttggaccacggttcctgcatatgcgagtggggtgattggattcatgctttgctctacggagggtccaccagtgaacttcaaacatccaataaataaattgaatccagagaaaaatggggtggcaaagggacctactaagttttataacccacagatccatgctgctgcattctgtctgccttcttttgtggacaaggttgattgatccaacagacattcataaatgactcggtagcattaacgaattgctgttagttaccctttgtttttgctgtgtcgctctgcatatttatgatattatccttttattatgacatttagttgtattctatattccctaaaatattagatgttacacacgtgtatgattcatctaatgtaaggtttgcaccta

SEQ ID NO: 264919 - DNA, 428 bp, Glycine max
ctactgtactatcaagaggattagcatctaaatgtgcaaatgtcgtagcgggcgcaggatcgggttcactcaaggaagaggtgaactccagagatggtaggattgaacacctgaacagccatttgaacgagcttcacgtggaacatgtacaactgattgctggaatggaggaggcacacaaacatgtggaagaactaaaatcaaaagccaagcaacttgaggaagaggtcgagaggcaaagaaccgtgatcttagaaggagcagaagagaaacgcgaggccataaggcagctatgtttctcactcgagcactatagagatggctataatatgcttcggcagcatgttatggggcacagacgagttccagttttggctgcctagttaataaatttgaaacgtgatcttgtatattgttttggtgctatc

SEQ ID NO: 264920 - DNA, 427 bp, Glycine max
aacagatttttggttatggtcattcgcgatttattaaacctatgtgaaatgacaaagggaaaagataacaaagctgttattgcaagtaatatcatgtatgttgttgggcagtatccacggtttttaagagctcattggaagttccttaaaactgttgtgaataaattgtttgagtttatgcatgagacacatcctggagttcaggatatggcctgtgacacatttctgaaaatagtccagaagtgcaagcgtaaatttgtaatcacccaggtgggcgaaaacgagccatttgtgtctgagcttctgacaggtcttcccatcactattgcagatcttgaaccccatcagatacattccttctatgaatctgttggtcacatgattcaggcagagtctgatgcacagaagagagatgaatatcttcagc

SEQ ID NO: 264921 - DNA, 385 bp, Glycine max
cccacgcgtccgattattgtcctcatagtgagtagaaggcagagagactagagcggggatagcaatcgcatctcattcatttcaatggcaactcaaggtcaagtcattacctgcaaagctgcggtggcctgggaacccaacaagcccttaactgtccaagacgttcaggtggctccgcctcaggccggcgaggtccgtgtccaaatcctcttcaccgctctctgccacaccgatgcttacacttggggcggcaaggatcccgaaggtctcttcccctgtattcttggccatgaagctgcagggattgtggagagtgttggagaaggtgttactaatgttcagcctggggatcatgtcattccctgttatcaagctgaatgtgggg

SEQ ID NO: 264922 - DNA, 391 bp, Glycine max
aaacactatagcaatagaaacatttgcttttgaaaaacccctcactcttcatcactagactagctagcgcacatacaatgtcgaccaaatttaaggtgtttcgtgaattcacaagcgatgactcattcctaaaccaagttatccctgaaaacatcaccgaattccaagtgactctgtccctcgctagagactacgatggcaacaactcaaccaacggaaagttcattccttactgggacactgaaaaggtcactcccgaagtgataaaaaaattcaagaaaaaatacgaacccaccgcactgagggttaaggttcttgtcagcattggaaacaaaaacaaacaatttcctttcaccattggctcggactcgaacagcgaagcatgggtctt

SEQ ID NO: 264923 - DNA, 401 bp, Glycine max
  unsure (1)..(401): unsure at all n locations
tcccggtcgacnacgcgtgcggcagaactttgtttcccaatttccattgcctccgcttccacctcgcaaccatgatcatcccggagaagaaccgcaaggagatctgcaaatacctcttccaagagggagtttgcttcgcgaagaaggacttcaatttggccaagcaccctgagatcgacgtgccgaatctgcaggtgattaagctgatgcagagtttcaagtctcgcgagtacgtgagagaaacttttgcttggatgcactattactggttcctcaccaacgatggcatcgagtttctcagaacttaccttaaccttccttccgaaattgtccctgctactttgaagaagcaagccaagccacctggcaagccctttggaggcccattcggtgatcgccct

SEQ ID NO: 264924 - DNA, 435 bp, Glycine max
gcggcgcacacggactccactctcctcacaatcctgcaccaaaacaatgtcaatgggcttgaggttctgaaggaaggggaagggtgggtggcggtgcctccgcttcccggagggctcgtgatcaacgtcggcgatctgctccacattttgtcaaacgggttgtacccgagtgtgctgcatcgagttcgggtgaaccgaacccggcagaggttctcggttgcttatctatatgggcccccaacaaacgtccaaatcagtccacaagtaaaattggtaggcccaacaaggcccgttctttatcgatcagtgacttggaacgagtaccttggcaccaaagcaaagctttttaataaggctctttcagctgttaggctttcttcatctattaacggtttgtttgatgtaaacgaggataagagtaacgactttcaagtg

SEQ ID NO: 264925 - DNA, 438 bp, Glycine max
gcgaataatcccaatcatcaagataggaaaagaatggaggccatttgttccaagcaccttatgacatgccttgtcataattcttgcttctagtttgaccttatcacagggtgccaagaaaggcagtgacagtgaaaggccataccaagaagcgagcacggtgttcattagaacatcttgcagctccacgacctatccaagactctgctacagctccttagtgaagcatgcagacttgatccaaacaaaccgtgtggttctgacaggcacagccctgaatgtgacccttgcgtctgccaagtcgacctcggcaatgatgtcgacgctggcaaagaggcaaggcctgaagccaagagaggttgcagcgatgaaggactgtgtggaagagttggcggactctgttgatgagctcagaaggtctatttctgagatggctcaa

SEQ ID NO: 264926 - DNA, 426 bp, Glycine max
caagatcagcaccttgttggaaactgcaaaggttcaagtagatacctatgggccaacgttatttgctaaacttggggagaagaaaaatcttggcgatttgatagccaatgcagcaggcggtggtgcaccagttgctgttgcagctgcccctgttgctgcctcaggtggtggtggtgctgctgctgccgccccagctgctgaggagaaaaagaaggaggaacctgaagaagagagtgatgatgatatgggatttggcttgttcgattagggacattctcaatatgatttggttaaattttgtggttctttacctttaagtttactttatggatattgtaggttttatttttgtgctggttatttatatctgtataagacttgattttgtagttttatgaacttcggaatgtgggtttatgtccattt

SEQ ID NO: 264927 - DNA, 430 bp, Glycine max
cccacgcgtccggcagatcaatctctctctctctctcaaccataatagtcatgggttggaaggaggattttgagcagtatgctgagaaagcaaagactttgccaccgactcaatcaaacgaagacttgcttatcctttatggattgtacaaacaggccaccgttggacctgtcaacaccagccgtcctggaatgttcaacatgagggacagagctaaatgggatgcatggaaggctgttgaagggaaatccaaggacgaagcaatgggtgattacatcattaaggtgaaacagctgctggaagcagctggcttgcctgcttgataacattgtcatgccttgctttctgattctgtgctagaagttcacaacagtttggaaataaacaattgcagtgtttgaagcttttattatcataatcatatttattt

SEQ ID NO: 264928 - DNA, 420 bp, Glycine max
caacaaggaccttggttgggatgaacactggatcttctgggtgggaccattcatcggggcagctcttgcagcactctaccaccaggtcgtaatcagggccattcccttcaagtccaagtgattcaatcaaacggttcatgcttaatcaagttgggaacaacaacaacaacaaaaatcaagccaatgtttgtgggttttggtttcatttcattaagatgatctgtttatctcttttcttctttttaaaatttaaagtctttgtattttgtatgtaaagatgtaaaattatgattattaggtggtgcatgtgtcgcgtcatgggccaatgttatcctctgcttttaagttggaagaggcccaactcatgtgtgatgtacggctgtgaatggggaatttaatttgccaaatcaaaaattaccc

SEQ ID NO: 264929 - DNA, 376 bp, Glycine max
cggacgcgtgggttcagccacagtttcggaggagaagaaaatagtcgttcgagatgggccgtacgaagcaaactgctcgtaagtccacaggaggaaaggctcctaggaagcagcttgcaaccaaggctgcacgtaagtctgcaccaactactggtggtgtgaagaagccacatcgttaccgtcctggtaccgttgctcttcgtgagattaggaaataccagaagagtaccgagcttttgatcaggaagctccccttccagaggctggttcgtgaaattgctcaggacttcaagactgatctgcgtttccagagccacgccgtgcttgcattgcaagaagctgctgaagcataccttgttgggctctttgaggacac

SEQ ID NO: 264930 - DNA, 434 bp, Glycine max
gaagccctagactcactagactacacacttcgcaatggcggttgttgctcaaacccctgacatcgccggcgagcggcagtccggccaagacgttcgcacccaaaacgttgtggcatgccaagccgttgccaacatcgtcaaaagctctttaggccccgttggcctcgacaagatgctcgtcgacgacattggcgacgtcaccatcaccaacgacggcgccacgattctcaagatgctggaagtggagcatcctgctgccaaggttttggttgaactcgccgagcttcaggatcgagaagtcggagacggcactacttctgtcgtcattgtagctgctgagcttctcaaaagggcaaatgaccttgtcaggaacaagattcatcctacctcgattatcagtggatatagacttgctatgcgagaggcttgtaaat

SEQ ID NO: 264931 - DNA, 312 bp, Glycine max
cccacgcgtccgtggaacttctcatgatgcataacaggacatattgtgctgagattgctcacaatgtatccacaaggaagaggaaggacatagttgagagagctgctcagcttgatgttgtcttgacgaacaagacggccagactacgtagccaggaggatgagtagatccaatacatgggagagttatttatgttttgtagtgagcttctgttgacacccttgatggtagattttgattttttgttatttccaaaactttgttgcatgccatacaattttatatgttgcttattgtctatttgctgttgct

SEQ ID NO: 264932 - DNA, 428 bp, Glycine max
aaacacaaaaagttctgttctttttcccacccaattcagttttctcaaatggctcgtgcgaagcaaacggctcgcaagtccaccggcggcaaggcgccacgtaagcagctggccaccaaggcggctcgtaagtctgctccggctaccggcggcgtgaagaagccgcacagattccgtccgggaaccgtagcgctccgcgagatccggaagtaccagaagagcacggaacttctgatccggaagctcccgttccagcgattggtccgcgagatcgcgcaggacttcaagaccgaccttcgatttcagagctccgccgtctccgccctccaggaagccgccgaggcctacttggttggtctcttcgaagacaccaatctctgcgctattcacgccaagcgtgtcactatcatgcccaaggatattcaact

SEQ ID NO: 264933 - DNA, 428 bp, Glycine max
aacagagatcggagcgtggaacctctctctctctctctctctctgcggaaaccggaagatctcagttctctgatcagatccatccgacgtcgtttcagtgataatggctccgttcagcggcgatgagacggcaccgtttttcggcttccttggagccgcagctgccctcgtcttctcctgtatgggagctgcctatggcacagcgaagagtggcgttggcgtggcttcgatgggtgtgatgagaccagagctggtgatgaagtctattgtccctgttgttatggctggagttttgggtatttatggccttattattgctgttattatcagtactggcattaatcccaaggccaaatcttattacctctttgatggttatgcacatctctcctctggtcttgcctgtgggctggctggcctctctgctg

SEQ ID NO: 264934 - DNA, 404 bp, Glycine max
tgttgttacaactggccgaaagattatcggagccacaaacccagctcaatctgagcctggaactattcgtggtgactttgctattgacattggaaggaatgttatccatggaagtgattcagttgagagtgctaacaaggaaattgcattgtggttccctgagggccctgctaactggcaaagctcccagcactcttggatctatgagtaatacaaatgcctcaagttgatcttgaaattggccttaggttgatccagattatctacatgttttctgtttttgtccattgttggacttttgctaagagtttggtaccgtggtttgcatgtagagtctatttatgtcatttctgttgaaacatgctcacagtttgataaattaaatcccaaactagttttgcttt

SEQ ID NO: 264935 - DNA, 428 bp, Glycine max
  unsure (1)..(428): unsure at all n locations
cccacgcgtccgcccacgcgtccgcccacgcgtccgcaccgagtagcaacaatgtcggagcgaggtcgcggaggatcggcagggaacaagttccgcatgtcactgggtctgccggtggcggcgacggtgaactgcgccgacaacaccggcgcgaagaatctctacatcatatcagtgaaggggatcaagggaaggctgaaccggttgccgtcagcttgcgtgggtgacatggttatggccaccgtcaagaagggaaagcctgatctccgtaaaaaggtgctccccgctgtcatcgtccgtcagcgcaagccgtggcgccgaaaggacggtgtttacatgtacttcgaagataatgctggggtcatagtgaatcccaagggtgaaatgaaaggttctgctatcactggtcctattgngaaggagtgtgc

SEQ ID NO: 264936 - DNA, 129 bp, Glycine max
gcgggtatgctgatatgcactattcaaataggagcattagctatgtttgttaatgtcactttatgttatgtgggtaagtcacctaagacactccacgtacctacgttgttgtctcttaccggctttaat

SEQ ID NO: 264937 - DNA, 359 bp, Glycine max
tctgaactagtagcaaggcttgctgatttcatccaatatgattggtaccgatctaggaggagtagcgtgagcattgaggatgatggttcaaactccaatgaatcatcaagttacagattaactgtaattggaacaactggtttcaccatccaaccaggatacgagagtggcggggagagtgtgcagcaagcaagtgtatctgttggtttcccaactgtacaaagtgtgactgatgttattgagatggaaccggtcatgactgagaggagagtgaggtttgctattgaagatgagcctgagagtgatgcaaggtctgagacaggaatgcaaatgcaggaagagttggaagatctttatgc

SEQ ID NO: 264938 - DNA, 434 bp, Glycine max
gtatttgattggtgtgcatccatgttaagctagtggcgatcggatccagctacagggtacaacgtacagatcaaggaaggaagatgttgggtgttataaggcacaagagtattcgccccgccttctccgcaatcagacacttctcttctgcagctaaagagattactgtcagggatgctctcaactccgcactcgatgaggaaatgtcagctgatcctaaagtcttcttgatgggtgaagaggttggggaatatcagggtgcatacaagatatccaaggggctgctcgacaagtatggccccgagagggttctcgatactccaatcactgaggctgggtttgctgggattggagttggcgctgcttactatggtctaaggcctgttgtggagtttatgacttttaacttctccatgcaggcaatagatcatatt

SEQ ID NO: 264939 - DNA, 429 bp, Glycine max
agtttgttgtgagctataagctagtttatcgtgaggagaatatgaagttggttgttgtctttgttgctgcagtagttttggtagcatggccatgccatggcgcaggctaccaaaggttccctctccgaatgaaaactggctatggtgagcgttcttcggaggtaaaatgcgcaagttttaggcttgctgtggaagcacacaacatccgagcctttaaaaccattcctgaagagtgcgttgaaccaacaaaggactacattaatggcgaacaatttagatcagactctaaaacagttaaccaacaagctttcttttatgctagtgaacgcgaagtccatcacaacgacatatttatattcggcatagataacaccgtactctctaatatcccatactatgaaaaacatggatatggggtggaggaattta

SEQ ID NO: 264940 - DNA, 424 bp, Glycine max
tcaggagctttacagacattgcttgagaagggtgccaagtacctagtagggcagggggtgcctctaactgggtgcttgacattgtccatgtacctggctccaccagatgatagggatgacattggatgtgtgaaaagtgtcaacaaccaaagctactaccacaaccttgtgctgcaagacaaattacaagaattcaggaaacagtaccctcaagctgtcatactttatgctgattactatgatgcctaccgcactgtcatgaagaatccaagcaaattcggattcaaagagaccttcaacgtttgctgtggatcgggagaaccaccttacaacttcactgtgtttgccacatgtggcacacctaatgccactgtgtgctcaagcccttctcagtacatcaattgggatggtgttcacctcactg

SEQ ID NO: 264941 - DNA, 393 bp, Glycine max
gcgaatatagcccaagccctatacaaccaaaccctaacacacacccatttgattcagtttgcatggctagcgctcaaggttgcatttttggctgcagtgctctgcatggttgtggtgagtgcacccatggcacatgcagctatcacgtgcgggcaggtgacgagtagcctggccaattgcatcggttacctccagaagggaggaacgccgtcgtcgggatgctgcaacggagtgaagagcctcaatgccgccgccaagaccaccgccgaccgccagacggcgtgcaactgcctcaagtcggccgccagccaaatctccggcttcaacgccaacaacgccggcttgctccccggcaaatgcggagtcttcattccctacaagatcagcaccttc

SEQ ID NO: 264942 - DNA, 395 bp, Glycine max
tttcgtttttccccttctcctctcaaaatcctttctttttcccgcagcccatcaaacgagtctcagaggaacgacgatctcgaacccgttcaccgttggatcgtcgtgaaatttgagtatcatgttcgcaacacaattccgagaattctcaccgttgggaattttgatatcacgtctgaactgagagaaacacccttcgcattgtagcctttttctttcccgcagaaacccagagctgtcttggtaaaactacgatcccggtttagttaaccgttggattattgtgaaatttggatatgttgttcgaaattcaattccgcacacttacaccgttgggatttgcgagataatattcgtggaaggagaaaaaggaatcgcatgaagacagcacaagt

SEQ ID NO: 264943 - DNA, 433 bp, Glycine max
ggtttacagagaagcgaagaggcgcagccgtagcagtaactcgtggaattgctagcagtggcgaggatcaaggtttacgagctgaggcagaagacgaaggctgatctgttgaatcagctgaaggacctcaaggccgagcttgccttgcttcgtgttgctaaggtcaccggcggtgcacctaacaagctctctaagatcaaggtggtgaggttgaacattgcccaggttttgacggtgatttctcagaagcagaaggccgcgttgagggatgcctacaagaacaagaagtacttgcctctcgatctccgccctaagaagaccagggccattcgcaggaggcttactaagcaccaggcatcattgaagacagagagggagaagaagaaagagttatatttcccactgaggaaatatgctatcaaggtgtaacttt

SEQ ID NO: 264944 - DNA, 439 bp, Glycine max
gcggccaagatccaggacaaagagggcatccccccagatcagcagaggctgatttttgccggtaaacagcttgaggatggaagaacccttgctgattacaacattcagaaggaatccacccttcacttggtgcttcgtttgagaggtggtatgcagattttcgttaaaactttgaccggaaagaccataaccttggaggtggagagttcagataccatagacaatgtgaaagctaagattcaggacaaggaaggtatcccaccagaccaacagaggcttatctttgccgggaaacagcttgaagatggaagaacccttgctgactataacatccagaaggaatctaccctgcacttggtgttgcggcttcgtggtggcatgcaaatctttgttaagactttgactggaaaaaccataactttggaggttgaaagttctg

SEQ ID NO: 264945 - DNA, 314 bp, Glycine max
cccacgcgtccgcccacgcgtccgcgcccttttttttttttttttttttttttttttgttttttttttttttttgtttttttttttttttttttttttttttttttttttttttttttttttttttttttttttttttttttttttttttttttttttttttttttttttttttcttttttttacttaattttatttatttttcattaattataatcattttatatttgaaatatttttctttatacaacttttttaattttttctatttttccattttaaacatcttttaaaatggggaattattttcttatt

SEQ ID NO: 264946 - DNA, 429 bp, Glycine max
cccacgcgtccgcccacgcgtccgagaaaacctaatttctcaaatttgaggtctcacgaaattttcctcactaaagatgtctggtcgtggaaagggtggcaagggtttgggaaagggaggtgccaagaggcacaggaaggttctgcgcgataacattcaaggaatcacgaaacctgcgattcgtaggttagcgagaagaggtggcgtgaaaaggatcagtggtttgatctacgaggaaaccagaggagttctgaagatattcttggagaacgtgattcgtgatgctgtgacctacactgagcacgctaggaggaagacagtgactgctatggacgtggtttatgctcttaagaggcagggaaggaccctctacggttttggaggctgaacaattctttttttggctgtgctcctatgtgcttgttctct

SEQ ID NO: 264947 - DNA, 415 bp, Glycine max
actcagcattgcatccctcttgatttgtagtttgttttgtgcttgagataaaggttctgccaaatcaaggggggttttaagatcatagtgtgtgttttgcaacaatggctaagttctttgctgctatgatcttggcactctttgccatttccatacttcaaacagtggtaatggctgctaatgaacaaggaggccacttgtatgacaacaagagcaaatatggaagtggaagtgtcaagagttaccaatgcccatcacaatgctcgaggagatgtaaccagacccaataccacaagccctgcatgtttttctgtcagaagtgctgcaggaaatgcctgtgtgtgcccccggggtattatggtaataaagctgtgtgcccttgctacaacaactggaagaccaaggaaggatgacc

SEQ ID NO: 264948 - DNA, 438 bp, Glycine max
ccacgcgtgcggtttgttgtgagctataagctagtttatcgtgaggagaatatgaagttgtttgtttggtttgttgctgcagtagttttggtagcatggccatgccatggcgcaggctaccaaaggttccctctccgaatgaaaactggctatggtgagcgttcttcggaggtaaaatgcgcaagttttaggcttgctgtggaagcacacaacatccgagcctttaaaaccattcctgaagagtgcgttgaaccaacaaaggactacattaatggcgaacaatttagatcagactctaaaacagttaaccaacaagctttcttttatgctagtgaacgcgaagtccatcacaacgacatatttatattcggcatatataacaccgtactctttaaatatccatactatgaaaaacattgatattgggtggaagaattt

SEQ ID NO: 264949 - DNA, 388 bp, Glycine max
gcgcaagcttcaatttgctttgtgctcactcatctatctattataaccaaacactcttctgcatattcttgttcttcttgttcttgttctatctgtgacgagcatcatggcctcgagagcagtgctattgttggctatgtgtgtgcttccggccatggttgtggccattcgcccagcaaagaaccctttttgcgtgaagggtcgcgtctactgtgacccttgccgtgctggttttgagacctcagcaaccacctacattgccggtgctgagattatgttgcaatgcaagagcagggttagcaacgaggttgtgtacaccaagaaagggtacactgactcaactggagcatacacaatgtacgtggaccaagatcacgcagatcaaata

SEQ ID NO: 264950 - DNA, 436 bp, Glycine max
agaagagagatggatccagacgcgttggcaaaggcattcgtggagcactactacagcgccttcgagaccaacaggaacggcttagcgaatctctaccaggagggttccatgctcactttcgaagggcagaagatccaaggcgcttccaacatcgttgccaagctcacctccctcccttttcagcagtgccaccactcaatctccaccgtcgactgccagccctccggcgtcaacgccggcatgctcgtcttcgtcagcggaaaccttcagctcgccggcgaacagcacactctcaagttcagccagatgttccatttgataccaacacctcagggaagctattatgtgttgaatgacatattccgtttaaactatgcatgaagatgtcatatgaccggaaaggccatagaagaagtttgcctatagcaagctgttt

SEQ ID NO: 264951 - DNA, 320 bp, Glycine max
tccacgcgtccgaaaaaaaaaaaaaaataaaaaaataaaaaaaaaaaaaaaaaaaaaagaaaaaaagaaaaaataaaaaaaaaaaaaaaaaaaaaaaaaaaaaaaaaaaataaaaaataaaaaaaaaaaaaaaaaaaaaaaaaaaaaaaaaaaaagtgggacctttttaaaaaatcaaattttaattaaaattttttgaaaaaaaaaattttttttttatgctaactaaaataaatttaattgccttttttttaaaaaatatataaattgtaaaaaccttgattttactaaattaaattcctttaaataaaatacctttt

SEQ ID NO: 264952 - DNA, 431 bp, Glycine max
  unsure (1)..(431): unsure at all n locations
tgcanatgcagagccttctctcctctattttggcttccaacctttttgctccattgattctcagcaacaaaccaatctctatattttgcttagacaatgagggggagcttgtggcaacttgggcaatcgatcactcgccgtcttgcccatggagataagaaggctgttgctcgccgatgttttgcctcagaagctgagctgaaaaagacagtgtttcatgacttccatgttgctcatggtgggaagatggttccatttgctggatggagcatgccaatccaatacaaggactcaatcatggactctaccatcaactgtaggcagaatggtagcctttttgatgtttcccatatgtgtgggctgagcctcaaggggaaggatgctgtcccattccttgaaaagctagtcattgctgatgttgccgggcttgc

SEQ ID NO: 264953 - DNA, 438 bp, Glycine max
aagaggttctcggatatgcctccaaggtggtgctcaccaaggatacaaccacaattggtggtgatggaagtacccaggaagcagtgaacaagagagttgcacaaattaggaacctaattgaggctgctgagcaagagtatgagaaagaaaagctgaatgagagaattgctaaattgtctggtggtgtggctgtgatacaggttggcgcacaaactgagacagagctcaaggaaaagaaattgagagttgaagacgctcttaatgctacaaaggcagctgtagaggaaggtattgttgttggtggtggttgcactcttctgagacttgcatcaaaggtggatgcaatcaaggatagccttgataatgatgaagaaaaagttggagctgatattgtgaaaagagctcttagttaccctttgaaattaattgccaagaatg

SEQ ID NO: 264954 - DNA, 429 bp, Glycine max
ccgttctttaccttcctgaacgacaccgagaccagacacggtttggggcacagttaaggtggtagcagtagcattgttaggccatatctccttttttctctgccttgtattgaggtaaaactcacaaatattataactttgatctggggaagcaatggcatggagaggacatctttcgaaaaacataaaagaacttcggtttttgatgtgccagtcatctcctccaagctcacctgcaagggcttttgtggagaggaattataaggaactaaagacattgaacccaaaattgccaatattaattcgtgagtgcagtggagttgaacctcaattatgggcaagatatgatttgggtgttgagaaaggcatcaaattggaaggcttgtccgaagcacagatctttaaggcacttgaagatttgtcaaaagc

SEQ ID NO: 264955 - DNA, 426 bp, Glycine max
agaaaaaaaaaacccttagccaacacaaccatcatggccacctctgctaggcagcaagcagcattcactggtcaaactgctctgaagcagctcaatgagttcgtccgcaagaccggtggcgccggcaaaggtcgcactaacatgcgccgcaccgtcaagagtgctcctcagagcatttggtatggccctgaccgtcccaagtacttgggtccattctcggagcagattccatcatacctgaccggagaattccctggtgactacggatgggacactgctggattatcagctgacccggaaaccttcgccaggaaccgggagctggaggtgattcacagcagatgggcaatgcttggtgcccttggctgcaccttcccagagatccttgagaagaatggtgtcaaattcggcgaggccgtgtggttc

SEQ ID NO: 264956 - DNA, 428 bp, Glycine max
attgcaaatgtcgaatttcctgagcaatactaatccgaaccctaataagtccttcgaggtgaatcagcctcccactgattccgtgtccagtcttagcttcagtcccaaagccaacttcctcgtcgccacttcttgggacaatcaggttcgttgttgggaggtagcacggaatggagtaaatgttgccactgttcccaaggcttctataacgcacgatcatccggttttgtgctctacatggaaggatgatggcacgactgtattctctggtggatgtgataagcaagtgaagatgtggcctctgttatctggaggccaaccaatgactgttgccatgcatgatgcacccatcaaagaacttgcttggattcctgaaatgaaccttttagtcacaggaagctgggacaagactatgaagtaatgtgcta

SEQ ID NO: 264957 - DNA, 401 bp, Glycine max
attcccgctggagccacgcgtgcgaatccctctttcttcctcttcctcagtagtgcgattttcgattctcttctctgcaacgatgcctaacgctaaggtcttcttcgacatgaccatcggcggtcaacctgccggccgcatcgtgatggagctctatgccgacgtgactcccagcaccgccgagaacttccgcgcgctctgcaccggcgagaagggcgccgggcggagcggcaagcccctccactacaaaggctcgtccttccaccgcgtgatcccgaacttcatgtgccaaggcggcgacttcaccgccggaaacggcaccggaggcgagtcgatctacggcgccaagttcgccgacgagaacttcgtgaaaaagcacactggtcccggcattctcttca

SEQ ID NO: 264958 - DNA, 417 bp, Glycine max
ttcccggtgggacgccacgcgtgcgctcgttcttcttcttttgttgttctgtgtttgtgtttgttttttctctcacctgaaggggtcttgcggcggtggtaactgtggttgcggaagctcctgcaagtgcggcaacggctgcggaggctgcaagatgtacccagacttgagctacactgagtcaaccaccaccgagaccttggtcatgggagtggcacctgttaaggctcaatttgagggtgctgaaatgggtgtgcccgctgagaacgatggctgcaaatgtggaccaaactgctcctgcaacccctgcacttgcaagtgaggtgttgggagagcaagcttcaagcagagatagcccttaattaggaataatgataaactattaatgtgtagctaaaaacttatggattatgtctg

SEQ ID NO: 264959 - DNA, 388 bp, Glycine max
cccacgcgtccgggcaaaaccgccttcgtcttttactcccaaaattccgtttccaagagtgagggacagtggaattggaactgtaaagtgtcaagttaaaacccaagtgaaagcgggtatcctgggactgggtctgggtctgttccacttccttaacttcgtcgaacccggttcatgtctccaactgcaattccacgaaccccccaatgccctctctttgcccacatgggccattcacgtgtccagtgtcgctgaatggattatagctatggctttggtgtggcaatacggagaaaaatctggatacccagcttggaagggcctttcttggggaatggtacctctacttggtggagctttttgtgcgtgcacatggcatttcttttat

SEQ ID NO: 264960 - DNA, 436 bp, Glycine max
cccacgcgtccgcccacgcgtccgaaatctaagccttcaccgcgtaggtcgagggttcaaaaggtagcactaggaccacattttaatactggtgtagcacgtgctgctgagacttcgaggaatgttcagttcccattggtgttggattcagttgtgagcatagtggtgaagaggccaaaaaagtcgaggagcaagaaggagaaggaagaggaagaggaggttcttgtgattgaaggggttgagtatgacagcaacataccagtgaaatttgatgtgcttattaatgatgaagatgataagcagattcagccagaagattcggagtatgcaggaagctttgtgactgtgcctcattcgcataagcacaaaaataagaagattatcacttgtttgaggctgggactgacagatttgttggaagaattggaagcagaag

SEQ ID NO: 264961 - DNA, 428 bp, Glycine max
gtaatcagagttagtaaatctggatggatgactgatgatgagtttgcaagagagatgattgctggtgtaaatccaaatgtaattcgtcgtcttcaagagttcccaccaaaaagcactcttgatcccgcaacctatggtgatcaaactagtaccataacaaaacaacagttggagattaacttgggtggggtcacagtagaagaggcaattagtgctcacagattattcatattagattaccatgatgcattcttcccgtatttgacgaagataaacagcctacctattgcaaaagcttatgccacaaggacaatcctgttcttgaaagacgatggatctttaaagccacttgctatcgaattaagcaagcctgcaacagtgagtaaagtggtgttgcctgcaacagaaggtgttgagagtacaatttg

SEQ ID NO: 264962 - DNA, 429 bp, Glycine max
cccacgcgtccgcaagcagcctccaattcgtgccactctcttcaaaatggccgttacgttctcaaatctccacacagaatcaggtctcaagtccctcgacgacttcctctctgggaaggtctacgtttctggggatcagttcacaaaggacgacatcaaagtgtatggtgctgttttggagaagccaggtgactcttttcccaatgctgccaagtggtacgaggttgtctcatctcagcttgctgcaagcttccccggcaatgctcaaggggtgagattcagtggcaaagcttctgctccagcggaggctgctcctgcgaaaccggatgcttctgctgctgaagatgatgatgaccttgatctctttggcgatgagactgaggaagacaaaaaggcagcagaggaaagggaggctgctaagaagtctac

SEQ ID NO: 264963 - DNA, 425 bp, Glycine max
gtttaagtacagttgatatagttgatgcacaatcaaaatatggtttttggggatggaatttgtggcgtcaacctatgggtttcattgtttttctaatctcgtccctagcagaatgtgaaagattaccttttgatttaccggaagcggaagaagaactagtagcgggttatcaaaccgaatactcgggtatcaaatttggtttattttatgttgcttcctatttaaacctattcatttcttccttatttgtaacagttctttactttggtggttcaaatatctctattccatacatattcgtttctgacttttttgaaataaatcaaacatatggagtttttgtaacgataattggtatctttattacactagctaaaacttatttattcttattcctttctatcgcaacaagatggactttgcct

SEQ ID NO: 264964 - DNA, 439 bp, Glycine max
  unsure (1)..(439): unsure at all n locations
cccacgcgtccgcgtgagctgtctgtgcaaatnnttgcgttgttcttcgcggcgagcacctcgantnncactgaacggtaagtgatggcggacaagggctgttacaatnccgaacctcgaaagttcatgaaccaacaggcttctttccaggaagcagtttgtcgttgatgtccttcatccagggagggcaaatgtttccaaggctgaacttaaggagaagctggctaggatgtatgaagtgaaagaccctaatactgtatttgtcttcaaattccgaacacattttggaggtggcaaatccactggatttggtttgatttatgatacagtggagaatgccaagaagtatgagcccaaatacaggcttatcaggaacggccttgacaccaaggtagaaaagtcaaggaagcaaatgaaggagagaaagaatagagctaag

SEQ ID NO: 264965 - DNA, 429 bp, Glycine max
acgcccacgcgtacgggtatgacttaggtggttaaaatattggacaaaatgagtgtcaacgacagtatatttgttggggtgtctgctttttgtctcctgcctcctacatttcaccaccccctttatccttatctcctctcttcttcatttgttctgctcttcccctctatttaaagctcacacaaagggatcatataccttggttgcactttggtaaggtgagagaataggaaaaagggaaatatggcatttgcaggaacaactcagaagtgcatggcttgtgacaaaacagtttatctggttgataagttgacagcagataaccgagtgtaccataaggcttgcttcagatgccaccactgcaaaggaacactcaagcttagcaactataactcttttgagggggttctttactgcaggccacacttc

SEQ ID NO: 264966 - DNA, 319 bp, Glycine max
ctcccttttgtttttctttctaatataaccaaagattctatgcgtgcaagattgtgagttttctttggattttcgtctttttgagccttctgttgtgttactgttatgctttacaattcaaattaactgtatgtacctgagatatagagggagagtggttatataattcttttccaatgaattggtgggttgtgaatcaaaaaaaaaaaaaaaaaaaaaaaaaaaaaaaaaaaataaaaaaataaaaaaaaaaaaaaaaaaaaaaaaaaaaaaaacaaaaagataaaataaaaaaaattcgagaaaaaaaactggatta

SEQ ID NO: 264967 - DNA, 348 bp, Glycine max
aatttaaaaacttaagttcatgccttgtgtttcgctttcttcctcaaaaccggagatgtttaagacatgcggcaactgcgactgcgctgacaagactagctgcaccaagggaaacagctatggtgttattgtagagactgagaagagttacatcgagactgttgtcatggatgttccagcagctgagcatgatgggaagtgcaagtgtggcactaactgcacttgcacggactgcacctgtggccattaaggaatatgtatgaaaatgtaattgccatgtgtttggcaatacacatatccaaatgatgtaatcttcgcatgaataaatgtgtgtgctgttatcctact

SEQ ID NO: 264968 - DNA, 419 bp, Glycine max
attactatgaccttcataagggaggatgatgatgatcaagttgatgatgatgatgatgatgatcatgtggatggtggtggatcacaaaacagtgccagcaacatcactgaaattgtgaccaccccagaaggggaaaacttaggagaatggctgagtctaggcctcaaaggagacatcaacatgccagcagaagaacaaaactcatcatcaaggcctctccacagcaacaacaacaaggtattctcatgcaacttctgcatgagaaagttttacagttcacaagccttagggggtcaccagaatgcacacaagagggagagagaagctgctagaagctaccaccaatctcatcatcacagaattgggttttcttacactacttctctggcaactaggtcactgggaattaagcctcactc

SEQ ID NO: 264969 - DNA, 445 bp, Glycine max
cggacgacccacgcgacccacgcaacacccccccaaaacaagccccaattatggctctgaatctttgtatctcaccgaactgtggatgggtttcatctcctgcttccttagatagtgcatcttctttgagatcttcacttggttcttgttttggtaacataaacattgctagtgtgagtttaagcactagtagaagtttgagtttgaggaggagtgggagtgttagtgtaagatctagtttggaaactgcggggcccacagttacagtgggacaggtcactgaggttaacaaggataccttctggccgatcgttaaggctgccggggataaaaccgttgtccttgacatgtacacacaatggtgtggcccttgcaaagtgatggctccaaagtttcaagaattatctgaaaagtatctggatgttgtctttctaaagcttgattg

SEQ ID NO: 264970 - DNA, 422 bp, Glycine max
gtagcatggcaatgccatgcgtacgatatgttccctctccgaatgaacactggctatggtgcccgtactccggaggtgaaatgcgcaagttggaggcttgctgtggaagcacacaacatctttggctttgagaccattcctgaagagtgcgttgaagcaacaaaggaatacatccatggcgaacaatatagatcagactccaaaacagttaaccaacaagcttacttttatgccagagacctcgaagtccatcccaaggacacatttgtgttcagtatagatggcaccgtactctctaatattccatactacaaaaaacatggatatggggtggagaaatttaactcgaccttgtatgatgaatgggttaacaagggcaatgcaccggcactgcccgagactcttaagaattacaacaagct

SEQ ID NO: 264971 - DNA, 417 bp, Glycine max
cccacgcgtccggagctccagcagttttcaactgtgtggttgaaatgggcaaaggaagtaaggttaagtatgagctggacaagacaagtggacttataaaggttgatcgtattctttactcatcagtagtctacccacacaactatggttttatcccaagaaccatttgtgaagacagtgatcctatggacgtgctggttctaatgcaggaacccgtgcttcctggttccttccttcgtgctcgtgctattggactaatgcctatgattgaccagggtgagagggatgacaagatcatagcagtttgtgctgatgaccctgagttccgccattacacagacatcaaggagcttccttcacatcggcttgctgaaatcagaagattctttgaggactaccagaagaatgagaaccaaa

SEQ ID NO: 264972 - DNA, 398 bp, Glycine max
gaaagaatggctgccaacacattgatgagttctgccatctcagcctgcccatctctcctttcctcctcaaaatccagatttgccgcagcagttcctctttccagctttgttgtcaccaatgcctcttcttctcgcttttccatgagtgctgattggatgcctggccagcctagacccccctaccttgatggttcagcacctggtgactttggattcgaccctcttcgtcttggtgaagtaccagagaatcttgagaggttcaaagagtcagaactcattcactgcagatgggccatgcttgctgttccagggattttggttccagaggcattgggcttaggcaactgggtaaaggctcaagaatgggctgcagttcctggtggccaagcaacctacct

SEQ ID NO: 264973 - DNA, 368 bp, Glycine max
atttttgcccaggtctgaagatgaaagggagatgtgctcaagaacaatctattgcgcaaatatcgacaagaagcttactcaagcagatgtcaaacacttcttcgaatctatttgcggagaggttcatcgcttgaggcttcttggggattaccatcattcaactcgaattgcatttgttgagttcgcactggcggagagtgcaattgcagctctgagctgtagcggtgtgatcttgggttcactgcctataagggttagtccatcaaagacaccagtgcgccctcgtgctcctcgttcccccatgcactgaatcatcctttctcgtgtttctgctgctgctgcaactcggagatatatttacatatata

SEQ ID NO: 264974 - DNA, 427 bp, Glycine max
acagtttgctattggacggtatggaaatggcttcaagaccagtagtatgaggcttggtgcagatgtcatagtcttcagttgccatctaaataataggattttgactcaaagcattggacttctgtcatatacatatttgataaaaacacagcttgacagaatagtagtacccatggtgaattatgagtttgatacatcaactggatcattgaaaatattaaatggcaatgagcattttgtgtctaatttatccttgctgttgcgttggtcaccatattcatcagaagcagatcttctgaaacaatttgatgacattggatctcatggtactaaagttattatctataatttgtggtgcaatgatgatgcaaatttggagctagactttgatacagatcctacggatattcgtattgctggggatgtc

SEQ ID NO: 264975 - DNA, 421 bp, Glycine max
gcgcccacacgtccgagcagatctttcaagtaatggcacaaattaacaacatggcacaagggatacaaggccttaatcccaattccaatttccataaaccccaagttcctaaatcttcaagttttcttgtttttggatctaaaaaactgaaaaattcagcaaattctatgttggttttgaaaaaagattcaatttttatgcaaaagttttgttcctttaggatttcagcatcagtggctacagcctgcatgcttcacggtgcaagcagccggcccgcaaccgcccgcaaatcctctggcctttccggaaccgtccgcattcccggcgacaagtcgatctcccaccggtccttcatgttcggcggtctcgcgagcggtgaaacgcgcatcaccggccttctggaaggcgaggacgtcatcaa

SEQ ID NO: 264976 - DNA, 420 bp, Glycine max
ctactgtactatcaagaggattagcatctaaatgtgcaaatgtcgtagcaggcgcaggatcgggttcactcaaggaagaggtgaactccagagatggtaggattgaacacctgaacagccatttgaacgagcttcacgtggaacatgtacaactgattgctggaatggaggaggcacacaaacatgtggaagaactaaaatcaaaagccaagcaacttgaggaagaggtcgagaggcaaagaaccgtgatcttagaaggagcagaagagaaacgcgaggccataaggcagctatgtttctcactcgagcactatagagatggctataatatgcttcggcagcatgttatggggcacagacgagttccagttttggctgcctagttaataaatttgaaacgtgatcttgtatattggtttg

SEQ ID NO: 264977 - DNA, 420 bp, Glycine max
aacagatttttggttatggtcattcgcgatttattaaacctatgtgaaatcacaaagggaaaagataacaaagctgttattgcaagtaatatcatgtatgttgttgggcagtatccacggtttttaagagctcattggaagttccttaaaactgttgtgaataaattgtttgagtttatgcatgagacacatcctggagttcaggatatggcctgtgacacatttctgaaaatagtccagaagtgcaagcgtaaatttgtaatcacccaggtgggcgaaaacgagccatttgtgtctgagcttctgacaggtcttcccatcactattgcagatcttgaaccccatcagatacattccttctatgaatctgttggtcacatgattcaggcagagtctgatgcacagaagagagatgaatat

SEQ ID NO: 264978 - DNA, 407 bp, Glycine max
  unsure (1)..(407): unsure at all n locations
cggacgcgtgggcggacgcgtgggaaaagcccagggaagaagaaaactaggtcgcatgttaacacttgtaggttgggtttcatatntngggtttccaatcttcaagtgttaatatgcgacctatatgttgttttccgggggctttttaaacgctttttttttttcatatgtggactctttcttatttccgggagttttgtgttggattttgttggcgttcctgttttttttttaaatggtattttgtttgatctgtttctctacttgttcatttcctttgtttttatagttgggggtggggggtttattttatgctttctttatttttatttattaatttttttgtgattattttttttttttattttttttttgttgttcttatgattttttttgttatttttttt

SEQ ID NO: 264979 - DNA, 404 bp, Glycine max
cccacgcgtccgattattgtcctcatagtgagtagaaggcagagagactagagcggggatagcaatctcatctcattcatttcaatggcaactcaaggtcaagtcattacctgcaaagctgcggtggcctgggaacccaacaagcccttaactgtccaagacgttcaggtggctccgcctcaggccggcgaggtccgtgtccaaatcctcttcaccgctctctgccacaccgatgcttacacttggggcggcaaggatcccgaaggtctcttcccctgtattcttggccatgaagctgcagggattgtggagagtgttggagaaggtgttactaatgttcagcctggggatcatgtcattccctgttatcaagctgaatgtggggagtgcaagacttgcaaatc

SEQ ID NO: 264980 - DNA, 388 bp, Glycine max
aaacactatagcaatagaaacatttgcttttgaaaaacccctcactgttcatcactgcactagctagccacatacaatgtcgaccaaatttaaggtgtttcgtgaattcacaagcgatgactcattcctaaaccaagttatccctgaaaacatcaccgaattccaagtgactctgtccctcgctagagactacgatggcaacaactcaaccaacggaaagttcattccttactgggacactgaaaaggtcactcccgaagtgataaaaaaattcaagaaaaaatacgaacccaccgcactgagggttaaggttcttgtcagcattggaaacaaaaacaaacaatttcctttcaccattggctcggactcgaacagcgaagcatgggtc

SEQ ID NO: 264981 - DNA, 411 bp, Glycine max
gcagaactttgtttcccaatttccattgcctccgcttccacctcgcgaccatgatcagtcccggagaagaaccgcaaggagatctgcaaatacctcttccaagagggagtttgcttcgcgaagaaggacttcaatttggccaagcaccctgagatcgacgtgccgaatctgcaggtgattaagctgatgcagagtttcaagtctcgcgagtacgtgagagaaacttttgcttggatgcactattactggttcctcaccaacgatggcatcgagtttctcagaacttaccttaaccttccttccgaaattgtccctgctactttgaagaagcaagccaagccacctggcaggccctttggaagcccatccggtgatcgccctaaaggtccaccacgctttgaaggggaacgt

SEQ ID NO: 264982 - DNA, 428 bp, Glycine max
gcggcgcacacggactccactctcctcacaatcctgcaccaaaacaatgtcaatgggcttgaggttctgaaggaaggggaagggtgggtggcggtgcctccgcttcccggagggctcgtgatcaacgtcggcgatctgctccacattttgtcaaacgggttgtacccgagtgtgctgcatcgagttcgggtgaaccgaacccggcagaggttctcggttgcttatctatatgggcccccaacaaacgtccaaatcagtccacaagtaaaattggtaggcccaacaaggcccgttctttatcgatcagtgacttggaacgagtaccttggcaccaaagcaaagctttttaataaggctctttcagctgttaggctttcttcatctattaacggtttgtttgatgtaaacgaggataagagtaacgactt

SEQ ID NO: 264983 - DNA, 424 bp, Glycine max
aataatcccaatcatcaagataggaaaagaatggaggccatttgttccaagcaccttatgacatcgcttgtcataattcttgcttctagtttgaccttatcacagggtgccaagaaaggcagtgacagtgaaaggccataccaagaagcgagcacggtgttcattagaacatcttgcagctccacgacctatccaagactctgctacagctccttagtgaagcatgcagacttgatccaaacaaaccgtgtggttctgacaggcacagccctgaatgtgacccttgcgtctgccaagtcgacctcggcaatgatgtcgacgctggcaaagaggcaaggcctgaagccaagagaggttgcagcgatgaaggactgtgtggaggagttggcggactctgttgatgagctcagaaggtctatttctg

SEQ ID NO: 264984 - DNA, 422 bp, Glycine max
caagacagcaccttgttggaaactgcaaaggttcaagtagatacctatgggccaacgttatttgctaaacttgctgagaagaaaaatcttggcgatttgatagccaatgcagcaggcggtggtgcaccagttgctgttgcagctgcccctgttgctgcctcaggtggtggtggtgctgctgctgccgccccagctgctgaggagaaaaagaaggaggaacctgaagaagagagtgatgatgatatgggatttggcttgttcgattagggacattctcaatatgatttggttaaattttgtggttctttacctttaagtttactttatggatattgtaggttttatttttgtgctggttatttatatctgtataagacttgattttgtagttttatgaacttcggaatgtgggtttatgtcca

SEQ ID NO: 264985 - DNA, 425 bp, Glycine max
cccacgcgtccggcagatcaatctctctctctctctcaaccataatagtcatgggttggaaggaggattttgagcagtatgctgagaaagcaaagactttgccaccgactcaatcaaacgaagacttgcttatcctttatggattgtacaaacaggccaccgttggacctgtcaacaccagccgtcctggaatgttcaacatgagggacagagctaaatgggatgcatggaaggctgttgaagggaaatccaaggacgaagcaatgggtgattacatcattaaggtgaaacagctgctggaagcagctggcttgcctgcttgataacattgtcatgccttgctttctgattctgtgctagaagttcacaacagtttggaaataaacaattgcagtgtttgaagcttttattatcataatcatatt

SEQ ID NO: 264986 - DNA, 417 bp, Glycine max
caacaaggaccttggttgggatgaacactggatcttctgggtgggagcattcatcggggcagctcttgcagcactctaccaccaggtcgtaatcagggccattcccttcaagtccaagtgattcaatcaaacggttcatgcttaatcaagttgggaacaacaacaacaacaaaaatcaagccaatgtttgtgggttttggtttcatttcattaagatgatctgtttatctcttttcttctttttaaaatttaaagtctttgtattttgtatgtaaagatgtaaaattatgattattaggtggtgcatgtgtcgcgtcatgggccaatgttatcctctgcttttaagttggaagaggcccaactcatgtgtgatgtacggctgtgaatgcgtaatttaatttgcaaaatccaaaatta

SEQ ID NO: 264987 - DNA, 376 bp, Glycine max
cggacgcgtgggttcagccacagtttcggaggagaagaaaatagtcggtcgagatgggccgtacgaagcaaactgctcgtaagtccacaggaggaaaggctcctaggaagcagcttgcaaccaaggctgcacgtaagtctgcaccaactactggtggtgtgaagaagccacatcgttaccgtcctggtaccgttgctcttcgtgagattaggaaataccagaagagtaccgagcttttgatcaggaagctccccttccagaggctggttcgtgaaattgctcaagacttcaagactgatctgcgtttccagagccacgccgtgcttgcattgcaagaagctgctgaagcataccttgttgggctctttgaggacac

SEQ ID NO: 264988 - DNA, 334 bp, Glycine max
cccacgcgtccggaagggaaaaagtttgccctacatcttgttccttgtggtattctgaatgaggatactctctgtgtaattgggaatggggttgtagtgcacctgccggggttgtttaaagagattgacggtcttgaatcaaatggggtctcttgcaagggaaggatattgatatctgatcgcgctcacctgttgtttgattttcatcaagtagtggatgggctaagagaagccgagcttgctaaatctttcattggcaccaccaagagaggcattggaccctgctactccagcaaggttaaccgtaatggcatccgagtgggtgatttgaggc

SEQ ID NO: 264989 - DNA, 441 bp, Glycine max
gattcccggtcgacccagcgtgcggagccctagatcactagactacacacttcgcatggcggttgttgctcaaacccctgacatcggcggcgagcggcagtccggccaagacgttcgcacccaaaacgttgtggcatgccaagccgttgccaacatcgtcaaaagctctttaggccccgttggcctcgacaagatgctcgtcgacgacattggcgacgtcaccatcaccaacgacggcgccacgattctcaagatgctggaagtggagcatcctgctgccaaggttttggttgaactcgccgagcttcaggatcgagaagtcggagacggcactacttctgtcgtcattgtagctgctgagcttctcaaaagggcaaatgaccttgtcaggaacaagattcatcctacctcgattatcagtggatatagacttgctatgcg

SEQ ID NO: 264990 - DNA, 312 bp, Glycine max
cccacgcgtccgtggaacttctcatgatgcataacaggacatattgtgctgagattggtcacaatgtatccacaaggaagaggaaggacatagttgagagagctgctcagcttgatgttgtcttgacgaacaagacggccagactacgtagccaggaggatgagtagatccaatacatgggagagttatttatgttttgtagtgagcttctgttgacacccttgatggtagattttgattttttgttatttccaaaactttgttgcatgccatacaattttatatgttgcttattgtctatttgctgttgct

SEQ ID NO: 264991 - DNA, 424 bp, Glycine max
aaacacaaaaagttctgttctttttcccacccaattcagttttctcaaatggctcgtgggaagcaaacggctcgcaagtccaccggcggcaaggcgccacgtaagcagctggccaccaaggcggctcgtaagtctgctccggctaccggcggcgtgaagaagccgcacagattccgtccgggaaccgtagcgctccgcgagatccggaagtaccagaagagcacggaacttctgatccggaagctcccgttccagcgattggtccgcgagatcgcgcaggacttcaagaccgaccttcgatttcagagctccgccgtctccgccctccaggaagccgccgaggcctacttggttggtctcttcgaagacaccaatctctgcgctattcacgccaagcgtgtcactatcatgcccaaggatattc

SEQ ID NO: 264992 - DNA, 423 bp, Glycine max
aacagagatcggagcgtggaacctctctctctctctctctctctgcggagagaccggaggatctcagttctctgatcagatccatccgacgtcgtttcagtgataatggctccgttcagcggcgatgagacggcaccgtttttcggcttccttggagccgcagctgccctcgtcttctcctgtatgggagctgcctatggcacagcgaagagtggcgttggcgtggcttcgatgggtgtgatgagaccagagctggtgatgaagtctattgtccctgttgttatggctggagttttgggtatttatggccttattattgctgttattatcagtactggcattaatcccaaggccaaatcttattacctctttgatggttatgcacatctctcctctggtcttgcctgtgggctggctggcctc

SEQ ID NO: 264993 - DNA, 404 bp, Glycine max; identical to SEQ ID NO: 264934

SEQ ID NO: 264994 - DNA, 418 bp, Glycine max
cccacgcgtccgcccacgcgtccgcccacgcgtccgcaccgagtagcagcgaatgtcggagcgaggtcgcggaggatcggcagggaacaagttccgcatgtcactgggtctgccggtggcggcgacggtgaactgcgccgacaacaccggcgcgaagaatctctacatcatatcagtgaaggggatcaagggaaggctgaaccggttgccgtcagcttgcgtgggtgacatggttatggccaccgtcaagaagggaaagcctgatctccgtaaaaaggtgctccccgctgtcatcgtccgtcagcgcaagccgtggcgccgaaaggacggtgtttacatgtacttcgaagataatgctggggtcatagtgaatcccaagggtgaaatgaaaggttctgctatcactggtcctattggg

SEQ ID NO: 264995 - DNA, 126 bp, Glycine max
ggtatgctgatatgcactattcaaataggagcattagctatgtttgttaatgtcacgttatgttatgtgggtaagtcacctaagacactccacgtacctacgttgttgtctcttaccggctttaat

SEQ ID NO: 264996 - DNA, 331 bp, Glycine max
tctgaactagtagcaaggcttgctgatttcatccaatatgattggtgccgatctaggaggagtagcatgagcattgaggatgatggttcaaactccaatgaatcatcaagttacagattaactgtaattggaacaactggtttcaccatccaaccaggatacgagagtggcggggagagtgtgcagcaagcaagtgtatctgttggtttcccaactgtacaaagtgtgactgatgttattgagatggaaccggtcatgactgagaggagagtgaggtttgctattgaagatgagcctgagagtgatgcaaggtctgagacaggagtgcaaa

SEQ ID NO: 264997 - DNA, 417 bp, Glycine max
gttatttgattggtgtgcatccatgttaagctagtggcgatcggatccagctacagggtacaacgtacagatcaaggaaggaagatgttgggtgttataaggcacaagagtattcgccccgccttctccgcaatcagacacttctcttctgcagctaaagagattactgtcagggatgctctcaactccgcactcgatgaggaaatgtcagctgatcctaaagtcttcttgatgggtgaagaggttggggaatatcagggtgcatacaagatatccaaggggctgctcgacaagtatggccccgagagggttctcgatactccaatcactgaggctgggtttgctgggattggagttggcgctgcttactatggtctaaggcctgttgtggagtttatgacttttaacttctccatg

SEQ ID NO: 264998 - DNA, 356 bp, Glycine max
  unsure (1)..(356): unsure at all n locations
cccacgcgtccggcggatttggtggaggtggaggtggtggcggaggtggtggaggaaggaggttcgggtagctgatttggcnaanaaacannatgatgttttggtgcaggaggttgatttggcgttataagtagtgatacacttattttttcaaaataataacattactatcacagatgctcttatctacttactttatgacgaaatttcaactgatcctaaaatcttcttattgcattaagaggtttatgaatatcaacttgcatacaacattttcacatttttgctcatacaagtatggccatgtgagggttctcgattctccaataactgaagatgaattttctggaattgct

SEQ ID NO: 264999 - DNA, 418 bp, Glycine max
agtttgttgtgagctataagctagtttatcgtgaggagaatatgaagttgtttgttgtctttgttgctgcagtagttttggtagcatggccatgccatggcgcaggctaccaaaggttccctctccgaatgaaaactggctatggtgagcgttcttcggaggtaaaatgcgcaagttttaggcttgctgtggaagcacacaacatccgagcctttaaaaccattcctgaagagtgcgttgaaccaacaaaggactacattaatggcgaacaatttagatcagactctaaaacagttaaccaacaagctttcttttatgctagtgaacgcgaagtccatcacaacgacatatttatattcggcatagataacaccgtactctctaatatcccatactatgaaaaacatggatatggggt

SEQ ID NO: 265000 - DNA, 419 bp, Glycine max
attggaaagtgaagttctcaatgcccttatggctcagaaccaaatatatgtaacattggtccacttcaattgttaggaaggcattttcctgataaagacaagggcttcaaggtgagtgggtcaaatctttggaaaaatgactcaaaatgtatccaatggctagaccaatgggaaccttcctcagtcatatatgtgaattatggaagtattactgtgatgtccgaggatcatttgaaagaatttgcttggggactagcaaatagcaatttaccatttttgtggataaaaaggccagatttggtaatgggtgagtccacacaattgccacaagacttcttagatgaggttaaagatagaggatacataacaagttggtgcccccaagagcaagtgctgtctcatccatcagttggggtttt

SEQ ID NO: 265001 - DNA, 409 bp, Glycine max
tcaggagctttacagacattgcttgagaagggtgccaagtacctagtagggcagggggggcctctaactgggtgcttgacattgtccatgtacctggctccaccagatgatagggatgacattggatgtgtgaaaagtgtcaacaaccaaagctactaccacaaccttgtgctgcaagacaaattacaagaattcaggaaacagtaccctcaagctgtcatactttatgctgattactatgatgcctaccgcactgtcatgaagaatccaagcaaattcggattcaaagagaccttcaacgtttgctgtggatcgggagaaccaccttacaacttcactgtgtttgccacatgtggcacacctaatgccactgtgtgctcaagcccttctcagtacatcaattgggatg

SEQ ID NO: 265002 - DNA, 398 bp, Glycine max
  unsure (1)..(398): unsure at all n locations
gccacctccgaatatagcccagccctatacaaccaaaccctaacacacacccatggattcattgcatgctagcctcaaggttgcatttttggctgcagtgctctgcatggttgtggtgagtgcacccatggcacatgcagctatcacgtgcgggcaggtgacgagtagcctggccaattgcatcggttacctccagaagggaggaacgccgtcgtcgggatgctgcaacggagtgaagagcctcaatgccgccgccaagaccaccgccgaccgccagacggcgtgcaactgcctcaagtcggccgccagccaaatctccggcttcaacgccaacaacgccgnctcgctccccggcaaatgcggagtctccattccctacaagatcagcaccttcacca

SEQ ID NO: 265003 - DNA, 395 bp, Glycine max
tttcgtttttccccttctcctctcaaaatcctttctttttcccgcaggccatcaaaggagtctcagaaaaacgacgatctcgaacccgttcaccgttggatcgtcgtgaaatttgagtatcatgttcgcaacacaattccgagaattctcaccgttgggaattttgatatcacgtctgaactgagagaaacacccttcgcattgtagcctttttctttcccgcagaaacccagagctgtcttggtaaaactacgatcccggtttagttaaccgttggattattgtgaaatttggatatgttgttcgaaattcaattccgcacacttacaccgttgggatttgcgagataatattcgtggaaggagaaaaaggaatcgcatgaagacagcacaagt

SEQ ID NO: 265004 - DNA, 420 bp, Glycine max
ggtttacagagaagcgaagaggcgcagccgtagcagtaactcgtggaattgctagcagtggcgaggatcaaggtttacgagctgaggcagaagacgaaggctgatctgttgaatcagctgaaggacctcaaggccgagcttgccttgcttcgtgttgctaaggtcaccggcggtgcacctaacaagctctctaagatcaaggtggtgaggttgaacattgcccaggttttgacggtgatttctcagaagcagaaggccgcgttgagggatgcctacaagaacaagaagtacttgcctctcgatctccgccctaagaagaccagggccattcgcaggaggcttactaagcaccaggcatcattgaagacagagagggagaagaagaaagagttatatttcccactgaggaaatatgctatc

SEQ ID NO: 265005 - DNA, 422 bp, Glycine max
gcggccaagatccaggacaaagagggcatccccccagatcagcagaggctgatttttgccggtaaacagcttgaggatggaagaacccttgctgattacaacattcagaaggaatccacccttcacttggtgcttcgtttgagaggtggtatgcagattttcgttaaaactttgaccggaaagaccataaccttggaggtggagagttcagataccatagacaatgtgaaagctaagattcaggacaaggaaggtatcccaccagaccaacagaggcttatctttgccgggaaacagcttgaagatggaagaacccttgctgactataacatccagaaggaatctaccctgcacttggtgttgcggcttcgtggtggcatgcaaatctttgttaagactttgactggaaaaaccataacttt

SEQ ID NO: 265006 - DNA, 419 bp, Glycine max
cccacgcgtccgcccacgcgtccgagaaaacctaatttctcaaatttgatttcgcacgaaattttcctcactaaaatgtctggtcgtggaaagggtggcaagggtttgggaaagggaggtgccaagaggcacaggaaggttctgcgcgataacattcaaggaatcacgaaacctgcgattcgtaggttagcgagaagaggtggcgtgaaaaggatcagtggtttgatctacgaggaaaccagaggagttctgaagatattcttggagaacgtgattcgtgatgctgtgacctacactgagcacgctaggaggaagacagtgactgctatggacgtggtttatgctcttaagaggcagggaaggaccctctacggttttggaggctgaacaattctttttttggctgtgctcctatgtgc

SEQ ID NO: 265007 - DNA, 403 bp, Glycine max
caaaactcaagcattgcatccctcttgatttgtagtttgttttgtgcttgagataaaagttctgccaaatcaagaggggttttaagatcatagtgtgtgttttgcaacaatggctaagttctttgctgctatgatcttggcactctttgccatttccatacttcaaacagtggtaatggctgctaatgaacaaggaggccacttgtatgacaacaagagcaaatatggaagtggaagtgtcaagagttaccaatgcccatcacaatgctcgaggagatgtagccagacccaataccacaagccctgcatgtttttctgtcagaagtgctgcaggaaatgcctgtgtgtgcccccggggtattatggtaataaagctgtgtgcccttgctacaacaactggaag

SEQ ID NO: 265008 - DNA, 403 bp, Glycine max
gtttgttgtgagctataagctagtttatcgtgaggagaatatgaaggtgtttgtttgctttgttgctgcagtagttttggtagcatggccatgccatggcgcaggctaccaaaggttccctctccgaatgaaaactggctatggtgagcgttcttcggaggtaaaatgcgcaagttttaggcttgctgtggaagcacacaacatccgagcctttaaaaccattcctgaagagtgcgttgaaccaacaaaggactacattaatggcgaacaatttagatcagactctaaaacagttaaccaacaagctttcttttatgctagtgaacgcgaagtccatcacaacgacatatttatattcggcatagataacaccgtactctctaatatcccatactattaaaaa

SEQ ID NO: 265009 - DNA, 383 bp, Glycine max
caagcttcaatttgctttgtgctcactcatctatctattataaccaggcactcttctgcatattcttcttcttcttgttcttgttctatctgtgacgagcatcatggcctcgagagcagtgctattgttggctatgtgtgtgcttccggccatggttgtggccattcgcccagcaaagaaccctttttgcgtgaagggtcgcgtctactgtgacccttgccgtgctggttttgagacctcagcaaccacctacattgccggtgctgagattatgttgcaatgcaagagcagggttagcaacgaggttgtgtacaccaagaaggggtacactgactcaactggagcatacacaatgtacgtggaccaagatcacgcagatcaaa

SEQ ID NO: 265010 - DNA, 416 bp, Glycine max
agaagagagatggatccagacgcgttggcaaaggcattcgtggagcactactacagcgccttcgagaccaacaggaacggcttagcgaatctctaccaggagggttccatgctcactttcgaagggcagaagatccaaggcgcttccaacatcgttgccaagctcacctccctcccttttcagcagtgccaccactcaatctccaccgtcgactgccagccctccggcgtcaacgccggcatgctcgtcttcgtcagcggaaaccttcagctcgccggcgaacagcacactctcaagttcagccagatgttccatttgataccaacacctcagggaagctattatgtgttgaatgacatattccgtttaaactatgcatgaagatgtcatatgaccggaaaggccatagaagaagt

SEQ ID NO: 265011 - DNA, 420 bp, Glycine max
ctgcagagtgcagagccttctctcctctattttggcttccaacctttttgctccattgattctcagcaacaaaccaatctctatattttgcttagacaatgagggggagcttgtggcaacttgggcaatcgatcactcgccgtcttgcccatggagataagaaggctgttgctcgccgatgttttgcctcagaagctgagctgaaaaagacagtgtttcatgacttccatgttgctcatggtgggaagatggttccatttgctggatggagcatgccaatccaatacaaggactcaatcatggactctaccatcaactgtaggcagaatggtagcctttttgatgtttcccatatgtgtgggctgagcctcaaggggaaggatgctgtcccattccttgaaaagctagtcattgctgatg

SEQ ID NO: 265012 - DNA, 424 bp, Glycine max
gcgaagaggttctcggatatgcctccaaggtggtgctcaccaaggatacaaccacaattggtggtgatggaagtacccaggaagcagtgaacaagagagttgcacaaattaggaacctaattgaggctgctgagcaagagtatgagaaagaaaagctgaatgagagaattgctaaattgtctggtggtgtggctgtgatacaggttggcgcacaaactgagacagagctcaaggaaaagaaattgagagttgaagacgctcttaatgctacaaaggcagctgtagaggaaggtattgttgttggtggtggttgcactcttctgagacttgcatcaaaggtggatgcaatcaaggatagccttgataatgatgaagaaaaagttggagctgatattgtgaaaagagctcttagttaccctttgaa

SEQ ID NO: 265013 - DNA, 419 bp, Glycine max
ccgttctttaccttcctgaacgacaccgagaccagacacggtttggggcacagttaaggtggtagcagtagcattgttaggccatatctccttttttctctgccttgtattgaggtaaaactcacaaatattataactttgatctggggaagcaatggcatggagaggacatctttcgaaaaacataaaagaacttcggtttttgatgtgccagtcatctcctccaagctcacctgcaagggcttttgtggagaggaattataaggaactaaagacattgaacccaaaattgccaatattaattcgtgagtgcagtggagttgaacctcaattatgggcaagatatgatttgggtgttgagaaaggcatcaaattggaaggcttgtccgaagcacagatctttaaggcacttgaagatt

SEQ ID NO: 265014 - DNA, 410 bp, Glycine max
agaaaaaaaaaacccttagccaacacaaccatcatggccacctctgctattcagcaagcagcattcactggtcaaactgctctgaagcagctcaatgagttcgtccgcaagaccggtggcgccggcaaaggtcgcactaacatgcgccgcaccgtcaagagtgctcctcagagcatttggtatggccctgaccgtcccaagtacttgggtccattctcggagcagattccatcatacctgaccggagaattccctggtgactacggatgggacactgctggattatcagctgacccggaaaccttcgccaggaaccgggagctggaggtgattcacagcagatgggcaatgcttggtgcccttggctgcaccttcccagagatccttgagaagaatggtgtcaaattcgg

SEQ ID NO: 265015 - DNA, 414 bp, Glycine max
atttgcaaatgtcgaatttcctgagcaatactaatccgaaccctaataagtccttcggggtgaatcagcctcccactgattccgtgtccagtcttagcttcagtcccaaagccaacttcctcgtcgccacttcttgggacaatcaggttcgttgttgggaggtagcacggaatggagtaaatgttgccactgttcccaaggcttctataacgcacgatcatccggttttgtgctctacatggaaggatgatggcacgactgtattctctggtggatgtgataagcaagtgaagatgtggcctctgttatctggaggccaaccaatgactgttgccatgcatgatgcacccatcaaagaacttgcttggattcctgaaatgaaccttttagtcacaggaagctgggacaagacta

SEQ ID NO: 265016 - DNA, 396 bp, Glycine max
aatccctctttcttcctcttcctcagtagtgcgattttcgattctcgggtctgcaactatgcctaaccctaaggtcttcttcgacatgaccatcggcggtcaacctgccggccgcatcgtgatggagctctatgccgacgtgactcccagcaccgccgagaacttccgcgcgctctgcaccggcgagaagggcgccgggcggagcggcaagcccctccactacaaaggctcgtccttccaccgcgtgatcccgaacttcatgtgccaaggcggcgacttcaccgacggaaacggcaccggaggcgagtcgatctacggcgccaagttcgccgacgagaacttcgtgaagaagcacactggtcccggcatcctcttcatggcgaacgccggtcccgg

SEQ ID NO: 265017 - DNA, 383 bp, Glycine max
ctcgttcttcttcttttgttgttctgtgtttgtgtttgttttttcggtcacctgaagatgtcttgctgcggtggtaactgtggttgcggaagctcctgcaagtgcggcaacggctgcggaggctgcaagatgtacccagacttgagctacactgagtcaaccaccaccgagaccttggtcatgggagtggcacctgttaaggctcaatttgagggtgctgaaatgggtgtgcccgctgagaacgatggctgcaaatgtggaccaaactgctcctgcaacccctgcacttgcaagtgaggtgttgggagagcaagcttcaagcagagatagcccttaattaggaataatgaataactattaatgtgtagctaaaaacttatgta

SEQ ID NO: 265018 - DNA, 391 bp, Glycine max
cccacgcgtccgggcaaaaccgccttcgtcttttactcccaaaattgcgtttccaagagtgagggacagtggaattggaactgtaaagtgtcaagttaaaacccaagtgaaagcgggtatcctgggactgggtctgggtctgttccacttccttaacttcgtcgaacccggttcatgtctccaactgcaattccacgaaccccccaatgccctctctttgcccacatgggccattcacgtgtccagtgtcgctgaatggattatagctatggctttggtgtggcaatacggagaaaaatctggatacccagcttggaagggcctttcttggggaatggtacctctacttggtggagctttttgtgcgtgcacattgcatttcttttataac

SEQ ID NO: 265019 - DNA, 410 bp, Glycine max
cccacgcgtccgcccacgcgtccgaaatctaagccttcaccgcgtaggtcgagggttcaaaagggagcactaggaccacattttaatactggtgtagcacgtgctgctgagacttcgaggaatgttcagttcccattggtgttggattcagttgtgagcatagtggtgaagaggccaaaaaagtcgaggagcaagaaggagaaggaagaggaagaggaggttcttgtgattgaaggggttgagtatgacagcaacataccagtgaaatttgatgtgcttattaatgatgaagatgataagcagattcagccagaagattcggagtatgcaggaagctttgtgactgtgcctcattcgcataagcacaaaaataagaagattatcacttgtttgaggctgggactgacaga

SEQ ID NO: 265020 - DNA, 393 bp, Glycine max
gtaatcagagttagtaaatctggatggatgactgatgatgagtttgcaagagagatgattgctggtgtaaatccaaatgtaattcgtcgtcttcaagagttcccaccaaaaagcactcttgatcccgcaacctatggtgatcaaactagtaccataacaaaacaacagttggagattaacttgggtggggtcacagtagaagaggcaattagtgctcacagattattcatattagattaccatgatgcattcttcccgtatttgacgaagataaacagcctacctattgcaaaagcttatgccacaaggacaatcctgttcttgaaagacgatggatctttaaagccacttgctatcgaattaagcaagcctgcaacagtgagtaaagtggtg

SEQ ID NO: 265021 - DNA, 401 bp, Glycine max
cccacgcgtccgcaagcagcctccaattcgtgccactctcttcaaaatggccgttacgttctcaaatctccacacagaatcaggtctcaagtccctcgacgacttcctctctgggaaggtctacgtttctggggatcagttcacaaaggacgacatcaaagtgtatggtgctgttttggagaagccaggtgactcttttcccaatgctgccaagtggtacgaggttgtctcatctcagcttgctgcaagcttccccggcaatgctcaaggggtgagattcagtggcaaagcttctgctccagcggaggctgctcctgcgaaaccggatgcttctgctgctgaagatgatgatgaccttgatctctttggcgatgagactgaggaagacaaaaaggcagcag

SEQ ID NO: 265022 - DNA, 419 bp, Glycine max
gtttaagtacagttgatatagttgatgcacaatcaaaatatggtttttggggatgggatttgtggcgtcaacctatgggtttcattgtttttctaatctcgtccctagcagaatgtgaaagattaccttttgatttaccggaagcggaagaagaactagtagcgggttatcaaaccgaatactcgggtatcaaatttggtttattttatgttgcttcctatttaaacctattcatttcttccttatttgtaacagttctttactttggtggttcaaatatctctattccatacatattcgtttctgacttttttgaaataaatcaaacatatggagtttttgtaacgataattggtatctttattacactagctaaaacttatttattcttattcctttctatcgcaacaagatggact

SEQ ID NO: 265023 - DNA, 416 bp, Glycine max
cccacgcgtccgcggagctgtctgtgcaaatttgcgttgttcttcgcggggcacctcgctcactgaacgggaaggatggccgacaaggctgttacaatccgaacccgaaagttcatgaccaacaggcttctttccaggaagcagtttgtcgttgatgtccttcatccagggagggcaaatgtttccaaggctgaacttaaggagaagctggctaggatgtatgaagtgaaagaccctaatactgtatttgtcttcaaattccgaacacattttggaggtggcaaatccactggatttggtttgatttatgatacagtggagaatgccaagaagtatgagcccaaatacaggcttatcaggaacggccttgacaccaaggtagaaaagtcaaggaagcaaatgaaggagagaaagaa

SEQ ID NO: 265024 - DNA, 398 bp, Glycine max
cccacgcgtccggttaggacttaggtggttaaaatattggacaaaatgattgtcaacgacagtatatttgttggggtgtctgctttttgtctcctgcctcctacatttcaccaccccctttatccttatctcctctcttcttcatttgttctgctcttcccctctatttaaagctcacacaaagggatcatataccttggttgcactttggtaaggtgagagaataggaaaaagggaaatatggcatttgcaggaacaactcagaagtgcatggcttgtgacaaaacagtttatctggttgataagttgacagcagataaccgagtgtaccataaggcttgcttcagatgccaccactgcaaaggaacactcaagcttagcaactataactcttttga

SEQ ID NO: 265025 - DNA, 265 bp, Glycine max
ctcccttttgtttttctttctaatataaccaaagattctatgcgtgcgggattgtgatttttctttgtattttcttctttttgagccttctgttgtgttactgttatgctttacaattcaaattaactgtatgtacctgagatatagagggagagtggttatataattcttttccaatgaattggtgggttgtgaatcaaaaaaaaaaaaaaaaaaaaaaaaaaaaaaaaaaaaatagaaaaaaaaatataagaaacttaaggaa

SEQ ID NO: 265026 - DNA, 354 bp, Glycine max
attgaattcaaaaacttaagttcattccttgtgttttgctttcttcgtcaaaaccagacatgtcgaacacatgcggcaactgcgactgcgctgacaagactagctgcaccaagggaaacagctatggtgttattgtagagactgagaagagttacatcgagactgttgtcatggatgttccagcagctgagcatgatgggaagtgcaagtgtggcactaactgcacttgcacggactgcacctgtggccattaaggaatatgtatgaaaatgtaattgccatgtgtttggcaatacaaatatccaaataatgtaatcttcgtatgaataaatgtgtgtgctgttatcctacttc

SEQ ID NO: 265027 - DNA, 394 bp, Glycine max
cccacgcgtccgcggacgcttgggttccgttcgaacccttctgccggcaacatcgggtgggcgttgccagcaagagtctactactgttacccctgtcgcaaaataagacccgcgcttcgcgtgcgtctaaccctaacccctattcaaatgcccgtacatttggaacaagagctggtatccaaaagctgcagatcatgtgaatacagaaaaaacatggtatgttgttgatgctacagacaaagttcttggaagactagcatcgacgattgctattcacatccgagggaaaaacttggcacctacacacccagtgtgtacattggtgcgtttgtaatttgtgttaattcaaaaaaggttgctgtttctgggaaaaaaatgacccaaaatctttaca

SEQ ID NO: 265028 - DNA, 434 bp, Glycine max
ggaaatggcttcctcaatgatctcctccccagctgttaccaccgtcaaccgtgccggtgccggcatggttgctccattcaccggcctcaaatccatggctggcttccccacgaggaagaccaacaatgacattacctccattgctagcaacggtggaagagtacaatgcatgcaggtgtggccaccaattggcaagaagaagttcgagactctttcctacttgccagacctcgatgatgcccaattggcaaaggaagtcgaataccttctaaggaaaggatggattccttgcttggaattcgagttggagcacggtttcgtgtaccgtgagcacaacaggtcacctggatactatgatggacgctactggaccatgtggaagctgcctatgtttggctgcactgatgcttctcaggtgttgaaggagcttcaag

SEQ ID NO: 265029 - DNA, 383 bp, Glycine max
cccacgcgtccgaatccgggtactatgcaatgcaaacatctctgagcatttcaatcccaagaaggatgcatcatttcctgaaatcaacttggtaaatggggagacaagaggtcttatcggtgggtaccctccatgtaaccgaacaattttggccttctttgcagggcaaatgcatggtagaattaggccagtgcttttccagcattgggagggcaaagacaaggatgtgctagtttatgagaaactcccagacggagttccataccatgagacaatgaaaaagagcaagtattgcatttgtccaagtgggtttgaagtggcaagtccaagaattgttgaggcaatctatgcacaatgtgtgcctgtgataatatcacaacaat

SEQ ID NO: 265030 - DNA, 370 bp, Glycine max
aatgtttgatatccccatggccatggatgcttctaaatctagaaaatctggtcagctaaagaatgccccttcacggactggatcatttgcaggtgctgctgcttcacattctggacctatcttgccaaattccactcctcgttctatttataccacatctggtaacatatcttctggaggcagcatgacgactgcttcagtctcaatgaaaaagaccaactctggtccactgaataaacatggggagcctgtgaagaagtcatctggaccgcaatctggtggagtcacacgccaaaattctggtccgattccaccagttgtaggaaagaacaggtcttattacatctggtcctctaaaatcatctggggc

SEQ ID NO: 265031 - DNA, 330 bp, Glycine max
cgagacatgagcataaatggataccctttatattatctatctttatattatctataaagggggaagggatccgatgtgaatctatttgtttagctttctatcggtatgtatataggtgaataatccaacatgcctttttgtgaagtaaaaaaactaccctcgatccatgcctgaagagggtggataatcagctagaaaaatcaatgaattcatgaggcaacccttctgcgtttgatcatgataaatttttttgtcaataaaaggatcaaagcgttgggggatcaaatgggaaagttcctttgtcggcaaatggcagactagaaacatgac

SEQ ID NO: 265032 - DNA, 414 bp, Glycine max
ggcttattcatggcaggtgatgcatggtttctaaatactccggaccaatcacttggcttggtacgtgcagatcatggttttgatgtatgggtaggaaatgtgcgtggaacacggtggagccatgggcatatatctttattagagaagaaaaagcaattttgggattggagttggcaggaattagccctgtatgatgttgcagaaatgatcaattacattaattcagtaacaaactcaaagatatttgtagttgggcattcacaggggacaattatatcttttgctgccttcactcaaccggagatagtagaaaaggttgaggctgcagcccttctttctccaatatcatacttggatcatatcagtgcacctcttgtacttagaatggttaagatgcacattgatcagatgatt

SEQ ID NO: 265033 - DNA, 449 bp, Glycine max
gatcgagataactagaaacagtgtgatgaaaatgaaggtccttgttttcttcgttgctacggttggggtagcatggcaatgccatgcgtacgatatgttccctctccgaatgaacactggctatggtgcccgtactccggaggtgaaatgcgcaagttggaggcttgctgtggaagcacacaacatctttggctttgagaccattcctgaagagtgcgttgaagcaacaaaggaatacatccatggcgaacaatatagatcagactccaaaacagttaaccaacaagcttacttttatgccagagacctcgaagtccatcccaaggacacatttgtgttcagtatagatggcaccgtactctctaatattccatactacaaaaaacatggatatggggtggagaaatttaactcgaccttgtatgatgaatgggttaacaagggcaatg

SEQ ID NO: 265034 - DNA, 343 bp, Glycine max
cccacgcgtccgcccacgcgtccgaaaccaacaactctgtcgtcgtctcgcttcgttcccgacgtcgtggtgtcgtcggatttggggcaggaggaggacaccttcagtgacggagacggccccagcttctcccccgaccttaagctctttgtcgggaatcttccgttcaacgtcgacagcgcgcagctcgcggagctctttgagagtgccgggaatgtggaggcggttgaggtgatttatgataagactactgggaggagcagggggtttgggtttgtcaccatgtcttctgttgaggaagctgaagcggctgctcagcagttcaatggctatgaacttgatg

SEQ ID NO: 265035 - DNA, 399 bp, Glycine max
cccacgcgtacgagtagttgagaactaagaaggagaagcaaatggcttcctcaatgatctgttccgcagctgttaccactgtcaaccgtgccggtgccggcatggttgctccattcactggcctcaagtccatggctggcttccccaccaggaagaccaacaatgacattacctccattgctagcaacggtggaagagtgcaatgcatgcaggtgtggccaccagttggcaagaagaagtttgagactctttcctacctgccagaccttgatgatgcacaattggcaaaggaagtagaataccttcttaggaagggatggattccttgcttggaattcgagttggagcacggtttcgtgtaccgtgagcacaacaggtcaccaagatactacgatggac

SEQ ID NO: 265036 - DNA, 450 bp, Glycine max
cggacgcgtgggttcaccaccaaaaagaaaataatggcaatggccagtgcaacaactctagccacaatcactgttgtggcggctagccccagtgttggcagcagaaggagtgggaagaggaatgtgaacttcatcagagggttgaattcttttggagggttgaaggctcagaacaatgtgacattactaggccttcctgtgtgcactgagcagtgctttgcaaggtggtgagctcattgaaatatccatcatcatcatcacgtaaggggagaggtggaggtgctgccttttcaacatgcaatgctgctggtgagattttccagattgcagccatcatgaatggccttgtgcttgttggggtggcaatagggtttgtccttcttcgagtcgaagcgtttgtggaagagtctgagtgagaattgcatcaacttttaatcagtttttcatata

SEQ ID NO: 265037 - DNA, 442 bp, Glycine max
ctttcttttttcccgcagtcatgggcaaggtcaagatcggaatcaacggatttggaagaattggccgtttggtggccagggtggctctgcagagagacgatgttgaactcgttgccgttaacgatcctttcattaccaccgattacatgacatacatgtttaaatacgacagtgttcacgggcactggaagcatcacgatgtcaccgttaaggatgagaagacccttctcttcggtgacaagccagtcactgtttttggacacaggaaccctgaagagatcccatggaagtcgactggagctgacatcattgttgagtccaccggagttttcaccgataaggataaggctgccgcacatttgaagggtggtgcaaagaaggttattatttctgcccccagtaaggatgcccccatgtttgttgttggtgttaacgagcacga

SEQ ID NO: 265038 - DNA, 342 bp, Glycine max
aacttaagttcattccttgtgttttgctttcttcctcaaaaccaaacatgtcgaacacatgcggcaactgcgactgcgctgacaagactagctgcaccaagggaaacagctatggtgttattgtagagactgagaagagttacatcgagactgttgtcatggatgttccagcagctgagcatgatgggaagtgcaagtgtggcactaactgcacttgcacggactgcacctgtggccattaaggaatatgtatgaaaatgtaattgccatgtgtttggcaatacaaatatccaaataatgtaatcttcgtatgaataaatgtgtgtgctgttatcctacttc

SEQ ID NO: 265039 - DNA, 320 bp, Glycine max
ctttcgaaagattttatccaattgaaattttaaaaatgactgggataaacttaagaattcaattattgaaattgaataagtaaacaatttaattggattggtcgaatggtatcaaaaaaatggagtactaactcccatttcttatttattattgaattaaccgatcaacttgctttgttatcgaacatttctttttgatttcaaaaattttccggaaaaaatttgaatctatttttatatgcgaatcaatcctactacttctggtcctgaggtttctgcgcttgaaaaaaaaaaatctgggacgtatcgcccaaataatt

SEQ ID NO: 265040 - DNA, 344 bp, Glycine max
aaccaaacactcttcttcatatccttatacttattgctcttggtctatctgagaggggcgggatggcctcaagagcagtgctattgttgactatgtgtgtgcttccggccatggttgtggccattcacccagcaaagaaccctttttgcgtgaagggtcacgtctactgtgacccttgccgtgctggttttgagacctcaacaaccacctacattgccgatgctgaaattatgttgcaatgcaagagcacggttagcaacaatgttgtgtacaccaagaaagggtacactgactcaactggagcatacacaatgtacgtggacgaagatcacgcaaatcaaata

SEQ ID NO: 265041 - DNA, 356 bp, Glycine max
ctttttctctctctccattccgtgttttcagctccggtaacctctccttctccggcgccggtgctatctccgccgtgaccttccatccctcaacgccccacagatcttcaatttgattgcttgggtcaacaatttctgtcattctcaatcatggcaactagacttcagtttgaaaataattgtgaagttggagtcttctctaaactcaccaatgcttactgtttggttgcgattggaggttctgaaagcttctacagtgtatttgaagctgagttagcagatgttatccctgtggtcaagacatccattggtggtactcgtatcattggtcggctttgtgctggaaacaagaatgg

SEQ ID NO: 265042 - DNA, 437 bp, Glycine max
gagagatccatccatcaattccaatggccgatcagctcaccgacgaacagatctgggagttcaaggaagccttcagcctcttcgacaaggacggggatggttgtattaccaccaaggaacttgggaccgtgatgcggtcacttggccagaacccaactgaggcagagctgcaggacatgataaatgaggttgatgctgatgggaatggtaccattgatttcccagaattcctgaatctcatggctcgcaagatgaaagacactgattcagaggaggagctgaaggaggctttccgcgtgtttgacaaggatcagaatggcttcatctctgcagcggagctccgccatgtgatgaccaatctcggtgagaagctgaccgacgaagaagtcgatgaaatgattcgcgaggctgacgttgatggtgatggtcagatcaac

SEQ ID NO: 265043 - DNA, 333 bp, Glycine max
cccacgcgttcgctccacccaacaaaccacctctccttcctctcccccaaaattttaaagggaaggtcaaattccacattcctgagattcgcaaaaatccctttctgcgtcgtcgcattgtatgagcctcgaattccgatcccgattggcatggccggagcggcgttatcgccgccgacgagttcgaagtcggtgacgcagactgtgaacgggtcgcacaagttcgtgatcgagggatactccctggcaaaagggatgtgagcggggaagcacattgcgagcgacgtgttcacggtgggagggttccactgggcgatctacttttaccccgat

SEQ ID NO: 265044 - DNA, 405 bp, Glycine max
gtaaaaaggaaaggggaaggaagcaaggcatggaaggagagtggatcgattcctcagcagggccagacatttataaaagctctttcccttccctcaaatcgctcatactcttccaatctttttttttttttttttttttacctttctccctcgctcaataatacaaaacaaaaaagaagaagaagaaggttttcgcgatggcatcgaaacggatcttgaaggaactcaaggatctccagaaggatcctcctacctcttgcagcgccggtcctgttgctgaaaacatgtttcactggcaagcaacaattatgggtcctccagacagtccttatgctggaagtgttttcctagtcactattcatttcccttcagattatcccttcaagccacccaaagttgcattca

SEQ ID NO: 265045 - DNA, 398 bp, Glycine max
gtgcaaagcctctattttttcttgtgaatttgaaggacgatgagttccacagaggtcgcggccacggcgaataagggtggaagagggaaacccaagaccacaaagtccgttttcccgttcctccaaagccggccttcagttccccgtcggccgcgtcgctcgctacctcaaggccggtcgctatgcccagcgcgttggttccggttcccctgtttacctatctgcggttctcgaataccttgccgctgaggttttggagcttgccggctacgctgcgagggacaacaagaagacgaggatcgttcctaggcacattcaacttgcggtgaggaacgatgaggagttgagcaagctgatggggtctgtgaccattgccaatgggggtgttctgcctaaca

SEQ ID NO: 265046 - DNA, 447 bp, Glycine max
  unsure (1)..(447): unsure at all n locations
gcaagatgtacccagacttgagctacactgagtcaaccaccaccgagaccttggtcatgggagtggcacctgttaaggctcaatttgagggtgctgaaatgggtgtgcccgctgagaacgatggctgcaaatgtggaccaaactgctcctgcaacccctgcacttgcaagtgaggtgttgggagagcaagcttcaagcagagatagcccttaattaggaataatgataaactattaatgtgtagctaaaaacttatgtattatgtctgtgatggttttcgtgcactctggtgttttgtgttaaacaaacatccttagaataaagtggtcatgtcttgcctttcagcaagttcaagtgttttggacttgtgatgggtgtgttaagctcatggntgcttcttttttttttttttaatggttgggaattggtcgcttctgtataaagttc

SEQ ID NO: 265047 - DNA, 409 bp, Glycine max
cttcttcttcttctcttaaaagttattaagagcttttgcttttctttctgcgcgcttttgggaaggagagtagttcttccttttctcaaagcaaaaaaaatgttcatcgagagtttcaaggttgagagtcctaacgtgaagtacacagagactgagattcagtccgtgtacaactatgaaaccactgaacttgttcacgagaacaataatggcacttatcagtgggttgtcaagcccaaaactgtcaaatatgaatttaaaaccaacacccatgtccctaaactaggggtaatgcttgtggggtgggggggaaacaatggctcaaccctcactggtggtgttattgctaaccgagagggtattttatgggcaacaaaggacaatattcaacaagccaattactttgggt

SEQ ID NO: 265048 - DNA, 433 bp, Glycine max
cccacgcgtccggaatggcacgcatcaaggaggatccatctctgaaacatattttggaggagatagagactggcggtcctgctgctatgatgaggtactggaataatgaggaggttttgcagaagttgggacaagccatgggtcttgccaattcgggagatgcaggtgcctctgctgaaaattctggggcagatgagaccgaagatttgggaaatgaagatgaatcaattgttcatcatactgctagtgttggtgatgtggagggcttgaaaaatgcactagcctctggtgctgacaaggatgaagaagattcagagggaagaactgctttgcattttgcctgtggatatggcgaggtaaaatgtgctcaagttctcctcgaggctgaagcaaaagtggatgctttggataaaaataagaacactgctcttca

SEQ ID NO: 265049 - DNA, 182 bp, Glycine max
ggtggtcaaggaggaggaagtggaggagggtatggtgctggtggagatcatggtgctgctgactgtggtggtggagctggaggtggagctggtggaggctatggtgccggtggagaacatggcattggctatggaggaggtggtggaagtggtggagggagtggaggaggttatggtgatgg

SEQ ID NO: 265050 - DNA, 447 bp, Glycine max
cccacgcgtccggaataccccctcttttgctgcatcagaggagttgtaaattaagagcatggctgggcaagctcttgtatcatcatcttctcttaccttctcagcggaggctgcaagacaaagtcttggaccaagatcactccaatctccatttggcttctccagaaaagcctcctttcttgttaaggcagctgctaccccccctgtcaagcaaggatcagacaggcctttgtggtttgcatcaaagcaaagtctttcttacttggatggcagccttccgggtgactatggatttgaccctctgggactttcagaccctgaaggaacaggagggttcattgagccgaaatggctagcatatggtgagataatcaatggtcgttatgcaaatgtgggtgcagttggtgcaatagcacctgaaattctaagcaaggctggtctgatccc

SEQ ID NO: 265051 - DNA, 446 bp, Glycine max
cagtttggcaattaaaagaatgcacagcctatctgtctctagaggtcctaaaagggggaggtcgcctgaaacaagaagtgctgatggtattgatactgatggtgacacacctatcaaaaaacatcgtccgagtagatcactgtcacggtccaggtcagtgtcacgcccaccacatgaagttgtgcctggagaatgcttcaaggattctgctcaaaaggtcaaggcaatcaaacttgcaaagaaatctgtcaagaaaagaaacaaggatgcccgtcgtggagaagctgatagagtcatacctaatctgaagcccaagcacttgttttctgggaagcgttccaatggaaaaactgaaagacgctaggacaggggatgcttgttaatgcaatttaaaggacacctgttggcattttttaaggctgccaaaaaaaattgttattaaatgt

SEQ ID NO: 265052 - DNA, 307 bp, Glycine max
tccactcacaaatacaagcgttcccacattacatggcctccttgcccttgaagcggggcggggatctccaaccggcggctgctactttactcccgtcgtatccgccccagcgtttgacgaatcccgaacttcctttccagagctccgacttggatgaccgataaagatttgtcatctactgtctttgatgggaatgatgcctatactcgcctcataatctccaccacaattgcaggcaaaaatggtgaacctatacaaaccatcacttacattgtaaaacttgttgtttggcacatggatcatttgg

SEQ ID NO: 265053 - DNA, 445 bp, Glycine max
agacacataaaaaatagtgatggaagaacaagagtgccaagttgtggaaaataaggggacgggcaactcctcctgttcgagtctatgctgatgggatttatgatctctttcacttcggccatgcccgttctctcgagcaagccaaaaaactgtttccaaacacttatctccttgttggatgctgcaatgatgagatcacacataagtataaaggcaaaactgtcatgactgagaaggaacgctatgagtctcttcgccactgcaggtgggttgatgaagttattccagatgcgccatgggtaatctctcgggagttccttgacaagcatcaaattgactatgtggcacatgatagtcttccttatgctgatgcaagtggagctggaaaggatgtgtatgaatatgttaagtccgttggaaaatttaaggaaacaaaacgaactga

SEQ ID NO: 265054 - DNA, 449 bp, Glycine max
cccacgcgtccgcccacgcgtccgaaacaaacccactaagatggcttcctttgtatccttgctagtgctgcttcttgcagcccttatcctcatgcctcaagggcttgctacttactacaaaccaattaagaagccaccagtgtacaagcctccagtgtacaagccaccagtgtacaaaccaccggtttataagccaaaaccaccggtttacaagccgaaaccaccggtttacaagccaccatataagaagccaccatacaagaaaccaccttatggaaagtaccctccagtagaggacaacacccatgcctaaagcaagcaatgaggtctattatctacttaataaataagaggaactgctttgtgttttctagcattgtgatttacaacttcgtagcaatgcatattcttgactcttgcatgcacttcaatcccttcgagcattaatg

SEQ ID NO: 265055 - DNA, 419 bp, Glycine max
ggagcgatccgagaaaaactctgtaaacatgttggtttaccaggacctccttacaggtgaggagcttctctctgactccttccgttacaaggaaattgagaatggaatgctgtgggaagttgaggggaagtgggttgttaaaggagcagttgatgtatacattggtgcaaacccttctgctgagggtggaggagaagatgagggagttgatgatgcagctgttaaggttgttgacattgttgacacattcagacttcaagagcaacccgcattcgataagaagcagtttgttaccttcatgaagaggtttatcaagaatttgactcccaagctcgatgcagagcaacaggagttgtttaagaagcacatcgagggagcaactaaatacctgctctctaagattaaagatttccaaattt

SEQ ID NO: 265056 - DNA, 432 bp, Glycine max
cccacgcgtccgcccacgcgtccgcgcatagtgtggtagcagcagcagagcttgtatacggcgccgcttcagcgtagcaacatgatcattcccgagaagaaccgtaaagagatctgcaaatacctcttccaagagggagtttgctttgcgaagaaggacttcaatctggcgaagcacccggagattgatgtgccgaatctgcaggtgataaagctgatgcagagcttcaaatccagagagtacgtgagggaaacatttgcgtggatgcactattactggttcctcaccaacgatggaattgagttccttaggacttacctcaaccttccatccgaaattgtccctgccactctcaagaagcaggccaagcccgccggaagaccattcggtggcccacccggtgatcgccccatgggcccacctcgctttgac

SEQ ID NO: 265057 - DNA, 429 bp, Glycine max
tccggtagttgagaactaagaagaaggaaatggcttcctcaatgatctcctccccagctgttaccgccgggaaccgtgccggtgccggcatggttgctccattcaccggcctcaaatccatggctggcttccccacgaggaagaccaacaatgacattacctccattgctagcaacggtggaagagtacaatgcatgcaggtgtggccaccaattggcaagaagaagttcgagactctttcctacttgccagacctcgatgatgcccaattggcaaaggaagtcgaataccttctaaggaaaggatggattccttgcttggaattcgagttggagcacggtttcgtgtaccgtgagcacaacatgtcacctggatactatgatggacgctactggaccatgtggaagctgcctatgtttggctgcactg

SEQ ID NO: 265058 - DNA, 411 bp, Glycine max
cccacgcttgcggttaggatagcggcgacttgagcggttcgctgcccgcgacgttgtgaggggtggactgaaccttatcatttaaaggaaggagagtggatcgattcctcaacagctccaaacatttataaaagctctttcccttccctcaaatcgctcatactcttccaatctttttttttctttttttttacctttctccctcgctcaataatacaaaacaaaaaagaataacaagaaggttttcgcgatggcatcgaaacggatcttgaaggaactcaaggatcttcataaggatcctcctaccttttgcagagccgagcctgttgctgaatacatgtctcactggcaagcaacaactatgggtccttcagacagaccttatgctggaggtgttttcctattcactat

SEQ ID NO: 265059 - DNA, 443 bp, Glycine max
agttattgggagttgcagcattcttgagactgcaggtcaaggagcactcattcccgtctggcagacattgaagtctgccattacttccaaggaatcagaatcttcaagttccaataaaattatttggctgcattttggggttaacagtgccgcaacgaggtttgctatcgagcgtcaagctgtcaacgaggctaccttccgctgccctgatgaaatgggatggaagccccagaaagtccctattgttccttcagatggtgcaattacacgaatacgggagactacccttcttcctgtggaggagatcaccaaggccttggcaaataagggctatgatgttatgacatctgatgatgcaagaaggtttgtgtgcaactacgtttactatcattcgcttcgctttgcggagcagaatgggactaaatccctttttgtgcacgtgc

SEQ ID NO: 265060 - DNA, 409 bp, Glycine max
ggacttaagctagtttatcggagagaatatgaagttgttgttttcttgggggggggagttttggtagcatgagcctgccatggcgcagctccaaatgtccctctccaatgaaaactgctatggtgagcgttcttcgtgaggtaaaatgcgcaagttttatgcttgctgtggaagcacacaacatccgagcctttaaaaccattcctgaaagtgcgttgaaccaacaaaggactacattaatggcgaacaatttagatcagactctaaaacagttaaccaacaagctttcttttatgctagtgaacgcgaagtccatcacaacgacatatttatattcggcatatataacaccggactctctaatatcccatactatgaaaaacatggatatggggtggaggaatttaat

SEQ ID NO: 265061 - DNA, 363 bp, Glycine max
cagcttcagatcttctccatcctctgaatcaagttttgactttatttgaagagtgggcagctgcactttccttccaaaatgagccggccaatggaggaagatgctgcgggtaaaaatgaggaagaggagttcaacaccggaccactatctgtactcatgatgagtgttaaaaataatactcaggtactgataaattgtcggaacaacaaaaagcttctgggtcgtgtaagggcttttgacaggcactgcaacatggttcttgaaaatgtcagggagatgtggactgaggtgccgaagactggtaaaggaaagaaaaaggcccagccagtcaacaaggatagattcatcagcaaaatgtttcta

SEQ ID NO: 265062 - DNA, 404 bp, Glycine max
ccaccgtcaaacttgtcattctatatgctttgcagggtccattgaatatgtctctggcgggggatcttcctcccaagggtggcttcagttttgatctatgccgaagaaacgcaatgcttcaaaacaagggcctcaaagccccaacctttctcaaaactggcaccactattgtcggtttagttttccaggatggtgtcattcttggtgctgatactagggcaactgaaggacctatagtggctgataaaaactgtgagaaaattcattatatggcacccaacatatattgctgtggagcaggcacagctgctgatacagaggctgtaacagacatggttagcttacagctgcaattacatcgctaccatactggtcgagaatcaagagttgttacagcgctgacc

SEQ ID NO: 265063 - DNA, 436 bp, Glycine max
tgcaattgaagttaaaagccttagccttccctacaactccaaacacaaagacatcatcatgcatggctgcctccgtctccactgtcggagctgtcaacagagctcttttgaacctgaatggttctggagctggagcttcagctcccagttcagccttctttgggaccagcttgaagaaggttattgcctcaagggtccccaacagcaaggtttccggtggaagcttcaagattgttgctgtagaagagaagaaagagattgaagagacccagcagaccgacaaggacagatggaagggtcttgcctatgatatctcagacgaccaacaagacatcacaagaggaaagggtttggttgactcccttttccaagctccacaggatgctggaactcactatgcagtcatgagctcctacgagtacctcagcactggact

SEQ ID NO: 265064 - DNA, 446 bp, Glycine max
cccacgcgtccggtttgttgttgtaactcgttcttcttcttttgttgttctgtgtttgtgtgtggtttttctctcacctgaaaatgtcttgctgcggtggtaactgtggttgcggaagctcctgcaagtgcggcaacggctgcggaggctgcaagatgtacccagacttgagctacactgagtcaaccaccaccgagaccttggtcatgggagtggcacctgttaaggctcaatttgagggtgctgaaatgggtgtgcccgctgagaacgatggctgcaaatgtggaccaaactgctcctgcaacccctgcacttgcaagtgaggtgttgggagagcaagcttcaagcagagatagcccttaattaggaataatgataaactattaatgtgtagctaaaaacttatgtattatgtctgtgatggttttcgtgcactctggtgtttt

SEQ ID NO: 265065 - DNA, 398 bp, Glycine max
tctattgtattggcctgtagctatgccatatcagagacagcgtgttcagagctcaatgggaacgtcactctcgtggcctatgttccatgctctggctacaagttgccattgatcaaagctgaggccagagttcctaaagccaaagaatctgaaggaggaaggagaggtgcccttgttctcttggcagctacccttttcacctctgcagcttccaattcttctgccaatgctgggatcattgaagattaccttgagaggagcaaggccaacaaggaattgaatgacaagaaaaggttagctactactggagcaaactttgcatgagcatacaccgtggaattcggtagttgcaagttccctgagaacttcactggttgccaaaatctttgccaaacaaa

SEQ ID NO: 265066 - DNA, 295 bp, Glycine max
acttttatcttgtcccatatcttctttcttctgtggacggggtccttatatataccttcagccaccgctgatgatgatcatgtgtactacactgactgtgataatctttaatacggtgtcatatattacgcgttgccagtgataagaagaaatggcggtggtatacaagttgaataatcatgaatctaaacttgccctctgactgtggtgcaatctggcaacgagctctttgaggggctaccgaatatgattgcatttcgttcagcaggagtctttttcattacctaatggccat

SEQ ID NO: 265067 - DNA, 444 bp, Glycine max
caaagagacagaaagttgagagagaagtgttcacgtctttgagaaatgggtgcttgggcggcggtcacagaaaaatccatccatgaattcatggtcaaggatgctaagggcagagacgtgaacctcagcacctacaaagggaaggttcttcttgtagttaacgtcgcttcaaaatgtggatttacaaattccaattacacccagttaactgagctttacagcaaatataaagacagaggtcttgagatactggcatttccatgcaaccagtttctgaaacaagagcccgggagtagccaggaggcagaggaatttgcctgtacaaggtacaaggctgagtatcccatttttggaaaggtacgtgtcaatggacctgatacagcacctgtctacaaattccttaaagcaaataaaacaggatttctgggtagtaggataaagtgg

SEQ ID NO: 265068 - DNA, 420 bp, Glycine max
  unsure (1)..(420): unsure at all n locations
cccacgcgtccgcccacgcgtccggggaagccagatagctttagtggggagtttctagttggatcgtaccgtggaagctctttcttggaccccaagggaagaggtgcttccacaggttatgacaatgcagttgctttgcctgctggtggaagaggagatgaggaagaacttgccaaggaaaacaataaaagtgcctcatcatccaagggcaaaannaccttgagtgtcaccaagaccaagcctgagacgggtgaagttatcggtgtgttcgagagtgttcaaccatctgacactgatttgggagcaaaggctccaaaggatgtcaagatccaaggcatctggtatgctcagcttgagtcatagagtggtttggtttctggtttggttgttggctcagatttttgtaggaacttcatgcat

SEQ ID NO: 265069 - DNA, 439 bp, Glycine max
cccacgcgtccgcccacgcgttcgcccactcgtccgcccacgcgtccgaggtgatgatcttgagccatgaccgagagagaggtcgagtaagtctttccactaagaagttagagcccacacctggagacatgattcgcaatccaaagcttgtctttgagaaggcggaggagatggctcagacattcagacagagaatagcccaagcagaagctatggctcgtgcagacatgctaaggttccagcctgagagtggattgactatcagcggtgatgggatcctgggaccatttacttcagacttgcctgaagagggactggatttgagtgaagtaccaccagctgaagaatcatgattcagaattgcgtgctcttttctttctgtttgcttacatttttataatattgtttggaactaactatcaattgttgccgaacgatg

SEQ ID NO: 265070 - DNA, 443 bp, Glycine max
cccacgcgtccggttccaactcatcaagggttaatgttgccgccaagatagcaatgcctggttccaaaggggtgcttgaactgaacaacacagaccccaggctgaacccttctgtgaggttcaactatctagcaagtgaagatgacatggaagaatgcgtcaagatgacaaaactacttgagagaattgcaaggtcaaaatctattgcatttttcctaggcgagtcaaagcaagaaaaactgacatcaactgacgttgatctaagaaacttctgcaagaaaaatgtgagaacaatctatcactatcatggggtttgcacggttggatcagtggttgatgagcaaaacaaggtttatggaataaagggattgagaatattggatggctcaactttttcagagtcaccaggcacaaacccaatggccaccattctgatgctagga

SEQ ID NO: 265071 - DNA, 451 bp, Glycine max
tgttgatcgagataactagaaacagtgtgatgaaaatgaaggtccttgttttcttcgttggtacagttttggtagcatggcaatgccatgcgtacgatatgttccctctccgaatgaacactggctatggtgcccgtactccggaggtgaaatgcgcaagttggaggcttgctgtggaagcacacaacatctttggctttgagaccattcctgaagagtgcgttgaagcaacaaaggaatacatccatggcgaacaatatagatcagactccaaaacagttaaccaacaagcttacttttatgccagagacctcgaagtccatcccaaggacacatttgtgttcagtatagatggcaccgtactctctaatatttcatactacaaaaaacatggatatggggtggagaaatttaactcgaccttgtatgatgaatgggttaacaagggcaa

SEQ ID NO: 265072 - DNA, 248 bp, Glycine max
cccacgcgtccggtcttatggtggttacctatgcacccagagacgaggaagggcagagtgggcgacgaaatgcttcggggagttcaaaataaacgtagatccggggattccctatatatgtcaacctttcgaactgctgctgaatccaccggcagtcaatatacaacctttcgaactgaaacatcttaatagccatatgaaaagaaagcaagcccatttagtttttcagtttttattagaatttccaa

SEQ ID NO: 265073 - DNA, 408 bp, Glycine max
cccactcgtcctggaaatgtccttttattacaaggactggttttcactggcaagcgttacctaatgatcttgtaaagagaggagttgctgttaaggacccatctgctccccatggagttcgtcttttgattgatgactatccttatgcttctgatgggctagagatatgggatgccatcaagtcctgggtgcaagaatatgtctcattctactacaagtcatatgaggaacttcaaaaagaccctgaactccaagcttggtggaaagaacttgtagaggtgggtcatggtgatttgaaagataagccatggtgtcaaaagatgcatactcgttaaaaagttgttgaagcttccgctatcctcatatggatggttcagcccttcatgctttttttaactttggacagta

SEQ ID NO: 265074 - DNA, 447 bp, Glycine max
gtttttgcattaattgctatttcatttattttattgattagtgtacctgttgtatttgctgctcctgaaggttggtcgaataacaaaaatgttgtattttccggtacatcattatggattggattagtgtttctcgtgggtattcttaattctctcatttcttgaagctctatttattctagatcaaaaacgaaatgaccccctcccccagaattctttcggattgtcgggcacattaaaaaaggaatggataagttcctaaaaataaagaaaactataacacattataaggaggggtcaaatattaattaagataaaagatatagaatatctatctgtatatatatatatatagatataatttattaataattagaactttcttttttcttaaaaaaaaaaaaagtaaataaaaagatttgatagaatcggaatttcaattcgatt

SEQ ID NO: 265075 - DNA, 430 bp, Glycine max
  unsure (1)..(430): unsure at all n locations
cccacgcgtccgtgttgatcgagataactataaacagtgtgatgaaaatgaaggtccttgggttcttcgttgctacaattttggtagcatggcaatgccatgcgtacgatatgttccctctccgaatgaacactggctatggtgcccgtactccggaggtgaaatgcgcaagttggaggcttgctgtggaagcacacaacatctttggctttgagaccattcctgaagagtgcgttgaagcaacaaatgaatacatccatggcgaacaatatagatcagactccaaaacagttaaccaacaagcttacttttatgccagagacctcgaagtccatcccaaggacacatttgtgttcagtatagatggcaccgtactctctaatattccatactacaaaaaacatggatatggngtggagaaatttaactc

SEQ ID NO: 265076 - DNA, 435 bp, Glycine max
gtgaggttgtaacaaccaatcctactgttggtagcaacgtcgaagagctcgtctacaagagtataggatttgaggtctgggatcttggtggacaagaaagactgaggacatcatgggcaacatattaccgaggaactcatgctgttattgcggtgatagacagcagtgatagagccaggatctctatcataaaggatgaactttttaggttgctggggcatgaagatttacaacattctgtcattcttgtctttgctaataaacaagatatcaaggatgctatgactcctgctgagatcactgatgcactctcacttcacagcatcaaggatcatgattggcatatacaagcttgctgtgctctctcaggagaagggctgtatgatggtcttggatggattgcccagcgagtaactggcaaagccccaacatgat

SEQ ID NO: 265077 - DNA, 450 bp, Glycine max
cccacgcgtccgcccacgcgtccgcaaggctctactctactgcttcaccttctgctctagagaatgtcagtggtgatacatggcttcggctactctctctgtagccaaaccagcccttcaggcaaatgggaaaggcttctctgaattctctggcctccgcagctcatcaggcttccttcccttttctagaaaatcttcagaggatttccattctgtcattgccttccagacctatgcagttggaagcagtggaggatacaagaagggtgtgacagaagcaaaactgaaggttgccataaacggatttggaaggattggaaggaacttcttgaggtgctggcacggtcgcaaagactcccctcttgatgtcattgccatcaacgacaccggtggcgtgaaacaagcctctcaccttctcaagtacgattcgatcctcggaaccttcgatgc

SEQ ID NO: 265078 - DNA, 435 bp, Glycine max
tccggtttgttgtgagctataagctagtttatcgtgaggagaatatgaagttgtttgttttcttgggtggtgcagtagttttggtagcatggccatgccatggcgcaggctaccaaaggttccctctccgaatgaaaactggctatggtgagcgttcttcggaggtaaaatgcgcaagttttaggcttgctgtggaagcacacaacatccgagcctttaaaaccattcctgaagagtgcgttgaaccaacaaaggactacattaatggcgaacaatttaaatcagactctaaaacagttaaccaacaagctttcttttatgctagtgaacgcgaagtccatcacaacgacatatttatattcggcatagataacaccgtactctctaatatcccatactatgaaaaacatggatatggggtggaggaatttaatg

SEQ ID NO: 265079 - DNA, 405 bp, Glycine max
cccacgcgtccgaatccgggtactatgcaatgcaaacatctctgagcattgcaatcccaagaaggatgcatcatttcctgaaatcaacttggtaaatggggagacaagaggtcttatcggtgggtaccctccatgtaaccgaacaattttggccttctttgcagggcaaatgcatggtagaattaggccagtgcttttccagcattgggagggcaaagacaaggatgtgctagtttatgagaaactcccagacggagttccataccatgagacaatgaagaagagcaagtattgcatttgtccaagtgggtttgaagtggcaagtccaagaattgttgaggcaatctatgcacaatgtgtgcctgtgataatatcacaacaatatgtgcttccttttagtgatgt

SEQ ID NO: 265080 - DNA, 405 bp, Glycine max
aatgtttgatatccccatggccatggatgcttctaaatctagaaaatctggtcagctaaataatgccccttcacggactggatcatttgcaggtgctgctgcttcacattctggacctatcttgccaaattccactcctcgttctatttataccacatctggtaacatatcttctggaggcagcatgacgactgcttcagtctcaatgaaaaagaccaactctggtccactgaataaacatggggagcctgtgaagaagtcatctggaccgcaatctggtggagtcacacgccaaaattctggtccgattccaccagttgtaggaagaacaggtcttattacatctggtcctctaaattcatctggggcaccaaggaaagtatctggtccattagaatttacagg

SEQ ID NO: 265081 - DNA, 285 bp, Glycine max
  unsure (1)..(285): unsure at all n locations
gaannnccggggggaccgacgcgtccgagaacatgagcataaatggataccctttatattatctatctttatattaggtatcgagggtaaagatatccgatgtgaatctatttgtttagttttctatcggtatgtatataggtgaataatccaacatgcctttttgtgaagtaaaaaaactaccctcgatccatgcctcaaaagggttgataataagtaaaaaaaatcaatgaattcatgataaaacccttctgcgtgtttttattataaatttttttgtcaata

SEQ ID NO: 265082 - DNA, 411 bp, Glycine max
ggcttattcatggcaggtgatgcatggtttctaaatactccggaccaatgacttggcttcatacttgcagatcatggttttgatgtatgggtaggaaatgtgcgtggaacacggtggagccatgggcatatatctttattagagaagaaaaagcaattttgggattggagttggcaggaattagccctgtatgatgttgcagaaatgatcaattacattaattcagtaacaaactcaaagatatttgtagttgggcattcacaggggacaattatatcttttgctgccttcactcaaccggagatagtagaaaaggttgaggctgcagcccttctttctccaatatcatacttggatcatatcagtgcacctcttgtacttagaatggttaagatgcacattgatcagatg

SEQ ID NO: 265083 - DNA, 409 bp, Glycine max
gatcgagataactagaaacagtgtgatgaaaatgaaggtccttgttttcgtcgttgctacaattttggtagcatggcaatgccatgcgtacgatatgttccctctccgaatgaacactggctatggtgcccgtactccggaggtgaaatgcgcaagttggaggcttgctgtggaagcacacaacatctttggctttgagaccattcctgaagagtgcgttgaagcaacaaaggaatacatccatggcgaacaatatagatcagactccaaaacagttaaccaacaagcttacttttatgccagagacctcgaagtccatcccaaggacacatttgtgttcagtatagatggcaccgtactctctaatattccatactacaaaaaacatggatatggggtggagaaattt

SEQ ID NO: 265084 - DNA, 405 bp, Glycine max
cccacgcgtccgcggtcgcgtgggttccgttcgaacccttctggcgcggatcctgtgtccgttgccagcaagagtctactactgttacccctgtcgcagaagaagacccgcgcttcgcgtgcgtcgaacccgaaccccgattcaaaggcccggacatttggaacaagagctggtatccaaaagctgcagatcatgtgaatacagaaaaaacatggtatgttgttgatgctacagacaaagttcttggaagactagcatcgacgattgctattcacatccgagggaaaaacttggcaacctacacacccagtgtggacatgggtgcgtttgtaattgtggtaaatgcagaaaaggttgctgtatctgggaaaaagaggacccaaaagctttacaggaggcactctg

SEQ ID NO: 265085 - DNA, 407 bp, Glycine max
ggaaatggcttcctcaatgatctcctccccagctgttaccaccggcaagggtgccggtgccggcatggttgctccattcaccggcctcaaatccatggctggcttccccacgaggaagaccaacaatgacattacctccattgctagcaacggtggaagagtacaatgcatgcaggtgtggccaccaattggcaagaagaagttcgagactctttcctacttgccagacctcgatgatgcccaattggcaaaggaagtcgaataccttctaaggaaaggatggattccttgcttggaattcgagttggagcacggtttcgtgtaccgtgagcacaacaggtcacctggatactatgatggacgctactggaccatgtggaagctgcctatgtttggctgcactgatg

SEQ ID NO: 265086 - DNA, 364 bp, Glycine max
  unsure (1)..(364): unsure at all n locations
cgcgtncgcccacgcgtncgcccacgcgttcgaaaccaacaactctgtcgtcgtctcgcttcgggccccacgtcgtggtgtcgtcggatttggggcaggaggaggacaccttcagtgacggagacggccccagcttctcccccgaccttaagctctttgtcgggaatctttcgttcaacgtcgacagcgcgcagctcgcggagctctttgagagtgccgggaatgtggaggtggttgaggtgatttatgataagactactgggaggagcagggggtttgggtttgtcaccatgtcttcggttgaggaagctgaagcggctgctcancagtttaatggctatgaacttgatggaagagcattgag

SEQ ID NO: 265087 - DNA, 401 bp, Glycine max
cccacgcgtccgagtagttgagaactaagaaggagaagcaaatggcttgctcaatgatctcttccccagctgttaccactgtcaaccgtgccggtgccggcatggttgctccattcactggcctcaagtccatggctggcttccccaccaggaagaccaacaatgacattacctccattgctagcaacggtggaagagtgcaatgcatgcaggtgtggccaccagttggcaagaagaagtttgagactctttcctacctgccagaccttgatgatgcacaattggcaaaggaagtagaataccttcttaggaagggatggattccttgcttggaattcgagttggagcacggttttctgtaccgtgagcacaacaagtcaccaggatactacgatggacgc

SEQ ID NO: 265088 - DNA, 411 bp, Glycine max
ctttcttttttcccgcagtcatgggcaaggtcaagatcggaatcaacggatttggaagaattggccgtttggtggccagggtggctctgcagagagacgatgttgaactcgttgccgttaacgatcctttcattaccaccgattacatgacatacatgtttaaatacgacagtgttcacgggcactggaagcatcacgatgtcaccgttaaggatgagaagacccttctcttcggtgacaagccagtcactgtttttggacacaggaaccctgaagagatcccatggaagtcgactggagctgacatcattgttgagtccaccggagttttcaccgataaggataaggctgccgcacatttgaagggtggtgcaaagaaggttattatttctgcccccagtaaggatgccc

SEQ ID NO: 265089 - DNA, 342 bp, Glycine max; identical to SEQ ID NO: 265038

SEQ ID NO: 265090 - DNA, 383 bp, Glycine max
cggacgcgtgggcggacgcgtgggttcctccctttcactctcgtagacatcacaaaccttccctccattcatcccacgcatggctgccatgaactctagcgtattggcctgtagctatgccatatcaggtgcagcgtgttcggagctcaatgggaaggtcacttccgtggcctatgttgcatgctctggctacaagttgccattgatcaaagctgaggccagagttcctaaagccaaagaatctgaaggaggaaggagaggtgcccttgttctcttggcagctacccttttcacctctgcagcttccaattcttctgccaatgctgggatcattgaagattaccttgagaggagcaaggccaacaaggaattgaatgacaaga

SEQ ID NO: 265091 - DNA, 356 bp, Glycine max
  unsure (1)..(356): unsure at all n locations
catgttattcttcataacttgttaaagtactttctccctgtcttatttgttttgcgctgagttaagttcaatcggattttgcatacagctatataattatgctttagttaagtttgattgcttctgcttttgtcttnnnnnanannannnnnnnnnanaaaaaaaaaaaaaaaaaaaaaaaaaaaaaaaaaaaaaaaaaaaaaaaaaaaaaaaaaaaaaaaaaaaagggaggacaaaataaaaataaaaaaaataaaaaaaattaggggggggccgttttaaaggatcaaagtttacttccccgtgcttgcaaggnaatatttttttattagggcccccaaaataaaattcagggg

SEQ ID NO: 265092 - DNA, 398 bp, Glycine max
ctttcgaaagattttatccaattgaaattttaaaaatgactgggataaacttaagaattcaattattgaaattgaataagtaaacaatttaattggattggtcgaatggtatcaaaaaaatggagtactaactcccatttcttatttattattgaattaaccgatcaacttgctttgttatcgaacatttctttttgatttcaaaaattttccggaaaaaatttgaatctatttttatatgcgaatcaatcctactacttctggtcctgaggtttctgcgcttgaaaaaaaaaaatctgggacgtatcgcccaaataattggtccggtactagatgtagcttttcccccaggtaagatgcctaatatttacaacgctctgatagttaagggtcgagat

SEQ ID NO: 265093 - DNA, 406 bp, Glycine max
cccacgcgtccgctccacccaacaaaccacctctccttcctctcccccagagtttgtgatcaaaattcaaattccaaattcctcagattcgcaaaaatccctttctgcgtcgtcgcattgtatgagcctcgaattccgatcccgataggcatggccggagcggcgttatcgccgccgacgagttcgaagtcggtgacgcagacggtgaacgggtcgcacaagttcgtgatcgagggatactccctggcgaaagggatgggagtggggaagcacattgcgagcgacgtgttcacggtgggagggttccactgggcgatctacttctaccccgatggcaagaatcccgaggacaattccgcctacgtctccgtcttcatcgcgttggcgagcgaaggcaccgacgtca

SEQ ID NO: 265094 - DNA, 405 bp, Glycine max
gtaaaaaggaaaggggaaggatgcaaggcaaggaaggagagtggatcgggtcctcagcagcaccagacatttataaaagctctttcccttccctcaaatcgctcatactcttccaatctttttttttttttttttttttacctttctccctcgctcaataatacaaaacaaaaaagaagaagaagaaggttttcgcgatggcatcgaaacggatcttgaaggaactcaaggatctccagaaggatcctcctacctcttgcagcgccggtcctgttgctgaagacatgtttcactggcaagcaacaattatgggtcctccagacagtccttatgctggaggtgttttcctagtcactattcatttccctccagattatcccttcaagccacccaaggttgcattca

SEQ ID NO: 265095 - DNA, 408 bp, Glycine max
gcaagatgtacccagacttgagctacactgagtcaaccaccaccgagacgttggggatgggagtggcacctgttaaggctcaatttgagggtgctgaaatgggtgtgcccgctgagaacgatggctgcaaatgtggaccaaactgctcctgcaacccctgcacttgcaagtgaggtgttgggagagcaagcttcaagcagagatagcccttaattaggaataatgataaactattaatgtgtagctaaaaacttatgtattatgtctgtgatggttttcgtgcactctggtgttttgtgttaaacaaacatccttagaataaagtggtcatgtcttgcctttcagcaagttcaagtgttttggacttgtgatgggtgtgttaagctcatggttgcttctttttttttt

SEQ ID NO: 265096 - DNA, 318 bp, Glycine max
cttcttcttcttctcttaaaagttattaagagcttttgcttttctttctgggcgcggttcccaattaagtagttcttccttttctcaaagcaaaaaaaatgttcatcgagagtttcaaggttgagagtcctaacgtgaagtacacaaagactgagattcagtccgggtccaactatgaaaccactgaacttgttcacgagaacaataatggcacttatcagtgggttgtcaagcccaaaactgtcaaatatgaatttaaaaccaacacccatgtccctaaactaggggtaatgcttgtggggtgggggggaaacaatg

SEQ ID NO: 265097 - DNA, 400 bp, Glycine max
aaccaaacactcttcttcatattcttcttcttcttgttcttggtctatcggggacgagcatcatggcctcgagagcagtgctattgttggctatgtgtgtgcttccggccatggttgtggccattcgcccagcaaagaaccctttttgcgtgaagggtcgcgtctactgtgacccttgccgtgctggttttgagacctcagcaaccacctacattgccggtgctgagattatgttgcaatgcaagagcagggttagcaacgaggttgtgtacaccaagaaggggtacactgactcaactggagcatacacaatgtacgtggacgaggatcacgcagatcaaatatgcagtgccaagcttgtaagcagccctcaccctcaatgcaaggaagtcaccccggg

SEQ ID NO: 265098 - DNA, 401 bp, Glycine max
ctttttctctctctccattccgtgttttcagctccggtaacctgctccttgtccgccgccgttgctatctccgccgtgaccttccatccctcaacgccccacagatcttcaatttgattgcttgggtcaacaatttctgtcattctcaatcatggcaactagacttcagtttgaaaataattgtgaagttggagtcttctctaaactcaccaatgcttactgtttggttgcgattggaggttctgaaagcttctacagtgtatttgaagctgagttagcagatgttatccctgtggtcaagacatccattggtggtactcgtatcattggtcgtctttgtgctggaaacaagaatgggcttctcttgccccataccaccacagaccaagagcttcaacaat

SEQ ID NO: 265099 - DNA, 395 bp, Glycine max
ataaactggaaggagtaggtgttgttggcattctgacctaaagcgttgtggctttctgcttcgtttgtatcttctgctgcgtaaagaggatccctttctgattcttccgtaaatttcgtctctgaaactagggctaatacttcatctaccgatctctatattctggatgaaggtttgcttttgatccggcttgggagttttgatcgacttgattttaactccaacttttaagaaatgtcattccgcagcatagttcgtgatgtaagggatagtttcgggagcttatctaggcgtagttttgatgtcagacttactgggcatcatagaggaaaatctcaaggatcagtgcaggatttgcatgaccagcctctagtaattcaaaatagccgctgggc

SEQ ID NO: 265100 - DNA, 404 bp, Glycine max
gagagatccatccatcaattccaatggccgatcagctcaccgacgaacagatctccgagttcaaggaagccttcagcctcttcgacaaggacggggatggttgtattaccaccaaggaacttgggaccgtgatgcggtcacttggccagaacccaactgaggcagagctgcaggacatgataaatgaggttgatgctgatgggaatggtaccattgatttcccagaattcctgaatctcatggctcgcaagatgaaagacactgattcagaggaggagctgaaggaggctttccgcgtgtttgacaaggatcagaatggcttcatctctgcagcggagctccgccatgtgatgaccaatctcggtgagaagctgaccgacgaggaagtcgatgagatgattcgc

SEQ ID NO: 265101 - DNA, 354 bp, Glycine max
ggtggtcaaggaggaggaagtggaggagggtatggtgctggtggagatcatggtgctgctggctatggtggtggagctggaggtggagctggtggaggctatggtgccggtggagaacatggcattggctatggaggaggtggtggaagtggtggagggagtggaggaggttatggtgatggaggagctcatggaggtggatacggtggcggcgcggttgccggtggtggaggagggtttggggctggtggagcacatggtggtggttttggaggaggtggtggaagtggtggtggccatggtggctattgttcccttagaacttctctctaatgcttactagatgtgcaagtg

SEQ ID NO: 265102 - DNA, 216 bp, Glycine max
gaccacgcgtccgccacgcgtccggaataccccctcttttgctgcatcagaggagttgtaaaggaagagcatggctgcacaagctcttgtatcatcatcttctcttaccttctcagcggaggctgcaagacaaagtcttggaccaagatcactccaatctccatttggcttctccagaaaagccttctttcttgttaaggcagctgctaccccccc

SEQ ID NO: 265103 - DNA, 406 bp, Glycine max
cccacgcgtccggaatggcacgcatcaaggaggatccatctctgaaacagattttggaggagatagagactggcggtcctgctgctatgatgaggtactggaataatgaggaggttttgcagaagttgggacaagccatgggtcttgccaattcgggagatgcaggtgcctctgctgaaaattctggggcagatgagaccgaagatttgggaaatgaagatgaatcaattgttcatcatactgctagtgttggtgatgtggagggcttgaaaaatgcactagcctctggtgctgacaaggatgaagaagattcagagggaagaactgctttgcattttgcctgtggatatggcgaggtaaaatgtgctcaagttctcctcgaggctggagcaaaagtggatgcttt

SEQ ID NO: 265104 - DNA, 407 bp, Glycine max
cccacgcgtccgcccacgcgttcgaaacaaacccactaagatggcttccgttgtatccttcctagtgctgcttcttgcagcccttatcctcatgcctcaagggcttgctacttactacaaaccaattaagaagccaccagtgtacaagcctccagtgtacaagccaccagtgtacaaaccaccggtttataagccaaaaccaccggtttacaagccgaaaccaccggtttacaagccaccatataagaagccaccatacaagaaaccaccttatggaaagtaccctccagtagaggacaacacccatgcctaaagcaagcaatgaggtctattatctacttaataaataagaggaactgctttgtgttttctagcattgtgatttacaacttcgtagcaatgcatat

SEQ ID NO: 265105 - DNA, 404 bp, Glycine max
  unsure (1)..(404): unsure at all n locations
ggagcgatccgagaaaaactctgtaaacatgttggtttaccaggacctcgttacaggtgatgagcttctctctgactccttccgttacaaggaaattgagaatggaatgctgtgggaagttgaggggaagtgggttgttaaaggagcagttgatgtagacattggtgcanacccttctgctgagggtggaggagaagatgagggagttgatgatgcagctgttaaggttgttgacattgttgacacattcagacttcaggagcaacccgcattcgataagaagcagtttgttaccttcatgaagaggtttatcaagaatttgactcccaagctcgatgcagagcaacaggagttgtttaagaagcacatcgagggagcaactaaatacctgctctctaagatta

SEQ ID NO: 265106 - DNA, 412 bp, Glycine max
cccacgcgtccgcccacgcgtccgcgcatagtgtggtagcagcagcagagcttgtatacgtcgccgcttcagcgtagcaacatgatcattcccgagaagaaccgtaaagagatctgcaaatacctcttccaagagggagtttgctttgcgaagaaggacttcaatctggcgaagcacccggagattgatgtgccgaatctgcaggtgataaagctgatgcagagcttcaaatccagagagtacgtgagggaaacatttgcgtggatgcactattactggttcctcaccaacgatggaattgagttccttaggacttacctcaaccttccatccgaaattgtccctgccactctcaagaagcaggccaagcccgccggaagaccattcggtggcccacccggtgatcgcccca

SEQ ID NO: 265107 - DNA, 412 bp, Glycine max
tccggtagttgagaactaagaagaaggaaatggcttcctcaatgatctcctcccgagctggtaccaccgtcaaccgtgccggtgccggcatggttgctccattcaccggcctcaaatccatggctggcttccccacgaggaagaccaacaatgacattacctccattgcttgcaaccggggaagagtacaatgcatgcaggtgtggccaccaattggcaagaagaagttcgagactctttcctacttgccagaccttgatgatgcccaattggcaaaggaagtcgaataccttctaaggaaaggatggattccttgcttggaattcgagttggagcacggtttcgtgtaccgtgagcacaacaggtcacctggatactatgatggacgctactggaccatgtggaaactgcc

SEQ ID NO: 265108 - DNA, 402 bp, Glycine max
cagtttggcaattaatagaatgcacagcagatctgtctctagaggtcggggaagggatagatcgcctgaaacaagaagtgctgatggtatggatactgatggtgacacacctagcaaaaaacagcgtctgagtagatcactgtcacggtccaggtcagtgtcacgcccaccacatgaagttgtgcctggagaaggcttcaaggattctgctcaaaaggtcaaggcaatcaaacttgcaaagaaatctgtcaagaagagaaacaaggatgcccgtcgtggagaagctgatagagtcatacctaatctgaagcccaagcacttgttttctgggaagcgttccaatggaaaaactgagagacgctaggacaggggatgctgtttaatgcattttagaggacacct

SEQ ID NO: 265109 - DNA, 400 bp, Glycine max
tctagagaaacaaagattagtgttcccacattacatggcctcctggcccttggggcaccaccaccatcaccaaccttttgtggtgactatacacccgtcgcaaccgccgcattgtcagccgcaacccgaagttcctcgtctgagctccgatatggagaccgataaggatatgtcagctactgtcattgaagggaatgatgccgttactggccacataatcttcaccacaattggaggcaaaaatggggaacctaaacagaccatcatttacatggcagaacgtgttgttggcactggatcatttggagttgttttccatgcaaagtgcttgtatactgtgataggcagtggttattaaaaaggttttgcaagacaggcggtacaaaaatcgggaattgca

SEQ ID NO: 265110 - DNA, 404 bp, Glycine max
agacacataaaaaattttgatggaagaacaagagtgccaagtggcggaaggtaaggaaactccaactcctcctgttcgagtctatgctgatgggatttatgatctctttcacttcggccatgcccgttctctcgagcaagccaaaaaactgttttcaaacacttatcttcttgttggatgctgcaatgatgagatcacacataattataaaggcaaaactgtcatgactgagaaggaacgctatgagtctctttgccactgcatgtgggttgatgaagttattccagatgcgccatgggtaatctttcgggagttccttgacaagcatcaaattgactatgtggcacatgatagtctttcttatgcttatgcaagtggagctggaaaggatgtgtatgaatatt

SEQ ID NO: 265111 - DNA, 408 bp, Glycine max
gagctataagctagtttatcgtgaggagaatatgaagttgttgggtttgggttgttgctgcagtagttttggtagcatggccatgccatggcgcaggctaccaaaggttccctctccgaatgaaaactggctatggtgagcgttcttcggaggtaaaatgcgcaagttttaggcttgctgtggaagcacacaacatccgagcctttaaaaccattcctgaagagtgcgttgaaccaacaaaggactacattaatggcgaacaatttagatcagactctaaaacagttaaccaacaagctttcttttatgctagtgaacgcgaagtccatcacaacgacatatttatattcggcatagataacaccgtactctctaatatcccatactatgaaaaacatggatatgggg

SEQ ID NO: 265112 - DNA, 399 bp, Glycine max
aagttaaaagccttttcctttcctacaactccaaacacaagggcatcgtgatccatggctgcctccgtctccactgtcggagctgtcaacagagctcttttgaacctgaatggttctggagctggagcttcagctcccagttcagccttctttgggaccaccttgaaaaacgttattgcctcaagggtccccaacagcaaggtttccggtggaagcttcaagattgttgctgtagaagagaagaaagagattgaagagacccatcagaccgacaaggacagatggaagggtcttgcctatgatatctcagacgaccaacaagacatcacaagaggaaagggtttggttgactcccttttccaagctccacaggatgctggaactcactatgcagtcatg

SEQ ID NO: 265113 - DNA, 407 bp, Glycine max
cccacgcgtccggtttgttgttgtaactcgttcttcttcttttgttgttgggtgtgtgtgtttgttttttctctcacctgaaaatgtcttgctgcggtggtaactgtggttgcggaagctcctgcaagtgcggcaacggctgcggaggctgcaagatgtacccaaacttgagctacactgagtcaaccaccaccgagaccttggtcatgggagtggcacctgttaaggctcaatttgagggtgctgaaatgggtgtgcccgctgagaacgatggctgcaaatgtggaccaaactgctcctgcaacccctgcacttgcaagtgaggtgttgggagagcaagcttcaagcagagatagcccttaattaggaataatgataaactattaatgtgtagctaaaaacttatg

SEQ ID NO: 265114 - DNA, 413 bp, Glycine max
cccacgcgtccgcccacgcgttcgctctagcgtattggcctgtagctatgccatatcaggtgcagcgtgttcggagctcaatgggaaggtcacttccgtggcctatgttgcatgctctggctacaagttgccattgatcaaagctgaggccagagttcctaaagccaaaagaatctgaaggaggaaggagaggtgcccttgttctcttggcagctacccttttcacctctgcagcttccaattcttctgccaatgctgggatcattgaagattaccttgagaggagcaaggccaacaaggaattgaatgacaagaagaggttagctactactggagcaaactttgcaagagcatacaccgtggaattcggtagttgcaagttccctgagaacttcactggttgccaagatctt

SEQ ID NO: 265115 - DNA, 271 bp, Glycine max
tatggatgggaaatgcctcactggcgcggtttgcatgcggaaaacccgacatctcagcgttttaatcaatcctgaagagtgcgttgaaacaccaaatgaatatatccctcgcgaacaatatttatcttactcacaagagacttaacacacatgattactcttatgccacagaccttgaaatacattccaaggacacatttctgttgagtatacatggcaccgaactatctaatatttcatactaccaaaaacatggatatggggtggagaa

SEQ ID NO: 265116 - DNA, 404 bp, Glycine max
agttattgggagttgcagcattcttgagactgcaggtcaaggagcactcgttcccctctaccagacattgaagtctgccattacttccaaggaatcagaatcttcaagttccaataaaattatttggctgcattttggggttaacagtgccgcaacgaggtttgctatcgagcgtcaagctgtcaacgaggctaccttccgctgccctgatgaaatgggatggaagccccagaaagtccctattgttccttcagatggtgcaattacacgaatacgggagactacccttcttcctgtggaggagatcaccaaggccttggcaaataagggctatgatgttatgacatctgatgatgcaggaaggtttgtgtgcaactacgtttactatcattcgcttcgctttg

SEQ ID NO: 265117 - DNA, 418 bp, Glycine max
  unsure (1)..(418): unsure at all n locations
gggggggggacccacgcntccgagcatctctcaccttttccttggcgacgccgtgagaaacgaagggggtggggaatataaacagagtggggtggtaggcacacgcacaaacgcaaagtcagaatctccaatcttcaatcggagacaaagctagctcgaacgaacgaagtagagtagtgtgctacgaaaaaagaggcggtgcattgcacgtggttctcgtggacctgcttccaccagatccacctccaatcactcacttggatctcaactttctagattcttctatagtggggcgaactcctcgtacaccgtggtggatcatacttatgatgctgttgtcgtacgagctggtggcgcgggattgagagctgctattggactttcaaaacacgggttcaatactgcttgtattaccaag

SEQ ID NO: 265118 - DNA, 407 bp, Glycine max
cagcttcagatcttctccatcctctgaatcaagttttgactttgtttggagagtttctcaactgcactttccttccaaaatgagccggccaatggaggaagatgctgcgggtaaaaatgaggaagaggagttcaacaccggaccactatctgtactcatgatgagtgttaaaaataatactcaggtactgataaattgtcggaacaacaaaaagcttctgggtcgtgtaagggcttttgacaggcactgcaacatggttcttgaaaatgtcagggagatgtggactgaggtgccgaagactggtaaaggaaagaaaaaggcccagccagtcaacaaggatagattcatcagcaaaatgtttctacgtggagactctgtcatcattgttcttagaaaccccaaatgag

SEQ ID NO: 265119 - DNA, 404 bp, Glycine max
ccaccgtcaaacttgtcattctatatgctttgcagggtccatgggatatggctctgtcgttggatcttcctcccaagggtggcttcagttttgatctatgccgaagaaacgcaatgcttcaaaacaagggcctcaaagccccaacctttctcaaaactggcaccactattgtcggtttagttttccaggatggtgtcattcttggtgctgatactagggcaactgaaggacctatagtggctgataaaaactgtgagaaaattcattatatggcacccaacatatattgctgtggagcaggcacagctgctgatacagaggctgtaacagacatggttagctcacagctgcaattacatcgctaccatactggtcgagaatcaagagttgttacagcgctgacc

SEQ ID NO: 265120 - DNA, 411 bp, Glycine max
cccacgcgtccgcccacgcgttcggggaagccagatagctttagtggggggtttcgggttccatcctaccgtggaagctctttcttggaccccaagggaagaggtgcttccacaggttatgacaatgcagttgctttgcctgctggtggaagaggagatgaggaagaacttgccaaggaaaacaataaaagtgcctcatcatccaagggcaaaatcaccttgagtgtcaccaagaccaagcctgagacgggtgaggttatcggtgtgttcgagagtgttcaaccatctgacactgatttgggagcaaaggctccaaaggatgtcaagatccagggcatctggtatgctcagcttgagtcatagagtgttttgttttctgttttgtttgttggctcagattttgttagtaac

SEQ ID NO: 265121 - DNA, 404 bp, Glycine max
cccacgcgtccgcccacgcgttcgcccacgcgtccgcccacgcgtccgaggtgatgatcttaagccatgaccgagagagaggtcgagtaagtctttccactaagaagttagagcccacacctggagacatgattcgcaatccaaagcttgtctttgagaaggcggaggagatggctcagacattcagacagagaatagcccaagcagaagctatggctcgtgcagacatgctaaggttccagcctgagagtggattgactatcagcggtgatgggatcctgggaccatttacttcagacttgcctgaagagggactggatttgagtgaggtaccaccagctgaagaatcatgattcagaattgcgtgctcttttctttctgtttgcttacatttttataatatt

SEQ ID NO: 265122 - DNA, 412 bp, Glycine max
cccacgcgtccggttccaactcatcaagggttaatgttgccgccaagatggcaatgcctacttccaaaggggtgcttgaactgaacaacacagaccccaggctgaacccttctgtgaggttcaactatctagcaagtgaagatgacatggaagaatgcgtcaagatgacaaaactacttgagagaattgcaaggtcaaaatctattgcatttttcctaggcgagtcaaagcaagaaaaactgacatcaactgacgttgatctaagaaacttctgcaagaaaaatgtgagaacaatctatcactatcatggggtttgcacggttggatcagtggttgatgagcaaaacaaggtttatggaataaagggattgagaatattggatggctcaactttttcagagtcaccaggcac

SEQ ID NO: 265123 - DNA, 383 bp, Glycine max
  unsure (1)..(383): unsure at all n locations
cttncgaaagagacagaaagttgagagtagaaagttcacggtttttgggaatgggggctttggcatcgggcacagaaaaatacatccatgattccatggtgtaggatgctaagaggaaagacgggaacctcagcacctataaaggggaggatcttcttgtatgtaacgttgcttgaaaaagtgcatttacaaattgcatttgcaaccatttatctgaagtgtgcagcaaatataaagacataggtccttggatactggtatttatatgcctccagaatatgaaacaaagacccttaagtttctcacaagaacatgaatttgattgtacagagaacaaggcggagaatcccaattttggaaaggtctgtgttattggatcttat

SEQ ID NO: 265124 - DNA, 391 bp, Glycine max
gtttttgcattaattgctatttcatttattttattgattagtgtacctggggtatgtgcttctcctgaaggttggtcgaataacaaaaatgttgtattttccggtacatcattatggattggattagtgtttctcgtgggtattcttaattctctcatttcttgaagctctatttattctagatcaaaaacgaaatgacccctcccccagaattctttcggattgtcgggcacattaaaaaaggaatggataagttcctaaaaataaagaaaactataacacattataaggaggggtcaaatattaattaagataaaagatatagaatatctatctgtatatatatatatatagatataatttattaataattagaactttcttttttctt

SEQ ID NO: 265125 - DNA, 412 bp, Glycine max
cccacgcgtccgtgttgatcgagataactagaaacagtgtgatgaaaatgaaggggcttgttttcttcgttgctacaattttggtagcatggcaatgccatgcgtacgatatgttccctctccgaatgaacactggctatggtgcccgtactccggaggtgaaatgcgcaagttggaggcttgctgtggaagcacacaacatctttggctttgagaccattcctgaagagtgcgttgaagcaacaaaggaatacatccatggcgaacaatatagatcagactccaaaacagttaaccaacaagcttacttttatgccagagacctcgaagtccatcccaaggacacatttgtgttcagtatagatggcaccgtactctctaatattccatactacaaaaaacatggatatgg

SEQ ID NO: 265126 - DNA, 412 bp, Glycine max
  unsure (1)..(412): unsure at all n locations
gtgaggttgtaacaaccaatcctactgttggtagcaacgtcgaagagcgggtctacaagaatatacgatttgaggtctgggatcttggtggacaagaaagactgaggacatcatgggcaacatattaccgaggaactcatgctgttattgcggtgatagacagcagtgatagagccaggatctctatcataaaggatgaactttttaggttgctggggcatgaagatttacaacattctgtcattcttgtctttgctaataaacaagatatcaaggatgctatgactcctgctgagatcactgatgcactctcacttcacagcatcaaggatcatgattggcatatacaagcttgctgtgctctctcangagaagggctgtatgatggtcttggatggattgcccagcgagt

SEQ ID NO: 265127 - DNA, 414 bp, Glycine max
cccacgcgtccgcccacgcgtccgcaaggctctactctactgcttcaccgtctgctctagaaaattcagtggtgatacatggcttcggctactctctctgtagccaaaccagcccttcaggcaaatgggaaaggcttctctgaattctctggcctccgcagctcatcaggcttccttcccttttctagaaaatcttcagaggatttccattctgtcattgccttccagacctatgcagttggaagcagtggaggatacaagaagggtgtgacagaagcaaaactgaaggttgccataaacggatttggaaggattggaaggaacttcttgaggtgctggcacggtcgcaaagactcccctcttgatgtcattgccatcaacgacaccggtggcgtgaaacaagcctctcacctt

SEQ ID NO: 265128 - DNA, 279 bp, Glycine max
  unsure (1)..(279): unsure at all n locations
cccacgcgtccgctttttcccattcattctctttcaactctctcttcaattccatcatggcgaaccaagccgagtcctctgatgctaagggaacgaanagagactttagcacggcgatcctggaacgcaagaaggcgccaaaccggcttgtcgtcgacgaggctgtgaatgatgacaattacgtcgtggtgcttcatcccgacactatggagaaactccagctcttacgtggtgacactattctgcttaagggaaagaaaaggaaggatacaatttgta

SEQ ID NO: 265129 - DNA, 340 bp, Glycine max
  unsure (1)..(340): unsure at all n locations
ctcatttggttttgttgcttgctttgatcttcactgtagttgccggcgctggagcccaaggcccatgcacctctcccgcgccttccacaccccagtcttcaccacctcccatccagtcttctccgccacctgttccttcctcacctcctccggctcagtctccaccaccagcttgcactcccccaccagccccactcagctctcctccccctgcctcccctcctccttcatcttcaccacccgcatctccttcccctgcctctcctcctccggcatatccaccacccgcatctcctccccctgcctcccctacttcggcatgtncttccccagccactcc

SEQ ID NO: 265130 - DNA, 301 bp, Glycine max
gcgctcaagcgttcgcttttacccattcattctctttcaactttatcttcaattccatcatgggggaccaagcccagtcatctgatgctaagggaaccaatagagactttaacacggcgatcctggaacgcaagaaggcgccaaacctgcttgtcgtcgacgaggctgataatgatgacacattacgcccggtgcataatccccacactatagagaaactacagctcttacagcgtgacactattctgctcaagggaaagaaaaagaaggatacaatttgtatcgcgcttgcggatgatac

SEQ ID NO: 265131 - DNA, 378 bp, Glycine max
ggtgctcaaggagcatgaacacaaaagattatcgcgtgcaaatggtgatcaaagtgaaagggatttgatggatattctgttagatgtttatcatgatgctcatgcagagttcaagatcacaatggctcatattaaagccttctttatggatctcttcattgcaggcacacacacctcagcagaagcaacacagtgggcaatggccgagctcctcaaccaccctgaagcatttcaaaaggtgagaaaggagatagagttagtcactggcaatgttaggcttgttgatgaatccgatatcacaaacttgccatatttgcaagcagttgtgaaggaaacactaagactcttacccgccgcaccaatcacgacaagagagtg

SEQ ID NO: 265132 - DNA, 272 bp, Glycine max
  unsure (1)..(272): unsure at all n locations
agaaatttgcgccatcgtccacagtagcgttttagacttctctcttattataagagctaaggtagtttaggtgtcaaggcataaatcantatcatcactttaaatttcattagaaaccttcaaaatgtcacggaagggtttgattgagcaagacctgattaagttggatgtaacaaaattgcatccacttttcttcaaaaatcatatctcggctggctactattaatatcggcactataggtcacgtggcccatggcaagtccacagttgtg

SEQ ID NO: 265133 - DNA, 441 bp, Glycine max
attcacctgaggcttccaaagcaatggctttccttgcagcatccactgctgctgggtcccggggcatgtcagaaatgcttggaaaccccatcaacttcagtggtgccacaaggccagctccatctgcttctagtcctgcctccttcaagactgtggctcttttctccaaaaagaaggctacaccaacacctccaaaaaaagctgctgctgctgctcctgccaatgatgagcttgccaagtggtatggtcctgacagaaggatcttcttgcctgagggtctcttggaccgatccgaaatcccagagtacttgaccggagaagtccctggagactatggttatgacccatttggtcttagcaagaagccagaagactttgccaaatatcaggcatttgagttgattcatgccagattggcaatgcttggtgctgctggattca

SEQ ID NO: 265134 - DNA, 374 bp, Glycine max
  unsure (1)..(374): unsure at all n locations
acgagatgatggagttgaagaacgtggcatttgtgaatgtagctttgttgcttttcctgttagggttcagtgcaaccactgcagatgctacntccttagacccacgttccttcattactcaggtgctccccaacaattactatgtaaaaatcaaatccacagccactgcatgttgtgatctttgtctttgcacaaaatcaaaccctccccagtgccaatgtgtagatgggagcgagacatgctgccactcatgttgcaaaaatcgcatctgcaataagaaatttcctccgacgtgtttttgtggagatataaccaacttctgctatgacaaatgtaactcaactgaaccaattaaagctcactagctaggaata

SEQ ID NO: 265135 - DNA, 434 bp, Glycine max
atgctgaagatcttgaaagtggtttcgcgttatatgttgaatctaaatacaagaagatatatgaggatgatataaatccttttgctgcattctcaaaaaaggaaagggatcaaagatacaaggagttgggattcagggacagaattacacttagcagtggacgttttctccttggcaacaagtatgcccgaactttcgcattcttttataccattggattgcatatcttggtcttcacctgtctctaccgaatgtctgctctcagttatcttagcaatggcccagaggaattccttgttggagagaaaaacgttgatcttccgcgtggaccctagtggatatgcaactcaggtttcagcttgtgatttctcaaattgaacattacatgtggtcgaaatgcaacctcttttcaatggtcattttcaactcaattt

SEQ ID NO: 265136 - DNA, 330 bp, Glycine max
aagtcatagtatcctcctttcagtgacaatgttttgttaaaggatcttttgagctgtggggccttcagtttggccttgcatcctctttctccgtatgaacatcaaccattatcaatgacctcatcttggttccctaagttaaagatgtggccaccattctccattggaagctataggggccatgcttagaggtcgtgtgtatctgcaatgaagaggcctagccaccttcatcaccatatgatatttataaagatatatatgaaactatgaactgcgtttatgcatgtcggaaaatcttcttttaataagagttggaaatcctcttgttat

SEQ ID NO: 265137 - DNA, 454 bp, Glycine max
  unsure (1)..(454): unsure at all n locations
aaacactatagcaatagaaacatttgcttttgaaaaacccctcactcttcatcaggacactagctagccacatacagtgtcgaccaaatttaaggtgtttcgtgaattcacaagcgatgactcattcctaaaccaagttatccctgaaaacatcaccgaattccaagtgactctgtccctcgctagagactacgatggcaacaactcaaccaacggaaagttcattccttactgggacactgaaaaggtcactcccgaagtgataaaaaaattcaagaaaaaatacgaacccaccgcactgagggttaaggttcttgtcagcattggaaacaaaaacaaacaatttcctttcaccattggctcggactcgaacagcgaagcatgggtctncgaggccactgcttcgctgaagagcatcattaaaacctacaaccttgatggcatcgatgtcagc

SEQ ID NO: 265138 - DNA, 263 bp, Glycine max
acgatcccatgaaggaaccttctctggttacagcaaacactgttctttcaatcttgggcatggagtacccggatgataaaatatcatgctacatttctgatgatggagcctcaatgtgtacatttgagtccttatcacaaactgcagagtttgctagaaagtgggtaccgttgtgtaagaaattttccatagaacctcggtcacctgacatgtacttcagcgagaagatcgactacctaaaggacagagtgcactccaccttt

SEQ ID NO: 265139 - DNA, 430 bp, Glycine max
cccacgcgttcggtgaaagagaatccgaggcgaagagaagagaaaaattaagatggaggggaaggagcaggatgtgtcgctgggagcgaacaagttcccggagagacagccgattgggacggcggcgcagagccaagacgacggcaaggactaccaggagccggcgccggcgccactggttgacccgacggagtttacgtcatggtccttttacagagcagggatagcagagtttgtggccacttttctgtttctatacatcactgtcttaaccgtcatgggagtcgccggggctaagtctaagtgcagtaccgttgggattcaaggaatcgcttgggccttcggtggcatgatcttcgccctcgtttactgcaccgctggcatctcagggggacacataaacccggcggtgacatttgggctgtttttg

SEQ ID NO: 265140 - DNA, 426 bp, Glycine max
accgcccggaatccggtcgccacgcgtcgaagaaaatctaattttctgagcagccaacactctcttctgtctctcgaaaattctggcttgagagaaaatctgatcatgtcgcggcagcgtatgtcgaccatcaccttctgtgtgacatcgaaggtaaccacctcactcacgctgctatcatcggccaagacggcagcgtttgggctcagagtaccgacttccctcagttcaaacctgaggagataactgccatcatgaatgactttaatgagcctggatcacttgctccaactggattgtatctcggtggcaccaaatatatggtcatccagggtgaacccggtgctgtcattcgagggaagaagggtcctggtggtgttactgtgaagaagaccggtgcggccttgatcattggcatttatgatg

SEQ ID NO: 265141 - DNA, 325 bp, Glycine max
gaaaagagtgagagagagagaggagtgggatatcgagaaaccctagtggagccggaagtggaagtgagagagagtaaatgacgatccattctgtggtgatacagaagctgcttagcaccaatgctcaagtgggtcgacgtgttgccgctcaccatttgaaggagttcacctatggcttccgcaacaaaatggtcatcatcgactccgacaagaccctcatttgcatgcgcagtgcctgcaacttcatggccgtcctcgcccgccacaacggccgcttgatgttcatcaacaccaaccctctcttcgacgaaatcttcgacctcat

SEQ ID NO: 265142 - DNA, 401 bp, Glycine max
  unsure (1)..(401): unsure at all n locations
cggacgcgtgggcggacgcgtgggttggaatcggaggagggacaacaccattaacaggccgagatggcgtttgatggcccaggaatcaccctctctcgactcagacaaaaccgccactgctgggtccctctccttcccttttctcttctcttctcttctctttctttcgctttttcctttcttcattcttcctttctattctctccgcagattctgcatcattgaaggccccgaaactgtacaggattttgccaagatggagcttcaagaaattcaggacaacattcgaagtcggaggaacaaaatcttcttacacatggaagaggttcgcaggcttaggatacaacaaagaattaaaaacgcttgacttggaattntaagcgaagagcaagagaatgaaa

SEQ ID NO: 265143 - DNA, 259 bp, Glycine max
ctcaattacatttgtttttgaagcaggtggtgggatttgatcttgcacatgatgaaagtcgaccaggaaggcgttcaactaagcacatgcctacttcagctgagtggacaaatgaattgaatccagcatactcttattacctttattactgctatgcaaacttgtatacactcaacatgctgcgatgaatctaaaggaatgaccacaataaagtttcggtcttattgtggagaggcacgtgatagtgatcatttggctg

SEQ ID NO: 265144 - DNA, 313 bp, Glycine max
catacatatacatggacaccgtcttttctttattcgttgctattccctcactcacgggcctgaaatcaagcgcaggcgaaatgaataccccacctaaagtctcagctccccaagccacattgttgggcatcaacgcttccctcaaagacattgtaatcgctgttgttgccactgtcgctagtgcaatgctttctaacaacgccatagccatttaaatgtttctgcgaggtgatgacagtttctattctttcgttcccaacaatatatacaatatctttgtgcagaagatcttttttacaaacaaaacatgttt

SEQ ID NO: 265145 - DNA, 412 bp, Glycine max
  unsure (1)..(412): unsure at all n locations
cccacgcgtccgaccacgcgtnnctttcacgcttncgcccacgcgtncggtttcaggcggagcgcgcattcacaaatgaggttgaaaagggccctgccggaagaagataaataccgtctttcattttccggcgatctctttttttcttccatcaccgttttgcggctatccctaatccttaacagaaatgacgacatcaaggcgccttgcggacaggaaggtggagaagtttgagaaaaacatcaccaaaagaggatttgtgccagacacaaccactaaaaaggggaaagactaccctgttggcccagtgctgctcggtttcttcgactttgttgacattggatcatcttctcttcagataatcaggacagcaacgagtggaggcatggcttaaatggaggcttattttgga

SEQ ID NO: 265146 - DNA, 374 bp, Glycine max
cactgaggaggcacaccttcaggagcagtcatggttctcaaaaccgagctgtgccgattcagcggtgccaagatctacccagggaaaggcatcagatttgttcgtggtgattctcaggttttcctgtttgctaactcaaaatgtaagaggtatttccacaacaggttgaagccgtcaaagctcacgtggactgcaatgtaccgaaagcagcataagaaggatattgctcaagaagctgtgaagaagagaagacgtgctaccaaaaaaccttactctaggtctattgttggtgctactttagaagttatccagaaaaagagaaccgagaagccagaagttcgagatgcatctagggaagcacagcttcgtgaaat

SEQ ID NO: 265147 - DNA, 376 bp, Glycine max
gtccttccttgtctgttatcactgtgtaagcagtgatcgattctgcgaactgcgattcgcagcgccaattcaaaagcggtcgttcgtcggagatggagacgctaccgacgacgacgacaaagcgaggaggagcgagatcgaagcccgttcagacctcgaaatcgtctctcgttatggccttcttctcctgcgtcgcgtggctctacgtcgccggaaggttatggcaagacgcagagaatcgcaatttactcgctagtcttctgaaaaagaattcagctcagaggcctaaggttcttacagtggaagataagttaatggtgcttgggtgcagggatctggagaggaggattgtggaagctgaaatggaattgacatt

SEQ ID NO: 265148 - DNA, 389 bp, Glycine max
gaaaatgaaagtccttgctttctttgttgctatagttctagcagcatggcattgccatggctcagagcatgaccatgaccatggccacacctaccaaattttccctctgagaatgaaaactggccatggtggccactacattccggaggtatcatgccaaagttggaggcttggtgtggaagcacacaacgtcattgactggaaaaccgttcctcaagattgcgagggatatattgggaactacatgcttggcgaacaatatagatcagactccaaaatagttaaccaacaagcttatttctatgctaaaacctctcatatcactgccaaaaccgcatgggtgttcgacatagatgagactacacttctctaatcttccttactatgct

SEQ ID NO: 265149 - DNA, 449 bp, Glycine max
gagatgctcaaccgcatcaagaaacaaggccttgatatcacccctcgtattctcagtatcgctcgtcttctccctgatgcggtaggaactacctgtggccaacgtctagagagggtatatgatactgaatattgtgacattctcagagttcctttcagaacagaaaagggaattgttcgcaaatggatctcaagattcgaagtctggccatacctagagacttacactgaggatgtcgccctggaacttgccaaggagttgcaagccaagccagatctgattgttggaaactacagtgatggaaaccattgtgcctctttgttagcacataaattaggagtaactcagtgtaccattgctcatgctctagaaaagaccaagtaccctgaatctgacatttactggaaaaaaatttgaagagaaatatcaatttctaatgccaatttact

SEQ ID NO: 265150 - DNA, 405 bp, Glycine max
cacgcacagtactgcactgaacgaaccgtatttgttccgattcagccatggtggagaacagtctcttctaggatatatgtagggtcaaaaaattaaaccccgatgacaaaaaattattctataaagtcactcgcattgaagcaagaagtgaaaagtttgacatgtttatgcacctggacattaattccgagatatatccgttaaaggttggtcagaagttcgctcttgtgctagtttcaacacttaatcctgatggaactccagacactggatattatacccagatcagactacaatcactggccaacaattgtgaatatgtcatgtatgggaagctctacaggataacagacggttcatggcgttaaaaagcggacatgaatatttcattttgagggcttctga

SEQ ID NO: 265151 - DNA, 397 bp, Glycine max
cggggcggccacgcgttcgactaggagctcttcttcattgggtcttcattttcatgcacacacttgcataattttggaagccaagaatttttggagggtggcatcaacaagaaattcttggaatggagatcaccaatgtcagcgagtatgaagctattgcaaagcagaagttgccaaaaatggtgtttgactactacgcatctggtgcagaggaccagtggactctgcaggagaacagaaatgccttttccagaattttgtttcggccacgtattcttattgatgtgagcaagatagacatcacaactactgtcctgggctttaaaatatccatgccaatcatgcttgccccaacagccatgcagaaaatggctcatcctgagggagaatattcaac

SEQ ID NO: 265152 - DNA, 424 bp, Glycine max
  unsure (1)..(424): unsure at all n locations
cccacgcgtccgcccacgcgtccggtagttcttcatcatagtcttaaacattaaaccttaggaaaactcaacaatgctagacatcaaaggctacctcgtactcttcttcctatggttcatatcaaccattctgatacgttccatcttcaagaaaccacagcgtctaagactcccaccgggtcctccaatttcaatacccttgctgggacacgcgccatatctncgttcactgctccaccaagcattgtacaagctatcactgcgctatggacccttgatccacgtcatgatcggttcgaagcacgtggtggtggcgtcgtctgcggagacggccaagcagatcctcaaaacctcggaggaggcattctgcaaccgtcccttaatgatagcgagcgagagcctaacctacggcgcggcggactac

SEQ ID NO: 265153 - DNA, 365 bp, Glycine max
  unsure (1)..(365): unsure at all n locations
gctncagatacctaaagcaggcaaaatctattcattcaatgaaggtaattatcacttgggggatgagaagctaaagaaatatattgatgatctcaaggacccaggtccaagcggcaagccttattctgcacggtacattggtagcttggtaggagatttccacaggacactgctatatggtggcatttacgggtaccccacggacaagaaaagcaagaatgggaaactaaggctcctgtatgaatgtgctcctatgagcttcattgtagaacaagctggtgtgaaagggtcagatggccatcaaagaatactcgacattcaaccaacagagattcatcaacgtgtgccactgtacattgggagcg

SEQ ID NO: 265154 - DNA, 431 bp, Glycine max
  unsure (1)..(431): unsure at all n locations
gccacgcgtttcgccacgcgttcgattcaattaaactagtgggtgggataatgcattcccgggtccgaagtacgacggcgaggtgttacataataaagcacgtgagttgctgcaggatacgcgattgagccagacactgaccaattttgtgataccaaccttcgaccttaagaaacttcacccagttatattctcaaactttcagctgaagacagttcctagctttgatgcgaagctgtcagatatatgcattgggacctcagcagcaccaacttatctttcaccctattactttgagaatgatggcactgaattcaatttggntgatggtggcgttgcagcaactaatccggccatggctgctgtcaatgaagtgataaagcaacagaagctgggaaagaatctcgacatcagtttttaaaagtcaaatg

SEQ ID NO: 265155 - DNA, 331 bp, Glycine max
  unsure (1)..(331): unsure at all n locations
cttcttacagtatttggttgaaagtttcaattatgtttcctttcagacaaaacgggcaagggataaaaacgactatggtggttatacataacaatctntttaatatcaacagcatcaccaattttggatgcatcgttcactaaagcttatgctttatatgcaattcaatccatgcacttactttttcaaccaccaaaatctccatccaattgattaattctaccaaagcttatttttgtaaactaaaaattttaaatatttcaaatttaataagaaaaatcacattaccaacctttttaccttgctaacaagcataccatgttaattttta

SEQ ID NO: 265156 - DNA, 375 bp, Glycine max
  unsure (1)..(375): unsure at all n locations
ctagctagttcacagcttcagtttgtttttgttgatcctgtgaacttatggctggggggggggttctgttggatacagtgggccancatgtttgggatgagggttaggattgcattagctgaaaagggtgttgagtatgaatacaaggaagaaaatctcaggaacaagagtcctttgcttttgcaaatgaacccaattcacaagaaaattccagttctgatccataatggcaaaccaatttgtgaatctgcaattatagtgcagtacattgatgaggtctggaatgataaagctccaatcttgccctctgacccttatgagagagctcaagccagattctgggtagattacattgacaaaaaggtgtatgacact

SEQ ID NO: 265157 - DNA, 221 bp, Glycine max
  unsure (1)..(221): unsure at all n locations
cccacgccttcggcaggctttatgtatttgatccttatggtttcaactcgttgtcattagggtgggctcctctctttacatgtggccattcctgactgggtacctgagagatgttttgtttatttaggaattaatataaaatgatatcttgtctgtcnnaaaaaaaaaaaaaaaaaaaaaaaaaaaaaaaaaaaaaaaaaaaataaaaaannaaaagggcg

SEQ ID NO: 265158 - DNA, 388 bp, Glycine max
cgagataactagaaacagtgtgatgaaaatgaaggtccttgttttcttcgttgctacaatggtgggagcatggcaatgccatgcgtacgatatgttccctctccgaatgaacactggctatggtgcccgtactccggaggtgaaatgcgcaagttggaggcttgctgtggaagcacacaacatctttggctttgagaccattcctgaagagtgcgttgaagcaacaaaggaatacatccatggcgaacaatatagatcagactccaaaacagttaaccaacaagcttacttttatgccagagacctcgaagtccattccaaggacacatttgtgttcagtatagatggcaccgtactctctaatatttcatactacaaaaaacatgga

SEQ ID NO: 265159 - DNA, 406 bp, Glycine max
agtttgttgtgagctataagctagcttatcgttaggtgaatatgaagttgaatgttttcttgtgggctgcaggagttttggtagcatggccatgccatggcgcacgctaccaaaggttccctctccgaatgaaaactggctatcgagagcgttcttccgaggtaaaatgcgcaagttctaggcttgctgtggaagcacacaacatacgagcctttaaaaccattcctgaagagtgcgttgaaccaacaaaggactacattaatggcgaacaatctagatcagactcttaaacagttaaccaacaagctttcttttatgctagggaacgcgacatccatcacaacgacatatttatattcggcatatataacacccgactctctaatattccatactatgaaaaaca

SEQ ID NO: 265160 - DNA, 351 bp, Glycine max
cttgatcgtgaaggaagggagggttgcaggtgttgtgaccaactgggctctgggtgcggtgaaccatgacacgcagtcttgcatggaccccaacgtgatggaggctaaggttgctgtgagctcttgtgggcacgatggacctttttgcgccaccggggttaagaggttgaagagtattggcatgattgatagcgttcctggaatgaaggctttggatatgaatgctgcagaggatgctattgtgaggctcacgagggagattgtgcccggcatgattgtcaccggcatggatgtggcagaaattgatggctccccaaggatggggtcgacgtttggggcgatgatgatatc

SEQ ID NO: 265161 - DNA, 412 bp, Glycine max
cccacgcgtccggttttcttctaccttgctgagaacaatgtcctttttgagggtgttcttgttaagcctagcatggttacacctggagctgagtccaaggacaaggccagtcctcagacagttgctgattacaccctcaagctccttcacaggagaattccccctgctgtccctggaattatgtttttgtctggtggacagtctgaggttgaagctaccctcaacttgaatgccatgaaccaatctccaaacccgtggcacgtgtcgttctcgtatgccagagcccttcaaaacactgccttgaagacatggggaggccgtccagagaacgtgaaggcggcacaagatgcactccttttccgtgccaagtccaactcgctcgcccagcttgggaagtacaccggtgagggtg

SEQ ID NO: 265162 - DNA, 309 bp, Glycine max
  unsure (1)..(309): unsure at all n locations
cccacgcgtccgtccacgcgtccgtttacgcgtacggaaattgttaacttcggggtgttagcttgtgttctgtacgcggcctgaacntaactattgtcaggatattgggattcatgtcgatgatgaaaatcacgcgcgtttggtgttgacaaatgatgatccactagtggttgagtttctgaaatatgatcccttctggccccagaataatctagtgcttcctacaagtcaatgagagactatataaatgctttggttgtaataaattattgtcagactaaataaaataatcaaagcttatcccttcaa

SEQ ID NO: 265163 - DNA, 276 bp, Glycine max
cagagagagagagatccatccatcaattaattttcaatggccgatcagctcaccgacgaacagatctctgagttcaaagaaggctttagcctcttcgacaaggacggcgatggttgtattaccaccaaggaacttgggactgggatgccgtcgcttgggcagaacccaacttgagctgagctgcaggacatgataaatgaggttgatgctgattggaatggtaccattgatttcccagaattcctcaatctcatggcgcgcaagatgaaagacact

SEQ ID NO: 265164 - DNA, 381 bp, Glycine max
  unsure (1)..(381): unsure at all n locations
gcgcccacgcgttcgcaaagttagaagtaaagattatcatggcttctctagcaaccttggctgctgttcagccaactacnatcaatggccttgctggaagttccctctctggaactaagctctctttcaagccctctcgccacagtgtcaaatccaagaacttcaggagtggtgccgtggtagcaaagtatggtgacaagagtgtgtactttgatttggaggatctgggcaacactacagggcagtgggacttgtatggctcagatgcaccttcaccctacaaccctcttcagagcaagttcttcgagacatttgctgctccattcacaaagaggggattggtactcaagtttctgatattgggaggtggttccacccttg

SEQ ID NO: 265165 - DNA, 465 bp, Glycine max
  unsure (1)..(465): unsure at all n locations
tcgaccacgcgtncgggctaatgtgattggtgtttccgtacactacaggagggcaccggagcacccggttcccgtggcccacgaagattcgtggagtgccctcaaatgggtcgcttctcacgtgggcgaaaacggtgttgaagagtggctgaagaaccatgcagattttgaaaaagtgttcttcgccggcgacagcgccggcgccaacattgcgagctatttgggcattcgggtcgggttagaagggttacccgggttgaagctcgaaggggttgttttggtgcatccttatttctggggtacggagccgctcgagtgtgaggtggagcangctgaaggcgctgccaaggtgcaccagctgtggcgggttacgtgccccaccacaacgggatccgacgacccgattatcaaccccggtcacgatccgaaatctggcaagctggcctctgggagagtgcttgtttt

SEQ ID NO: 265166 - DNA, 367 bp, Glycine max
  unsure (1)..(367): unsure at all n locations
cccacgcgtncgcaacaagtgtttctggaaccatggcatccaccactctatcccctacaacggcttctcagctatgctcaagaaagagtgggattttcagtccctcacaggcacttcttgtgaagccagtgaagaggcagatgatggggaagagcaagggaatgagaattgcatgccaagccaccagcattcctgctgatagagtccctgacatgggcaaaagacagctcatgaatctgcttcttcttggtgccatttcactcccctctgctggaatggctattccctacacctacttttttgtccctccaggttcaggttcttcagctggtggtactgttgccaaagatgctgttggaaatgatgt

SEQ ID NO: 265167 - DNA, 305 bp, Glycine max
gcgcccacgcgtccgctccgaatagaggatgccaagaatgcaacttttgctgccattgaggaaggtattgtacctgggggtggcactgcactggttcatctctccactcatgtcccagcaatcaaggacaagcttgaggatgcagatgagaggctaggagctgacattgtgcaaaaggcactgatagctcctgcagcattgattgctcaaaatgctggaatagaaagtgaagttgttgtggagaaaataaagagtggtgaatgggaagtcggttacaatgccatggcagacaggtatgagaattt

SEQ ID NO: 265168 - DNA, 336 bp, Glycine max
cccacgcatgcgtccacgcgtgcgtccacgcgtacgtatcacttccctcaccatggccgagtcctgcctcctggcttctccctcctcactcttccacaccaaaaccaaaccctctctctttacacccccctccaaacccctcacactccaattttcatgcctcaactcctccgtctctctctccctcgccgcaccaactcaccgttctccccttgtaactttcgtggcccaaacttccgattgggctcaacaagaagaagaacagagcctcgctgaaaccgaagcgggcctggaaagttgggagcccaacggcgaagacgccggcgatgagagctt

SEQ ID NO: 265169 - DNA, 294 bp, Glycine max
ttttccggtacatcattatggatgcgattggtgtttctcgtgggtgttcttaattctctcatttcttgaaactctatttattctacatcaaaaacgaaatgacccctcccccagaattctttccgattgtctggcacattaaaaaaagaatggataacttcctaaaaataaagaatactattacacattataaggaggggtcaaatttttattaagattaaagatatagaatatctatctggatatatatatatatagatataatttattaataatagaactttcttttttctt

SEQ ID NO: 265170 - DNA, 401 bp, Glycine max
gcgcccacgcgtccgctccgaatagaggatgccattaatgcaactttcacttacattgatgacggtttcgcaacccttaacactccttcttctccttcctcttcatcttccttcccctctctcattcaagacaggcctgtttttgctgcccctgcccccatcatcaccccaactgtgagagaggatatggcaaaggaatacgagaaagctattgaagaacttcagaaattgttgagggagaagagtgaactcaaagcgacagctgctgaaaaagtggagcagataacagcttttctagggacatcatcatctgatggcatcccatcatcagaagcctcagacaggatcaaagctggtttcattcacttcaagaggagaaatacgacaagaattcaactttt

SEQ ID NO: 265171 - DNA, 358 bp, Glycine max
tgcttcattcattctggacaacgaaccaatctttcttagaaaatgagggggggcttgtggcaacttgggcaatcgatcactcgccgtcttgcccatggagataagaaggctgttgctcgtcgatgttttgcctcagaagctgagctgaaaaagacagtgtttcatgacttccatgttgctcatggtgggaagatggttccatttgctgggtggagcatgccaatccaatacaaggactcaatcatggactctaccatcaactgtagggagaatggtagcctctttgatgtttcccatatgtgtgggctgagcctcaaagggaggacgctgccccattccttgaaaagctggtcattgc

SEQ ID NO: 265172 - DNA, 216 bp, Glycine max
  unsure (1)..(216): unsure at all n locations
ggtggatttctgcgtagcagactacacaggccccaatgggcccgcagggtactcatgcaagagcccagcaaaggtcacggtggacgacttcgtctactccggccttggcaccgncggcaacacctcaaacatcatcaaagccgcggtgacgccggcgttcgacgcgcaattccccggcgtcaacgggcttggaatctncattgcacgcctagacct

SEQ ID NO: 265173 - DNA, 189 bp, Glycine max
aatggcttctacccaatgtgtctgggaccaccatgctcttaccacccctgccagtgccagatccccatcactacgcatcttggttagcaccaagcctaaccagcttgtttgcaaggcacagaaacaacaaacaccacaagaggatattgatgtcagcccaatctctcgcggttagctctaactgtgctc

SEQ ID NO: 265174 - DNA, 393 bp, Glycine max
  unsure (1)..(393): unsure at all n locations
gccaagacattattatatgtgaatgcttgggcaattcatagagatcctaaggcttggaaagatccagaagagtttatacccgagaggtttttaaattgcgacatacatctttatggacaagattttgagtttattccattcggtgctggtcgtagattgtgccctggtatgaatatggcatttgctgcattggatcttatactngctaatcttccttattcctttgactgggaatttgcaacagggattgaaaaaggagacctttgttcctgaaatgttgcaagaagtacaccacctttagaaggaatcctttgggtgttgtggccaagtgctttttttaaaatccaaaagtcgtaactactgctgaaaaaaattaatttaaataattaatga

SEQ ID NO: 265175 - DNA, 266 bp, Glycine max
caacgaaccaaggggggggcagcctcagacgcaggggggggcgcagcacgggcaagcagcgctggagcacgtgcagtgcttcggtcgcaagaagaccgccgtgggcgtgacctactgcaagcgcgggcgcgggctcatcaagatcaacggctgccccattgagctcgtggagccggagatcctccgcttcaaggccttcgagcctatcctgctgttgggtaagagccgcttcggccggcgtcgacatgcgcattcgcgtcaagggt

SEQ ID NO: 265176 - DNA, 387 bp, Glycine max
  unsure (1)..(387): unsure at all n locations
ttctcctcttacanaaatgggtgccgcataaaaaactaagaagacccatgagagcatcaacaacaggctcgctctcgtcatgaagagtggcaaattcaccctcggttacaagaccgatctcaaatctcttaggagctccaaagggaaattgattatcattgctaacaactgcccccctttgaggaagtcagagattgaatactatgctatgttggcaaaggttgnggttcatcattacaatgggaacaatgtggatttgggcactgcatgtggcaaatattacagagtgtgctgccttagcattattgatcctggtgattcggatatcatcaagacacttgctggtgaacaagtaagtattcttgaagttccttgcttggtattttc

SEQ ID NO: 265177 - DNA, 302 bp, Glycine max
ggcggaggaacctttttagaaggtttaacaggaaccgcctatagatgagacagagatccaagttatgcgtttaacctaattggtttctgttgcttttacaattgcttatgttgtcgaatgggacacccagttgttagtggcactggtttctcctttttgatgtttgatacatcttgttggattcaagtagtttatgttcgtcttatgttattagctcaaaacaatggttgtactgcttttgctaatcaacatgatttcttatttgctcaaaaaaaaaaatggtaattaaaaaaaagggcggg

SEQ ID NO: 265178 - DNA, 324 bp, Glycine max
gctgcttgttgcagcccttatcctcatggcggaggggcttgctacttactacagaccaattaagaagccaccagtgtacaagcctgcagtgtacaagccaccagtgtacaaaccaccggtttataagccaaaaccaccggtttacaagccgaaaccaccggtttacaagccaccatataagaagccaccatacaagaaaccaccttatggaaagtaccctccagtagaggacaacacccatgcctaaagcaagcaatgaggtctataatctacttaataaataagaggaactgctttgtgttttctagcattgggattaacaac

SEQ ID NO: 265179 - DNA, 373 bp, Glycine max
acatcttgtagctttagaggatagttaccaacaaaagcgagattttataaatgtatttattgcccaacagttcctgtttcaaaggcagtggcagaaagttcacagctatgcacagagtaagggaatcagcataatgggagacatgccaatatatgttggttatcatagcgcagatgtttgggcaaataagaaacagtttttactgaacaggaagggctttcctcttttagttagtggtgttcctcctgacgcattcagtgaaactggtcagctttggggcaaccccctgtatgatttgaaagccatggagaaagatggatactcatggtgggtacgtcgcatacgacgtgcacaaaatttatttgatgaattt

SEQ ID NO: 265180 - DNA, 257 bp, Glycine max
  unsure (1)..(257): unsure at all n locations
anggccaccgncaccccngcagccgnngctttccctcattcactggcctcaaggcaagcgcaggcaaagtgagtgccgcagttaaagtctcagctccccaagccacaaggttgggcatcaaggcttcgctgaaagacgttggagtcgcttgtgggggcacttgcgnnagtgcagtgctggctagcaacgccatggccattgaagtgttgctgggtggtgatgacgggtctctggctttcgttcccaacaatttctcc

SEQ ID NO: 265181 - DNA, 311 bp, Glycine max
  unsure (1)..(311): unsure at all n locations
gggaagccatgagcaccaccgagagtgagagatataagggcacagtgaaatggttcaacgaggagaagggtttcggtttcataactcccgaagatggtggctctgatctcttcgttcactacagtgcgatccaaaccgacggcggcttccgcaccttggcggagggtcagtcagtagagttcctcgtcactcaggacgacagcgggcgagccgcggccgtcaacgtgacgaccaccatggttaaatctagtgacagcggtaacggggaaaactctggtggtgatgctgncaatgttgagaaataagtgaga

SEQ ID NO: 265182 - DNA, 413 bp, Glycine max
  unsure (1)..(413): unsure at all n locations
ctctnncactcttcttgtatgatgagaagatccagcacagtgaggtggaagtgaagggactgaagcttcacgtggcagagattggaagtggctccaaaacagtggtattcttgcatggattcccagagatctggtacacatggaggcaccaaatgatttctgtggcaaacgctggttatagggctattgcctttgatttcagaggctatggactttctcagcaaccagcagagcctgaaaaggaaaccaatggttgatctgggtcatgaaattgtaggccttttggaatgcttgaacatctncaaagccttcctttgtggaaaggattttggtgccattccaagacatcttactacttgagtgcacccagaaagagtagctggtatcataactttaagcattcctttcatgct

SEQ ID NO: 265183 - DNA, 222 bp, Glycine max
cattcctagtctttcgcttgcttacttaagaccagacatgtctaacacatgcggcagctgctactgcactgacaagactagctgcaccaagggaaacagctatagagctatagtatagactgagaagaggaacatcgagactgttcacatggatgtaccagcagctgagcatgatcataagtgcatatatgcccctaactgcacatgcactgactgaacatg

SEQ ID NO: 265184 - DNA, 250 bp, Glycine max
gtccgcccacgcgtccgggagcatcgtaaggcataattcaccgcgatgtaaagacaactaacatcctcttagatgataactttgttgctaaggttgcagactttggcctctccaaaactggtcctgctcttgatcagactcatgtgagcactgctgttaaaggtagtttcggttatcttgatcctgaatacttcagaaggcaacagcttacagagaaatcagatgtttattcatttggagtagttttgat

SEQ ID NO: 265185 - DNA, 262 bp, Glycine max
tggtaaccattcgtgcgatgagataggaaattatccgtgaacgcattgagcaatataatacggaagtaaaaattgtaaatacgggtaccgtacttcaagtaggcgacggtattgctcgtatttatggtcttgatgaagtaatggcgggtgaattagtggaatttgaagagggtactataggcattgctttgaatttggaatccaaaaatgttggtgttgtattaatgggtgatgggttgatgatacaagagggaagttcagt

SEQ ID NO: 265186 - DNA, 352 bp, Glycine max
  unsure (1)..(352): unsure at all n locations
caaatggctagtacatgaaactgagtcgacggttgaaatagtaacatttgttcatcgtttgcataagctgcaaaattgtctataactatcagcctatcaaattctttcgatttttagctagctattataccacaaggtatcagtaaatatgtatttgataacaattattttccgtagtcaaatcatttattcatgttttctaaatgttgtaaagaagtttaattgaatgaaattgcanagtgaaaaactagtgtagacacaagtccgggttatgaaaaaaaaaaaaaaaaaaaaaaaaaaaaaaaaagggccggccgttttaaaggtcccaagttaccgtccccttccttcc

SEQ ID NO: 265187 - DNA, 253 bp, Glycine max
  unsure (1)..(253): unsure at all n locations
tgggtcaaattgattctttctagcaaggagatggtcttcctgagcatggcttttatttggtaggtaatatcgatgaagctactgcgaaagctactaacttagaaatggagagcaatttgaagaaatgactttaaatctttgtgtactgacccccaatcgaattgtttgggattcgcaagtgaaggaaatcattttatctactaatagcggacacatcggagtattaccaaatcatgcgcctattgncacagac

SEQ ID NO: 265188 - DNA, 215 bp, Glycine max
tgatgaaaatgaaggtccttgttttcgtcggggctcaattttggtagcatggcaatgccatgcgtacgatatgttccctctccgaatgaacactggctatggtgcccgtactccggaggtgaaatgcgcaagttggaggcttgctgtggaagcacacaacatctttggctttgagaccattcctgaagagtgcgttgaagcaaccaaagaataca

SEQ ID NO: 265189 - DNA, 182 bp, Glycine max
agaggtcgaagttgaaccagtcgtttagtcactgtaagaattctcgtggcgatggcgacaacaatatcaacgcacatatcctgatgaatgtctagacaaatctgatgctaggcgtaaaggtgattatcagattgactatgtgccagcaccaagagtcactgaagcttgacaaaacaatgatc

SEQ ID NO: 265190 - DNA, 216 bp, Glycine max
tcggtgttcacttgatctcatcataagtgggtcggcgtcaattgaagaagatgccgatcagaaacatcgccgtcggaaggcctgaagaggcgactcaccccgacacgttgaaggcggctttggctgagttcatctcaaccttcatcttcgtgttcgccggctcaggctccggcatcgcctacaacaagctcaccgacaacggcgctgccacccctg

SEQ ID NO: 265191 - DNA, 176 bp, Glycine max
ttcttttcttctttttttttttctacagttctcacttgatacacatcatattgtctctgtttaaatttaagaagatgccgatcataaacatctccatctaaattccttaatagactactcaccccaacacttttaatgcttctttggctgaattcatcttaacctttatcttcttc

SEQ ID NO: 265192 - DNA, 331 bp, Glycine max
tttgaaaaacccctcactcttcatcacgtacagtagctagccacatacagatgtcgaccaaatttaaggtgtttcgtgaattcacaagcgatgactcattcctaaaccaagttatccctgaaaacatcaccgaattccaagtgactctgtccctcgctagagactacgatggcaacaactcaaccaacggaaagttcattccttactgggacactgaaaaggtcactcccgaagtgataaaaaaattcaagaaaaaatacgaacccaccggacttaaggttaaaggtcttggcaacattggaaaccaaaaccaacaatttccttttaccat

SEQ ID NO: 265193 - DNA, 324 bp, Glycine max
  unsure (1)..(324): unsure at all n locations
gtgcgacttgaagccaggagccgaaggaaagattactggacctgttggtgaagaaatgcttatgccaaaagatcctaatgcaaccgtcatcatgttggcaactggaacaggaattgccccattccgctcatttttatggaaaatgttctttgagaagcatgatgattacaagttcaatggtttggcatggctcttcttgggtgtccncacaagcagctcactactttataaggaggacattgaaaagatgaaggagaaagcacctgacaacttcaggcttgactttgctttaagcagaaagcaaacaaaccaaaaaggttttaa

SEQ ID NO: 265194 - DNA, 277 bp, Glycine max
  unsure (1)..(277): unsure at all n locations
cttcactctngaaccccgattcagttccgccagcacaagaagcatggctgcaatatcaataccttctcacatgaaagcttggacatactctgagtatggaaaatccaaggaagttctcaagtttaatcagagtgtggctttgcctgaagtgaaggaagaccaggtcctcatcaaggtcgctgctgcttcccttaaccccattgatcataagagaatggaaggctatttcaagaacagcgacttccctttacctactgctcctggttatgatgttgct

SEQ ID NO: 265195 - DNA, 216 bp, Glycine max
ggcatatttaaaaaaaaaataaaataatattttaaaaaaaaaaaaaaaaaaaaaaaaaaaggaaaagataaataaaaaaaaatggacagaaaaaacataaaaaaaaaatataaaaaaaaaaaaaaagggccgccctttttaaaggatccaactttacttacccttccttgcaacttcataccttttttttagtgtcacctaatttcaattaattgc

SEQ ID NO: 265196 - DNA, 206 bp, Glycine max
actcttaaattctcagatatgtggagggaagcttttttagatgagcacctacttccttaaatccaaggtaaccacctcactcacaccactatcatctaccaatacagaatcttttgatctcatatcaccaatcttcctcacttcaaacctgatgaaataactaccatcaataattactctaatgagcacttatcactttctccaac

SEQ ID NO: 265197 - DNA, 321 bp, Glycine max
  unsure (1)..(321): unsure at all n locations
attcccnntccgaccgacgcatactactgagtacaccacggccattgatatctgtcagccggttgtgtacttggtgaactattggttggccagcctctattccctggtgagagtggagtacatcagcttgttgaaattatcaaggttttaggaaccccgacaagggaagaaatcaagtgtatgaatcctaattacaccgagttcaaatttccacacattaaagctcatccatggcataagatatttcacaagcgtttacctactgaagctgtggatctcgtcttaaggctactgcaatactctccaaatcttcgatgcaca

SEQ ID NO: 265198 - DNA, 137 bp, Glycine max
ccaccccactttgtttgtttgtacttaaactacattcccatttgtttgtgctttttgagatttcatcatcctgtatttttggtttctgttttcggacttcaatggaaattaatggatgagaactaatgaataagctt

SEQ ID NO: 265199 - DNA, 260 bp, Glycine max
cccacgcgtccgctcatttacggcaatataaaaggatgattacaacatttgtaattctcaggggaaaaaaaaaaaaaaaaaaaaaaaaaaaaaaaaaaaaaaaaaaaaaaaaaaagggtgaaataaaaaaaaaaaaaaaaggtaaccaacaaaagaaaggaaaggaaaaaaaaagcgtagtgtgaatcttaaaaaaaattctttggctcgcgttaaaaaaaaaaatcaattgggaaaactactggaatcaaaaaaataaa

SEQ ID NO: 265200 - DNA, 354 bp, Glycine max
  unsure (1)..(354): unsure at all n locations
gaaatggcttcctcaatgatctcctcccgagctggtaccaccgtcaaccgtgcccgtgccaacatggttgctccattcaccaanctcaaatccatggctggnttncccacgaggaagaccaacaatgacattacctccattgctagcaacggtggaagagtacaatgcatgcaggtgtggccaccaattggcaagaagaagttcgagactctttcctacttgccagacctcgatgatgcccaattggcaaaggaagtcgaataccttctaaggaaaggatggattccttgcttggaattcgaggttggagcacggtttcgtgtaccgtgagcacaacaggtcacctggatacta

SEQ ID NO: 265201 - DNA, 357 bp, Glycine max
cccacgcgtccgcccacgcgtccgggaagttctctgtttatgtgcatgcatccaagacaaaggcagttcatgtgagccggtattttgttaatcgggatatacgcagtgaccaggtgatttgggggaaaatttctatggttgatgcagagagacgactattggcaaatgctcttaaggatactgacaaccagcaatttgttctactgtctgatagctgtgtgcctctatatgattttgactatatttacaactatctgatgtatacaaatatcagctttgtagactgctttaaggatccccgtcctcatggcaatggcaggtattcagatcgcatgctaccttaaatttgaggtgaag

SEQ ID NO: 265202 - DNA, 391 bp, Glycine max
atttgcagaactttgtttcccaacctccattgcctccgcttctacctcgctaccatgatcggtcctgagaagaaccgcaaggagatctgcaaatacctcttccaagagggagtttgctttgcgaagaaggacttcaatttggcgaagcaccctgagattgacgtgccgaatctgcaggtgattaagctgatgcagagtttaaagtctcgcgagtatgtgagggagacttttgcttggatgcactattactggttcctcaccaacgatggaatcgagtttctcagaacttaccttaaccttccttccgaaattgtccctgctactttgaagaaacaggccaagccacctggcaggccctttggccgccccatccggtgatcgccctaggggt

SEQ ID NO: 265203 - DNA, 419 bp, Glycine max
  unsure (1)..(419): unsure at all n locations
gagcgatgttggtgttccgaagtctgaaccagaatcctacgaatgacagaagaggggggggaagaggatgaagatgaagatggtgatgatcaagatgacgacgatgaggatgacgatgatgatgacgaagaggacgaggcaggtgaagaagaggatgaagatggtgctgaggatgaggagaatgaagaggacgaggaagatgaggaagcattgcagcccccaaagaaaagaaagaagtgaatttagtttagtaaagcctcctctttgtattgttgtgtacgaatttggcttctaacttccatgtttttacttttttgggtactaaacttccatgttcttatttaagttattaaggaggcttatgtaggacatgttttaattgatatctatngttaccattgcgtaattagaatgctaca

SEQ ID NO: 265204 - DNA, 379 bp, Glycine max
agcagagaaatgagaaaggtagaggtagacattgaagatggaagagattgttttcggcacagaccttacccttcttcttcttctaacctcagtttcatgcacagagttcatctacaacaccaacttcaactccaccaacacccttctacatggcaacgccaccatagaatcttccatcctcacccttactatcagttccaccttctctgtgggtcgtgctttctacccttttaagatccccacaaaaccttccaactcttcaacccctttaccattctcagcctcattcattttctccattgcaccattcaaagaccttctccctggccatggctttgtcttcatactgacaccttctgcaggcaccactggggtgaac

SEQ ID NO: 265205 - DNA, 249 bp, Glycine max
aaaatctaaccggggtcaatgttcttatcaaaaaagagggtccaaaagtcaatccgaagttcgagctgaagccgccaccatatccactgaatggtttggagccggtgatgagccagcagacacttgagtttcattgggggaaacaccacaagacatatgtggaaaatctgaaaaaacaaattgttgggacagagcttgatgggaaatcactagaagagattatagtgacatcatataataagggtgaca

SEQ ID NO: 265206 - DNA, 372 bp, Glycine max
ggggcttcttccctcttatttgtctattctttggattatgcccgtactcgtttagcaaacgatgcagaggctgcaaagaagggtggcgagaggcagtttaatggcttggttgatgtttacaggaaaaccatcaagtctgatggtgttgctggcctttatcgtgggttcaacatctcatgtgttggaattatagtgtatcgtggtctttactttggaatgtatgattccctgaaaccagtagttttggttggtgggttgcaggatagtttctttgctagtttccttttgggatggggaatcacaattggtgctggtttggcttcttatcccattgacactgttcgaagaagaatgatgatgacttctggagaa

SEQ ID NO: 265207 - DNA, 455 bp, Glycine max
atatgatcctgttgtaaaagctcttgcaaatgatcttgatatacgcttgaaccacagggtgaccaaaatatccgatggttacaacatggtaatggtcacagttgaggatggcagaaactttgttgctgatgctgttattgtaactgtccctattggaatccttaaggccaatttaattgaattttcaccaaaactgcctcattggaaggctgaagcaattaaagatattggtatgggaaatgaaaataagattgccctaagatttgatgcagtgttttggcctaatgtagaagttctgggcatagttgcacccacctcttatgcctgtggttattttctcaatctccacaaggcaacaggccatccaattcttgtgtatatggcagcttgcaagtttgcctatgaccttgaaaagctgtctgatgaatcagctgcaaattttgcaatgcaacagc

SEQ ID NO: 265208 - DNA, 151 bp, Glycine max
cccacgcgtccgcccacgcgtccgttggaaatggctatgcccctgttcttgactgccacacttcccacattgctgtcaagtttgctgaactcatgaccaagattgacaggcgatctggcaaagagcttgagaaggaacccaagttttggag

SEQ ID NO: 265209 - DNA, 424 bp, Glycine max
cccacgcgtccgcagatctgctccttccgttccccctcagaaatcagttgaagagcatgggtcgtggagttagcagtggtggtggtcaaagttcattgggttatctttttggcagtggagaggcccctgccccaaaaccagcaacaaataatgccccagcccaacctgaagtgcaggctgtaaataatgtgcctcctccaaaagcatctcctcctactaaaacaatagaccctaacaaggctgctggtatcaacagtcattctactgatggccagaacaccggcaacttcatcacggaccgaccctcaaccaaggtccatgctgcccctggtggtggttcttccctaggttatctctttggtgaacctggggaggggaaatgatacctttgttgcaaagcttttgctcgatgatgaatgattta

SEQ ID NO: 265210 - DNA, 443 bp, Glycine max
cacaattctctgtgaactttctagaatctcgttcttcctttgccttctccttcttcgtcagccctttttctttctctttctttcgcactttcattctctaaaaaaatctaagtccctttggtcttcatcttctgttctgatccaggtatggcttctaaacgcatcttgaaggagctcaaggatttgcagaaggatcctcctacctcatgcagtgcaggccctgtggctgaggacatgtttcactggcaagccacaatcatgggacctgctgatagcccatatgcaggtggtgttttcctagtttcaattcattttcctcctgactatcccttcaagccaccaaaggttgcttttcggactaaggtgttccacccaaacatcaacagcaatggcagtatatgtcttgacattctcaaggagcaatggagccccacccttaacca

SEQ ID NO: 265211 - DNA, 375 bp, Glycine max
cccacacgtccggaaacagggaggtgaaagtgaacgtccttgcttcattcgttgctgcaaggttggtagcatggcactgccatgcctacgatatgatgaatattcgaatgaacactggctatggtgcccgtacttccgaagtgaaatgcgcaagttggaggcttgctgtggaagcacacaacatgactagctttgagaccattcctgaagagtgcgttgaatccacacatggatacatccatggcgaacaatatagatcagactaccaaacagcttacctacaagcttacttttatgccagagacctcgaagaccaatccaaggacacatttgagtgcagcatagatggctacgtactctactatattccatact

SEQ ID NO: 265212 - DNA, 421 bp, Glycine max
cccacgcgtccgcccacgcgtccgcccacgcgttcggaaaacaatggctgttgccaacaatgtgctttgcattgctttcattatcactttaacgtgggcagttgaagctcgaattccggggatttactctggtggtgcatggcaaagtgctcacgccaccttctacggaggatccgacgcttccggcaccatggggggagcgtgtgggtatgggaacctgtacagccaggggtacggtgtgaacacggcggcattgagcacggcactcttcaacagcgggcttagctgcggtgcgtgttttgagataaagtgcgcaaacgacaggcagtggtgccactccggcagtccttccatcttcatcaccgccaccaacttttgccctcccaacttcgctcttcctaacgacaatggcggctggtgc

SEQ ID NO: 265213 - DNA, 100 bp, Glycine max
cccacgcgtccgaaaaaaaaaaaataaaaaataaaaataaaaaaaaaaaaaaaaaaaaaaaggagaaggaaaaaaaaaaaaaaaaaaaaaaaaaaaacat

SEQ ID NO: 265214 - DNA, 394 bp, Glycine max
cccacgcgttcgcccacgcgtccgcaaatggctattccttcactagtaaaccagcctctagcattcagcttctccttcctcctctttcttgctctctgcaccccattggctgctaacaacaccgatttcggaggttcagcctgcctcaaggtttcccccacccacttcgccggctcagtcaccgaagtcataactgctatacgacaagtcgcttccattctctcacgcttcagccctcccttcgccaactttcgcctcgccaccgccctcgccgactgccttgacttgctcgacctctcctccgacgtgctctgctgggccctctccgcctctcagaaccccaaagggaagcataacagtacggggaatctgagttcggatttgaggacatggc

SEQ ID NO: 265215 - DNA, 374 bp, Glycine max
gtccgatcgagataactggaaccaggtgtgatgaaaatgaaggtccttgttttcttcgttgctacagttttggtagcatggcaatgccatgcgtacgatatgttccctctccgaatgaacactggctatggtgcccgtactccggaggtgaaatgcgcaagttggaggcttgctgtggaagcacacaacatctttggctttgagaccattcctgaagagtgcgttgaagcaacaaaggaatacatccatggcgaacaatatagatcagactccaaaacagttaaccaacaagcttacttttatgccagagacctcgaagtccatcccaaggacacatttgtgttcagtatagatggcaccgtactctctaatat

SEQ ID NO: 265216 - DNA, 396 bp, Glycine max
cccacgcgtccgcttaaatttcccaatcaattccatccatcgggtctttactctcttaccgagcccacacacactctttctctctctctctttccctgatcatcaaaatcagaaaaaattgggggaatggagaccaacaaccagcaacaacaacaacaaggagctcaagcccaatcgggaccctaccccgtcgccggcgccggcggcagtgcaggtgcaggtgcaggcgctcctccccctttccagcaccttctccagcagcagcagcagcagctccagatgttctggtcttaccagcgtcaagaaatcgagcacgtgaacgactttaagaatcaccagctccctcttgcccgcatcaagaagatcatgaaggccgacgaggatgtccgcatgatc

SEQ ID NO: 265217 - DNA, 448 bp, Glycine max
gacggagacggcggaggatggcggcggagagaggacgacgagggcgtggggggtggtggttcaggggaagggcgtcgggtgcggcccggtttgttatcttttaaagaccgttcgggtcgggtcaggacccggttcgggaatggggatttgttcgacccatttttgtttggtgaaagtgaaggacttcagggaaacggtgcagtcgcagctaaaaaattgttggcttttgcagagccagtgccagtggaataactataaatgaatcaatgaaaatattcaatattgtacatttttttctcattgagtaatttttttttggtgccacggttgttgcaattattatagccaatagattttcgactgtgaaaatgtacagagtgaaataccttttaagggaagttcgtcttcttcaaactgtcaaatattattattatttttgcattactat

SEQ ID NO: 265218 - DNA, 405 bp, Glycine max
ctttgataagagaattgttgattggctggcttctaacttcaagagggatgaaggcgtggagcttttgaaagataaacaagctcttcagcgtctcactgaaacagccgagaaagcaaagatggagctctcaacattgactcaaactaacatcagattgccattcataactgccacggcagatggacccaaacatattgagaccaccatcacatgggctaaatttgaggaattgtgtttagatctttttgacaggctcatgacaccaattgtaaattcattgacggatgcgaaactctcgtttaaggatcttgacgaaatcatacttggtggtggatcaacacgtattcagcttttcaggagctttgaaagaagttgactggcaaggacccaaatgtcactgtcaat

SEQ ID NO: 265219 - DNA, 349 bp, Glycine max
gggaatttagaatgcttagaataaatgaatgaataaagttgagttccctctaacagttatgttagagtttagttgagttatcatgaataatcatcagtgacactgtaggagcatggatcctctatgtgagttttgtcgggtggtgagagctgtggtttactgtaagtcagattctgctcgtctctgcttgcattgcgatggctgtgtacactctgcaaattctttgtctcgcaggcattcgcgttccctcctatgcgataagtgcaattcccagccggcaatgatccgctgcatgaatcataagttgtcattatgtcaaggttgtgactggaatccaaatgactgttct

SEQ ID NO: 265220 - DNA, 463 bp, Glycine max
  unsure (1)..(463): unsure at all n locations
atccactccaggtgggccatgctcggagccttgggctgcgtcttcccggagttggtgtccggcaacggggtgaagttcggagaagccgtgtggttcaaggccgggtcccagatcttcagcgagggtgggctcgactacttgggcaacccaagcctgatccacgcccagagcatcctcgccatctgggccacacaagttatcctaatgggtgccgttgaaggttaccgtattgctggtggccccctcggtgaggtcactgacccaatctacccaggtggcagcttcgacccattgggccttgctgatgacccagaggcttttgctgagcttaaggtgaaggaactcaagaacggacgattggccatgttctctatgnttggcttctttgttcaggccattgtcaccgganagggtccattggaggaacttngccgatcaccttgctgaccctgtcaacaacaac

SEQ ID NO: 265221 - DNA, 353 bp, Glycine max
gaagcagcaaagggaggagcggcattaaaaatgcagatcttcgtgaaaaccctaacgggggagaccataaccctcgaggtcgaaagcagcgacaccattgacaatgtcaaggctaagattcaagacaaggaaggcatccctccggatcagcagcgtttgattttcgccggaaagcaacttgaagatggaaggaccttggccgattacaacatccagaaggaatcaacccttcaccttgtcctcaggcttcgtggtggcatcatcgagccttccctcatggctttggctcgcaaatacaaccaggacaagatgatttgccgcaaatgctatgctcgtctgcacccctaaggctg

SEQ ID NO: 265222 - DNA, 458 bp, Glycine max
cccacgcgtccgcccacgcgtccgggtgaaactgctattgttggaaacagagttggagtggggcatggtgtaacattaggaggcacggggaaggaaataggtgatcgccatcccaaagtaggtgaaggggcactaattcgagctagtgcaactatacttggaaatataaagattggtgaaggtgccatgattgctgcgggttccctggtgttaaaagatgtccctcctcactgcattgcggcaggaataccagctaaagtcattagtggtctacaggagcatgacccatctttaaccatgaagcatgatgctactaaagattttttcacacatgtagctactaacttcagagatgaaaaacccaatggagcgcagcatccagatagaaatggaatgaacatttgagaggttcggcaacgtagtctcgtttggcatgcattgtcctcaaaggagcatga

SEQ ID NO: 265223 - DNA, 449 bp, Glycine max
catcatcattaaacatgggtggcagtgttagcaagagtaggaggatgagttctgagaaatatgtgatgaatttgaaggagaaagtgaggctcttgcaagaggagataaaggagatgatgtatgagagggagaaggagacaaggagatatgagagggacataatggtgttcactttcaaggaggcagattcgaagcaagaggggaagaggctgagagaggaagtgaagcaattgaggagtttggtggaagagaaagatgagaagataagagagattgaggttggaatgatggagaagaacagtgagaaagagtgggaattgatgggaactaagctcttggttgagcagatgaaggaggagagagcaaggagagatgaagctgtggagaagtggaagcaactttatcttgcaattaagactgagctagatggactcattcaaagaacatat

SEQ ID NO: 265224 - DNA, 452 bp, Glycine max
  unsure (1)..(452): unsure at all n locations
cccacgcgtccggcagaatggcttctactcaatgtttcttgcaccaccatgctctgaccacccctgccagatccccatcacaacgcatcatggttagcaccaagcctaaccagcttgtttgcaaggcacagaagcaagaggatattgatgtcagcccaatctctcgccggttagctctaaccgtgctcattggtgctgctgctgttggctccaaagtccaacctgctgatgcagcttatggggaagctgccaatgtgtttggaaagccaaagacagacacagatttcctgccatacaatggagatggattcaaactatcgattccctcaaagtggaacccaagcaaagaggttgagtacacaggtcaggttgttagatatgaggataactntgattcaaccaccaacgtggttgtcaccatcactccgactgataagaagtctatcactgac

SEQ ID NO: 265225 - DNA, 401 bp, Glycine max
gtgagatacacaataattaagtagccaggcttaattgtttaacttaaaaaccatttctgctgcatatggtgtccatttgggaatggtcccactaaaattctattcatctatggctgcctcatcttatgctatgcaatcaatccttgcaaaccctatgatccgcatttccagcgggtctagggagaaccattttggtgttcctgcttatcacatgagaaggaatgttggcctgagagttaggtccatggctgaggaagagcaaccaagtcagcctgcgaccccagttacaccaccaccagcagaacccaaaccacagccagtctctacttctttaccaaaggtgagcaccaagttttctgatgtgttggcgttcagtgggccagcacctgagaggatcaatg

SEQ ID NO: 265226 - DNA, 335 bp, Glycine max
atcgatcttaaggctgggggtaggaccaaaaagaccaaaagaacagcaccaaagtccaatggcatgtacctcaaattacttgtcaagctttatcgattccttgttcgaaggacagacagcaatttcaatgctgtgatactcaagcgcttgttcatgagcaaggttaacaagcctccaatttctttgtcaaggttaattaagtatacgaaggggaaggaggataaaattgctgtagtagtggggactgtaactgatgatatcagagtatatgaagttccagcattgaaaattaccagcactcaagtttacagagagagcacgtgcaagaataaaaa

SEQ ID NO: 265227 - DNA, 381 bp, Glycine max
cccacgcgtccgtagaaacagtgtgatgaaaatgaaggtccttgttttcttcgttgctacgagttttggtagcatggcaatgccatgcgtacgatatgttccctctccgaatgaacactggctatggtgcccgtactccggaggtgaaatgcgcaagttggaggcttgctgtggaagcacacaacatctttggctttgagaccattcctgaagagtgcgttgaagcaacaaaggaatacatccatggcgaacaatatagatcagactccaaaacagttaaccaacaagcttacttttatgccagagacctcgaagtccatcccaaggacacatttgtgttcagtatagatggcaccggactcttttaatattccatactac

SEQ ID NO: 265228 - DNA, 264 bp, Glycine max
cccacgcgtccgctaaatttttggtgtcatccgtaattgctgatgataacggatttgacagcaataatctcagaaagatactaaaatatcagccttttgtactaaaaaaaaaaaaaaaaaaaaaaaaaaaaaaaaaaaaaaaaaaaaaaaggaaaaaaaaataaaatagacgagcaagcaaacaaaaaccttggctaatagggacactctaaattaaatgcactgaacttaaatttacaacctctgcgactgggaaaactcttg

SEQ ID NO: 265229 - DNA, 429 bp, Glycine max
cccacgcgtccgcccacgcgtccgaaatcttatactcctctcttgtctgtgtaatcgaaacgacaacattcattcatactcacttccttgcctactacacattcttcatcacttcattcaacatttctccccttagcttgtttcaccaatggctgctgcggttagtgctgcagtctcttttccatccaccaagtctacctctcttccaagcaggacctccctcattgccccagagagagttgtgttcaagaaggcttcattgcaaaacagagatgtttctagcagtggacgggtagtttccatcagagctcaagtcaccactgaggcaccagccaaggttgaaaaagagtccaagaaacaggatgaaagtgtggttgtgaacaagtttaaacccaagaccccttacattgttagatgcctgctcaacac

SEQ ID NO: 265230 - DNA, 459 bp, Glycine max
cccacgcgtccggttggttgaagcttccgctaccctcatatggattgcttcagctggtcagtgctgctgttaactttggacagtatccatatggaggtttaatcctgaataggccaactattagcaggagattcatgcctgagaaagggtctcctgaatatgatgcgttagctaagaaccctgagaaggagtttttgaagactattactggcaagaaagagaccctcattgaccttacaattatagaaattttatcaaggcacgcatctgatgagttctaccttgggcagagagatggcggtgactactggacttctgatgccgggccattagaggcctttaagaggtttggaaagaatcttgaagagattgaaaagaagcttatagagaagaacaataatgagacattgagaaaccgctatgggccggctaaaatgccttacactttgctctatcctt

SEQ ID NO: 265231 - DNA, 368 bp, Glycine max
ggaccgaacctacaagctcggactgaaccggttcgcggatctcaccaacgaggaggacagggccaagtacttgggaaccaagatcgatcccaaccggaggctcggcaagaccccgagcaaccgatacgcgccacgtgtcggcgacaaactacctgaatcggttgattggaggaaggaaggtgctgttcctccagtcaaagaccaaggaggctgtgggagctgttgggcattctcagcaatcggtgcagtggaaggaataaataagatagtgacaggtgaactgatttcgttatcagaacaagaattggtggattgtgatacaggatataacgaaggatgcaatggaggacttatggactattcatttg

SEQ ID NO: 265232 - DNA, 279 bp, Glycine max
  unsure (1)..(279): unsure at all n locations
gttgagagcagaatccaccgacttgctcgctattacaggaggactaagaagctcccaccaggctggaagtacgaatcaacaactgctagcactctggttgcttagagaatgtatcaactttcatgggttttgctaccgtgcagtcgccgttgagctagcaatttgcgatatcattttgatgtttatttgaaggctggataggttatgtggcttaattttgttaagaacctatggtttgactgggaaagataatttaactagttaagtcaatttatcana

SEQ ID NO: 265233 - DNA, 362 bp, Glycine max
gcaatggcttctctggcaagcttagctgttgttcaaccatctactgtcaagggccttgctggaactaagctctctttcaagccctctcgccagagcttcagacccaagaatttcaggagtggtgccgttgtagcaaagtacggtgacaagagtgtgtactttgatttggaggatctaggcaacactactggtcagtgggacttgtacggctccgatgcaccttcaccctacaaccctcttcagagcaagttcttcgagacattcgccgctccattcacaaagaggggattgttactaaagtttttgatcctgggaggtggttccaccctggcatacttgagtgccacagcgtcaggtgacat

SEQ ID NO: 265234 - DNA, 390 bp, Glycine max
ggggactccaagaaatacgaggggtcctcggagttcgtgaagctgaggtaccacatgggggcggtcctgactaccaacatcaccgtccacaccatctggtacggcaagtggcagcggagccagaagaagatcatccgcgagttcataaattcaatctccgccgcgaactcgccgcacccctccgtggccggatggtggcgcaccgtgcagctctacacggaccaaaccggcgccaacatttcaaaatcggttcgactcggcgaggagaagaacgaccggttctattcccacggcaaatcactgacccggttatcaatacagtctgtgataaagagcgccatcacaggcaaaacgagacccttgccgatcaaccctagaagcggttatacc

SEQ ID NO: 265235 - DNA, 405 bp, Glycine max
  unsure (1)..(405): unsure at all n locations
ctttactctctctttcccctaattccgaccatggaagccacggcctccgcaatgagcttcggccttccctcaacaaaagcccaagcccaagcccaactcctgacccggcccaccaatccattcaccattcccnttcgcagcccagcccaccgccccccgccgcgcctccccaccatccgcgccgcaattccccgcacaaagaaagaggcaacggtggagactgtgcgggagcagctcgagaactgttacctcctcgccggcatcaactacaagggcttcacggtgaagcagttccaggagcttcgaaagacgctcccagaaacaacgaaactgatcgtggcgaagaacacgctcgtttacaaggccgtggaaagcacgccctgggaaacgctgaagccctgcatg

SEQ ID NO: 265236 - DNA, 457 bp, Glycine max
  unsure (1)..(457): unsure at all n locations
tgaagctactgcgaacgctacgaacttagaaatggagagcaatttgaagaaatgacgttaaatctttgagtactgacccccaatcgaattgtttgggattcggaagtgaaggacatcattatatctactaatagcggacaaattggagtattaccaaatcatgcgcctattgccacagccgtagatataggtattttgagaatacgtcttcttaaagaccaatggttaacgatggctctgatgggcggttttgctagaataaacaataatgagatcactgttttagtaaatgatgcggaaaagggtagtgacattgatccacaagaagcacagcanactcttgaaatagcagaagctaatttgaataangcggaaggcaagagacaaacaattgaggcaaatctagctcttagacgagctaggacacgagtagaggctatcaatgtgatttcataac

SEQ ID NO: 265237 - DNA, 400 bp, Glycine max
  unsure (1)..(400): unsure at all n locations
tcttaatacatatcactttcttcaccgttcgctctttctttctcccctacacagggcatggctttgcccaatcagcaaaccgtcnattaccccagcttcaagcttgtcatcgtcggcgacggtggcacaggaaagacaaccttcgtgaagaggcatctcactggtgaattcgagaagaaatatgaaccgaccattggtgtggaggttcatccgttggattttttcacgaactgtggaaagattcgcttctattgttgggatactgctgggcaagagaagtttggtggcctcagagatggatattatatccatgggcaatgtgcgattatcatgtttgatgttactgcccgtctaacatacaaaaatgtccctacctggcaccgtgatctttgccgggtct

SEQ ID NO: 265238 - DNA, 424 bp, Glycine max
ccttaaactgcgcactccaccccactccctccccgccatccgcgccatcaccctcgcccaggacgacctcaagagactcgccgccgacaaggccgtggagtccgtcaagagcggcatggtcctcggcctaggcaccggctccactgctgccttcgtcgtcgccaagcttggcgcccttctcgcctccggccaactctccgacatcgtcggtgtccccacctccaaacgcacggaggagcaggcccgctccctcggcatccccctctccgtcctcgacgacaacccccgcctcgatctcgccatcgacggcgccgacgaggtcgaccccgacctcaacctcgtcaaaggccgcggcggcgccctcctccgcgagaagatggtcgaggcccgcctccgacaagttcgtcgtggtcgtcgacgacac

SEQ ID NO: 265239 - DNA, 352 bp, Glycine max
tcggatccattcacttccttgcacaagccttaagtgagtttggtgtgatttgaattgaaggaaggggagggggccgttgcaatggccgtgggtcaccttctgcacctgggaagcaatacttgcaggaattctcgaagctttttcagtactatctggataaatccactccccatgccctctacagatggattgggactttcgtgattgcatccatctacggtctgcgtgttggttatttgcaggggttttacattgtctcctacggcctcggaatctaccttctcaatctcttgattggctttctctcccctttggttgatccagagctcgatccctccaacgcccctatgct

SEQ ID NO: 265240 - DNA, 406 bp, Glycine max
cgaaaatttaacctccttagttggggtagggggttttgcgtttttgcaaaaatacctaatttggggaaattgggtcgacccaccggtcaccgaatgtccatcctccgaaccatggtctcgcagttggtgaagcacgagcgcatcgaaactactgttgccaaggcgaaagagatcagaagactcgcggataatatggtgcagcttggaaaggagggatcccaacatgctgcaagacaagctgctagttttgtgcgaggagatgatgtcattcacaagttgtttacagaactagcttatcggtacaaggatagagctgggggatacaccagattgctttcggacccgttttcgagtgggtgatgctgcaccgatggcctatatcgagtttattgacagagaaaatgag

SEQ ID NO: 265241 - DNA, 384 bp, Glycine max
cccacgcgtccgtagaaacagtgtgatgaatatgaaggtccttgttttcttcgttgctacgattttggtagcatggcaatgccatgcgtacgatatgttccctctccgaatgaacactggctatggtgcccgtactccggaggtgaaatgcgcaagttggaggcttgctgtggaagcacacaacatctttggctttgagaccattcctgaagagtgcgttgaagcaacaaaggaatacatccatggcgaacaatatagatcagactccaaaacagttaaccaacaagcttacttttatgccaaagacctcgaagtccatcccaaggacacatttgtgttcagtatagatggcaccgtactctctaatattccatactaccaaaa

SEQ ID NO: 265242 - DNA, 380 bp, Glycine max
gtccgctttaataaataatccccccttgttccatactttaaaaaaaaaaaaaaaaaaaaaaaaaaagaaaagttaaaaaaaaaagaaaaaaaaaaaaaaaaaaaaaaaaaaaaaaaaaaaaaaaaaaaaaaaaaaaaaaaaaaaaaaaaaaaaaaaaaaaaaaaaaaaaaaaaaaaaaaaaaaataaaaaaaaaaaaaaaaaggggccgccccttttaaaaaatcaaattttcctaccccttctttccaacaaaaaattttttttttggggccccaaaaataaaatcaatggccccgattttaaaaactttccaattgaaaaacccttttgtaacccaaattaaatccttttaaaaaaaatccctttttcccccgttggg

SEQ ID NO: 265243 - DNA, 369 bp, Glycine max
gaaactgacaaaatatatggggtgggagagcttcctggtggtgcacaacatagcaaagaggcgcaacgtgggaacacttgctcgcagtgccacctcgttcggcgtatcataactcatccttgatggtcgaagagatttcaactgtttctgcagccatgggtcctgctcctacctacgatttcgacacttccactccctgcaagacgctcgcaaattcttcaaagacaaagactttgatatttgcggcgttgagatcacaaccgattctctcctcgtaaataaacacccttttactaagagcactgcatattctactcggcaacgcaggcactggtctttcttctaaggaaattgagatatgcgactttt

SEQ ID NO: 265244 - DNA, 422 bp, Glycine max
  unsure (1)..(422): unsure at all n locations
attttggcatccccgtggcttcaagaagagaatctcaatggaggcccaggagctggagcgcgtgttccagatgttcgaccgcaacggcgacgggagaataacgaagaaggagctgaacgactcgctggagaacctgggcatcttcatctctgacaaggacctgagccaaatgatccagaggatcgacgtcaacggcgacggttgcgtggacatggacgagtttggggagctgtatcagaccataatggacgagcgcgacaatgaggaggacatgagggaggccttcaacgtcttcgaccagaaccgccgacggcttcatcaccgtcgacgagttgaggaccgtcttgtcctccctcggcttgaagcanggaagaaccgttcaagactgcaaggccatgatcttcaaggtcgatngtgatgga

SEQ ID NO: 265245 - DNA, 378 bp, Glycine max
taaaaaaaaaaaaaaaaaaaaaaaaataatatttaaaaaaaaaaaaaaaaaaaaactggaaaggttataaaaaattggtagccacaaaacaacaatcttatatatactataataatatctctacaatctttttataaaaccttttcttttatattctattacatggtccttttcttttttattcttatttatttacttttctttttacaatttttttttcttttttttgtttttcattatttttttattcctttatttttttttcttctacttttatttattacattattcttatctttcaacattcttttatctttatctcctaatctcttctttttctcttttatgttttttatctattatattttttctaccttt

SEQ ID NO: 265246 - DNA, 362 bp, Glycine max
ctcccccaaatcgtagatctacggttaaattggtgtagtgtggtaagatgggagggggatttagagtgcttcacttagttaggccatttctctcgtttcttcctgaagttcaaactgctgacaggaaagtgccatttagagagaaggtcatatacactgtgatctctcttttcattttcctggtttgtagtcagctccctctatatgggatacactcaacaacaggtgctgatccattctattggatgcgtgttattctcgcttcaaaccgtggaactgtcatggaacttggaatcacctccaattgtgacttctgggctagtaatgcaacttctggctgggtcaaagatcattgaaatgac

SEQ ID NO: 265247 - DNA, 388 bp, Glycine max
  unsure (1)..(388): unsure at all n locations
cccacgcgtccgcccacgcgtccgcccacgcgtccgctcaagcattgcatccctgttgatgtgtagtttgttttgtgctttagataaaagttctgccaaatcaagaggggttttaagatcatagtgtgtgttttgcaacaatggctaagttctttgctgctatgatcttggcactctttgccatttccatacttcaaacagtggtaatggctgctaatgaacaaggaggccacttgtatgacaacaagagcaaatatggaagtggaagtgtcaagagttaccaatgcccatcacaatgctcgaggagatgtagccagacccaataccacaagccctgcatgtttttctgtcagaagtgctgcanganatgcctgtgtgtgcccccggg

SEQ ID NO: 265248 - DNA, 447 bp, Glycine max
  unsure (1)..(447): unsure at all n locations
tacaaatagtaaatcgaggtccccatttaatgataaactttccttccatttttgttcctcgagtaggcctagtatttccggcaattgcaatggcttctttatttcttcatgttcaaaaaaacaagattttttagatacagaaaacaaagtaaaattctggggttttttattccccaattataatactaaattcaaaaaaaggagagtaatgagtataatctttcgctcagacgatgtactgatatattctatggcggaggttcgaagaacaagcaatttattttgggccgttttcactttgttaggttcattggggttattgttcgttgcaatttccagttatcttggtatggatttgttctttatttctgagaaaaatagtganttttcttttatntccgactttatttatttccatttattccacaaagggccacgatggctttt

SEQ ID NO: 265249 - DNA, 374 bp, Glycine max
cgcttgtgctgccttcgtttgcgtttttatcacagaggaattaacatatatatagcaagcgtggcagtcacactctacgaccttagctcttcctctgggttgaagaaacttgatgagtaccttctcccacgcagttacatcaccgggtaccaagctacaaaggatgatcttactgtttatgcagctttgccaactgctccatcagatgaatatggaaatgtttccaggtggtacaagcacattgatgctttgttgataatctctggtgttactggcgagggatctggtgttattgttgagggatctctagttgcaaagccttgtgcaacctcccctgctgcagaggaaacggccgcttcaagtgaagccttttc

SEQ ID NO: 265250 - DNA, 366 bp, Glycine max
  unsure (1)..(366): unsure at all n locations
annnnnnnntnnnattanncataaggttcatccatatctccgaatcctttaatcatatggcatcgttgaccgggggtgtgtccaacgatcacaacaacatcgtcatcccatggcaaacgccgcatctggtatggcagtccatgatgactgcaagttaaggtttttggagctgaagacaaagaggacacaccgtttcatagtttttaagattgaggagcagcagaagcaggtcattgtggagaagcttggtgagccagcccaaggctatgaagatttcactgccagccttcctgctgatgagtgccgntatgctgtttaatgatttgagtatctgactgaaggaaatccccaaaaacaaaaattttt

SEQ ID NO: 265251 - DNA, 465 bp, Glycine max
  unsure (1)..(465): unsure at all n locations
cccacgcgtccggaacagcagagaaacaaagttagaagtaaagaagatcatggctggtctagcaaccttggctgctgttcaaccagctacgatcaatggccttgctggaagttccctctctggaactaagctctctttcaagccctctcgccacagtgtcaaatccaagaacttcaggagtggtgccgtggtagcaaagtatggtgacaagagtgtgtactttgatttggaggatctgggcaacactacagggcagtgggacttgtatggctcagatgcaccttcaccctacaaccctcttcagagcaagttcttcgagacatttgctgctccattcacaaagaggggattgttactcaagtttctgatattgngaggtggttccacccttgcatacttcagtgcaactgcctcaggtgacattctaccaatcaagaagggaccacaactcccaccaaagctcgg

SEQ ID NO: 265252 - DNA, 363 bp, Glycine max
gcagctttgaacgacgcagaaggttcatccaatctccgaatcctttaatcgcatggcaacgatgtctaggagaaaggtcagagagccaaaggaggaaaacgtgactcttggcccagctgttagagatggcgaacatgtctttggcgtcgctcgcatatttgcctcctttaatgataccttcattcatgtcactgatctgtctgggagggaaacgcttgtccgcatcactggtggaatgaaggttaaggctgacagagatgaatcatctccttatgctgctatgcttgcagctcaagatgttgctgccagatgcaaggaacttggcattactgctcttcatatcaagctccgtgccacgggtgg

SEQ ID NO: 265253 - DNA, 309 bp, Glycine max
cggtgaaattgtttctggccctttcttggatgtcattctcaaggatatagctttgcttaatgacctaggaatccgctttgttcttgttccggggacacatgtgcagatagacaagcttctgaatgagagagggtgccagcctatgtatgttggtagatataggataactgatgatgaatctggaagctgccatggaagcagctgggggcataagattgatgatagaagcaaaactttctcctggaccttccatatgcaacattcgccgtcatggtgacaatagtcgatggcacgaagttggtgtcagtg

SEQ ID NO: 265254 - DNA, 340 bp, Glycine max
gaggcgtacgaccacccattctgcccacaacggtgtgcctttgggacaaacaaagagtatctggcgatttggcatcttgcctacgaattcgcaagcatcactctcttaacctcgttactctgcgatcagggttgcaatcggagaccctgaccctatgactgaggactacaactctgcgttctcagtgtttgcagcggaagcatgcgaaactgttggaggggaagcctgcatggcagaaatgtaccctgaagtgaagctacagccagaagctaagacaccacgagttgttacagagaacgttgagagagagtatcctggattccaataatcctaaaccggt

SEQ ID NO: 265255 - DNA, 343 bp, Glycine max
ctttcgtttcctttcattttccctcactttctcgctccccaaacgcccctctctctcctccgatggccgaccagctcaccgacgaccagatcgccgagttcaaggaggccttcagcctcttcgacaaggacggcgatggttgcattactaccaaggaacttgggactgttatgaggtcacttggtcaaaacccaactgaggcagaactgcaggatatgataaacgaggttgatgctgatggcaacggaaccatcgatttcccagagttcctcaacctgatggctcgcaagatgaaagacaccgactcagaggaagagcttaaggaggctttccgggtgtttga

SEQ ID NO: 265256 - DNA, 399 bp, Glycine max
gtcactccttgctcttagccctcctcctcttcgccgccgtggccaccgccgcgatggcgggggccgcgtccgacgccgacgacatcctgatccgtcaggtggtgccagatgttggcgaagccgaagaggaggacaacctgctgaacgccgagcaccacttcgcgagcttcaaggccaagttcgccaagacctacgccaccaaggaggagcacgatcatcgcttcggcgtcttcaagtccaacctccgcagagccaggctgcacgcaaagctcgacccctccgccgtccacggcgtaaccaaatcctccgttctaactccggccgatttccgccgccagttcttcggcctaaagccgttcggattccgggagcaggcccaaagggcgccaatcttcccaa

SEQ ID NO: 265257 - DNA, 151 bp, Glycine max
  unsure (1)..(151): unsure at all n locations
caaaccgaagaagaagccaccagngnacaagccnccagagnacaagccaccaggggacaaaccaccgggggagaagccaaaaccaccggnnaacaagccgaaaccaccggngaacaagccaccaaagaagaagccaccanacaagaaacca

SEQ ID NO: 265258 - DNA, 455 bp, Glycine max
aacactcataacacacagcacaaagcagagctcatccttgagttaaaaaatggcagcagcttcttacatggctctctcatccacatccttggctggcaaggccgtgaagctgggcccatcagccccagaagtgggaagggtgagcatgaggaagaccgtcaccaagcaggtctcctcaggaagcccatggtacggcccagaccgagtcaagtacttgggcccattctctggcgagcccccgtcctacctaaccggtgaagatccaagccactacggctgggacactgctgggctttccgcagacccagaaaccttcgccaagaaccgtgaactcgaagtgatccactccaagtgggccatgctcggagccttgggctgcgtcttcccggagttgctgtcccgcaacggggtgaagttcggagaagccgtgtggttcaaggccgggtcccaaatct

SEQ ID NO: 265259 - DNA, 362 bp, Glycine max
  unsure (1)..(362): unsure at all n locations
aaaatggcaacaatcatcgccggcaccccaactacatcaatcactcgcacaggtcatgtgctcaaacgacctgttggggcctcatcctctaccgttcttggattgccagcaatggccaaggcggngagagtgaggtgctccatggaggaaaagccttcaagcagctcaaacctagggatgggggcatccttgttagcagctgcagctgccgcaaccatgtcaagcccagcagccatggctttggttgatgagagactcagcactgaaggaactgggcttccctttgggcttagcaacaaccttcttggttggatcctgtttggtgtctttggtctcatatgggctctcttctttggctacac

SEQ ID NO: 265260 - DNA, 340 bp, Glycine max
cccacgcgtccggggaattatgtttcttcatttgataaattgtgttgaaagaatattaaaatttgaatatagtttttacactgcttttgtatcttaaaaaaaaaaaaaaaaaaaaaaaaaaaaaaaaaaaaaaaaaaaaaaaaaaaaaaaaaaaaataaaaacaaaaaaaaaaaaaaaaaaaaaaacatacaaaaaaaaaataaaaaaaataacaacacattaataaaaataaaaaggcggcggattttaaaaagtttaaactttaaaatcaatgagctttcccaagctaatgcgcataaaagggccattaattataataaccaggctaatatttaaaaa

SEQ ID NO: 265261 - DNA, 215 bp, Glycine max
gctggcgccgtcatttaacacgcactcgttctccatgaatcagaggctgttggtgctgaagccggaccatttgagtggggttggagaataaacgcacgaggttgaagttaccgcgccggcttccgctgttcttgcgccaccgggtttctatctgctgtttgtggtccatcaagaagtttccaagccacgggtttttgggtccagatggtgtgaaa

SEQ ID NO: 265262 - DNA, 348 bp, Glycine max
cccacgcgtccggccatcttaaattccttcttcaagcgatcaaggaaggtgttaatttgaagggctattatgcatggtcattttcggacagttttgaatgggatgctggttacacagttcgattcgggctcatatatgtggattacaagaacaacttgaaaagataccccaagttctctgctttttggttgcaaaagttccttctcaagtgatctgaatttagtgttcctttgacatgtctagtgtttttcttgtttatttccctagatttcatcgtatatcacttgtgttggatgtaatcaagagatcattttatcaaataaataatgccaaatggcatgtcgaagt

SEQ ID NO: 265263 - DNA, 464 bp, Glycine max
gtggataactcaatgtataacattcccactggacctagtgactacccgtctgctggaaatgaacctggtgaaaataatgagataaaaggtggaaggcctggtccatacatgcaacctcctccctggacgagccagaaccagaaccagagggctccacttgacgtcaatgttgcttatgtggaagggcgggatgctgcggaaagaggagcctctaatcaacctttgacacaggacttcttcatgtcctcggggaagcggaaacgtgatgaaattgcttctcaatataatgctggtggatatataccttagcaagatggagcttgagatgctgattcttaaatttttgaaattgaagtgtatggaaggggcatctccattgatgcaagtcactctacttctaatggaaaaatgccagcacattcagacaggccagcttctcagattcctcaatttgatggaccaat

SEQ ID NO: 265264 - DNA, 418 bp, Glycine max
cccacgcgtccgattgactagtatcattaagatggctaattcctacttatgcttgcttgtcttgatccttgtagctctgctcctcacccctcaagggcttgctgatgaatctgattcttactataagccaccagtttacaagaaaccaccagtgtacaagcccaagcccaagccacccattcacaagcccaagccacccgtttacaagcccaagccacccgtttacaagaaacccccttatggtaagtacccaccagttcaagacaacgatcacttctaaaccatgcaacaaggcatgttaatgttaactatctactaaaataaagaggttcagttaacctactacgtacgttgctccttttaattcctaaatcgtaatttaacccaaaaaaaccccttttttttttttgtagggatg

SEQ ID NO: 265265 - DNA, 379 bp, Glycine max
cccacgcgtccgcccacgcgtccgcccacgcgtccgggatcgtggtaataacaacaataacggcgttgttgttgttgtcgtttgggtgcgaacggggacacgctctgaaggtgccgtttagagtaaacgacgtgctccccgtgctgccgcgcgagatctcgtggccggttctgaacaacctgcacagcgccgtcgacctgctcccttatttcgttgggtccctcactcctgccaatgcctccgtcaagtggaaaggggcatgcttcttcgataacaccgccaagattgagttcgcaccctctttggagggtgccactctctatctcaagacagaggctgcacatagctggacctgcatggatttgtatgtttttgcaac

SEQ ID NO: 265266 - DNA, 139 bp, Glycine max
ccaacgcgtccgaaaaaaaaaaaaaaaaaaaaaaaaaaaaaaaaaaaaaaaaaaaaaaaaaagaaaaaaaaaaaaaaaaaaaaaaaaaaaaaaaaaaaaaaaaaaaaaaaaaaaaaaaaaaaaaggaataaaacccaaa

SEQ ID NO: 265267 - DNA, 428 bp, Glycine max
  unsure (1)..(428): unsure at all n locations
aaaagagggcnntcaaaatgcaaacagccttaaccttcgctgcccccaacgttgtgccattggcacccacaaagagtgtctcccatattaccatctttcccaccaaattgaaagccccgcgctcctcacctcgttactctccgattagggttgcaaccgtggagcccgacacttcaactgtcgactacaactctgcgttctcagtgtttcctgcagaagcatgcgaaactgtaggaggggaagcctgcatggcggagatgtaccctgaaacgaagctacagccagaggctaagactccacgagtcgttacagagaacgttgagagagagtatcttgaatacgatgatcctaaaacggtatttcgaggagaggcttgtgatgatcttggaagaactttctgtgagaccgagtatcagaagggtgtctac

SEQ ID NO: 265268 - DNA, 342 bp, Glycine max
gaaacgccatcggtggccgtgatggaaaattctatgtggtgactgaccccagggatgatgaccctgtgaacccgaaacccggcactcttcgccatgctgtgatccaggataagccattgtggattgtgttcaagagggacatggttattcagctgaaacaagagctgatcatgaacagcttcaagacaattgatggtagaggagtcaatgtgcacattgctaatgaaccatgcttaacatttaagttggtaaccaatgtcataatcaatggttggaaaattaatgattgcaaacttactggaattgctatggtaagaacttcccaaaccaatttgggttgaa

SEQ ID NO: 265269 - DNA, 398 bp, Glycine max
cttcattctatgtttgacttaaaacttaaaaagtagataacattcattctgggagtgactcgaatctattttgaggttgtacccgcattttcattatatataagtctatttatttatataaaaaaaaaaaaaaaaaaaaaaaaaaaaaaaaaaaaaaaaaaaaaaaaaaaaaaaaaaaaaaaaaaaaaaaaaaaaaaaaaaaaaaaaaaaaaaaaaaaaaaaaaaaaaaaaaaaaaaaaaggggcgccctttttaaaggctccaagttaacttacccgtccttccaacctcaaacctttttaatagggcccctaaatttaaattaatggcccgttttttaaaaacttcgatacctggaaaacccttggcttacccaaattaaatcggccttttttttt

SEQ ID NO: 265270 - DNA, 358 bp, Glycine max
aagactgacagccttatggaataaatggtggcatggcttcaatggaaggagtagaggcatctgtcaagaaaggaaagggaaagggcttttaccagtttgtagacatatacagtgctaatgtcgatggttacagtcctatctactacaccaaggactggtctccaaccggtgatgtctacgctggctgtacgactggcttggctatctgggctgtgactctacttggtcttcttgctggtggtgcacttcttgtctacaacacaagtgctttggcgcaataaactttgcaaatcgatgttttaagctcaaacttagtccatgtaactatctaaaaatgaagaattattcatgaaatact

SEQ ID NO: 265271 - DNA, 387 bp, Glycine max
tccttcaccaccatcaaacaaagcctcatgccccaaggacacattaaagcggggtgcgttgtgctgatctcttaggacttgttaacattattgttggaactcctccttcgagccagtgttgtgcattgatcaagggtttggcggatttggaagctgcactttgcctatgcaccgcaattaagagcaatgtgcttggaatcaacttgaacgtacctgtgacgctcagcgtgatccttagtgcttgtcaaaagactgtccctcctggtttccaatgtccctcctgagataatcaaattaggttcatgagatatctctctcatcagagaaatgtttagatatgcacttaacatgaaattgattgactgcctatgtaagcatttctttttt

SEQ ID NO: 265272 - DNA, 436 bp, Glycine max
cttcttcggtgagagttagagagagagagagagagagagaaggctctttttttcttttttggtggtttctcttgtttttttttttgtaggtactgaggaagaaagaccaaaactttatccgcttgcttcacttagctcaagagcgtacaattcaggcaaaggccttgaagtcggagtgtgtgttaaggatttcttaggagttgcttctgtcttgactgaagaaatggaggtatatggcaaatctatggttgcaggtcctgcaaatgttatttttctgtcaagtattttgggccaagaaggtccagttcccggtcacaaatgcgactggaaatgtcaaaatgaacatgtttgtggaaacatgtatcgctgcaagctaactgggctgactcacatctgtgataaaaactgtaaccagagaattctgtatgacaaccat

SEQ ID NO: 265273 - DNA, 468 bp, Glycine max
agccactctaaagaaaatggcggtgcctctactctcgaagaagatcgtgaagaagagggtgaagaagttcaagaggcctcagagtgacaggaaaatttctgtcaagacaaactggcgcagaccaaagggtatcgattcccgtgttaggagaaagttcaagtgatgcactttgatgccaaacattggttatggttcagacaagaagacccgccactatctccctaatggttttaagaaatttgttgttcacaatgtgaaggacttggaactgctcattgatcaccaccaggcttaacgggcttaaaatggccaacatatatccaccagaaagaaggaaggtatagttgagagaaccgcgcaacttgatgttggtgtgacaaacaaaacagccagattacgcaaccaggaagatgaatagtctaaatgacttaaaaagtcacttatctgtagtgattcagtagttcaata

SEQ ID NO: 265274 - DNA, 277 bp, Glycine max
  unsure (1)..(277): unsure at all n locations
gaaagaaaaactctagacggggagttggcccgtgccaaggtaacagcaaacagagtacctgttgtggttgcaaatgaatggaaagatgccaatgataaagtgatgcctgtcaaacaatggcttgaagaacgccgattcttgcanggagaaatgcagcaacttcgtgacaagcttgctatagttgagcgcgctgcanaatatgaagcacagttgaaagaaaaatatcatttacgacttatagtgctagaggagagtttgagaggaaattctaacagta

SEQ ID NO: 265275 - DNA, 466 bp, Glycine max
aaatgaaaaaaaatcattcacggtcacattttcatcctcgggttcgccacagcaaagagtgaacgcttttggaagggtagaatggtccgatgggaagcacgtggttggaaccccaatttcgattaattggggttgatgcaaggttcatcactcactcgaatagggggtgtgtcttgattggttagtgattatagtatttatatgttactattattattatttaactttttttgcaaacaaaaatgttgggtttatccaggttgacattgatgatagcggggacctcgtgcttgattggtgttggttctgtttgttccctgggagaaatgttgcaaaggggaaaaaatgtttggctcatgtgtttcttttcttcccggtgtacagcgttctaatcattgatgaatatttttcgtcgaccatcttgacattaaagtttatgttcaactactttaaagtgaattcattt

SEQ ID NO: 265276 - DNA, 259 bp, Glycine max
ttgttggcgaatactcactcacgcgtttgtagttgcaggctctaatcagatcccaaatgatcaactttgtgcttctcattagtcgccaagggaaggtgagattgacaaaatggtactcaccttattctcagaaagaaaggagtaaggtaatccgtgagctcagtggaatgattctttcccgtgcgcccaagcaatgtaattttgtggaatggcgaggacataaagttgtttataaaaggtatgctagtctctatttctg

SEQ ID NO: 265277 - DNA, 461 bp, Glycine max
cccacgcgtccgcccacgcgtccgcccacgcgtccgctcagaagaagaagagagaggtctctcaacaatggccactgccactgtttcaatttcaactttatgcgctactttcggaacccattgcgccatttcccacaacccaaaacctctattttctcaacctttcaatctcaatcactttccttctaactcttacaagctcgctttctcgcctcgctcacctctttcaccccttcccaaggcctctgaatccgcggtagccgaaaccgaacccggttcggccgagcccgaaccggcccaaatttccccggcccaacctccctcctgggaacccggtctcttcgctgtcgtaatgattggcggacgccaatatattgttcacccggggcgacatcttactgttcagaggttaaaaggtgctaatgttaatgataagattgccttacacaaggttttactgg

SEQ ID NO: 265278 - DNA, 398 bp, Glycine max
  unsure (1)..(398): unsure at all n locations
gagtttttgaaaactattactggcaagaaggagaccctcattgaccttacaattatagaaatcctgtcaaggcacgcatctgatgagttctaccttggggagagagatggtggtgacttctggacttctgatgctggtccactagaggccttcaagaggtttggaaagaagcttcaagagattgaacataagcttatacagaagaacaaggatgagacgttgagaaaccgcactgggccagctaaaatgccttacactctgctctatccttctagtgaggagggattgactttcagaggaattcccaacagtatctctatctaagggctctctcattgaggttgctgtactactctgcctgnttttcaataatgtgaaataggaagaatatgattcct

SEQ ID NO: 265279 - DNA, 377 bp, Glycine max
tgaaaatatgggcttctcctcctttctgggtcgcgtcctctttgcttccctcttcatcctctcagcatggcagatgtttaatgaatttgatgacaatggtggacccattgtaaaggagttgattcccaagctcactgttgtgaggagaaatttatcctccaagctgggggtagcgataccagatattaatgttcggacagtcattgcctctaccatgttactaaagggggttggaggagttctatttgtgcttggcagtacatttggatcttatcttttgctcttgtatctggggatttctactccaattctgtatgatttctacaactatagatctaatatccctgaatattatttactgctgaatgatttcattc

SEQ ID NO: 265280 - DNA, 412 bp, Glycine max
  unsure (1)..(412): unsure at all n locations
aacaaatcaaagccatggccacctccaacttctctattgttctctccgtctgcctagccttctttttggtgctacttaccaaggcacactcgaccgataccgcttctttcaccttcaacaagttcaacccagtccaaccaaacattatgctccaaaaagatgctagtatttcatcctctggggtgttacaactcaccaaagttggcagcaactgcgtgcccacctcgggatctctcggtcgtgccctttacgctgccccaatccagatttgggacagcgaaacctgcaaggtagccagctgggctacatgctttaaattcaacattttcgcacccaacaaatcaaactcagctgacgggctttgccttcttcttggcacncggttttcccgggggggggggtttttttttct

SEQ ID NO: 265281 - DNA, 197 bp, Glycine max
aacaagtgtactgaaccttgatagtattgagaaaaaaaaaaaaaaaaaaaaaaaaaaaaaaaaaaaaaaaaaaaaaaaaaaaaaaaaaaaaaaaaaaaaaaaaaaaaaaaaaaaaaaaataaaaaaaaaaaaaaaaaaaaaaaaaaaaagctaaaaaaaaaaaaataaaagaaagaaaaaaaaaaaagggggactca

SEQ ID NO: 265282 - DNA, 458 bp, Glycine max
  unsure (1)..(458): unsure at all n locations
cccacgcgtccgcccacgcgtccgggaatttcgatgctcagtcatctcttttaccattctcttctctcttgctcttgcaggagagagccatgtccatgcatcgctacctgaggaagattattgggaagctgtttggccaaacactcccattcccactgcactgcgagagcttctaaagcctctccctgcaggtgttgaaatcgatgaactccctaagcaaattgatgatacacagtacccaaaaacattcttctataaagaagaccttcatccaggcaaaacaatgaaagtacaattcaccaaggcgtcctaatcccaaacctatgggggatatacatgggtaacgggtattaaagacacctcttaagaaggatataggtttgaagagatattccttaagaaagaagcgtttganggagaagagaagttttgtgcaaaatccttgggaacagtaattg

SEQ ID NO: 265283 - DNA, 310 bp, Glycine max
cccacgcgtccgactagaaacagtgtgatgaaaatgaaggtccttgttttcttcgttgctacaattttggtagcatggcaatgccatgcgtacgatatgttccctctccgaatgaacactggctatggtgcccgtactccggaggtgaaatgcgcaagttggaggcttgctgtggaagcacacaacatctttggctttgagaccattcctgaagagtgcgttgaagcaacaaaggaatacatccatggcgaacaatatagatcagactccaaaacagttaaccaacaagcttacttttatgccagagacc

SEQ ID NO: 265284 - DNA, 420 bp, Glycine max
cccacgcgtccgaattctctcttatcttctttgttattacctctttccaaagtccaaattttctagttccaccaaaccaaaccaaaccaaaatggcagcagcctcagcctcatccatgatatcaacaccagccttatctccaaccatccaaaagcaccatcatttgaagccatccaacgtgtgcttccaaggtcttagacccctcgcaaggttcaccaaagcctcatcaaccaaagtgagcaccaccaccaaaagggttattccaaagggtggtgttagagctgaactcaactcagcccttgtgataagcctcagcactggcctctccctcttcttgggaaggtttgtgttcttcaacttccaaagggagaacgtggcaaagcaagttgggccccccccttttggggaaaaaagcagaac

SEQ ID NO: 265285 - DNA, 136 bp, Glycine max
cttaaactacattcccatttgtttttcctttttgagatttcatcatcctgtatttttggtttctgttttcggacttcaatggaaattaatggatgagaactaatgaataagctattgtgttgtgttgctttgtttc

SEQ ID NO: 265286 - DNA, 394 bp, Glycine max
cccacgcgtccgctgagtactggttcgggaacttctcccaagtgtgaggagcatagtgaagaatggcattgcccatggggttttacagttgttgatgatgtggctccaacattcaaaacaattttagaagaaaactacttgtcaacaaaatctccttttgaagatacaacacaaaataggatgttatggtggaagcggagaaagaaccttgatcactgtcttgataaattactgaggaaccttgaagagtcgtggtttggttcatggaaatgcttgcttcttggagaatggttgaactgcaaaaaatttgacttggtgcttaagaatcttgggaatgatttaagatctaaatgcaaattggatgtaaatgaaggtcttcttaaaaattattctt

SEQ ID NO: 265287 - DNA, 274 bp, Glycine max
  unsure (1)..(274): unsure at all n locations
aacgcgcagaacgaaccccnatcaaagaggcacaatggctacaatggtggcaccaaggcaccagggggacgggctaaaaacggggccaagtgtagtgctggcgaatcatccactgaaccctatatcagaggacactactaagcacacgcacatgaatctgctgccacatcatacaagacaaaatagcaggcacgacaaaaaggacaaatagggagcactaatccaacacactacgagaagccaaaagctcaaagagcagcagaagacaaggcag

SEQ ID NO: 265288 - DNA, 406 bp, Glycine max
gcttcccttccccctcttcttagcaaatgtttcaatattccaaggccatgttgcttgatttagttcttgtttcctttgtcctcttgagttctatcagagatgggagtgcagggatcaccagctctttcgttcggccacagtggccaggagttgacattcccgtggatcatgaagtatttgcagttccaaagggttataatgctcctcaacaagtgcacatcacgcaaggtgactatgatggaaaagcagtaatagtctcatgggtgaccccagatgaaccagggactcgccatgtgcaatatggcacatcaaaggataagtttaaaactagtgcagaaggcacagttgcaaactacactttctataactacaagtcttggcctttttttacccccaaatttttttt

SEQ ID NO: 265289 - DNA, 418 bp, Glycine max
gcaggcgtaacaaaagttgcgtagccatactctgattcattagtgaagaaaaatggggaccagcatcgccggcatcccaactacatcgatcactcgcgcaggtcttgtgctcaaacgacctgctggagcctcgtcctttaccgttcttggattgccagcaatggctaaggcagggaaagtgaggtgctccatggatgaaaagccttcaagcagctcaaatatagggatgggggcattcttgttagcagctgcagttgccgcaaccatgtcaagcccagccatggctttggtggatgagagactcagcactgaaggaaccgggcttccctttgggcttagcaacaacctacttggttggatcctgtttggtgtcttcggtcttatatgggggtgggccctttttacacctttttctact

SEQ ID NO: 265290 - DNA, 345 bp, Glycine max
cccacgcgtccgcccacgcgtccgaccacgcgtccgcattcatagaaataccagcttgagaaccaccagcggtggagacaatgatgctgatggacagactcgtgagcatgctattcttgcttttaccctcgtggtgaagcagatgatctgctgctgtatcaagatggatgccactaccggcaagtactctaaagctacgtatgatgaaatcgcgaacgaagtatgttactacttgaagatggtgggatacaacctaaacaagatggcatttgtgccacactgtggttactggggtgacaacatgattgagaggttcaccaaccttgactggtacaagggaccaac

SEQ ID NO: 265291 - DNA, 384 bp, Glycine max
ctcataagctttacttaattagcaaatccaaatatggcactttcttcttcatcatcttcaacatccatatttgctttagctttgttcactcttttgcttataggaagttcttcagctcaactctctgagaacttctatgatagtaaatgtcccaaggttttctatgccgtaaaatccgttcttcaatctgctttggctaaagaacctcgccagggagcatctatcgttcgcctcttctttcatgactgctttgtcaatcttggagggccatattggaaggttaaacttggtagaagggattccacgactggatttttcaaccttgctagcagtggtgtgctcccaggacctggttcttccctcagcgaccttatcaaaagattt

SEQ ID NO: 265292 - DNA, 375 bp, Glycine max
  unsure (1)..(375): unsure at all n locations
caaatccatatcacagaaaaccattttggcttctcaaaaccccactcatcatccatatcacaaaaaactattttggcttctgcctttccttttccagggagctcattgacaatggctgaaacaaagtgggtcatgaaggacaaaagatggtctctccatggaatgacagctctagtcacaggaggcacccgaggcatagggcatgccattgttgaagagttagctgagtttggagcaactgttcatatatgtgcacgtaatcaagatgatattgataaatgtttnaaaaagtggaaaaaaaagggcctaaatgtgactggttaagaatggaattaacaatgtcctgcccaccttaaaaaattattggaaatggtg

SEQ ID NO: 265293 - DNA, 418 bp, Glycine max
ctttgaatgaacccttatcatttagtctcaatggctacaatggtggcacctttgcaccaggtagatgttctaaatacgttgccaattgtagtgctggcgattcatccactgaaccctatatcgttggacactacttattacttgctcatgaatctgctgccacattatacaagacaaaatatcaggctcgtcaaaaaggacaaattgggatcactaatccaacacactactttttgccaaaatctcaaagtgctgcagattacaaggcagcaagtagagctctggacttcttctttggttggtattctgatcccggtttctatggtgactatccggagagtatgaaatcttcaataggttctaaggttccaaaattcacaaaagcttaatcttaaaggcttaaaaattccataaaatt

SEQ ID NO: 265294 - DNA, 458 bp, Glycine max
gagaacgtggctggggagtggaaccacacctctggtcaatggaatggagacgctaatgacaaaggtattcaaaccagtgaggattacagattctatgctatttcagctgagtaccctgaattcagcaacaagggtaagacactagtctttcaattttctgttaagcacgaacagaagcttgactgtggtggtggctacatgaagttgctcagtggggatgttgatcagaagaaatttggcggggatactccttacagtattatgtttggcccagatatctgcggttacagtaccaagaaagttcacgctatttttacctacattaccccaaacaattggttaaaaaaggatgtccttgggaaaattgacaacttaattaaggttacacatttaatcttcggtcggattcaacctaaaggattccgattggtaatgttgagaagccaactggtaatctc

SEQ ID NO: 265295 - DNA, 350 bp, Glycine max
ctcgtcctcaatatctccgttggcgagagtggagatcgtctcaccagagccgctaaggtgttggaacagcttagtggccaaacccctgtgttttccaaagcaaggtacacggttcgttcctttgggattagaagaaatgagaagattgcatgctatgtcactgtcagaggtgacaaggcaatgcaacttttggagagtggtttgaaggtgaaggaatatgaacttctcagaaggaacttcagtgatactggttgctttggctttggcattcaggagcatatcgatttgggaatcaagtatgatccttcaactggtatttatggaatggacttctttgttgttctggagcg

SEQ ID NO: 265296 - DNA, 401 bp, Glycine max
aatctcttcgttgtcatttgtctctcacaacctcatcaccaccaccactcccacatggtcacggttccaatctgccaaatatagaaaaccaatacgccaccacattagtaaaattgcatgcagtgaaaacacactcgaaggagaaaagctcccacatcggaggaacgttctacttggcctaggaggattttgcggcgctgctgttatgtctctgaacaacaagaacataccttttgcctctgctgctcccacacccatgttccctctggtgttggattccgctgtgagcacggtggtgaagaggccaagcaagtctaggagcaagaagcagaaggaagaggaggaggaggttctcgtgattgaagggatcgagtttgagggaaacacaaaccccaattttt

SEQ ID NO: 265297 - DNA, 381 bp, Glycine max
gtattgactacctctgccggcatcatggatcacgaagaagctaggagaaaaaatgttggtggtaaggtactgggtttcttctactagagtttaatttcgattaagaggatgtcaggaatttcaattgagattcatggattgtaatggaggatatgctaggcccctagtaatatcaagcatagcaggagctgttttgtgatgttccttattttgtttgcaaaaccaagttggtaactataacttttattttcttttatcattatttttctttataccaaaatgtactggccaagttgttttaaacagtgagaactttgattagaaagtgggagcatggcgatgtttgagttggtgtgggcgagtcatgatatttcattgaaa

SEQ ID NO: 265298 - DNA, 421 bp, Glycine max
gatgattggctgacaaactacgtcgattactccaacgtttttctcatggggagtagtgccggaggaaacatagcctacaacgcgggtctacgagcagccacggttgatggtacttataatcagattcccaagatcaaagggcttattttggttcaaccatttttcagtgggacccaaagaaccggttctgagctgaggctagagaacgaacctcatttggcgctgtgtgttaatgacgcgttgtgggagttatcgttgcccgttggagttgaccgtgatcacgagtattgcaatccaacggcagggaatggtcctaagagattggaaatgatcaaacggcgtggatggtgggtgctggttaccggctgtggcggtgacccacttgttgggggggaaaaattttccccggggggtcaggtgc

SEQ ID NO: 265299 - DNA, 300 bp, Glycine max
cttacaacgaaaccctcttcatcttgttctatctgtgacgagcatcatggcctcaagagcagtgttattgttggctatgtgtgtgcttccggcgatggttgtggccattcgcccagcaaagaaccctttttgcgtgaagggtcgtgtctactgtgacccttgccgtgctggttttgagacctcagctaccacctacattgctggtgctgagattatgttgcaatgcaagagcagggttagcaacgaggttgtgtacacgaagaaggtgtacaccgactcaaccggagcatacacaatgta

SEQ ID NO: 265300 - DNA, 312 bp, Glycine max
  unsure (1)..(312): unsure at all n locations
cccacgcgtccgctgagtactggttcgggaacttctnccaagtgtgaagagcatagtgaaaaatggcattgcccatggggttttacagttgttgatgatgtggctccaacattcaaaacaattttagaagaaaactacttgtcaacaaaatctccttttgaagatacaacacaaaataggatgttatggtggaagcggagaaagaaccttgatcactgtcttgataaattactgaggaacctttgagagtcgtggtttggttcatggaaatgcttgctttttggagaatggttgaactgcaaaaattttgac

SEQ ID NO: 265301 - DNA, 395 bp, Glycine max
  unsure (1)..(395): unsure at all n locations
gtgcgatggcaagttacaatgtgaagctgataaccccagaaggagaacaagaatttgaatgcccagatgatgttttcattcttgaaaaggctgaggaatttggcattgaccttccctactcatgcaaggctggtgcttgctcttcctgtgccggcaaagttgtttctggcaaagtcgaccaatctgatggtagttaccttgatgatacccaaatcggtaacggatttgttctcacctgtgttgcttatcccacctcagatgttgttattcagacccaccaggaggatgagctattctagttctatatctcatgtctctntctatcttgcattttcatntatatgcttgnttatcatatcaccaacttcaactgtagtacctacgtaccatgtcat

SEQ ID NO: 265302 - DNA, 326 bp, Glycine max
gttttcttcatatcttccttgtcactgcccgtgtgtcgccgccatggccaccgtcaccacgcaagcctccgccgcaattttccggccatgtacctcgaaatcgaggtttttgaccggctcttccggtaaacttaaccgggaagtgactatgcggccaatggggtgccctccttctgcctctttcaaggttgaagccaagaagggagagtggttacctggcttggcctccccaacttacctcaatggcactcttcctggtgacaatggatttgaccctctggggctagctgaggacccagagaacttgaagtggtacgttcaaaccg

SEQ ID NO: 265303 - DNA, 358 bp, Glycine max
gatcgaagtttcacatcagccttatccagtttagggtttcggttccttaccctacctttgacgtatcgaaaccttaaatttgggattaggtctgagcaatctggttggtagaacctttggtcttagagagtcaagttttatgtctggattagacgatcaaattcctactgccttcgatccttttgctgatgcaaatgctgatgactcgggtgctgggtcaaaggagtatgtgcatattcgcgttcagcagcgaaatggtacgaaaagcctgacaaccgttcatggattgaaaaagaattcagctataacaagatactttaagacgttaagaaggagttctgttgcaatggaacagttg

SEQ ID NO: 265304 - DNA, 376 bp, Glycine max
  unsure (1)..(376): unsure at all n locations
gccacgggctgccgcctgaccatgggcctcgtcggggtctacgatttcgagggcagggtcatcggcgacgcctcgctcacaaagcgcccgatgggccgcgtgttgaacccgctgcgcgaaatgggcgtgcaggtgaaatcggaagacggtgaccgtcttcccgttaccttgcgcgggccgaagacgccgacgccgatcacctaccgcgtgccgatggcctacgcacaggtgaagtccgccgtgctgctcgccggcctcaacacgcccggcatcacgacggtcatcgagccgatcatgacgcgcgatcatacggaaaagatgctgcanggctttggcgccaaccttaccgtcgagacggatgcggacggcgtgcgca

SEQ ID NO: 265305 - DNA, 356 bp, Glycine max
cccacgcgtacggttattttttatttcttgctctttctctgtgtcgatgggggtaaagggatgtaaggggcttgtggccggaaaaaccactgcatcgaacaaggacaaagacaaggataagaaaaggcctgtctctcgttcatcccgtgctgggatccagtttcctgtgggtcgtatccataggcagttgaagcaaagggtgcaagcaaatggacgtgtggtggctactgctgctgtgtacttggcctccattctggaatatctgactgctgaggtgctggagctggcggcgaatgctagcaaagatctgaaggtgaataggatcacaccaaggcacttgcaactcgctatcatgg

SEQ ID NO: 265306 - DNA, 347 bp, Glycine max
ccatttcccactgtcttcgattttagggcattaaatctgccatggcagcagcacccgctagagctcgtgccgattacgattacctcatcaagcttcttcttatcggcgacagcggtgtggggaagagttgtctacttttgaggttttctgatggctcattcacaaccagttttatcaccaccattggtatcgattttaagataagaaccattgaactagacagcaaacggattaagttacaaatctgggatactgctggtcaggagcggttccgaactattaccacagcttattaccgtggagccatgggtatcttgctggtttatgatgttactgatgaagcatct

SEQ ID NO: 265307 - DNA, 386 bp, Glycine max
gaagaatcagagaatggcaactatgactggtgtgagcctttcatgccccagggtttgcttcaacgcatcagcctcaccgcaaaacgcgcatgctgtaaagttctcacttccacccagccaagcagtgcgaccgggtagtatcaagttgggtcgcgtgatgaggatccgacccgttcgcgctgcgcctgagcgcatatcggagaaggtggaggagagcataaagaacgcgcaggaggcgtgcgccggcgatccgacgagcggcgagtgcgtggcggcgtgggacgaggtggaggagctgagcgcggcggcgagccacgccagggacaagcaaaaggaaaaggactccgacccgctcgagaattactgcaaggacaacccggagacca

SEQ ID NO: 265308 - DNA, 380 bp, Glycine max
cccacgcgtccgacaagtagttgagaactaagaagaaggaaatggcttcctcaatgatctggtccgcagctgttaccaccgtcaaccgtgccggtgccggcatggttgctccattcaccgggcctaaaatcattgcttggtttcccaacagggaggcccaccattgcctttacttcaatggttggcaccgttggaggagtccattgcttgcaggtttggccaccaattgccaggaagaagttcgggactctttcctacttgccagacctggatgatgcccaattggcaaaggaggtcgaataccttctaaggaagggatggattcctcgcttggaattcgagttggagcacggtttcgtgtaccgtgagcacaacaggtc

SEQ ID NO: 265309 - DNA, 409 bp, Glycine max
cgagataactagaaacagtgtgatgaaaatgaaggtccttgttttcttcgttgctacaatgttggtagcatggcaatgccatgcgtacgatatgttccctctccgaatgaacactggctatggtgcccgtactccggaggtgaaatgcgcaagttggaagcttgctgtggaagcacacaacatctttggctttgagaccattcctgaagagtgcgttgaaacaacaaaagaatacatccatggcgaacaatatagatcagactccaaaacagttaaccaacaagcttacttttatgccagagacctcgaagtccatcccaaggacacatttgtgttcagtatagatggcaccgtactctctaatattccatactacaaaaaacatggatattgggtggagaaatttaac

SEQ ID NO: 265310 - DNA, 432 bp, Glycine max
cccacgcgtccgatcagcctctaatatttttctcactgtctctccagagaacttgatagagagatggcagctgcaacatctggtgctgtgttaaatgggttgggatcttccttcttgagtggaggaaacaggagccaaacccttctggcctctgctattggaggcaaagttggtgctgctgttactgttaatcccagaagactcattgtggtagctgctgctgcaccaaagaagtcatggctccctggtgttagaggtggtggcaatctcgtcgacccagaatggcttgatggatcgctaccaggtgactatggttttgatccactaggccttgggaaggacccagcattcctcaaatggtacagagaagctgagctcattcatgggaggtgggcaatggctgcagttctaggaatctttgttgggcaagca

SEQ ID NO: 265311 - DNA, 434 bp, Glycine max
  unsure (1)..(434): unsure at all n locations
ctcacgcgtccgaaatgaaaatggataaattgataagggagtctgctcaaatttctggcgtgacctgaagccaggagctgtagtcacaataactggacctgttgggaaagaaatgcttatgcccaaatatcctaatgccaccatcatcatgtcgggaaccggaaccggtattgccgcatttcggtcatttatatggaaaatgttctttgagatacacgaagattacaagttcaatggtttggcatggctctttttgagtgaccctacaagcagcttattgctatataaagaggaatttgataagattcactataaatatcctgacaactntaagcttgacttcgctgtaaggccagagcactcatactataacggatagaagatgtacatacaaacccgaatggcataatatgcataagagctgagggaattac

SEQ ID NO: 265312 - DNA, 466 bp, Glycine max
  unsure (1)..(466): unsure at all n locations
ggggaggattgtggggactggaccgatggggaggattgtggctaaagatgttgaggcatttgcggcggcaggtaatgttgcagcggcagcaccggcaccggggaagagtgcagcacctgccgggatggagttgggatccgtggtgcctttcaccacaatgcagagtgctgtgagtaggaacatgctggagagtttggcggttcccactttcagagttggttacaccatcaccacggatgcactcgatgccttgtacaagaagatcaagtcaaagggagtcacaatgacagcattgcttgctaaggctactgcacttgcgctggttaaacaccctgttatgaactctagttgtagagatggtaatagctttacatataatagcagcatcaatattgcagttgctgtggctatagatggcggattgattacaccagtgcttcanggtgctgataagattgatgtctat

SEQ ID NO: 265313 - DNA, 277 bp, Glycine max
attcacatcataaagtgtttgaaattcaaaattctcaacacttctcttcaaccattctcttgtcagatgaatacaacaatgggatttcgtttacctggcatcagaaaggcatcaaaagcggcggacgcaccaaaaggctatcttgcagtctatgtcggagagaaattgaagcggtttgtgattcccgtatcatacttgaaccaaccttcattccaggacttgttgagtcaagctgaggaagagtttggatatgatcatcccatgggtggcctcacaa

SEQ ID NO: 265314 - DNA, 135 bp, Glycine max
caaatctgttcctatctaacgaagcgctattggatcaaatgacaaagacattgttgagaagaagatggcttttcccagatgagatggttgttgctatctgctccaataacgaatcattggtttaactgaataact

SEQ ID NO: 265315 - DNA, 457 bp, Glycine max
  unsure (1)..(457): unsure at all n locations
atcgagataactagaaacagtgtgatgaaaatgaaggtccttgttttcttcgttgctacagttttggtagcatggcaatgccatgcgtacgatatgttccctctccgaatgaacactggctatggtgcccgtactccggaggtgaaatgcgcaagttggaggcttgctgtggaagcacacaacatctttggctttgagaccattcctgaagagtgcgttgaagcaacaaaggaatacatccatggcgaacaatatagatcagactccaaaacagttaaccaacaagcttacttttatgccagagacctcgaagtccatcccaaggacacatttgtgttcagtatagatggcaccgtactctctaatattccatactacaaaaaacatggatatggngtggagaaatttaactcgaccttgtatgatgaatgggttaaacaggggcaatgcaccgcac

SEQ ID NO: 265316 - DNA, 370 bp, Glycine max
gcaaaggtttaccaagaaccccagaggcattacccttcttcagaggatgggaattggccttgtaaggcacacactgatcatgatcattgcatctgggactgaaagctatagactcaaggttgcaagagaacatggggtagttgaaagtggagggcaagtccctttgagcatattcattttgcttcctcagtttatactcatgggaacttgttatgcattcttaaaagttgcaaaaattgagtttttctaatatcaatccccggaacacaataaaagcattggaacttcatattccacaactaccttaagccttggtaacttcatcaattcctttcttctcttaacagtgtcaaatgtcaccaagaaaaat

SEQ ID NO: 265317 - DNA, 431 bp, Glycine max
  unsure (1)..(431): unsure at all n locations
ggttgtgcaagacgaggtgcagtgcacattcgaggcccaacttgtgcactagggcgtgtggcacgtgctgtgtgaggtgcaagtgtgtcccacctggtacatctggaaatagggaactatgtggaacctgctacactgatatgaccacccatggcaacaagaccaagtgcccttagagaaacaaaaagcttcattagattggccaatttgtgcttcgttcattatgcatcaaagtttaagtgtactcctatgtggggtgcaattctgtttactatagcgatggatttgtgtgcactactatggctatattaattgactgttagtgtttttatttaaggtgtgcctgtatgattgatgtgatgagctaatcattgtaactttgtgccttntgtttgcgtaatataaaatgtagtacattacttgaccctttt

SEQ ID NO: 265318 - DNA, 444 bp, Glycine max
cccacgcgtccgagcgtatccgcgagtctcgatttccttctctgcaagcggattggtcgcttgtgaaggaggaacatgtattcaagagggagcggcggttacggccaatcgtacactggtcaatccgcatatggccagaacctgggtggcaattattctgggagttctgttggagggcatgatgtgggtcagcattctgtggcttctaggcattcaacaattttaggtggttctcaagacgttgatgttggtgggtataggccttcggctgcgacccagtatgggggacagtatagttctggttatggctctgctgcattgagcaatgcacagcaagtcccttcattgagtaccaagggttctgcatcatcagctttagatggtcctggaggctatgctttgggtggctctgattcacctaaagttgcatcttgagattatgtc

SEQ ID NO: 265319 - DNA, 426 bp, Glycine max
cccacgcgtccggagaaggtatgaagaggagggatctgaaggtagcagattccataagttgttcaatgagtgtgaagctatgttgggtaacttctttgtttcagattatattcctttcatgggttggattgataaactcaggggactggatgcacgtcttgaacgcaatttcaaggagatggataagttctaccaagaagccattgatgaacacatgaattctaagaaaaaaactccagaggaagaggatttagttgatgtcttacttcaactgaaagagaacaacacgtttcccatagatctcaccaatgataacatcaaagcagtgctcttgaacttacttgtaggagctacaggtacaactgaagtcacaacaatctgggccatgactgaactaataaaaaatccaagcattatgaagaaagt

SEQ ID NO: 265320 - DNA, 298 bp, Glycine max
cccacgcgtccggccgagcagcgagagagagaaaccctagcaaaaatgccggctggtcacggtttgagatcccgcaccagagattccttctctcgtcccttcaggaagaagggtaccatcgccctcaccacatacctcagaacctaccacgtcggcgattatgtcgacgtcaaggttaacggcgccgtccacaagggaatgcctcacaagttctaccatggccgcaccggtcgcgtctggaatgtcaccaaacgtgctgttggggtcgaagtcaacaagcatgtcggcaacagaatca

SEQ ID NO: 265321 - DNA, 411 bp, Glycine max
gctgctgcaacatatgggaatcctaatgtccctaatgctgcttatgctggtggtccaccaggtggcccaaggagtacatggcctgctcaggctccttctggttatggatctatgggctatgggaacactgctgcttggggtgctccaagtggtggtgctggctctggtggcggtggtcctggttcagcaactgcaggtcaatctcctggtggagctgctggatatgggaatcaaggttatggatatggtgggtatggtggatatggtggaagtgatagttcttatgggaattctggtgcatatggtactgttggcggacgtactggaagtgctccaaacaataatgctagtgcttctggtggtagtgaactaacaagtagtggtggcagtggcaactatatgggtgggggc

SEQ ID NO: 265322 - DNA, 406 bp, Glycine max
cccacgcgtccgcccacgcgtccgttttctttttttcatttgcattgcaaagcaaaaacctggcagattgcaatggcttccaacaaggttattgccaccatcttggttctttctctccttgcctactcaacatcattcaccaatgcatgtggcacatgccacccaaaacctactccttctccccctcctccatcagggaagtgccccaaggacacattgaagctaggggtgtgtgctgatgttctaggacttgttaatgttgatgttggttcccctgtctctagcaagtgttgtgcattgcttgaaggtttggctgattccgaagctgcactttgccttagcactgctattaaagccaatgttcttggaatcaacctggatgtgcctatcacactcagtgtgctac

SEQ ID NO: 265323 - DNA, 365 bp, Glycine max
acgcccacgcgtacgaaacactatagcaatagaaacatttgcttttgaaaaacccctcactgtgcatgagtacactagctagccacatacaatgtcgaccaaatttaaggtgtgtcgtgaattcacaagcgatgactcattcctaaaccaagttatccctgaaaacatcaccgaattccaagtgactctgtccctcgctagagactacgatggcaacaactcaaccaacggtaagttcattccttactgggacactgaaaaggtcactcccgaagtgataaaaaaattcaagaaaaaatacgaacccaccgtactgagggttaaggttcttggcagcattggaaacaaaaaccaacaatttcctt

SEQ ID NO: 265324 - DNA, 444 bp, Glycine max
cccacgcgtccgcccacgcgtccgcccacgcgtccggtgactcgttcttcttcgtggttatcttcttcttttgttgttcgcgtgtttgttttttctctcacctgaaaatgtcttgctgcagcggtaactgtggttgctgaagcgcctgcatgctcggcaacggctgcggaggctgcaagatgtacccagacttgatctacaccgagtcaaccaccaccgagaccttggtcatcttagtgtcaccagctaaggcttaattctcgagtgctgaaatgggtattcccgctgagaacgcttgcttcacatgtggagctaactgctcctgctaccactgctcttgcatgtgaggtgttagagagcttaatcttcaagcacagatggcccatatgaaccattgttacatctatatcttagccaaaacttcaaaattatgtaatatgcatt

SEQ ID NO: 265325 - DNA, 440 bp, Glycine max
catggtgcaaaactggtgggttaggagatgttcttggaggtctaccaccagcattggcaggtttcgggcatcgagtaatgactattgtgccacgctatgaccagtacaaagatgcatgggatacaggtgttgtaattgaggtgaaagtaggagatagaacagaaaaggttcgcttcttccattgctataagaggggagttgatcgtgtctttgtggatcacccttggtttcttgaaaaggtctggggcaaaactggacaaaaactttatggaccaactacaggagatgattacgaagacaaccaactgcgttttagcctcttttgccaggtgaagatgtcattttcgtcgccaatgattggcacactgcccttatcccctgctacttgaaaagtatgtaccagccaaagggcatctatatgaatgcccgggttggttttt

SEQ ID NO: 265326 - DNA, 362 bp, Glycine max
agcattttcatttttcaacttgagagaagaagagaaggggaaaaggaaaaaaaggcaaagggggtaaggatctgagcgatgagcaagtgtcttcaatgaaggaagctttctctttattcgacacagacggtgacggtcggatcgcgccgtcggagctggggatcctgatgaggtctctgggagggaacccgactcaggcccaactcaaagccatcgtggccgaagagaacctcacggctcccttcgacttcccccgattcctcgatcttatggccaaacacatgaaacccgaacccttcgatcgccaactccgcgacgccttcaaagtcctcgacaaggactccaccggcttcgtcgccgtc

SEQ ID NO: 265327 - DNA, 170 bp, Glycine max
cttcttgatccttctttttctccttgaactcaaacatgtcagatgaggtggttctgctagatttctggccaagtccatttgggatgagggtcaggattgcacttgctgaaaagggtatcaaatatgagtacaaagaagaggacttgaggaacaagagtcctcttctcctc

SEQ ID NO: 265328 - DNA, 364 bp, Glycine max
atccattcctcttccatggtccattagaatgaaaattgcactaggagctgctaagggtctggcttttcttcatgaagaagctgaacgaccagtaatatatagggattttaaaacttcaaacatattactggatgcagagtacaatgccaagctctcagattttggtcttgccaaagatggtccagaaggtgataaaacccatgtgtctactcgagtgatgggaacctatggttatgcagcaccagaatatgtcatgacgggtcatcttacatcaaaaagtgatgtgtacagtttcggagtggtactacttgagatgtttaccggcaaaagatccatggacaaacaacgacccaacggtgagcat

SEQ ID NO: 265329 - DNA, 355 bp, Glycine max
cccacgcgtccgcttccttcttctctcagaacccttttccacatctcatctcaacgttctgttcctaattcctttcacaactccatcactcttgcatcatctttcaatccactgactcattcaaagcagcacctgaaccacagaggctgcaactccaagctcttggctatttcttacaggtatttcattgaagaagaagaagaagatgatgaaaacaacaactttgatgaagcagtggctctcttcaatggaggagagtactacaaatgccatgactatcttgaagccctttggctcaatgctgaagagcccaccagaactctcattcatggaatactgcaatgtgccgtgggtt

SEQ ID NO: 265330 - DNA, 408 bp, Glycine max
ctcaaaacaaaacacagcaatgtcccaacccagattcatttccatgatctccctctgtctggcccttgttctgttctacacctgcaatggcctaccatttgtggacctcaatttccatgaagtagatgtgatgaccaaaagggtttgcaccaagagcattggggagtgcctgagcttgacagagccggagatggattcggagaccaacagaagagttctggcaatgcagaaaaagtacattagctatgacacactcaagagagacatggttccctgtgatagggctggagcttcttactacaattgtcatgcaatacgagcaaatccttataatagaggttgtgaggtaattactgcttgtgcaagaggtcaagacatcaaaacttgatgcatcagcgtcacaatgga

SEQ ID NO: 265331 - DNA, 408 bp, Glycine max
gtacaccccatagggaaaaaatttcttcacatttacaatgaagctatccactctattccgattcctattccacctggctcatgctgctctgtctgacgaagctactttcattagagatggcctcaaatcctattcccagcttgatctccctcactcggtttttggttctgaaagtgtagccttcgattgccatggtaaaggaccatatgttggcgtgtctgatggtagaatcctcaagtggcacgagacaaagagagagtggattgactttgcagttacctcgccacacaagaacaagaaattatgtgatgggttaacatatgacaagatggaatcaatgtgtggaagacccttgggcctcaaattcaacacgttaacttgtgaactgtacattgccgatgcatactt

SEQ ID NO: 265332 - DNA, 376 bp, Glycine max
  unsure (1)..(376): unsure at all n locations
acgcccacgcgtccggctggatcgcaacaactgcggtttcatcccttccgatgaattcggtcntgattcccgaattcgccgtcaatcctctctctcagagtttgttgaggatgctggatgggttgaacttcaaggaatttgtggccttcttgtccgccttcagtccccgtgccactctccaccacaaaattgaattcattttcaaggtctatgacaccgattgcaatggaaaagttaccttccatgacatgttgagggctttaagggatttgagtggacccttcatgtctgagcaacagagagaggacgttctgacacaggttcttgaagaagctggctatgcaaaggattcttcattagtcttgtctgactttca

SEQ ID NO: 265333 - DNA, 451 bp, Glycine max
cccacgcgtccgaacaaatcaaagccatggccacctccaacttctctattgttctgtccgtctccctagccttctttgtggtgctacttaccaaggcacactcgaccgataccgtttctttcaccttcaacaagttcaacccagtccaaccaaacattatgctccaaaaagatgctagtatttcatcctctggggtgttacaactcaccaaagttggcagcaacggcgtgcccacctcgggatctctcggtcgtgccctttacgctgccccaatccagatttgggacagcgaaaccggcaaggtagccagctgggctacatcctttaaattcaacattttcgcacccaacaaatcaaactcagctgacgggcttgccttcttcttggcacccgtcgggtctcagccccaatccgactgatggattcttggtcttttcaacagtcccttaaa

SEQ ID NO: 265334 - DNA, 412 bp, Glycine max
acgcagctatacttgttccttttgaaggttagaagtgctacaatacaaacaatggcagctactgaggaagatgtgaagcttttgggtattgtgggaagcccatttgtgtgcagggtccagattgcccttaagttgaagggagttgaatacaaatttttggaagaaaatttgggcaacaagagtgatttgcttctcaaatacaaccctgttcacaagaaagttccagtgtttgttcaaaattagcagcccatagcagaatctcttgggaatggtgaaatccttgattagaccttggagaacaaccccatcttaacttctgaaccttaccaaagagccttggcttcgttctgggcccaattcattgattattagattgggggtgccttattgaaatctggttttaccggttatt

SEQ ID NO: 265335 - DNA, 359 bp, Glycine max
acggagagggaggagggagagtgttgacgctccatcaagatgggtatttctagggattccattgacaagatgcgtgccactggtggcaagaagaaggcatggagaaagaagagaaagtatgagcttgggcgtcaggccgcaaacaccaagttatcaagcaacaaaactatccggaggattcgtgttcgaggtggcaatgttaaatggagggcattgaagttggataccggcaattactcatggggtagtgaagcagttactcgcaagactcgtattctagatgttgtttacaatgcctcaaacaatgagcttgtgcgaactcaaaccctggtcaaaaatgctattgttcaagttgatgc

SEQ ID NO: 265336 - DNA, 414 bp, Glycine max
gttgatcgagataactagaaacagtgtgatgaaaatgaaggtccttgttttcttcgttgctacaattgtggtagcatggcaatgccatgcgtacgatatgttccctctccgaatgaacactggctatggtgcccgtactccggaggtgaaatgcgcaagttggaggcttgctgtggaagcacacaacatctttggctttgagaccattcctgaagagtgcgttgaagcaacaaaggaatacatccatggcgaacaatatagatcagactccaaaacagttaaccaacaagcttactttatgccagaaaacctcgaagtcaatccaagggcccatttggggtcaatataaaatggaccgtactctctaatattccatactaccaaaaacattgatattgggtggagaaatttaac

SEQ ID NO: 265337 - DNA, 417 bp, Glycine max
cccacgcgtccgcttccaccctcctctcaggtttttgtggataagagtgagctataatggctgccaggagaccgggtttaattgctttgtttgatgttgacgggactcttacagctcccaggaaggtggtcacaccggaaatgttgacattcatgcaagaactacgaaaggttgtaacggttggagttgttgggggttctgaccttataaagatatcagagcaacttggcagcacagttaccaatgagtatgattacgtattttctgagaatggtcttgtggctcacaaggaaagaaagctcattggaactcagagcttgaagtcattccttggtgaagaaaagctcaaggagtttattaactttacacttcattatattgctgatttggacattcccattaagaagggaacattta

SEQ ID NO: 265338 - DNA, 343 bp, Glycine max
acgcccacgcgtccgctagtctttatgatgcttaccagcatatagagctggtttcccgtgccgcgtcaaatgctgaaacagagacttttgatgtggttggccctgtctgtgagtctgcagatttcttaggaaaaggaagagaacttcctactccagccaagggtactggtttggttgttcatgatgctggtgcttattgcatgagcatggcatcaacctacaatctatagattcggccttctgagtattgggttgaagatgatggatcaatgagcaaaataagacatggatagacttttgaagaccacattcggttttttgaggggcttttaagctaataatt

SEQ ID NO: 265339 - DNA, 163 bp, Glycine max
tacacgctttctatcgatataactagaaacagtgttttgaaaatgaatgtccttgttttcggctaggctacaattatagtagcatggctatgccatacgtaccatatgttccctttcctaatgaacactgtctatagttcctctacttcatatgttaaattct

SEQ ID NO: 265340 - DNA, 207 bp, Glycine max
acacgtacaagtacttgtgcactaacaaggataagcaattggcttcctcaatgatctattcgccacctgttaccactgtcaagcgagccggtgcctgcatggttgctccattcactggcctcaagtacatggctggcttcactaccaggtacaccaacactgacattacctccatcgctagcaacagttgaagagtgcactgcatgc

SEQ ID NO: 265341 - DNA, 407 bp, Glycine max
aatcaataaaaactgagaatattgattcacgaaaaaacaaatcaatattcgaaaaaaaaagagattatgaattttaagatatgagaaaggctccattgtcgaattcagacctaaccattaatcgagaagtgatgggaacgacgaaacctgcaaatacttaagattttattaaaaacaaatcttaatgattcattacgtgggatggcggaagaaaccaaaaagcaatcctttttttaggagttgtgccctacattacatctgaatttgattgataataaaagagtaaatattcgcccgcgataattttgattttattgaattttttttttatttttgccaattctatttattctttctaataataaaaaatattctaataactaataataaaaaggaaaataaagatt

SEQ ID NO: 265342 - DNA, 456 bp, Glycine max
gacccacgcgtccaaaaggttcaaaaagtggaactgctggtaggtgttttggatgcaaaggcactggtatgaaaattacaagggggcatattggactaggcatgattcaacaaatgcaacatgtctgtcctgactgcagaggatctggtgaggtcattaacgagagagataaatgtcctctgtgcaaaggaaacaaggtttcccaggaaaagaaggtgctggaagtgcatgttgagaagggcatgcagcaaggtcagaagattgtttttgaaggacaagctgatgaagctcctgacacaatcacaggagacattgtttttgtattgcaagtaaaggatcacccaaagttcagaagggagcaggatgacctctatattgatcacaatctcagcttaaccgaggcactctgtggcttccagtttgctgtcaaacatcttgatggtaggcaactattga

SEQ ID NO: 265343 - DNA, 407 bp, Glycine max
ttgctaattccatcgaagccgctccattaatggaaaggtagattacagcagaagcaacatccggtgagttaacagcatcttcatacacctcttacaactaccgaacaaactcgcctaaggcgtaaatgtcaagagaaaaaaaaatgaatgattcaaaggcacttatagttacatccccccaaaagttctcaatagcagatcagaataatcaatgtacccactaagaaaaacatagtgcaacagaacattcaataatatatccattagttggaccagacatgaactagtccatgcctgttgcctgtatagatttcattgcgctcttcatcatagaagagagcagtaatgtcttgcaaggcttctgcaacagtgctcctcggctggcatccatgttttcgcttttttga

SEQ ID NO: 265344 - DNA, 414 bp, Glycine max
ctcggatcgcgcattcacaaataaggttgaagagggccctgccggaagaagataaataccgtctttcattttccggcgatctcttttttcttccatcaccgttttccggctatccctaatccttaacagaaatgacgacatcaaggcgccttgcggacaggaaggtggagaagtttgagaaaaacatcaccaaaagaggatttgtgccagacacaaccactaaaaaggggaaagactaccctgttggcccagtgctgctcggtttcttcgtctttgttgtcattggatcatctctcttccagataatcaggacagcaacgagtggaggcatggcttaaatggagctttattttggattgtgtcatcatctcttagcctcctcgtagaaaatgctaatacttctctacatgtact

SEQ ID NO: 265345 - DNA, 414 bp, Glycine max
aagagaagcattagcaaaagcaagaagaactagtctaagcagaaatggcctcttcagtgatggcatctgtggccctcaaacctgcccctttcactgttgagaagtcctcagttagaggccttccctccctctcaaggaactcctcttcattcagagttgtggccagtggtggcaagaagatcaagactgacaagccttatggaattaatggtggcatggctttgagggaaggagttgatgcatctggcaggaaaggaaagggaaagggcgtttaccagtttgtagacaaatacggtgctaatgtcgatggttacagtcctatctacgacaccaaggactggtctccaaccggtgatgtctacgctggcggtacgactggcttggctatctgggctgtgactctactttgtcttc

SEQ ID NO: 265346 - DNA, 435 bp, Glycine max
cggcgcactccgtctgttcctcaccgtcaccggcgcgcgcaccctctgttccagcgactcctaattaagttgggaaataaaaaagacttcaaatttcccagatggctgcagcctttgcttccagatgctctcgtgtgggccgttctctgtctggtggattaagcaacagttcccctggtttatttacctcatcacatggcatgacatgcaacaatttgttttctcagcaacaacgtaccttcatacagatgaggactgttctcaaggttgtcgataactcacgtgctaaaaaggtgatgtgcatacaggcattgaaagggaagaaaggggcaagattaggtgacacaataatagcatctgtgaaggaagcacatcctaatggaaaagtgaagaaagggaacgttgtatatggcgtaagtgtgcgtgcagcaatgc

SEQ ID NO: 265347 - DNA, 437 bp, Glycine max
cccacgcgtccggggcaacacaacctatcctctggttcctgggcacgagattgctggtgtggtaacagaagttggaagcaaggtgcaaaagttcaaagttggagaccgggtaggtgtggggtgcatgattggatcctgtcgttcatgtgaaagctgtgatgaaaatcttgagaattactgccccaaaatgattctcacatacggtgtcaagtattttgatggcaccataacacatggaggctactctgacttgatggttgcggatgaacactttgtggttagaattccggataacctaccacttgatgctgctgctcctctcctctgtgctgggatcactgtgtatagccctttgagatactatggacttgacaagcctggtctgaatcttggtgtggttggtcttggtggacttggtcacatggctgtcaagtttg

SEQ ID NO: 265348 - DNA, 352 bp, Glycine max
gattcatcaaaaaaaaaaaaaaaaaaaaaattaaaaattaaaaaaaaaaaaaaaaaaaaaagggaaaagagaaaataaaaaaaaaaaaaaaaaaaaaaaaaaaaaaaaaaaaaaaaaaaaaaaaaaaaaaaaaaaaaaaaaaaaaaaaaaaaaaaaaaaaaaagggccgccctttttaaaaattcaaattttttttccccttcattccaactttttatttttttttttgtgccccttaatttaatttcattgccccccttttaaaaactcttaacttgaaaaacccttgcctttcccaattttattccctttgaaaaaattccctttttccccagttgtctttttaacaaaa

SEQ ID NO: 265349 - DNA, 417 bp, Glycine max
cccacgcgtccgcttgggtgcgattccttcactcacaacaacaacacatcactatggctctgctgagtcgagcctcttcacgcttccctcagctggtttcccctcaaagggtagtttcactccacacaacgctcccatctctgaacgcatccccatccacagccacgcctacaccatatgccccgccaccgcctccgtccgcttcctctcccgccggcgtttcgaaggcggcggagttcgtgatctcgaaggtggacgatctgatgaactgggcccgccgcggctccatctggcccatgaccttcggcctcgcctgctgcgccgtcgaaatgatgcacaccggcgccgcccgctacgatctcgaccgcttcggcatcattttcaggcccagccctcgccagtctgattgcatgatcg

SEQ ID NO: 265350 - DNA, 434 bp, Glycine max
cccacgcgtccgcccacgcgtccggtgagtctacgtgtttgagagaaaggttgagctatagcctaaagggagagacacataaatagtttctactttctattcatagatagatggctggcccaattatgagacctcagattgtgctatttggctcctccataattcaaatgagcttcgacaatggtggttggggtgctattctagctaacttgtacgctaggaaggcggacatcatcttaagaggatactctggttggaattcaaggcgggctttggaggttttggatgaaattttccccaaggatgcttatgtgcaaccatcattggtaattgtgtattttggtggcaatgattctattgatcctcacccatctggccttggtcctcatgtaccccttgaagaatatgttgaaaacatgaggaaaattgctaat

SEQ ID NO: 265351 - DNA, 237 bp, Glycine max
tccacgcgtccgcccacgcgtccgaaaaaattaaaaaaaaaaaaaaaaaaaaaaaaaaatgggaaaaaaaaaaaatataaaaaaataaaaaaatatataaaaataattaaaaaaaaaataaaaattatataaagaaaaaataaaatttaattttatggtcgtatattttaaattgttaagacttgtaaaaaccgtggcgtttcctaactttatttaatttgtaataattttaaaatt

SEQ ID NO: 265352 - DNA, 431 bp, Glycine max
  unsure (1)..(431): unsure at all n locations
atctcgcctacgccctatacaaccaaaccctaacacacacccatttgattcagtttccatggctagcctcaaggttgcatttttggctgcagtgctctgcatggttgtggtgagtgcacccatggcacatgcagctatcacgtgcgggcaggtgacgagtagcctggccaattgcatcggttacctccagaagggaggaacgccgtcgtcgggatgctgcaacggagtgaagagcctcaatgccgccgccaagaccaccgccgaccgccagacggcgtgcaactgcctcaagtcggccgccagccaaatctccggcttcaacgccaacaacgccgcctcgctccccggcaaatgcggagtctccatcccctacaagatcagcacctncaccaactgcgctaccatcaaagtttgaagagaaagtcatggac

SEQ ID NO: 265353 - DNA, 413 bp, Glycine max
actgtgtctaagtcttcctttcaggctttgtgaattgaattccgatgtcacagccaaggcggaataagatgatgagtccaaaccttgcaaaacaagttggtgacgcaacctataccaagatttttgttggaggactggcttgggggactaagagagacactctaaaacgctattttgatcagtttggggagatcttagaggccgttgtcatcactgacaaaatcactggaagatcaaaaggatatggctttgtgaccttcagggacccaaattctgcaataagagcttgtcataatccctatcctgtgatcgatgggaggagagctaactgtaatcttgcagctcttggtgcccagaaatttgatccatctataacaggaaggcaaaaactcagtagcccgtcatggaatatg

SEQ ID NO: 265354 - DNA, 424 bp, Glycine max
attgaatttgaagggagtataggaaaaccaaccaaagttccaaattttttggtttggggagagatagagtgatacgcgtcacattttcataataataaaaaaatggcagcggcggcggcagtgacggtgctactcccacctaggattccgaccaccaccaacgttacccgctgctctgctttgccttctctccctcctcgcgtctccaacaccaaaaccactttgttctcaccttccctcaacaacttttcagtgtcccgaaaatcttctctgcttcagaccagagcttcttcagaggaatcatcctcagtagatgccaatgacgtgttcacagatttgaaagaaaagtgggatgctcttgaaaacaagtccacagtacttctttatggtggaggggctatagttgctatttggctatcgtcaa

SEQ ID NO: 265355 - DNA, 435 bp, Glycine max
cccacgcgtccgtgctgtaatagcagtttggagcacattcctgcaacagtattacgtgcatgttcttgagaggaagtattctattgggtcatttaacttgttgggccatactgcaccagcacaggcagcaagtttacttctagtaggcccctttatggactactggttgactggcaaacgagttgatgcctacggctatggtttgacatccacgttgttcatcattctgtcttgcactatcgcagtagggacaaacctcagccagttcatctgcattggtaggttcacggctgtaacgttccaagtccttggtcacatgaagactatcctggtcctgatcttaggattcattttctttggaaaagagggtctcaatctacatgttgttctaggcatgatcatcgcaatagcaggaatggtttggtatggcagtgc

SEQ ID NO: 265356 - DNA, 411 bp, Glycine max
cccacgcgtccgatttgagcttaaaccctagccgctcttctcttcattcttcactttggaaacaatgataatggcgttctgtaataaggttggaaatgtcttgaggcagggtgctgctcgcagcacacatgcccctgttgcgtccatgcttaattacatccgctgcatgtcttcaagcaagcttttcattggaggcctttcatatggagttgatgaccagtctcttaaggatgcattttctggctttggagatgtggttgatgcaaaagttataactgatagagacagtggaagatcaaggggatttggatttgtcaacttctccaatgatgagtctgcaagttcggcactctctgcaatggacgggaaggatctaaatgggcgaagcattcgggtatcctatgcaaatga

SEQ ID NO: 265357 - DNA, 431 bp, Glycine max
  unsure (1)..(431): unsure at all n locations
acaccctcatcctccaccacctcctaagaagctatactactatcattctccaccacctncacgccaccctcacccttacccccatcctcacccccacccacaccctcatcctccttacgtttaccactctcctcctccaccccctaagaagccctacaagtacccttcacccccaccaccagttcaccctccctacattccacacccactttaccactctcctccaccaccaccttacaagaagccttacatctatgcatcacctncccctccttaccactattagcatacctctcatcgatatgaacaatatgtgcaacgaataaaataaagcgatggaaagcgcttctcgatgcacgaaagagaaaaaatggaaacaaagtttccgccttttttctttcataaaaaaaaatgttaaacttatttttttc

SEQ ID NO: 265358 - DNA, 442 bp, Glycine max
gcgcccacgcgtccgatcgagacacacatcatagtgatcattttttaatttctcagatttatccgacgtggctgcatatccaccaaccgttatggttgccttcagcggtgatgaaacggcaccgtttttcggcttccttggcgccgcagctgccctcgtcttctcctgtatgggagctgcctatggcacagcgaagagtggcgtgggcgtggcttccatgggtgtaatgagacctgagctggtgatgaagtcgattgttcctgttgtcatggctggagttttgggcatttatggccttattattgctgttattatcagtaccggtattaatccaaaggccaaatcctattacctctttgatgggtatgcacatctcttttctggtcttgcctgtggcttggctggcctttctggctgcatggctattggtatttggtggtga

SEQ ID NO: 265359 - DNA, 427 bp, Glycine max
  unsure (1)..(427): unsure at all n locations
cccacgcgtccgtgttgatcgagataactataatacagtgtgatgaaaatgaaggtccttggtttctgcgttgctacaatttgggtagcatggcaatgccatgcgtacgatatgttccctctccgaatgaacactggctatggtgcccgtactccggaggtgaaatgcgcaagttggaggcttgctgtggaagcacacaacatctttggctttgagaccattcctgaagagtgcgttgaagcaacaaaggaatacatccatggcgaacaatatagatcagactccaaaacagttaaccaacaagcttacttttatgccagagacctcgaagtccatcccaaggacacatttgtgttcagtatagatggcaccgtactctctaatattccatactacaaaaaacatggatatggngtggagaaattta

SEQ ID NO: 265360 - DNA, 434 bp, Glycine max
cccacgcgtccgctgccataggattgggaaacccgatgaacagctctttcagcttctctccaatcttctccaccaggtggaatcactgacgaatcaagaagaagttgagctgcgttctaaaattgaaactcttggattagaggttacaaaagttccttcaaagtcaacgcagcaccttaacgaggtgtttttcacttgatgcagagttctcttatccctgttgaaatgtgctagaacatatgaaaagattttttcatcttatattatcctgtgaattagtttttcgatttcctcgttatctcttgggattagttattatattttctcaacatttttatttcctcattgaggattagctatcatattttcttttcttatcatgattttttttcttaattaattaggatcattattagtatagataagggttagtg

SEQ ID NO: 265361 - DNA, 431 bp, Glycine max
cccacgcgtccgcccacgcgtccggataactagaaacagtgtgatgaaaatgaaggtccttgttttcttcgttgctacaattttggtagcatggcaatgccatgcgtacgatatgttccctctccgaatgaacactggctatggtgcccgtactccggaggtgaaatgcgcaagttggaggcttgctgtggaagcacacaacatctttggctttgagaccattcctgaagagtgcgttgaagcaacaaaggaatacatccatggcgaacaatatagatcagactccaaaacagttaaccaacaagcttacttttatgccagagacctcgaagtccatcccaaggacacatttgtgttcagtatagatggcaccgtactctctaatattccatactacaaaaaacatggatatggggtggagaaatttaact

SEQ ID NO: 265362 - DNA, 434 bp, Glycine max
cccacgcgtccgcccacgcgtccggagataactagattcagtgtgatgaaaatgaaggtcgttgttgtcttcgttgctacaattttggtagcatggcaatgccatgcgtacgatatgttccctctccgaatgaacactggctatggtgcccgtactccggaggtgaaatgcgcaagttggaggcttgctgtggaagcacacaacatctttggctttgagaccattcctgaagagtgcgttgaagcaacaaaggaatacatccatggcgaacaatatagatcagactccaaaacagttaaccaacaagcttacttttatgccagagacctcgaagtccatcccaaggacacatttgtgttcagtatagatggcaccgtactctctaatattccatactacaaaaaacatggatatggcgtggagaaatttaactc

SEQ ID NO: 265363 - DNA, 439 bp, Glycine max
cactctttgtatttttcgctgactccggcgtcacttttcgttgagtctccgtccaccggcgtggcgatggactcggaatcttcaaactccgattctcaaccgcaccctctctcgaacccaatcgacgacgcgtgccacgacatgagctccctggaagagctcgcgaaccgcggcgcgtggcgttccatcattgacaaggtctcacgcgcccgcgccctctctctcctccacaagccccacgaccacctcacctaccttgccttcaacgccctctccttcaccaaactgcgtcgtttcaacgaagcctctgcggaactcgattccctcgaagacctcgacagctcccactaccgctacgaaacctaccccaaaatctaccccaatcggatcggatccatggtccccttctccctccggtggctccacgccctaatcccca

SEQ ID NO: 265364 - DNA, 446 bp, Glycine max
gcgcccacgcgtccggaattgaagtccataatcataatgggtccaatatgggcatcaggaattgtgctcgtcacagcttatgcccaacaaaacacattctccctccaacaagccaagaccatggacagacacctaaccaaaacctttcaaatcccagctgggtccatgtctgtcttcaccatccttaccatgctcaccaccactgccttctatgaccgagtcttcatcaaagtggctcgtaggttcaccgggctggaccgtggcataagcttcctccacagaatgggcattgggtttgtgatctcaaccttagccacattggttgctgggtttgttgaaatgaaaagaaagaaggcagctttggcccatgggctttttgaccacccacatgccataatcccaatctcagtgttctggcttgtccctcaatacagccttcatggaat

SEQ ID NO: 265365 - DNA, 433 bp, Glycine max
caataatctattttatactatacccacattttgataattatttttctagttgataagccatggctactcgaggaaagcttgaggttgacgttcatctcaagtctaacgcagacaagtactggcaaacccttaggaactccactgaaatattccccaaggccttccccaatgattacaaaagcattgaggttcttgagggtgatggcaaatcacctggttctatccgccacataagttatggtgaaggttcaccacttgtgaagtcatcctttgagaagattgaggctgttgatgaagaaaagaaggtagtgtcgtacactatcattgatggagaactcctccagcactacaaaacattcaagggagacatttctgtgactccagttggcgatggatgcgaggtgaagtggagtgctgtgtacgaaaaggttag

SEQ ID NO: 265366 - DNA, 262 bp, Glycine max
cccacgcgtccggagctttttgtgaggatttcaaagcatggcttcccttgcagcatccactgctgctgcttcccttggcatgtcagaaatgcttggaaaccccatcaacctcagtggtgccacaaggccagctccatctgcctctagccctgcctccttcaagactgtggctcttttctccaaaaagaaggctgcacctccaaaaaaagctgcagctgctgctcctgccaatgatgagcttgccaagtggtatggtcctgac

SEQ ID NO: 265367 - DNA, 223 bp, Glycine max
aaaaaaaaaaccttttttaatttttttaaccaaaaaattaaaaatttgatttttttttttttttttaaaaaaaaaaaaaaaaaaaaaaaaaaaaaaggggggcctttttaaaaaaaaaaaattttctttccggttttttgaaataaaaattttttttttaggggaaaaaaaaaaaaattaattggccgttttttaaaaaagtgggaaataaaaaaaacttggg

SEQ ID NO: 265368 - DNA, 428 bp, Glycine max
  unsure (1)..(428): unsure at all n locations
tgaaatgtctaggtttcttttgaagaacgatggtctcttccttgggagttcttctgcaatgaactgtgttggagcagtaagagtagcgcaagcaattggccctggtcacacaattgtaaccattctctgcgacagtggaatgagacatttgagcaaattctatgatgctgaatacttgtctctgcttggtttgacaccgaaagcaactggtttggagctcttaggcatcaaatgagaaggtttcttcagatttttgaaattttaatgccactgtctagctgctatatacttgagtgcttagtgcctgccttggatgagagtggccacctagaagttagtttagttatattgatatatagaagatattacacttattaatacactgttttggggggtattacagggctcattctttgntagtcttcatg

SEQ ID NO: 265369 - DNA, 409 bp, Glycine max
cccacgcgtgcggttcttggcgggggagatatcactggacctcattagcatactaggtatgctgacgggttaacagacaccctaccatgagctacaatgggagcaggatcacttgctgcaaagtctgaattcgaggataagtacaaggaaagtgagagcatggatgaaggcattaagctagttggtgaggcgatatgtactgacatatgtaatgacctaagaagtggaagtaatgttaataccagtgtgaaaaccaaaggacataaggaatatcttatgaaccaccttctaccaaatgctcatacctatggcaatccaaaacgctatgatacccccaaaaagacaaaagacctttcaacaaagaatgcaccggtggaagagaatgtaggagagactgaaggagatgctc

SEQ ID NO: 265370 - DNA, 293 bp, Glycine max
  unsure (1)..(293): unsure at all n locations
ccacatggtttctttnttttaaatatacattttaatgtatctaattagcatactatntaagctgacggtttaacttacaccggcccattatctacaatactatcangaacacttgcttcaatgtctgaattcaagtctaattacaatgaaaattaaagtatgaatcaatgcattaagctaatttttgatgctatatgtactgacatattaaatgacctaaaaagtgaaagtaatgttaatacctacgtaataaccaattaacataacgaatatcttataaaccaccttctacc

SEQ ID NO: 265371 - DNA, 387 bp, Glycine max
  unsure (1)..(387): unsure at all n locations
ggaaattgttggcgttaagaagttgattgaaaagaaggcttggccatatgttcagaatgagctgcgtctcanggccgagtatctgcgctttgatctcaacactgtcattgctgcaaagcctaaggatgagaagaaatcactcaaggaactcactggcaagctcttccaggatatcagcaatctggatcatgcagcaaaaattaagagcagcccggaagcagagaagtactatgctgctactgtatcttctctgaacgatgtccttgccaaacttggttaatgtgattaatttcttgctttcttgtgtaagctttgtgcatgattttctcagacactttattgactgatattttaagaaaatcaaatgatgagggaaaattttctata

SEQ ID NO: 265372 - DNA, 424 bp, Glycine max
  unsure (1)..(424): unsure at all n locations
cccacgcgtccgcccactcgtcctttgacgtttgggtagtttatcgtgaggagagtatgaagttgtttgttttctgtgttgctgcantagttttggtagcatggccatgccatggcgcaggctaccaaaggttccctctccgaatgaaaactggctatggtgagcgttcttcggaggtaaaatgcgcaagttttaggcttgctgtggaagcacacaacatccgagcctttaaaaccattcctgaagagtgcgttgaaccaacaaaggactacattaatggcgaacaatttacatcagactctaaaacagttaaccaacaagctttcttttatgctagtgaacgcgaagtccatcacaacgacatatttatattcggcatagataacaccgtactctctaatatcccatactatgaaaaacatgg

SEQ ID NO: 265373 - DNA, 437 bp, Glycine max
cccacgcgtccggttgagaactaagaaggagaagcaaatggcttcctcaatgatctcttccccagctgttaccactgtcaaccgtgccggtgccggcatggttgctccattcactggcctcaagtccatggctggcttccccaccagaaagaccaacaatgacattacctccattgctagcaacggtggaagagtgcaatgcatgcaggtgtggccaccagttggcaagaagaagtttgagactctttcctacctgccagaccttgatgatgcacaattggcaaaggaagtagaataccttcttaggaagggatggattccttgcttggaattcgagttggagcacggtttcgtgtaccgtgagcacaacaggtcaccaggatactacgatggacgctactggaccatgtggaagctgcctatgtttggttgcactg

SEQ ID NO: 265374 - DNA, 420 bp, Glycine max
cggggcgaccgcacgcgtccgctttcagctcctaagagcacgcatcactgttgcacttcttactcgttctccctcgttttcgttcttcttcttcttcttcgctaaaccccccctttatttttcctatctcactaacatcgatgggagacgagaataagaccaagtcccctgcttccggcgtgtggtccaccatcaagcctttcgtcaatggcggagcctccggcatgctcgccacctgcgtcattcaacccatcgatatgatcaaggtgaggattcaacttgggcaaggatcagctgcgcaggtcacttccaccatgcttaagaatgagggtgttgctgccttctataagggtctatctgctggattactcaggcaggctacatacaccactgcccgtcttggatcatttaaaatcttga

SEQ ID NO: 265375 - DNA, 432 bp, Glycine max
cccacgcgtccggcatatctcatttgaatacattccttgtagtttatactgaaagatgggggtgaagatggcgttactgatcctaggcctttccctcatgctccttttggtctcctctgacgtggcatccacgaatacaaaagaggaggcaaatggagtggatgatgccaaatatcccggtggaagctatggagggggttacccaggtcatggcggtggcggttatcctggccatggcggtggcggttatcctggccatggcggtggtggtggctatcctggtcatggtggtggccaccctggtcatggtggcggctaccctggccgtggtggtggatactgtaggcatggctgttgcggtggccggacatacaacggaggttgcagaacgtgctgctataacgctggcgaaagctgtgctgcacaaactca

SEQ ID NO: 265376 - DNA, 430 bp, Glycine max
gttgagaactaagaaggagaagcaaatggcttcctcaatgatctcttccccagctgttaccactgtcaaccgtgccggtgccggcatggttgctccattcactggcctcaagtccatggctggcttccccaccagaaagaccaacaatgacattacctccattgctagcaacggtggaagagtgcaatgcatgcaggtgtggccaccagttggcaagaagaagtttgagactctttcctacctgccagaccttgatgatgcacaattggcaaaggaagtagaataccttcttaggaagggatggattccttgcttggaattcgagttggagcacggtttcgtgtaccgtgagcacaacaggtcaccaggatactacgatggacgctactggaccatgtggaagctgcctatgtttggttgcactgatgct

SEQ ID NO: 265377 - DNA, 320 bp, Glycine max
atctcttccccaactattacgcgctgccgcccattctcaagccggcatgcgcactccattcactgtcctcaaatacatggctagcttccccaccataaaaaccaacaatgacattacctccattactaccaacggtggaagagtccaacccatgcacgtgatgacaccacttctcatgaataaatttaaaactacttttctacctgccaaaccttgatgatgcacaattggcaaaagaagtataataccttcttaagaaggtatgcattccttgcttggaattcgaattggatcaccgttttctgttccttgaacccaac

SEQ ID NO: 265378 - DNA, 360 bp, Glycine max
  unsure (1)..(360): unsure at all n locations
cccacgcgttcgaggaaatggggcttcaccaagtttagccgttctgattatctcaagttcgggtcagagaatagaattgtgcccgatggtgtgaatgctaagcttcttgggtgccatggaccattggccaaccgtgaacccggaagggcctttttggatactgatactggttcttagtctgtttgttaatttggaaatactagactttggattactttagttttgcaagagtgaatttgagttattgtcagaacattccaattacttaaattgcttgcgaacctcttcaatttggctattttaatgctatattttgttatgaagcaaagacaccaacacccttnnccgggaaaggaaggg

SEQ ID NO: 265379 - DNA, 444 bp, Glycine max
ctcatgatgcacggtagaaacaatggcaagaaactcttggctgttaggatcatcaaacatgctatggagattattcatttgttgactgaccagaaccccattcaggttattgttgaagctgttgtcaacagtggtccacgtgaagatgcaacaagaattggttcagctggagttgttaggagacaggctgtggatatctcaccccttaggcgtgttaaccaggctatctatcttctaacaactggagcacgggaagctgctttcagaaatattaagacaattgcagaatgcttggctgatgaacttattaatgcagcaaaagggtcatccaacagctatgctatcaagaaaaaggatgaaattgagagagttgcaaaggccaatcgttgagcagttgtggaagcaatatttgcgatcgggaggattttgtttcggtcaatgttt

SEQ ID NO: 265380 - DNA, 368 bp, Glycine max
gtttgttttgtgctttagataaaagttctgccaaatcaagaggggttttaagatcatagtgggtgtgttgcaacaatggctaagttctttgctgctatcatcttggcactctttgccatttccatacttcaaacagtggtaatggctgctaatgaacaaggaggccacttgtatgacaacaagagcaaatatggaagtggaagtgtcaagagttaccaatgcccatcacaatgctcgaggagatgtagccagacccaataccacaagccctgcatgtttttctgtcagaagtgctgcaggaaatgcctgtgtgtgcccccggcgtattatggtaataaagctgtgtgcccttgctacaacaactggaa

SEQ ID NO: 265381 - DNA, 433 bp, Glycine max
cccacgcgtccgctgtcccataacccagtctctgttcacctgggtggaacaccctgtgacgctcttcacccaattacgttccatccaattctgaataagcctcgttcttctgcctctctgttttggaactgcaaaaggagaaggaagaggaaaagctccattactatggcttctaatctcagaaccaacaatttcctgcgccatgtggaatcaatgaagcttcttccatcaggtgcgggtcacatttcacacttgaatgctgtgatacttggtgaatctctcgccactgaagaggatgatttcgttcttccaagtgaggactttgctagccaagccaatgttcagtccccagaacagtatctgaagatgtataatacatccattgaggatcctgctggattctggtctgagattgcctcagagttctattgga

SEQ ID NO: 265382 - DNA, 427 bp, Glycine max
cccacgcgtccggcagttagatgcctcacacaataatgatagtgaagattcacatcgacaagcaataatattaacatcttgttagttattcatgttctcttattaagaaaataggaggtgatatggtttgagaaaatcagtgttttaaaacccagagatagcagcaggtgtagcagccgacccgaaaactgttatcacaggatagctgctactttgaagcagattaactagtaggttggtgattgattcttctagtgctgtgattttattgtatttttttttcagagagagtgtgtcccttcactggaaagaaatcaaacagggccaacaaagtatcattttcaaaccacaagacaaagaaactgcagtttgtgaaccttcagtacaagagaatttggtgggaagcagggaagcgctacgtaaagct

SEQ ID NO: 265383 - DNA, 373 bp, Glycine max
  unsure (1)..(373): unsure at all n locations
ctaaccaatcctgacactacttcttttacactttctctatcatcatcatttaagaatgccgccgaaattataaccattccagatcgtatacagtcttcttacacttaaacaataggtagagtgtatatggcggcgagataattcgcccctaacatccgatacataggtctctgccccaaaaacatccgagaaaatatcgtcaaagaaaccgtcatagactggaacggactacctattaccgtcaagatcaccgtgcataaccgtcaggccaaagtcactgtggttctatccgacagcgngctcgttataaaggccctaaatgaacccgagcgtgaccgctagaaatctaaaaacatcaagcacatcggctaca

SEQ ID NO: 265384 - DNA, 437 bp, Glycine max
gagaatttgtggagcagcaatcagcagcagttacaccaccacgtccaattccctgttaggggttgcttcctcttccctctccagtcctgcaaaaaccaagttcctgccctcactttctagattttctgtcaagcgtccgtacttcctttcccaaacttatccgcgcattgctgtgaacaagccctccatgaacctgttgaacagactcgggtttggcagcgcaagagcaacagagaacatggattcatccattcctcagggtccagatgatgacataccagcaccaggccagcagtttgccgagtttggtgctggctgtttttggggtgttgagttggccttccagagggtgcctggggtgaccaagacagaggttggctacacccaggggcttgtgcataatccaacctatgaggatgtgtgtacagggaccacca

SEQ ID NO: 265385 - DNA, 331 bp, Glycine max
tgagaactaagaaggagaagcaaatggcttcctcaatgatctcttccccagctggtaccagtgtcaaccgtgccggtgccggcatggttgctccattcactggcctcaagtccatggctggcttccccaccagaaagaccaacaatgacattacctccattgctagcaacggtggaagagtgcaatgcatgcaggtgtggccaccagttggcaagaagaagtttgagactctttcctacctgccagaccttgatgatgcacaattggcaaaagaagtagaataccttcttaagaagggatggattccttgcttggaattcgagttggagca

SEQ ID NO: 265386 - DNA, 403 bp, Glycine max
gcgcccacgcgtccgcccacgcgtccgcaagtagttgagaactaagaagaaggaaatggcttcctcaatggtctcctccccagctgttaccaccgtcaaccgtgccggtgccggcatggttgctccattcaccggcctcaaatccatggctggcttccccacgaggaagaccaacaatgacattacctccattgctagcaacggtggaagagtacaatgcatgcaggtgtggccaccaattggcaagaagaagttcgagactcttttctacttgccagacctcgatgatgcccaattggcaaaggaagtcgaataccttctaaggaaaggatggattccttgcttggaattcgaagtggaacacggtttcgtgtaccgtgagcacaacaggtcacctggatac

SEQ ID NO: 265387 - DNA, 290 bp, Glycine max
cccacgcgtccgcccacgcgtccgcggacgcgtgggtagtttatcgtgaggagaatatgaagttgtgggttttctttgttgctgcagtagttttggtagcatggccatgccatggcgcaggctaccaaaggttccctctccgaatgaaaactggctatggtgagcgttcttcggaggtaaaatgcgcaagttttaggcttgctgtggaagcacacaacatccgagcctttaaaaccattcctgaagagtgcgttgaaccaacaaaagactacattaatggcgaacaattt

SEQ ID NO: 265388 - DNA, 390 bp, Glycine max
caaaaaatgaaaaattactcgatttttatttctccaaaatgatcaattttataagattgaatcgactaaaaaatgaaatgaatcatttcatattgatagtattgctatgcttagtgtgcgactcgttagttttttagaacggttccaatttaacaaatttataaaccggttcatcgtataaatgaattaaaaaagaactaataaccaacgcatcgcttcggattatctagatctaaagaactagtcaaaacaaaaaaaaatataaaaaaagatatattatagcaactgaactattgtgaagcataaaagaacaaaaatcttatttagttgtaaagcaataaaaatatacagataaatgaagaggtgaaagaaagagagaaaaaaatcaat

SEQ ID NO: 265389 - DNA, 458 bp, Glycine max
  unsure (1)..(458): unsure at all n locations
aaaagggggcgaccgacgcgtacgataaaattaaaaattactcnatttttatttttccaaaatcatcaaatatataagatggccgcgacttttaaatgaacggcagcacttcatatttatcttattactatgcttaatgagcaactccctacttttttagaaccgctccactttaacacatttataaacccccatcatcttataaatcaattaaacaagaactaataaccaactcatccttctcaattatctatatctaaagaactattcaaaacaaaaaaaaatatacaaaaactatctattataacaacttaactattgccaagcatataataacaaatatcttatttacttttaaatcaatataaatatacatatctattaatacgtcaaacaaaaaaataaaaaaaaccattcatatatatactctaatatctaaaacgcctattccttatatt

SEQ ID NO: 265390 - DNA, 376 bp, Glycine max
cccacgcgtccgaaaaaaaaaaaaaaaaaaaaaaaaaaaaaaaaaaaaaaaaaaaggaaaagggaaaaaaaaaaaaaaaaaaaaaaaaaaaaaaaaaaaaaaaaaaaaaaaaaaaaaaaaaaaaaaaaaaaaaaaaaaaaaaaaaaaaaaaaaaaaaaaaaaaaaggggggggcctttttaaaaaatcaattttttcttccccttttttgaaaaatatttttttttttttggggccactaaaataaatttaatggcccccttttttaaaactttggattggaaaaaaccttggttttcccaaatttaatccttttgaaaaaaatccctttttgccaagttgggtaataaaaaaaaaggcccaaacaattccttttt

SEQ ID NO: 265391 - DNA, 437 bp, Glycine max
cccacgcgtccgcccacgcgtccgagaaacagtgtgatgaaaatgaaggtccttgttttcttcgttgctacaattttggtagcatggcaatgccatgcgtacgatatgttccctctccgaatgaacactggctatggtgcccgtactccggaggtgaaatgcgcaagttggaggcttgctgtggaagcacacaacatctttggctttgagaccattcctgaagagtgcgttgaagcaacaaaggaatacatccatggcgaacaatatagatcagactccaaaacagttaaccaacaagcttacttttatgccagagacctcgaagtccatcccaaggacacatttgtgttcagtatagatggcaccgtactctctaatattccatactacaaaaaacatggatatggcgtggagaaatttaactcgaccttgtatga

SEQ ID NO: 265392 - DNA, 406 bp, Glycine max
gcgctgacaatgaacagaacatcaagaccagtaggtttgatgcgcatattttgtgaatatatatattagggcgggagtaacaagctttggctcacgggtaagctggctagctatgggggaattcaagcactttgtaattgttaagttcaaggaaggtgtggccgttgacgagctcacaaaagggatggaaaagttggtcacggagattggtgctgtcaagtcctttgaatggggacaagacattgaaagcctaaatgtgttgagacaaggtttcactcatgcattcttgatgacattcaacaagaaagaagactttgttgcatttcagagccacccaaatcatgtcgagttctcgacaaagttttcggcagctattgagaatattgtgctactggatttcccatct

SEQ ID NO: 265393 - DNA, 337 bp, Glycine max
cccacgcgtccgaaaaaaaaaaaaaaaaaaaaaaaatttttaaaaaaaaaaaaaaaaaaaagagaaaggggaaaataaaaaaaaaaaaaagaaaaaaaaaaaaaaaaaaaaaaaaaaaaaaaaaaaaaaaaaaaagggggccgccctttttaaaaaaccaaattttctttccccttctttcaaaattataattttttttttggggcccctaaattaaattcactggccccccttttaaaaccgtcggactggaaaaacccttgccttacccaacttaaatccctttaaaaaaattccccttttcccaatttgggtaaaaacaaaaaagccccaaccc

SEQ ID NO: 265394 - DNA, 399 bp, Glycine max
  unsure (1)..(399): unsure at all n locations
cgacccacgcgtgcgtaacaacagaacacacagctcttactttcttccgccattttccacaagaactctccaaggatcctcggtgccacgagattctttggtgggaaaaatccaagaggtttgaaatttgaatgcatggaagatggattattttaatgcaccaggaagaaaccatctctttgttccagggccggttaacattccggaccacatcatccgggccatgaacagaaacaatgaggactaccgttctccagcaatttcagctatgacaaaaactttgcttgaggatgtcaagaagattttcaagaccactactggaaccccatttctcatccctacaactggtactggtgcttgngagagtgctctcacaaacacactgtcttctggggatcg

SEQ ID NO: 265395 - DNA, 420 bp, Glycine max
  unsure (1)..(420): unsure at all n locations
tcgnccacgctatcgtgaggagaatatgaagtngtttgttttctttgatgctgcagtagtttgggtggcatggccatgccatggcgcacgctaccaaaggttccctctccgaatgaaaactggctatggtgagcgttcttcggaggtaaaatgcgcaagttttacgcttgctgtggaagcacacaacatccgagcctttaaaaccattcctgaagagtgcgttgaaccaacaaaggactacattaatggcgaacaatttacatcagactctaaaacagttaaccaacaagctttcttttatgctagtgaacgcgacgtccatcacaacgacatatttatattccgcataaataacaccgtactctctaatatcccatactatgaaaaacatggatatgcggtggaggaaattaatgaaac

SEQ ID NO: 265396 - DNA, 319 bp, Glycine max
  unsure (1)..(319): unsure at all n locations
ctnctctctctctctctctgaactcaacccttctttccttccgcgacgacaacagcaacggggaccaactacggcacaattccaacctcctccacaccttccaccaacctcgagttcatctcacgcgccaagcagcgcgtcaaggagggactcggaacccgccgtccatggaagctcatgttcaattgccgatccttcgccctccccgccggcgtcggagacgccgtctcgcgcgtgagggagaacatctcctacttccagatgaactacgcgatcgtcgggctcatcgtgctgttcctgagccttctctggcatccaa

SEQ ID NO: 265397 - DNA, 328 bp, Glycine max
  unsure (1)..(328): unsure at all n locations
gccttcancaacagtttttctgggtcattgtctgctgaattctctcanctagcatccctcggcgttcttaatctagctgggagctacttcaaaggttcaattccatctgaatatggttctttcaagagccttgagtttcttcatcttgcacgaaattctctttcaggaagcatacctccagaacttggtcatctcaacacagtgacccacatggaaattggctacaacctataccagggttttattccacctgaaatacgtaacatgagccagcttcagtatcttgacatagcaagagcaaatctttctggccttataccaaagcaac

SEQ ID NO: 265398 - DNA, 441 bp, Glycine max
  unsure (1)..(441): unsure at all n locations
cacacatcgttttatccgaaagcaagcattatcagaagcagaaagaaagaataagaggttgcagcaacaatggcagccatggctgcgcttcanagctcaatggtcggtctctccctctcctccaactctttcttaggccaacgcctttctcccatcaccctcccctctcttcttccgggtaagtcaacagagaagcaatgtcctattgtaatgaggcttaaacgatgggaacggaaggagtgtaaaccaaacagccttcctatcttgcacaaaatgcatgttaaacttggagatacggtgcaagtcatatctggacgtgaaaggggtaaagttggggagattactaaaatcttcaagcataacagcactgttatagtgaaagatttaaatttgaagacaaagcatgtgaagagtagagaagagggggaaccagggcaaatt

SEQ ID NO: 265399 - DNA, 397 bp, Glycine max
  unsure (1)..(397): unsure at all n locations
cccacgcgtccgcccacgcgtccgggtgtacacagtgtatgccacagcagcagaccctaagaagggatcattgggaaccattgcaccaattgccattggtttcattgttggtgccaacatcttggcagcagggccattctctggcggctcgatgaacccggcacgctcctttgggcctgcagttgttagtggtgacttccatgacaactggatctactgggttggacctcttattggtggtggnttggctggncttatctacggcaatgtcttcattcgctctgaccatgcacctctttccagtgaattttgatctgattcaagtcatggcctttgnaattcatggttctttttctatctctctttgttttctctctcttccatctatgcttttttt

SEQ ID NO: 265400 - DNA, 316 bp, Glycine max
tgaaaacccaaagtgcttctctcctctgtctatttctctctcttgctatcctgggggctagtggcactgctgcaagtgcaactccaagaagcgcagtgtcaagccaccatgtttcaacattcaacagaagcctttttccttacacttttctctatggaattggttcttatgcttaccaggcattaaggagcatcaagtgtagatgggagaggaccaagcatatgggacacctacactagacagcatactgaaaagatgtgggatcatagaaccggtgacatgggagctgatttctatcatcgatacaatggtgaca

SEQ ID NO: 265401 - DNA, 294 bp, Glycine max
gcggctataagctagtttatcgtgaggagaatatgaagttgtttgttttctttgttggtgcaggatttttggtagcatggccatgccatggcgcaggctactaaatgatccctctccgaatgaaaactggctatggtgagcgtgcttcgtaggttaaatgcgcaagttttatgcttgctttggaatcacacaacatccgagcctttaaaaccattcctgaagagtacgttgaaccaacataggacgacattaatggctaacaatttagatcagactctaaaacagttaaccaac

SEQ ID NO: 265402 - DNA, 347 bp, Glycine max
gctagcgaagatgtctggtcgtggaaagggtagcaaggctttgggaaagggacgagccgagaggcacaggaaggtgcttcgtgacaacatccagggtatcaccaatcccgcaattcggcgtacggctcgcacaggtggcgttaagagaatcagtggtctcatctacgatgagacacgtggcatcctcaagatattcctcgtgaacgttattcgcgacgctgttacctacaccgaacacgctagaagaaagaccgttaccgctatggatgttgattatgctctcaagaggcaggacaggactctctacggtttctgtggttaatttctagggcctccatcggcgtatc

SEQ ID NO: 265403 - DNA, 456 bp, Glycine max
tccacgcgtccggtctctctctcacatcatcatggcctccccaacactaataacccccaggtcagtgaaatcactcacacccatcaagcccaaacccaccaccaccatcgccgccactctcacaccacccacaacaacctccaccgtcgtcgccacccaccctcgccgccgcgaattcttgtccatcatcaccgccaccacatggctggtccctctgagcccggcactggcttcctcggacgaggaatacatgaaggagacctaggaagtgatcaacaaagtgaggacaacaatcgtgatggacaagaatgaccccaacgtggcaaccgtggtggcggagttgagagaaaccttgaactcgtgggttgcaaagtacatgagtgaaaaagcgcttctgggacgcgtttcctttaaggacaattatttcggcggctaacgctatttctggtcactaca

SEQ ID NO: 265404 - DNA, 249 bp, Glycine max
atggtacgtctcactactgataatgattctgctggcaatgaacagactatcaccttggaggaaattaatgaatcaacagccaacatgtaacagattattgtgtattgagttactgttgaattgttacgggctgaatgcttggaaagacaagtgaaactaaaggtgttacgatatgtatgtaatatatttgtatttaccgaaaatcatatgtaattaatgtaactgcatttttatctgactctgtattac

SEQ ID NO: 265405 - DNA, 414 bp, Glycine max
gtgatcgagataactagaaacagtgttatgaaaatgaatgtccttgttttcttcgttgctacaatttgggtagcatggcaatgccatgcgtacgatatgttccctctccgaatgaacactggctatggtgcccgtactccggaggtgaaatgcgcaagttggaggcttgctgtggaagcacacaacatctttggctttgagaccattcctgaagagtgcgttgaagcaacaaaggaatacatccatggcgaacaatatacatcagactccaaaacagttaaccaacaagcttacttttatgccagagacctcgaagtccatcccaaggacacatttgtgttcagtatagatggcaccgtactctctaatattccatactacaaaaaacatggatatggggtggagaaatttaac

SEQ ID NO: 265406 - DNA, 410 bp, Glycine max
gggagtagcggcattaaaaatgcacatcttcgtgaaaactctgacagggaagactatggccctcgaggtcgagagcagcgacaccatcgacaatgtcaaggccaagattcaagacaaggaaggcattcctccggatcagcagcgtttgattttcgccggaaagcagcttgaagatggaaggaccctggccgattacaacatccagaaggaatcaacccttcatctcgtcctcaggcttcgtggtggcatcattgagccttccctcatggctttggctcgcaaatacaatcaggacaagatgatttgccgcaagtgctacgcccgtctgcatcctagggctgtgaactgccgcaagaaaaagtgcggtcatagtaaccagtttgaggcctaagaagaagatcaagtgaatt

SEQ ID NO: 265407 - DNA, 408 bp, Glycine max
gggggatccactgttgcagaatccagtttgtgacaccaattccaaatcactattcacgatgactactgagacccaagaggagcttcttgctcaacatctcgaacagcaaaagatccatgatgatgaacctgtcgtcgaggatgataatgatgaggaagaggatgatgatgatgatgaggatgacgaggatgatgaccatgccgacggactagaaggtgatgcatctggtaggtccaagcagaccagaagtgaaaagaagagtcgcaaggcaatgcttaaacttggaatgaaacctgtaacaggtgtcagccgagtgacggtcaagaagagcaagaatatcctgttcgtcatctcaaaaccagacgttttcaagagtccaacgtctgacacgtacattatatttgggga

SEQ ID NO: 265408 - DNA, 460 bp, Glycine max
tcgcccacgcgtccgctcacgcgtccgcccactcgtccggcacctccttcatgaggaagcagcgtatgacgaccaagagcctaaagacattccccaacgctctttttggtctgaaaggtggacgaggtggtcgtgtaacttgcatggcctcgtacaaggtgaagctcataaccccagaaggagaattggagtttgaatgcccatatgatgttttcattgatgacaaggctgatgaagaaggcattgaactttcgtactcgtgcagggctggttcttgcgtttcatgtgttgggaaaattgtgaaaggtgacgtggaccaatcagatggtagctttcttgatgatgaacaaattcaaagtggatggggtcttacctgtgttgctgtacctaagtcatacgtttgcattgagtcacacaacgatggatagatcgaatgatcgatatgtatcataatgtaatc

SEQ ID NO: 265409 - DNA, 451 bp, Glycine max
gtttgttgtgagctataagctagtttatcgtgaggagaatatgaagttgtttgttttctgtgttgctgcagtagttttggtagcatggccatgccatggcgcatgctaccaaaggttccctctccgaatgaaaactggctatggtgagcgttcttcggaggtaaaatgcgcaagttttaggcttgctgtggaagcacacaacatcctagcctttaaaaccattcctgaagagtgccttgaaccaacagaggactacattaatggcgaacaatttacatcagactctaaaacagttaaccaacaagctttcttttatgctagtgaacgcgaagtccatcacaacgacatatttatattcggcatatataacaccgtactctctaatatcccatactatgaaaaacatggatattgggtggaggaattttatgaaaccttatatgatgaatgg

SEQ ID NO: 265410 - DNA, 433 bp, Glycine max
cgttttagatcgtaaaaactaatcactacgaaaacaagagatatcgaagatggctctgcccagagctaaggagagcgtgtcgttcaattccgtcgtcgttttcagcaaaacctattgccctttctgcgtcgatgtgaagaagctcttcggtgacctcggtgccaattacaaggccatcgaactcgacactgaatccgatggaaaagagctccaagcagcattagttgagtggacggaccagcgaaccgtgcctaatgtgtttattggtggaaaccacattggtggctgtgactcaacaactgccctgcacactcaggggaagctggttcctctgctgatatctgctggagctgttgccaaatcaactgcttaaaggatctcccatttctaggttatgcaggtaaataaaaataaaaacccaagtagttgggtc

SEQ ID NO: 265411 - DNA, 430 bp, Glycine max
catgatccagatcagaactgggaattgtgcatctgggtttggtttgaattgtgctgggaaggttaaggttggtcccagcagagttgggtttaaggtgtttgcttcagagactcaggctacagagcctgatcttagtgtaactgttaatgggttgcgcatgcctaacccctttgttattgggtcaggtccaccagggaccaattacacagtcatgaagagggcctttgatgaaggttggggtgctgtgattgcaaaaactgtatcacttgatgcggcaaaagttataaatgtaactcctcgatatgcccggctacgggcaggtgcaaatggatctgcaaaaggagaaattattggatgggagaacatagaacttatcagtgataggccacttgaaactatgttgaaagaattcaagcaatttaaagaagag

SEQ ID NO: 265412 - DNA, 458 bp, Glycine max
tcgcccacgcgtccgtggaagaaaatggcgggttgtggaaaggtttcgttcaaagtggcactggcctcctatccaaaattacccttcaaagtgtttagcgtttcataggctgcgccttttactgccgttctcaaattcgccgccgaagaattcaaagtcccgccccagaccatcgctatcatcaccaatgatggtgttggcataaatccccagcagagcgcatgctatgtcttccttaaacatggttcagaattgcgcctgattccgcgcgatagggttggtgccttttatatgttacagatgtgtttgactggagttgatgccttttatattttacagatgtctgacttgatattgacccttctcgattgatacatgaactgtagcttcatatgttgtaatcatttaataccattgttactgatttcatatattgatattgagatcaaaggtgtctt

SEQ ID NO: 265413 - DNA, 408 bp, Glycine max
gaggtgtaacacccaaagtgttctctcattgcttaaaaggaggagagaacggaggaggcgtgctagttcttggtgaaattttggaaccaagtattgtttatagtccacttgtcccatcacagcctcattacaacttaaatcttcagagcattgctgtcaatggacaacttctcccaattgattcaaatgtatttgcaacaactaacaatcaaggaacaattgttgactctggcacaacattggcataccttgttcaagaagcttacaatccttttgtcaagctataactgctgctgtgtcacagttttcaaaacccattatttcaaaaggaaaccagtgttatctgctatcaaacagtttctgatgatctcaattgaatttatgcttattcaacgtaagtgatatatt

SEQ ID NO: 265414 - DNA, 318 bp, Glycine max
actcgtccgtcaatatagcccattccctatacaacttaaccctaacacacaccgatttgattcagtgtccatggctagcctcaaggttgcatttttggctgcagtgctctgcatggttgtggtgagtgcacccatggcacatgcagctatcacgtgcgggcaggtgacgagtagcctggccaattgcatcggttacctccagaagggaggaacgccgtcgtcgggatgctgcaacggagtgaagagcctcaatgccgccgtcaagaccaccgacgaccgacagacggcgtgcaactgacttaaatcctcttgcagcca

SEQ ID NO: 265415 - DNA, 516 bp, Glycine max
tcgtcccactgcgtctcgtcttcaattctatcacattctcatatcactcacattcatgaaactccttctgtccctgtggaacaacattgagacgatctgtgatgtgcaccataagggcggagatagaagccccgcagtaggagaagacagtccatcggtgggagacaaggtctccgtgcggagaagaagccaaagggccggaaagaagcttccgaaggagggaggcgccggcggagaagggaagaagaagaagaggaacaagaagagcgtggagacatacaagatctacatcttcaaggttctgaagcaggttcaccctgacattggtatctcaagcaaggccatgggaatcatgaacagcttcatcaacgacatcttcgagaagcttgcccaggaatcttctagacttgcccgctacaacaagaaacccaccatcacttcgagggaaattcagaccgcggtcaggcttgtgctgcccggtgaattggctaagcacgccgtctctgagggtaccaa

SEQ ID NO: 265416 - DNA, 472 bp, Glycine max
cccacgcgtccgcctagtccttatcagcttcactatttcgattgaaatcgccgaagaaggtattgacgtcgatgatgaaaatgaaattggtgaaaacattactgcttctcctttgtgtgaaactcttctgttatgcagtgattggtgctcctcaaacttgtcctgctaacaatgaggataaatgcggcgattcagatgaatggaaaggggagtttttccctgacattcccaaaattaaatatgagggtccgtcaagtaagaatgtgctttcatttaaatggtataatgcagaggaggaaattcttgggaagaagatgaaggattggttaagatttagtgttgcattttggcatacattccgtggaacaggtgctgacccatttggtgcacctaccaaatactggctatgggaagatggtaccaattcattaaacatggctaaaagacgaatgagagctaactttgagttcat

SEQ ID NO: 265417 - DNA, 473 bp, Glycine max
ctcaaatgttcatttaaaggatacagtgatgcttggtgctgattactatgaaaccgatgcataagtggtagcactcttagctgaaggaagagttccaataggaataggagaaaatacaaaaatcaaggactgtattattgacaaaaatgctagaattggaaagaatgttgtcatagcaaattcagagggcatacaagaggctgacagatcttcagaagggttttacatccgttctggggttaccattgtattgaaaaactcagtaattgaagatggattcatcatataataaattcgcccgtgatttgtttgccccgttttaccatgaatttgaggatgggaatgttttgatctttatgaattatgtctttttttttaaagaaaagcattaaatgacaatgtgttgccgaaatggatattccaaattcagcacaacttctctgagcttgtacttgtatatcataattattaac

SEQ ID NO: 265418 - DNA, 425 bp, Glycine max
  unsure (1)..(425): unsure at all n locations
cgtttcgaattcggctcgaccacgcgtccgccaatatagcccaagccctatacaacctaaccctaacacacacccatttgattcagtgtccatggctagcctcaaggttgcatttttggctgcagtgctctgcatggttgtggtgagtgcacccatggcacatgcagctatcacgtgcgggcaggtgacgagtagcctggccaattgcatcggttacctccagaagggaggaacgccgtcgtcgggatgctgcaacggagtgaagagcctcaatgccgccgccaagaccaccgccgaccgccagacggcgtgcaactgcctcaagtcggccgccagccaaatctccggcttcaacgccaacaacgccgnctcgctccccggcaaatgcggagtctccatcccctacaagatcagcaccttcacca

SEQ ID NO: 265419 - DNA, 286 bp, Glycine max
cacgcgtccgaggccgcaaatgtctgtcctcttctttttcttcattctatttcaaccatgaaagagagcctgctcttaaggggttgccaatgctgtaacgaaatcggatccaagttctgatacgtgatattctactagcacgtcattgatcctaccggaaagtacaactactaaagcaacagctacatacaactagagaggatcaatgtctattacaatgttgcctttgacataaggtacgtatcaagagccctgcttatggatcttgaaccttgtaaccatggac

SEQ ID NO: 265420 - DNA, 460 bp, Glycine max
ggaaactttttcgattttcgctttctggatgtgtgaattgttgtttgaaagtcacaagcgatggtgaaggacactgcgtattatgacatattaggtgtcaattatgatgcatctgctgcagagatcaagaaagcttattatgtcaaggctagaattgttcaccccgataaaaatcctgaggatcctaaggccgcagaaaactttcagaaacttggtgaggcttaccaggttttaagtgatcctgggaagcgtgcggcatatgatgagcatggaaaggagggagtaccacaagattccatgatggaccctacaactgtatttggaatgatttttggaagtgaattttttgaagaatatattggacaacttgcactggcttctttagcatctatagaaattgaggaagactcacaggatccttgagttttgaggcatagaattcaagaaaagatgaaagctt

SEQ ID NO: 265421 - DNA, 439 bp, Glycine max
atggaatttcgatgctcagtcatctcttttaccattctcttctctcttgctcttgcaggggagagccatgtccatgcatcgctacctgaggaagattattgggaagctgtttggccaaacactcccattcccactgcactgcgagagcttctaaagcctctccctgcaggtgttgaaatcgatgaactccctaagcaaattgatgatacacagtacccaaaaacattcttctataaagaagaccttcatccaggcaaaacaatgaaagtacaattcaccaagcgtccctatgcacaaccttatggtgtatatacatggttaacggatattaaagacacctctaaagaatgatatagttttgaagagatatgcatcattaaagaagcgtttgaaggagaagagaagttttgtgcaaaatccttgggaacagtaattgggt

SEQ ID NO: 265422 - DNA, 312 bp, Glycine max
cccacgcgtccggtttcaagaggctattactgcataccccaatggcgttcatccgtatgattggatttgacaacgttcgccaagtgcagtgcatcagcttcatcgcctacaagcccccaggcttctaagtcattgaaaaatttgcaaagcatctgtagccaccccactttgtttgttgtacttaaactacattcccatttgtttttgctttatgagatttcatcatcctgtatttttggtttctgttttcggacttcaatggaaattaatggatgagaactaatgaataatctaaaaaaaaaataagttaat

SEQ ID NO: 265423 - DNA, 451 bp, Glycine max
cccacgcgtccgcttctacctctaatctatgaataggaaaaagatgggcagcagtagtgcgagtgccctcaggctatcgtcgatggtcagcgtgtcctcgaattgcaattgctcatcgatgacgcttatgaagaagacggcgatggcgatggctatggctcctttttcacttgcaatgaaaatcaaaagcaaaaggggtggtattaggtgcgaggtggctattaatgcggtggatgaggagtcgaggacgtcaccggaggagacgaatatcggagcgcgtgtgaaggtgaatgaggcgggtttgaaggtgtaccacgttctcaaagttggggagcttgacctaacgggtctggaatgcgagatcaagcagtgcgttggcctctggaacggtaagcgaatcttcgccaatcttccttacaaggttcagtttttcaccgacatccccggtcgt

SEQ ID NO: 265424 - DNA, 443 bp, Glycine max
cttatttcttgccgttgggaggaaaccacttccagcggtacacatgcagcatgttaaggggatgtgagtggtgcaacagcacctggtcataccgagaagacaacgttcatgaagccaaataggagctgcgcacttctcgatgcgcatcctgacatgtactccaattgactatcgatcacgttatgtgcttgtacacctaaatcgctgcacataggcgtcaccttaaagcctatggccttgatcatgaagctatacgttgagaagtgagaatctacagcgattgagaagcccaagcgcgtatggtcatgattcaagctcatgactattgtacctgtgacgaatggtgacataacaggagcgtacattggcatgacctttactctagtggacatgtgaccgcttatgaatgagcatgatccggcatagtatactattggatacag

SEQ ID NO: 265425 - DNA, 484 bp, Glycine max
aacaaattgtagcataagtcccatggccaatgagactagtgttgtttatctatatcccagcaaatcacaagtttggggtgagaattttgatcataaaaaacttgtaataacaacactagctgctaatggaaagaaggaggagagtaatggagcacctaatgacacatatcctgcgtttcccgggtggtatgctgatgtttcctggccaggagaagcacacacatataaaatagaaaagattctattccacgggaaatcagaattccaagagcttcttgtatttgagtcttctagacaaggcaaggttgcaattcttgatgggcatatccagctgacagaaaacgatgaatttgcttaccaagagatgctcactcaccttgcactctgttccattccagatccaaagaaggtgctgcttattggagggggagatggtggaattcttagggaaatatcacgccattcttctgttgagcatattgat

SEQ ID NO: 265426 - DNA, 406 bp, Glycine max
  unsure (1)..(406): unsure at all n locations
cacaacatggtcttccacttgccgctgcagagcgatatcttccttgggtttcttctgtctattaacatgggtcaaatgttcttcgttcctaccaagaacctgctccattatagacccccnttataaccactagtgccctcaaaccgtggcaatgtttgtgtcacacttggtggaacctttgtccattgtgggtgccattaattcgcacaagttgtgggggcctataatttctgctgctgttgcacaagaagaggctgttgttgttgctgaagatgacgtatatgatggtgcttggttaattgaagaatataaagtgtaggataatgaaagaaaagttttttcagatcaagactcttaatcctctgccaccaacctttatttttggaatttgccttatattgattat

SEQ ID NO: 265427 - DNA, 438 bp, Glycine max
tgcatcaccgcaagtccacaacatggctgccactgccgctgcaggcatagcttcctggttttcttcttctattaacagtgtcaaatgtcttcgttcctccaagaactgctccattatagacccccttataaccacagtgccctcaaaccgtggcatgtttgtgtcacacttggtggaacctttgtccattgggggtgccattaattcgcacaagttgtgggggcctagaatttctgctgctgttgcacaagaagaggctgttgttgtggctgatgatgaggtagatgatggtgctggtttagttgaagaagagaaagtggaggagaatgaaggagaagtagttgcagaacaagactctgattcctctgccaccaagctttattttgggaatttgccttatagtgttgatagtgccaaacttgcagggctaattcaaga

SEQ ID NO: 265428 - DNA, 484 bp, Glycine max
cccacgcgtccgcgattgctagaatggaatttcgatgctcagtcatctcttttaccattctcttctctcttgctcttgcaggagagagccatgtccatgcatcgctacctgaggaagattattgggaagctgtttggccaaacactcccattcccactgcactgcgagagcttctaaagcctctccctgcaggtgttgaaatcgatgaactccctaagcaaattgatgatacacagtacccaaaaacattcttctataaagaagaccttcatccaggcaaaacaatgaaagtacaattcaccaagcgtgcctatgcacaaccttatggtgtatatacatggttaacggatattaaagacacctctaaagaaggatatagttttgaagagatatgcatcaagaaagaagcgtttgaaggagaagagaagttttgtgcaaaatccttgggaacagtaattggttttgccatttcaaagctgggaaa

SEQ ID NO: 265429 - DNA, 277 bp, Glycine max
ctcacgcctacgtcaacgcgagcagtatatgcaagtgtatcgtgaggagaatactacagtggttgtggtctcaggtgcaggccatggcgcaggcgtacgaacgtgccatgtcgcgaagctacccaaggtatcgtgagcgaatgaaaactgtctatggcgcacgttctacgctggctaaatgcgcacgcatcatgctagccgtgaaagcacacaacatacagtgcgttgaaaccactcatgactagagcaatgaaccaacatatgaatccaactatgg

SEQ ID NO: 265430 - DNA, 157 bp, Glycine max
  unsure (1)..(157): unsure at all n locations
cccgnaccccggaggngaaaagcgcaagnnggaggcccgccgnggaagcacacaacancnnnggccnngagaccannccngaagagngccgcgaagcaacaaaggaanacanccaaggcgaacaananagaacagacnccaaaacagnnaaccaaca

SEQ ID NO: 265431 - DNA, 338 bp, Glycine max
cacagaccgagaaatcccaatcctatggcacaagacgggtatctcgatgaacagttggcgcagctactatccaattttgtgcaccagagggaatcactgtcgaatcaagaagaagtagagctgcgtactaaaaatgaaactcttgtattagaggttacaatagatcttttttaaagacaacgcagcaccatgaacgagacgcaaatagcttataatgtcggataaataatcaccctgattggataacttagatgagaggatatcaatcatcaaaggcttcagtaacacaggtgcagacgctcttgagtgatgcaaacataatgtggatgccagctata

SEQ ID NO: 265432 - DNA, 391 bp, Glycine max
gcggaaaaaaaagattctaaagaaatataactaatattctttagaataatcaaaaagaatgtggaattcaaataaattttagatagaaaaaagacttaaaaaggaggatttgaaatgcgagatctaaaaacatatctttccgtggcaccagtagtaagtactctatggttcggggctttggcgggtctcttgatagagatcaatcgtttttttccagatgcattgatattcccttttttttcattctagttattgacacggaaaggggtgaagaagattatagatccaattaagtattaaatatatgtaattaatatgtaattaatctcctcttctttatttcgtcttttatgtcttctttattttacaattgaaaaaaacacacgattgg

SEQ ID NO: 265433 - DNA, 282 bp, Glycine max
gaaaaaccggggcgacgcacgcgtccgtcttcaacgcggtgtgttgcggaggacttgatcgtgaatgaagggagggttgccggggtgttgactaggtgggctctggtgtcgatgaaccatgacacgcagtcatgcatggaccccaacgtgatggaagcgaatgttgtggtgagctcttgtgggcacgatggaccctatggcgccactggggttaagaggttgaagagtattgggatgattgatagctttcctggaatgaaggctttggatatgaatgctgct

SEQ ID NO: 265434 - DNA, 300 bp, Glycine max
gagattctgaaagggaaagttgctctaatcactggtggagcctccggaatcggattcgaaatttccacccaattcggtaaacatggagcctctgttgcgctcatgggtcgccgcaaacaagtccttcagtccgctgtctccgttctccaatccctcgtcattcccgctgttgggtttgagggggatgtacggaagcaagaggatgccgcaagggtggtggaatccacgttcaagcattttggaaggattgatatactcgttaatgctgcagctgggaactttctccgttctgcagaagat

SEQ ID NO: 265435 - DNA, 303 bp, Glycine max
gtttgatgttctaactctttcttctacttttattgttctgactatgtttgtgttttttgtctcacctaaaaatatcttgctacaactgtaactactgttgcagaagctcctgcaagttcggcaactgctacctaagctgcaagacatacccacacttgagctacactgagtcaaccaccacctataccttagtcatgtgagtgccacctgctaacgctcaatatgactgttcttaaattggagtgccctctaagaacgatggctgctaacttaaaccaaactgcatctacaacccctgcactt

SEQ ID NO: 265436 - DNA, 422 bp, Glycine max
cccacgcgtccggtgggtgttaacacattttcttgtgtgccaccatcgacggcaagctatgcatgcgagcctacactccaacaagtagtgtggatgaagtgggtttctttgatctactcatcaaggtgtacttcaaaggtgtgcatcccaagtttccaaatggaggactcatgtctcaacatttggactctctacccattggatccatgttggacgtgaagggcccattaggtcacatagaatacaccggaagaggcaacttcatggttcatggaaaaccaagattcgccaagaggttggccatgttggctggtggaactgggatcacgcccatttaccaagtggcgcaagcgattttgaaggacccagaggaccacaccgaaatgcatgtagtgtatgcgaatcgcacagaggatgatata

SEQ ID NO: 265437 - DNA, 395 bp, Glycine max
gtaatgagagggcgaagttattaatgctctagatcgttacgagcgtttcgtcgtccttgaaggcaccaaaaaggtttcttatgagagggacacgaagatcatcaatgcggcgtccttcaccatcgagagagaggagcacactatcggcaacatcctcctcatgcagctgcacagagaccccaatgtcttgtttgccggatacaagcttcctcatcctcttcaatacaaaattattgtcaggatacacaccactagtcagtcttcgccaatgcaggcatataaccagtctgttaatgatctggacagggaacttgatcatttgaagagtgccttttaggcagagatgttgaagttttctagggactattgatatacggtcaaaatggacggtgttg

SEQ ID NO: 265438 - DNA, 421 bp, Glycine max
ggggattgcaacaattatttcaaccccatatcgagttcctgttatccgcgaaggctttgctttgaacgagtacgttcggtaattttgcagttatactgccttgtgtcccccttcgttctgagtggaccgtcgttaatggccaaccagaaggacccgcagttaaaattggttcgcccccaaatgcagaaaatggttggtttgaaattgagaaattgttaactttgggctataagcttgtgttctgtacgcggcctgagcgtagctattgtcaggatattgggattcatgtcgatgatgaaaatcacgcgcgtttggtgttgacaaatgatgatccactagtggttgagtgtctggaatatgatcccttctggccccaaaataatctagtgcttactacatgtcaatgagagactatttaaat

SEQ ID NO: 265439 - DNA, 425 bp, Glycine max
aatgatgatgactctttgtaggtcagagcttttgcagaaaacacattgctcattatgggcaccacatggcctcctacgtcctacacctgcaccttctgcagaagggagtttcgctccgcccaagccctcggcggccacatgaacgtccaccgccgcgaccgcgctcgcctccaccaagctccagtaccctcctcctcctccaaccccatgacctcttctcttcccacttcacccttcatcaatatccctcctcaagaccttgttgcaaatgctggcttgtgcctcctctaccacttgcccaaaagccctagtagtactgcaccaccctttccaccttcccacactactccttcttcttccactcttctctctatctcttcttatcctacaaccaactttttgattcaaactttccttaatttttc

SEQ ID NO: 265440 - DNA, 418 bp, Glycine max
cccagcgtccgggctgcttcattctcaagcatgctcattattccctcggcaaaataagctacgaagctagcttgggaggattaagcttccacaacttcctaacagcaaaatcaccacctctgaagcgaaaccaaaagtcaataaaagttgttacacgcgataaccactcacccctggtcgacgacctcatgatagaagtacaagaacatgaacatgaacatgcaacgctgcatcagaaagatctctcagaaatgtggcgccaaatccacggtgagaagaactgggaagggcttctagaccccatggaccctcttttgaggtcggaggtgatccgctacggcgagctggcgcatgcctgctacgacgccttcgactacgagccattctctaggttctgcggcacatgcaagttcgagga

SEQ ID NO: 265441 - DNA, 271 bp, Glycine max
cctggttacacctgctccctctaaaccagtgaaaggattgaggaaaatgtggtcaaaatcgacatgagaggatgtcgagccacactatctctcttctgtcctgattggaactgctgttgtttgttttgctattatttgaaaaaccatttgtttttaattgagattgttgcatgtatgttttaatcctaggcaagtagcagcaaagatgcttctctgtgacatgttcaattattaatttatatgaattgcgcttttattcaacaaattaaag

SEQ ID NO: 265442 - DNA, 430 bp, Glycine max
ctgagaacaattacaagaaagattgaggtccttgtggacctttcagcgatagagattggtcaagacatgcttctgatgagatctaccttgggaagagggacagtgacgattggactgatgaccaaaaggcaattcaagcctttgaaaagtttggaaccaagctgaatgaaattgaggccaaaatcaattcgaggaacaaagattcaagccttagaaaccgtaatggaccggttcagatgccttatactgtgcttcttcctaccagtgaggaaggccttactttcagaggaattcccaacagcatctgtatctaaggccagagtgcgtttatgtgtggttctctttccaaacctacgttacctttctcgttgacgaataaatatgcaagcttatgcatgcatataataattgtcttatgcattcttaagtg

SEQ ID NO: 265443 - DNA, 329 bp, Glycine max
aaatgatttcaggtcaacaggtatctgttgcacatgatgcacctcctgcttcaactccgggagagcgaatggacatcatgactgctctacaacttgcgctgagaaaatctatggcctatggacgtctagcacgaggtcttcatgaaagtgctaaggtgatcgagaagtatgctttacagctgttcgttctatcacaagattgcgaccaacctgattatgtgaaactggtgaaggctctttgatcacagctcaatcttagcctttagacagttataagtgccaagacccttggagaatacgctcatttgtgccagatcgattgacaggga

SEQ ID NO: 265444 - DNA, 455 bp, Glycine max
catcatcgcatgacatccttggatatgcctaccatggcctcctctctgcttctcccacgtggttctgcttgtggtagaagtccctcttttactcctcaaagcattttggtggataaacttcgaagattagttgttaaagtcaagtcctcagagacaagggaatgcaccactgctatgtttaatgccaattcacgtagagactttcttgggttggctttaggagtctcgggtggtctctttatgggttcattggatgcaaatggagctggtttgcccccagaggaaaagcctaaactgtgtgatgacacttgtgagaaagagcttgaaaatgtgcctacggtaactactggatcaggtttgcaatacaaggatattaaagttgggcaaggtcctagtccaccaatcggatttcacgtggctgctaattacgttgcaatggttccctctggacaaat

SEQ ID NO: 265445 - DNA, 477 bp, Glycine max
ccggggcgacgcacgcgtccgtctcctcctaacgctacgacgtcgtttgcccctcgtcggcgcgttttgcatgctcgggttgggacgctccaatctctgcacgcccttccattcctctgccctcaaaacgggatccaagttcggtattcgaagccactccagcaccagaatggaagggagtaactccactgtgccgagtattgttgtctatgtcactgttcccaacaaagaagcaggtaagaagttggctgaaagcatcgtcaaagagaagcttgctgcttgtgtcaacagggtaccgggtattgaatcggtgtaccagtgggagggaaagatccaaactgattctgaggaacttcttattatcaagactaggcaatcccttctggaagcattgacagagcatgtcaaaactaatcatgaatacgatgtgccaaaggtgatctccttacccatcactggaggcaatcttaatattta

SEQ ID NO: 265446 - DNA, 428 bp, Glycine max
gagcgagcgagcgagcagtttcaaagataggatttggtattgggaaggctagggattgcgctacatctcttcctctgctctttcaattcatccctcattcataatcttccaatccaacaacctcagcctcacactcacacatacacacatctgaacgcgtatcgtccctcccatggcttcaaagcgcatcctcaaggagctcaaggacttgcagaaagacccaccaacttcttgcagcgctggtccagtagctgaggacatgttccattggcaagcaacgattatgggtcctgctgatagtccttatgctggaggtgtattcctagtcactattcactttcctccggattatcctttcaaacctcccaacgttgcctttaggactaatgtgtttcatccgaacatcaacagcaatcgtagcatttgtc

SEQ ID NO: 265447 - DNA, 425 bp, Glycine max
tgataattatatatcagttccacaaattgataacaaacagtagtaacatgaatgggagaatagagttcaacacaaaccaaacttattttcaaaggtcattacagacccattacacatcacatttcttcttaaaatgtttgggaaaatccaacatcgaacatcacacagaaatcagctccagcttaaaaccccccacgaagacgcaacaccaagtgcagagttgactccttctggatgttgtagtcagcgagggtccttccatcctctagctgtttgccagcaaaaataagcctctgctggtccggtgggattccttccttgtcctggatcttcgccttcacattgtcaatggtgtcggagctctccacctcgagggtaatagtcttacccgtaagggtcttgacgaagatctgcataccaccacg

SEQ ID NO: 265448 - DNA, 455 bp, Glycine max
cggactcgtgggaaaaataataaaaattttataaaaaaaataaaaaatttttaaaatttggaaaaatttaatgcaaaaaaaaaaaaatataataaacttatttttttttttaataacactatatattatcttttatatttttttcattaaaattaattttttttttcttctataaataatattcaatttaatattttatttaatatctttttaataatataattatttttttttttattatatattttttataaactttcttacttttttaatcattttttattaattatattttataatttgtttatgttttatattatatattatattttaatttttattatattatatttttttttttatttttttaacttaattatattaatttaacttttaattattttaatttatattttttttattttttttatacttaatattattttttttttttt

SEQ ID NO: 265449 - DNA, 377 bp, Glycine max
cgggtcgcccacgctccgctctctttgcgctttctttaaccgaacatttcatctccaaagggatcgcaggtcggggagaaatggggctgacattcacgaagcttttcagccggcttttcgcgaaaaggaaatgcgaattctgatggttgtcttgatgctgctggtaagaccactatcctctacaagctcaagctcggagagacgtactacaattcctaccattgggttcaatgttgagactgggaatacaagaacattacttcactgttgggatgttgtggccaggacaagattcgtcccttgtggaggcactactttcagaacacttaagggcttattttttgttgagacagcaattatagggacagagttgttga

SEQ ID NO: 265450 - DNA, 436 bp, Glycine max
cccacgcgtccgcccacgcgtccgctttgattgagcagttaattggaaaagagaaaggagatgaagttgcaggtccattggtcatgcattccaatcatgatgatgaacatacttttaaggagtttaacccagtgcagtggacatcagacaatccacccaagattcttgtaccaattgcaaatggttcagaggaaatggaagctgttatcatcattgatattctgcgaagagcaaaggcaaaggttgtggttgcttctgttgaggataaactagagattgtggcatcacgcaaagttaaactggaggcagacatgctccttgatgaagcagccaaactttcatatgaccttattgtgttacctggaggacttggtggtgcccaaacttttgcaaactcagaaaccttggtgagtttgctgaaaaagcaaagagaatc

SEQ ID NO: 265451 - DNA, 447 bp, Glycine max
  unsure (1)..(447): unsure at all n locations
gcctgactatgccacatgtgttaagatctccactgatgcttccattaagggaatgattgcacctggtgctcttgtcatgcttacaccgcttgttgttggaatcctttttggtgttgaaacactttctggtgtcctagctggatctttggtgtctggtgtacagattgctatttctgcatccaacaccggtggtgcttgggataatgccaagaagtacattgaggctggtgcttctgagcatgcaagaagccttggtccaaaagggtcagattgtcacaaggcagctgttattggtgacaccattggagaccctctaaaggatacatctggaccttcacttaacatccttattaagctcatnggcggtgagtctcttgttgttgctcccttctttgctacacatggtggcctactcttcaagatctaaaggatttgatagaaaaagag

SEQ ID NO: 265452 - DNA, 386 bp, Glycine max
  unsure (1)..(386): unsure at all n locations
cccacaccctccccaaaattccatggaagtgaatcaccataagcactctaaatccnaaaccgtcgcttttggccggtacaatggcttcnacnacccctcctacnccnaaacgcactcgcttttcggcgagtccaattattctttctccggcgaaacacaagaaatccttaaggatttggtgacatgtgcgagtgttagtgaaaggaatttgctagcggacactacaaagatcattgagaagaataaaacaacgtgcaaacgcaaagactattgttgcataaagatcgttactgaagcgttgatagctctcggatacgacacttccgtatgcaaatctcgctttgaaaaattaactttcttttcatccttgcgaatattatatacat

SEQ ID NO: 265453 - DNA, 443 bp, Glycine max
ctaaaaccaaatactttgtgtgcaaaaccatcacatcatcggcaacaggggcagtaacggtggaagagagaaaggattcgctctcctcaatccttatataagctccagcgacccaatttcttctcttatcgatttgattgtttctgagtaatggcttcgtcgcgagtagatctggatgggaaccccataaagcccatcaccatttgcatgattggcgccggtggcttcattgggtcccacctctgcgagaagctcatgtcggagacccctcacagtgtcctcgccttggatgtctacaatgacaagatcaaacacctcttggaaccccacacgctcccttgggcctctcgcatccagttccatcgcctcaacatcaagcacgattcccgtctcgaaggcctcatcaaaatgtcagatctgactattaatctggctgccatttg

SEQ ID NO: 265454 - DNA, 450 bp, Glycine max
  unsure (1)..(450): unsure at all n locations
gacgaattnnacagacacgctgacatttatagtacatttttcccttcacattaccattgtctatttggtgaaaacaaattcaccgcggacacactgcaaacgctgacaaacaatctatgctacacttatgctaggtgcacacgatctgtttcaattgtgccgcctgcttattatgctcatctagctgctttccgtgcacggttttatttggaacctgatacatcttacagcgggtctatggctggaaccggacggggaggtcctcttggaggccgtaacactcgggccccaaataatactgctgttaggcctgtccctgcattgaaagaaaatgtgaagagggttatgttttacttctgagtctcactaattgaaataatgttttaacttatattaatatccgttgccgttcgtttgaagattcttgcaaacaaagttattttttttttt

SEQ ID NO: 265455 - DNA, 96 bp, Glycine max
tttgattttgctttatgagatttcatcattctgtatttttggtttctgcattcggactgcaatttaaattaatggatgagaactaatgaataagct

SEQ ID NO: 265456 - DNA, 441 bp, Glycine max
  unsure (1)..(441): unsure at all n locations
atttcctcgtttttttcttcccttttctctttctccggcgacgatctcagattccggcgactcctctcgccggcgagcccttactcttccctcctccgtcgagccctctccgattcgaatcgttcccagcctcgcaccaccatgaatcccgaatacgattatttgttcaagcttttgctgattggagattctggtgtaggcaagtcatgtcttctcctgaggtttgctgatgattcataccttgacagctatatcagtaccattggagtggactttaaaatccgcactgtggagcangatgggaagactattaaacttcaaatttgggacactgcgggtcaagaacgtttccgaacaatcactagcagctattatcgtggggctcatggcattattggtgtttatgatgtcactgaccaagagagctttaataatgttaag

SEQ ID NO: 265457 - DNA, 441 bp, Glycine max
attttatactatacccacattttgataattatttttctagttgataagcgatggctacgcgaggaaagcttgaggttgacgttcatctcaagtctaacgcagacaagtactggcaaacccttaggaactccactgaaatattccccaaggccttccccaatgattacaaaagcattgaggttcttgagggtgatggcaaatcacctggttctatccgccacataagttatggtgaaggttcaccacttgtgaagtcatcctttgagaagattgaggctgttgatgaagaaaagaaggtagtgtcgtacactatcattgatggagaactccttcagcactacaaaacattcaagggagacaatttttgtgactccagttggcgatggatgcgaggtgaaatggagtgctgtgtacgaaaagggtagccatgattgttctgat

SEQ ID NO: 265458 - DNA, 444 bp, Glycine max
gattgaacatgcgtacgtttttgtgaagaaaaagtttgaggaattgtggttccagatcgactgctcctgactgtgtacatcgcgtgttcaagatctatcaggcgactgcccttgatcagaagcttgtgaagaagactttcaagcttgttgatgagactttgagacggaggaatctctttgaagctggcttattatgaccatgcaacagtatgtatgtttaagagggatatgatatttttacattgagaaattaaaacgtcatctgattttgttgggtatattagaggtcaggtatacaacaatataaaatcgatttgttgattttatgtcaagtaaatcctgggtggatagggaaagcctttttgaatacctacttgatcaccacatccatctttagaaggaaaattagttgcgctcaaattttcaaagatgacattatgcttt

SEQ ID NO: 265459 - DNA, 397 bp, Glycine max
  unsure (1)..(397): unsure at all n locations
ctgacccttactctcagtccttctacattactacattttgtcgcacaaccaatccaccgtacaacttccagaacgacgagggacaaatcatcgatctctacatccccaagaactgttccgacacgaacaggctcatcaccgctaacgatcatgctgccgtccacatcaacatcgggcatttggatgagagcggagtttacaccgaccagatcactaccttcgccctttgcggcttcatccgtgctcanggtgatgctgatggtgctctggaccgtctttggcagaaaaagaaagtagaagctcgccagcagtaaaaagtagctgtagggcgttttgcagtggaagatctggttttagtttcaacatatgttactttgacctctactagttactctat

SEQ ID NO: 265460 - DNA, 340 bp, Glycine max
cccacgcgtccgaattctgaatttgcggtttttggatttggacttggtcgtcaacaccggctaattggtatcttttggctccttcgcttatgaatctttttcttcttcttcttcttgttcctgcaacgcacttaattcgatcaatcaatccatcttcaattcgcttcgtttcgatcggtggaaaatggcccatcagttatcgaagggagaggaattcgtgaaaaatgctgagatgaatctcagctgatggggctcgtttggctcctattatgcagatgccgccgatctcttcaataaaacctccaattgcttcaagctcgcctaatcatgggacaaggct

SEQ ID NO: 265461 - DNA, 449 bp, Glycine max
cccacgcgtccggccaaaaattggaatgaggagaaatgaagagcgaagaaaaaaccagggttgcttaacctaagcgaccatgctataaggagcaaacatctaaggtgtgtgtcttaattgcatttgcatagcatggacatcaaaacctttgctttcgccccatcttctccgccgttaccggtaatcgccgccgccaagctcgccggaatctctccctcgattgatacctctctctctcctgactcacctcccgcatttatcttctccgatgggctcaagttgcatggagcatatgctcttctacgttatatcggccgagttgccagccttcccaatttctatgggcaaaatgcattagaatctagccagattgatgaatggctggactatgctcctatcctctcatctggccctgcttttgagaatgcatgcaaatatatagatgagta

SEQ ID NO: 265462 - DNA, 252 bp, Glycine max
taccaaacgttccctctcccaatgaaaactggctatcgtgagccttcttcggaggtaaaatgcgcaccttttaggcttgctgaggaagcacacaacatccgagcctataaaaccattcctgaagagtgcgctgaaccaacataggactacattaatggctaacaatttagatcagactctacaacatttcaccaacaagcttgctgttatgctagtgaacgcgaaacccatcacaaccacatattgatattc

SEQ ID NO: 265463 - DNA, 474 bp, Glycine max
ccggggcgacccacgcatccgcccacgcatccgctttttttgattgtgtgtttgatttttctctcacctttaaatattgggctgctgtggtaactctcattgctaaagcgcctgcaagtgctgcaacagctgcagaggctgcaagatgtacccagacttgagctacaccgagtcaaccaccacctagacctttgtcatgggagtggcaccagttaaggctcaattctagagtgctgaaatgtgtgttccctctgataactatggcttcaaatgttgagctaactgcaccttgcaactcctgcacttgcaattgaggttggtgtagagctaaatcttcaaataaagatttacccttaaaatattattatatactacatcttctttttaaaactttaaaattattttatatattattatctttatactattccattttatcttttaatcaatattccttaaaaatatatttttatt

SEQ ID NO: 265464 - DNA, 414 bp, Glycine max
  unsure (1)..(414): unsure at all n locations
cgggcggacgcacgcgtccgctgaaacttttccacctccaccaacatttaacaagcattgctgcaaagttgcatatctggaactttggatggggggctgattcttgcaacttcngctgataatggtggagctgccacagccttaacgtacgatgaggcactgggacaacctttgagcctccctggtactggggactttgatgtgaatggctttgtggagagtgtcgctggctttgcagctgagaaccctgcaattgttgccgggggagtggttgttttggcagagccattggttttgtctcacgttttcaagaaacctaaagcttggggtgttgagtctgctaataacgcgtatgctaaacttggagctgatgggaatgctcaacttctttacataagggcactggtggagatt

SEQ ID NO: 265465 - DNA, 373 bp, Glycine max
  unsure (1)..(373): unsure at all n locations
acgagatattctcgcanaatctcacgttcatccgctcccacaacaagaaacgtttgccgtgatactctctctgttaatcattttgctgattggacttgggaggagttcaaaagacacagactaggagctgcccaaaattgctctgccactcttaacggcaaccacaagctcaccgatgctgttcttcctccaacgaaagactggagaaaagaaggtatagtgagttcagttaaagatcaaggcagctgcggatcatgctggacattcagcacaactggggctttagaagcagcctatgcacaagcatttgggaagagtatctctctttctgagcagcagctagtggactgtgctggccctttcaacaactttg

SEQ ID NO: 265466 - DNA, 452 bp, Glycine max
ttctcattctcccatttcctctcagaaccctcgatcactcccacgcgctcctatatcctctccttcaccgtcgctctctccaacgatcacaacaacatcgtcatcccatggcaaacgccgcatctggtatggcagtccatgatgactgcaagttaaggtttttggagctgaagacaaagaggacacaccgtttcatagtttttaagattgaggagcagcagaagcaggtcattgtggagaagcttggtgagccagcccaaggctatgaagatttcactgccagccttcctgctgatgagtgccgttatgctgtttatgattttgagtatctgactgaagggaatgtccctaaaagcagaatttttttcattgcatggtcccctgacacatcaagggtgaggagcaagatgatctatgcaagctccaaagacagattcaaagaggagctggat

SEQ ID NO: 265467 - DNA, 258 bp, Glycine max
cccactcgtccggttcctggggagaagaaagacctgtatgtgaagagtgttcaggggtgttcaatttggatggggaagaaatatcaaacagttgaggatgttccttgtggaaacacagttgccttggctggtttggaccatttcattaccaagaatgctactattacaaatgagacatacattgaagcacaccccattcgagctatgaagtcttctgcgtcaccattgctacgtgtagcttctaactgcactgctgca

SEQ ID NO: 265468 - DNA, 431 bp, Glycine max
  unsure (1)..(431): unsure at all n locations
cagggagatgggtcatctctatgctttttactttgatggagttatctgtgatagctgtggtgagacagctatctctgctcttaaggctgccaaattgagatggcctcccttgtttgatggtgtggattcaaccatagaagattggattgttgaccagatgattacagtacggccagtggtggaaactggatatgaaactcttttacttgtgaggttgttgcttgagactagagttccatccatcangaagtcttcggtttcggaggggctcaaagttgaggatatactggagaactgcgtcaaattgaagcctatcattattgaagaatggaatgagaatagagaagaactaattgatctttttggaaggtcagaaattactggtttgagtgtgatttcacaggttgtattgagcaaacttactttatcct

SEQ ID NO: 265469 - DNA, 267 bp, Glycine max
  unsure (1)..(267): unsure at all n locations
acaancactaataacactcctgctgcttttttattacactgccgctccactcaaacacatatctcactccaaacctcatctctttcactactttttctttctccatatacttatcttcctacttgtatctacttaactacacttattcacattaattatttaagcactaacgctcattctccaccatttgtatcactgaccatacccaagaccatcttatacatcttctttataattagctttcataacacatattcacaattttca

SEQ ID NO: 265470 - DNA, 350 bp, Glycine max
  unsure (1)..(350): unsure at all n locations
cacgcgtgacccacacatncnnctccatactacctagattagacaactttttgtggacangaagatactgtacttcttcaatcatttgaacgggctcgctttaaacgaataactgttaaagcaatggtgatcataaatcctggaaaccctactggtcaatgccttagtgaagctaatctaagagaggttttgcaatttctctatcaaaaaaatttatccttgctttgagatgatgtttaccataccaatatatatcacgatgaacgacccttcattatttctagaaatgattttattgaattggttccacctataagcaaagaaatttaacttatttctttttaattctt

SEQ ID NO: 265471 - DNA, 214 bp, Glycine max
ggaaaatcaagttccatttcgcctactatgatattttggaattgtaaaatcaaagagaacaccattatgaagtttgtaaaccattgtttattattggtacaaatttgcatttcaagaaaaaaaaaaaaaaaaaaaaaaaaaaaaaaaaaaaaaaaaaacttattaataaaagaatagatttattggtttgaaattcaaataggaagacgggttt

SEQ ID NO: 265472 - DNA, 317 bp, Glycine max
gccacgcgtacgccacgcgtaccgtcacgcgtacgttcatgcgttcgagggcagacaccatggacaatgtgaaagacaagattcaagattaggagaggatacccccagaccagcagaggcttatctatggtgggaaacagcttgaagagggacgaacccttgcagataataacatgcacaaggaatctaccctgcacttggttttgaggctatcgggaggcatgcaaatactggttaagactttgaccggaaaaacaatgactgtaaaagttgaaagttgtgataccaaccataacgtgaaggcaaagatacatgac

SEQ ID NO: 265473 - DNA, 204 bp, Glycine max
  unsure (1)..(204): unsure at all n locations
acaangaaagnacaangcaccaagcgggcctangcacaaccnnaggcgananacanggnnaacggagannaaagacaccncnaaagaaggananagccnngaagagaaangcancaagaaagaagcgcnngagggagaagagaacgcncgngcaaaaaccccgggaacacgaannggcgnngccacnncaaagcggggaaagaa

SEQ ID NO: 265474 - DNA, 162 bp, Glycine max
  unsure (1)..(162): unsure at all n locations
ggagggcaccgaagaagagcgagaanacgaggnacgacgaaaaccncggcggcnccaagaacgccccgcaggaagaacngaagaaggcggacaagaaagccgccannaagaaacaccccgacaagggcggngancccgagaagnnnaaagagcnggcgcaag

SEQ ID NO: 265475 - DNA, 459 bp, Glycine max
  unsure (1)..(459): unsure at all n locations
acccacgcgtacgcccacgcgtccggagangtacgaggnnncatttatgttcgggtgtggagcggtgatggcgggggcgcaagcaatgggaattggaaggagaagcgatggtggattgacgatagtgtgttcgtctaggccgcagaagaaagcgacggcgcatcacatgaagactcggcctcggaagacgcaggcatgggatagaaaccgcaagcccaccgtctacgatccactccctcctcttcctcctgattggaccctcgttattcccgctgacgcttcttctgctcccgttacgcctccgcctccaactccctctgcctagtcactctctcggaactctctctcggtttcatgtaagcttatctttaattccagcagcttttctttcatgttttcatctcaaatcaaaccttcatcatttgttttggatcaataaatgtttctgaattctctctc

SEQ ID NO: 265476 - DNA, 190 bp, Glycine max
  unsure (1)..(190): unsure at all n locations
aaaaaaaaaaaaaaaaaaaaaaaaaaaaaaaaaaaaaaaaaaaaaaaaaaaaaaaaaaaaaaaaaaaaaaaaaaaaaaaaaaaaaaaaaaaaaaaaaaaaaaaaagggggggggggaaaaaaaaagggnnggggaagggagagagggaaanaanannnaangnnnanaaaaaaaaaaaagggggggcggg

SEQ ID NO: 265477 - DNA, 131 bp, Glycine max
  unsure (1)..(131): unsure at all n locations
aaaaaaaaggggaaaaaaaaaaaaaaaaaaaaaaaaaaaaaaaaaaaaaaaaaaaaaaaaaaaaaaaaaaaaaaaaaaaaaaaaaaaaaaaaaaaaaaaaaaaaaaaaaaaaaaaaaaaaaaanggggggg

SEQ ID NO: 265478 - DNA, 317 bp, Glycine max
  unsure (1)..(317): unsure at all n locations
cccacgcgnncgaccacgcgaacggaggggtttgtgagngancggngancactngaccctggagaagtcgtcatcatcatcatgatcatcaccgacgattgaagaagacgccgatcagaaacatcgccatacgaaggcctgaagaggctactcaccccgacacgtagaaagcggcgttggctgagaacatctacaccttgatcttcacgttcgcccggtcaggttccggcatcgcctacaacaagctcaccgacaacggcgccggcactaccgccggactcatctgcgcgttcatcgaccatgcttacgccctcttc

SEQ ID NO: 265479 - DNA, 381 bp, Glycine max
  unsure (1)..(381): unsure at all n locations
cacgcgnncggctgcgcagaagagagagaacgaacgaacgaaccataccaccctncaataagcnngnggcagngagnagggatatgcagcaaggggaaccaacggncctaagcttgaggcctggtggtggtcgtggcggtggaagcaggcttttcgctcactcgtcctcctcttcctctctctccgccgatctccctctctcgcgccctcatgcctctttctctctcaagactggagattcacggtttgagggtcatgagcgtgtgcgatataccagagatcagcttttacagcttaaagaggctgttgaggtccctgatgatattcttaagattaaacaagatatagaagctgaactttttggtgaagatccaagttggg

SEQ ID NO: 265480 - DNA, 152 bp, Glycine max
  unsure (1)..(152): unsure at all n locations
aaaaaaaaaaaaaaaaggaaggggaaaaaaaaagaggaaaaaaaaaaaaaaaaaaaaaagaaaagagaagaaaaaaaaaaaaaaaagnagaaggaagaaaaagaaaaaaaaaaaanagagagggggggaagagagaaaaaanaagaggggag

SEQ ID NO: 265481 - DNA, 220 bp, Glycine max
attgcttttaaaaaaaatttgggaaaaaaaaaaaaaaaaaaaaagggggagttaaaaagaaaaaagggtaaaaaaaaaaaaaaaaaaaaataaaaaaaaagaagaggataaaataaaataaataaaagaaaggaaagaaaattattaaggaagaataataatagaaaaaaaaaaataaaatggggggaggattaaatataaaaaaaattaaagtgaaaag

SEQ ID NO: 265482 - DNA, 260 bp, Glycine max
  unsure (1)..(260): unsure at all n locations
ccactcaaaaaaaaaaaaaaaattttgggaanaataaaaaaaaaaaagggngggggaataaaaaaaagaaaagggggtaaaaaaaaaaaaaaaaaaaaaaaaaaaaaaaaaaaaaaaaaaaaaaaaaaaaaaaaaaaaaaaaaaaaaaataaaaaaaaaaaaaaaaaaaaaaaagtgaaaaaaaaaaaagggggggggggtttaaaaaaaaaaaattttttaggggggggtgtagaaaaaaaaaatttttttttttgaag

SEQ ID NO: 265483 - DNA, 270 bp, Glycine max
  unsure (1)..(270): unsure at all n locations
agtgcagccttttngncggngacgacgacaccgagtttctgatggagtcggagagcaaccggcgcattctagcaggaaggagctacataagctacggtgcgctgagaaggaacactgtcccttgctcccgacgtggcgcctcctactacaattgccgccctggcgctcaagccaacccctacaggcgtggatgcaatgctatcacccgatgcangcgttgaaaaagttattcttctcttttaattacacttcgttttatatatatatatt

SEQ ID NO: 265484 - DNA, 273 bp, Glycine max
  unsure (1)..(273): unsure at all n locations
aacgtgatgggaaggtaaaatgtnttggaggtnntgaacgtacaggtagngtaactattgttggtgctgttttgccaactggaggagatttcttagatcctgtgacatctgcaaccctgagcatagttcacgttttctggggtttggacaaaaagcttgctcagaggaagcactttccttctgtaaactggcttatttcttattcaaaatacttaacggcacttgaaaccttttatgagcaatttgatccagattttatcaacattaggacaa

SEQ ID NO: 265485 - DNA, 392 bp, Glycine max
caaagaagaacggaatcattttatgaaacacgggacacaagataaaggggaacttggtgattatgcgaaagaatgtgttggatatcaacagcattaccagtgttaagggtgtcatcggaaccggcattaacatcattggaggagtcgtcgacaccgttactgctttggcgtcccacatctccatccagctcattagtgccaccaaggctgatggacatgggaaaggaaaagttggaaaggctacaaatttaagaggacaagtgtcgttaccaaccttgggagctggcgaagatgcatacgatgttcattttgaatgggacagtgacttcggaattcccggtgcattttacattaagaacttcatgcaagtgagttctatctcaagtcttaac

SEQ ID NO: 265486 - DNA, 331 bp, Glycine max
  unsure (1)..(331): unsure at all n locations
gacagaagaagaagaagaagangaaggggaagacgaagaagaagaagaaaggtgaaggggtgtgtgatcgggtccttaagtgaagatctgaggctgttggtgtctcttttcttttctccgagttccaaagatgagcgcttctaggttcatcaagtgcgtcactgttggggatggtgctgtgggcaaaacctgcttgcttattgcctacaccagcaacactttccccaccgattatgtgccgactgtttttgacaatatcagtgcaaatgtggttgtcaatgggagcattgtgaatctggggttgtgggatactgctggacaagaagattac

SEQ ID NO: 265487 - DNA, 249 bp, Glycine max
  unsure (1)..(249): unsure at all n locations
cacgcgtncgaaaatggcttctagntcagaatctcaatctcagtctaaaccgctccaagagcgagttgcaatcgtcaccggctcgtgccgcggaatcggccgagaaatcgcgcttcacctcgcctcactcggcgcgcgactcgtcgtcaactacacctgcaactcggcccaagccgactcagtcgcggcgcagatcaacgccggtttcgncaccacgacaccgngcgccgtcgtggtccaagccgacgt

SEQ ID NO: 265488 - DNA, 423 bp, Glycine max
ccggaaccataattgattcgggcacgggtataacccggttcgtggagcccgtttacaacgcggtgagggaggagttcaggaagcaggtgggaggcactacattcacgagcattggagccttcgatacgtgttttgtgaaaacctacgaaactctggcgccgccaattacgctgcacttcgaggggttggacctgaaactgccgttggaaaacagcttgatccacagcagcgcgggttcgctggcgtgtcttgcaatggcggcggcacccgacaatgtgaactcggtgttgaacgtcatcgccaactttcagcaacagaaccttaggattttgcttgataccgtcaataataaggttgggatagcccgtgaggtttagtactagctggttggctacatttgtatttatgtatgtattaatatgt

SEQ ID NO: 265489 - DNA, 441 bp, Glycine max
gaacaagtagttgagaactaagaaggagaagcaaatggcttcctcaatgatctcttccccagctgggaccactgtcaaccgtgccggtgccggcatggttgctccattcactggcctcaagtccatggctggcttccccaccagaaagaccaacaatgacattacctccattgctagcaacggtggaagagtgcaatgcatgcaggtgtggccaccagttggcaagaagaagtttgagactctttcctacctgccagaccttgatgatgcacaattggcaaaggaagtagaataccttcttaggaagggatggattccttgcttggaattcgagttggagcacggtttcgtgtaccgtgagcacaacaggtcaccaggatactacgatggacgctactggaccatgtggaagcttgctatgtttggttgcactgatgcttc

SEQ ID NO: 265490 - DNA, 284 bp, Glycine max
caaaatgtctgaagtgaatgcgacccctgaaattcctttaagcaacaccatctacatcaacgacctcagggagaagattaagattgatgagttgaagaagtctctgaacgctgttttcactcagttcgggaagatacttgaggtgttagctttcaaaaccctaaagcacaaaggtcaagcttgggtggtctttgaagatgcctcttctgcttccaacgcccttatgcaaatgcaaggtttacccttctatgataagcccatgagaatacagtatgcaaagacca

SEQ ID NO: 265491 - DNA, 423 bp, Glycine max
acgctgcaacttcttaaccgctgcagtctccactcctgctaatagtttagcacactcgttgtgggtctgttgagtcctgaggcacagggagattttacccgttggtgtcaattaggtggtctgtggacttttgttgctctccacggcgctttcgcattaataggtttcatgttacgtcaatttgaacttgctcgatctgttcaattgcggccttataatgcaatcgcattctctggtccaattgctgtttttgtttctgtattccttatttatccactgggtcagtctggttggttctttgctcctagttttggtgtagcagctatatttcgattcatcctctttttccaagggtttcataattggacattaaacccatttcatatgatgggagttgctggtgtattgtgcgctgtactacta

SEQ ID NO: 265492 - DNA, 336 bp, Glycine max
gcggttcatcccctgaaggtctctctggaggatctttacctcggaacatctaagaaactcgctctggcaccaaacgtgctgtgttcaaaatgcaatgggaagggctcaaagtctggggcttcaatgacctgtgctggttgccagggtactggcatgaaggtgtctattaggcaccttggtccttctatgattcagcagatgcagcatccttgcaatgagtgtaagggtactggagagacaatcaatgacagagacaggtgccaacagtgcaaaggagagaaagttgttcaggagaagaaagtacttgaagtttgtgtggagaaggtaatgcataat

SEQ ID NO: 265493 - DNA, 284 bp, Glycine max
aacaaaacaatacaacttaaaaaccaatacaatctacacttctaaataataaaaaaaaacactggataatagaactataaaaatactgaagcacaattaaaattttcccaattatatcaattaaataaactataaacttttattgctattcacggcgctttctcattaataccgatcatattacttcaattttaactttctctatcttttcaattgctaccttataatataatctcattctctgtttcaaatactttccttgtttcataattccttatttatcc

SEQ ID NO: 265494 - DNA, 377 bp, Glycine max
  unsure (1)..(377): unsure at all n locations
cctcacccattttcttcgtagccaaacactctgaaattctcagttatgtcgtggcaagcgtatgtgggtgatcacctactgtgtgaaatcgaaggtaaccacctcactcacgccgctatcatcggccaagacggaagcgtttgggctcagagcaccaacttccctcagttcaaacctgaggaaataactgccatcaataatgactttaatgagcctggatcacttgctccaactggattgtatatcggtggcaccaaatacatggtcatccagggtgagcctggtgctgtcattcgagggaagaagggtcctggtggtgttactgtgaagaagaccggtgctgccttgatcatttgcanttatgatgaaccaatgac

SEQ ID NO: 265495 - DNA, 349 bp, Glycine max
ccgggacgacggacgcggccgcgcccaaaccctaactccctaccctattccgctttctttcatccatcatgaaaggaggaaagtccagtaccgaatctaagagagccggggccaaacttgctgcgaataagaagggcgccgccaccaagactaggaaacccgccggaaaggggaaggcagcgaaagatcctaacaagccaaagaggcctccaagtgctttcttcgttttaatggaggaattcaggaaggtgttcaacaaggaacatcccgacaacaaagcagtgactgctgcgggcaaagctgctgtagcaaaatggaatacgatgtctgatgctgaaaaacaccttat

SEQ ID NO: 265496 - DNA, 358 bp, Glycine max
cccacgcgtccgcccacgcgtccgcccacgcgtccgataaatcccatattttccccccacattaactcacccaacccctctttctaaaaggcctcaaggatacactccggacttaattacgttattttgttagggtcaccgtttcgagatattctaaacttgtactgaaaaatatggagggaaaagaagaggacgtaagagttgaagccaacaggtacggaaagaggcagccaatagggaccgttgctcaggctaaagactacagaaagccaccgtcggagcctttcttcgaaccgggaaagttgtcatcggggtctttttatagggctggcataccaaaatttgtggccactttttt

SEQ ID NO: 265497 - DNA, 452 bp, Glycine max
  unsure (1)..(452): unsure at all n locations
tactcggtcttgaattcgacccacgcgtgcgccggaaccataattgattcgggcacggttataacccgtttcgtggagcccgtttacaacgcggtgagagaggagttcaggaagcaggtgggaggcactacattcacgagcattggagccttcgatacgtgttttgtgaaaacctacgaaactctggcgccgccaattacgctgcacttcgaggggttggacctgaaactgccgttggaaaacagcttgatccacagcagcgcgggttcgctggcgtgtcttgcaatggcggcggcacccgacaatgtgaactcggtgttgaacgtcatcgccaactttcagcaacagaaccttanngatttgttgataccgtcaataataaggtggcatagcccgtgaggtttgtaactagctggttggctacatttttattaatttatttattaatatgt

SEQ ID NO: 265498 - DNA, 400 bp, Glycine max
cccacgcgtccgaaaaaaaaaaaaattttaaaaaaaaaaaaaaaaaaaaaaaaaaagggggaaaaaaaaaaaaaaaaaggaaaaaaaaaaaaaaaaaaaaaaaaaaaaaaaaaaaaaaaaaaaaaaaaaaaaaaaaaaaaaaaaaaaaaaaaggggcggcctttttaagggtcccaagtttacttccccgtgtttgcaacttattagtttttttttggggcccccaaatttaaattaattggccgtgtttttaaaacgtcgtgtctggaaaaaccttggctttcccaaatttaatccctttggagcaaatcccctttttgccagttggcgtattaccaaaagggcccgacccaatggcctttcccaaaagttgcccaccttgattgggaaatggaacccc

SEQ ID NO: 265499 - DNA, 395 bp, Glycine max
gaacacaagtacttaaacacacattactctctcagtttctctctcttcttacttctgtctccaaaccttacatgcacaaagttgtgtttgtgttctaatggaacttgcttgcttagactaatcaaccaagttttgcatttccagtaaccaaaactctcttctttttttttttccccctttcttctgggttggcaaagtcaacatgcaagaacaagattttttttaggctggttggtggtttgagttccaaaaaaactgactttttgttgaataatttgggtcggtgaaggggtgttatgaagaacgaagagcaggctcgtagtttgtttggaatttcactctctgacagacccagatggcagcaattcctcatttgttcatcagggttcttcttt

SEQ ID NO: 265500 - DNA, 412 bp, Glycine max
  unsure (1)..(412): unsure at all n locations
cccacgcgtccgagatatcatcacattgcaaagaaaatacacattacattactaagggtttgttcatttgagtagtagcgatggctagcctcaaggttgcatgtgtggttgctgtgatgtgcatggttgtggtggccatgagtgctgcacccatggcacaggccgcaatcacgtgcgggcaggtcgccggcgacatgtctccgtgcttcagttatcttcgaagcggcggaaaaccgtcgcaggcctgctgcaacggagtgaagttcctcagcagcgcggtgaagaccaccgcggaccgacagggggcgtgcagttgcctgaaaaaccttgccaataatatgggacagagtttgaatgccggcaacgcagcctatctccctggncaatgtggcgtcaacataccttacaagat

SEQ ID NO: 265501 - DNA, 422 bp, Glycine max
aacacaacaccttttccttttcccttccgttggtgccattcgtgcagcaccggatcctctcatttctccggcgataactctcccttttccggcgaattcaccgcttcctcgatatgaatcccgagtatgactatctgttcaagctccttctgattggagactctggtgttggtaaatcatgccttcttctaagatttgctgatgattcatacattgagagctacataagcaccatcggagttgattttaaaattcgcactgttgagcaggatgggaagacaattaaactacagatttgggatactgctggacaagaacgatttaggacaataactagtagctactatcgtggagcacatggaatcattattgtttatgacgtgacagatgaagatagcttcaataatgtgaagcaatggctc

SEQ ID NO: 265502 - DNA, 402 bp, Glycine max
aacacaacaccttttccttttccctttcgttggtgccattcgtgcagcaccggatgcgggtcatttctccggcgataactctcccttttccggcgaattcaccgcttcctcgatatgaatcccgagtatgactatctgttcaagctccttctgattggagactctggcgttggtaaatcatgccttcttctaagatttgctgatgattcatacattgagagctacataagcaccatcggagttgattttaaaattcgcactgttgagcaggatgggaagacaattaaactacagatttgggatactgctggacaagaacgatttaggacaataactagtagctactatcgtggagcacatggaatcattattgtttatgacgtgacagatgaagatagcttc

SEQ ID NO: 265503 - DNA, 389 bp, Glycine max
cccacgcgtccggtaatggcacgggtcccattaccaaccaagaagcgaatctactgtgttcttaaatccccgcacgtacataaggatgcccggttccatttcgagatcagaactcaccagcgtctcattgatattctatatcctacagctcaaacaatagattctctgatgcaacttgatcttcctgctggtgttgatgtggaggtcaagctgtagagatatttgcttttcaggttgctaactgtcttgaatttgagtgaggttcaacttgttatcaatagccaaaatatattggcagatatcatgtgtttcactgcctaaacttgatttctaagaacaatgctaaaagtccttttgtttgctttccctttctgtcttcattaaattag

SEQ ID NO: 265504 - DNA, 424 bp, Glycine max
  unsure (1)..(424): unsure at all n locations
ctataagctagtttatcgtgaggagaatatgaagttgtttgttttctttgttgctgcagtagttttggtagcatggccatgccatggcgcaggctaccaaaggttccctctccgaatgaaaactggctatggtgagcgttcttcggaggtaaaatgcgcaagttttaggcttgctgtggaagcacacaacatccgagcctttaaaaccattcctgaagagtgcgttgaaccaacaaaggactacattaatggcgaacaatttagatcagactctaaaacagttaaccaacaagctttcttttatgctagtgaacgcgaagtccatcacaacgacatatntatattcggcatagataacaacgtactctctaatatnccatactattgaaaacatggttatggggtgggaggaattaaatgaaac

SEQ ID NO: 265505 - DNA, 367 bp, Glycine max
aacagagagtggtttcagtgagtgatctgtgatcacttgatccttcataagtcgtcggggcatcatcatcatcaccgttgattgaagaagatgccgatcagaaacatcgtcatcggaaggcctgaagaggctactcaccccgacacgttgaatgcggggttggctgagttcatctacaccttgatcttcgtgttcgcccgttcaggttccggcatcgcctacaacaagctcaccgacaacggcgccgccacttccgccggcctcatctccgcttccatcgcccatgctttcgccctcttcgtcgccgactccgtcggcgccaacatcttcggcggacacgtcaaccccgacgtcaccttcggcgcct

SEQ ID NO: 265506 - DNA, 366 bp, Glycine max
atccgaagcaggcccaatttccctctgcagctgttagagaaaaaggacgttgatgaggtcaccgaacaaccttgttccaccaccagcgtggtaactactgctgctgctactattacttctggtaacaacgacctccacgtggcggagcagtcgaagaagcctccgccaaagcggagttccacgaaagaccgccacacgaaggtcgatgggcgaggccgccggattcgcatgccagcggcctgcgccgcaagagtgttccaactcacgcgtgagctgggacataagtctgatggtgagaccatcgagtggctcctccagcaggcggagccggcggtcatcgctgccacaggcaccggcaccattccc

SEQ ID NO: 265507 - DNA, 386 bp, Glycine max
tagggtttgtagtgtagcaggaacaagcagcaatggcgccgaaggtaacacgcaagggtagcagaaaccccgaattgataaggggaattggaaagtactcgaggtcgcagatgtaccacaagaggggcatttgggctatcaaggccaaaaatggtggcgttttacctcgccacgaccctaaacccaaacctgaaacacccgctgaaaaaccacccaaattttaccctgctgatgatatcaagaagccccttgtcaacaagcacaaacccaaacccgctaagctcagggctagcattactccgggaacagtgttgattcttcttgctggtagatttaagggaaagagggtagtctttttgaagcagcttccttctggattgcttctt

SEQ ID NO: 265508 - DNA, 422 bp, Glycine max
aacacgatgcagagacttgagaatggcactcgccagtggtctgagactcatagtaccgggaagagggccacacggctggccgagatctccgcgcactcatcgctgacaggaactgcgctcctataatgcttcgactggactggcacgacgcccgaacttactatgctaagaccaagactggtggacctaacggttcgatccgtaacgaggaagagtattctcaccgcgccaacaatggcttgaagaaggctatcgatttctgcgaggaagtgcaggaaaaacatcctaaaattacatatgcagatatctaccagcttgctggtgttgttgcaattgaaggtaccgggggtcccacaattgattcccctcctggtagaaaggattcaaaaatatctcctaatgaagggccggtttctgatgct

SEQ ID NO: 265509 - DNA, 361 bp, Glycine max
  unsure (1)..(361): unsure at all n locations
ttgggaganccacggggagccaacaaggatgcaaacgaactggtacatatgttacttgcaatatacccttacctggagtgtcaagggcactttaatgaacttcttagagcaaatcctgtactgactgtatcacatgctgaattttgtaagtgcctatgccatgtgcataatgtggttaatagaagccttgccaaaccgatattcccctgtgaacgacttgatgcaaggtggcgctaactgtactgtgaacagaatgcatgtgacattatcggaagcacataagtttttgggaggatatggcagaaacctacctaaaaatgattggcacacatactatgcgagatgtgttaacatttgacct

SEQ ID NO: 265510 - DNA, 295 bp, Glycine max
cccacgcgtccgcccacgcgtccggtttcaccgttttcctttgctttgcgttctacggtggccaaaacctcagagattgttacatgcaaagctgctatttgctgcggaataggaaaacctgtgactgtggaagagatacaagtagaccctcccaaagccaccgaagttcgagttaagatgctttgagccagtatatgctccacagacatttctagcacaaaaggattaccacataccaattttactatagcacttgtacaccaaggagtacgtattatagagagtgtctgtgatc

SEQ ID NO: 265511 - DNA, 375 bp, Glycine max
  unsure (1)..(375): unsure at all n locations
cagcgactgcgtttttggatcggaactttttctgcggcgtagcaatgggacactccagcntttggaactctcacccaggaaactacggtcctggttctcgcacttgccgtgtgtgtgggaatccacatggactgatcaggaagtatggccttatgtgctgcaagcagtgcttccgtagcaatgccaaggaaattggcttcatcaagtatcgctaaaagagcagttgtcaactacggaccaatattgtgttctggcactaggatgttttgaggatgttatgtttgaagaaacttgagactttcttttttcatctaattaattattagaacgtatttggggtacttaaaatacctttatataaatttgtttgaaccc

SEQ ID NO: 265512 - DNA, 388 bp, Glycine max
cccacgcgtccggcggaagaagaagacgccgcagccatggtgaagtactccagagagcccgacaatcccaccaagtcctgcaaggccagaggcgctgaccttagagtgcatttcaagaacactagggagactgcctttgccatcaggaagttgcccctggttaaagctaaaagatacctggaggatgttttggcccacaaacaggccatccctttccgacgcttctgtggtggtgttgggaggacagcccaggctaagagcagacactccaatggtcaaagacgctggcccgtcaaatcagctaagttcatcctagatttgctgaaaaacgctgagagtaatgctgaagtaaaaagtttggatgtcgatgctctgtacattttccatg

SEQ ID NO: 265513 - DNA, 423 bp, Glycine max
  unsure (1)..(423): unsure at all n locations
cgaaaggaaagaagaagaagaagcgttctttcggagagttcgaagatgtcgggcgttaccaacaacaacgaggaagacaagaagccaaccgaacagggagcacacatcaaccttaaggttaaggggcaggatgggaatgaagtttttttcaggatcaagagaagcactcaattgaagaagcttatgaatgcttactgtgaccgacagtcggtggatttcaactccattgcttttctgtttgatggacgccgcctccgagctgagcagactccagatgagttggaaatggaggacggggacgagattgatgccatgcttcaccagacaggaggttctgttgtctgaaggatgtgattactntgctcctcattataagtaggaattagttaacttagagctatgtatggcataagatacatattt

SEQ ID NO: 265514 - DNA, 399 bp, Glycine max
  unsure (1)..(399): unsure at all n locations
cccacgcgtccggtttctttccttctctctctctggagctagcgcgagtgaccggggcggcgaagatagagtcagatcggaagcggaagaaggcgtcgacctcggcggcggagaaggagaaccggaataagcataagaagtcgaagatgtcgtcgtcgtcgtcgaagggtggtggcggtattgaggttagggcttcgcacatattgataaagcacgaaggttctagaaggaaggcctcgtggaaggatcctgaaggtcgcatcatcaagagcacaaccagagaaaacgcggtttctcagctcaaggccctccgcgacgacatcgtttcgggcaaagcctccttcgaggacatcgcctctcgcttctncgattgcagctccgccaagcgcgggggtgatc

SEQ ID NO: 265515 - DNA, 425 bp, Glycine max
cttgtcaggaagaacactggacaaacatgccgtaacagaagcaaacttaaagaaggcgtggctacgacacatgggaaaaattaattctcaaggatccacaagatccttccactccaaatgcagtttcatacaaaacagcagcgagagagaaactgataaggcagggatacaacattgttgggatcattggagaccaatggagcgatctcctcggaggccacagaggcgaaagcaggacctttaagcttcctaatcccctgtactacattcagtagttccttcacctctcaacaatctagcttgctcctatctatctatatgtaataagatgcgttcaaataggggcactagcttcactttattttgtttcagctgtgtgtcaacaagtcatgtaagagacttcactatgttgttttctctttcgt

SEQ ID NO: 265516 - DNA, 406 bp, Glycine max
cccaactgaggcagaactgcaggatatgataaacgaggttgatgctgatggcaacggagccatcgatttcccagagtgcctcaacctgatggctcgcaagatgaaagacaccgactcagaggaggagcttaaggaggctttccgtgtgtttgacaaggatcagaatggtttcatctctgcagctgagctccgccatgtcatgacaaatcttggggagaagctgacggacgaggaggtggatgagatgatccgtgaggccgatgttgacggtgatggacagatcaactatgaggagtttgtcaaagtcatgatggccaagtgaggaccattccaaccataacctaaatttgaaaagcatataaagagaagagggacagggcaaataagttttgatgagaattctatt

SEQ ID NO: 265517 - DNA, 388 bp, Glycine max
gaagagtcctcgatagaaaagggagctgagatttgttgttctgttgccccaaatgaagtgcaggtgccagctgtgaaaacctcggatcccaagagtaagcctgagtgctatggtgtcttctgccttacctatgatttgagggctgaagaagagacaagatcctggaagaaattaattaacattgcagtctcaggtgctgctggaatgattgcaaatcatctacttttcaagcttgcatctggtgaagtttttggcccagatcaacctattgctctcaaattattgggatcagaaaggtcaatccaagctcttgaaggtgttgcaatggaattggaggactctttgtttcctttgttgagggaggttagtattggtatcgatccttatg

SEQ ID NO: 265518 - DNA, 421 bp, Glycine max
attctattcattcaagattcagcaagtgcgttttggaagcagagaccgaaatactgggagatggcccgtacaaagcaaactgctcgtaagtcaactggaggaaaagctcccaggaagcagcttgcaaccaaggctgcacgtaagtctgcaccaacaactggtggtgtgaagaagcctcatcgttatcgccctggaactgttgctcttcgtgagattaggaaataccagaagagcactgagctcctaatcaggaagcttcctttccagaggttggttcgtgaaattgcccaggatttcaagactgatctgcgtttccagagccatgctgtgcttgcattgcaagaggctgctgaagcataccttgttgggctctttgaggacactaacttgtgtgccattcacgccaagcgtgtgactatta

SEQ ID NO: 265519 - DNA, 384 bp, Glycine max
cccacgcgtccggtggaacatgcacgtccagatccccttcagcaccttctccaagcggtccttcaccgttcccgaacggcgaagacctcctcctctgcggcgccctcgagtattacgaccgcacctacgatcggatcactcccaaaaacgaacgccgcctcgaacgcttcaagaatcggaacttcttcaaagtcaccaccaccgacgaccccgtcattcgcagactcgccaacgaggacaaagccaccgttttcgccaccgacacgattctctccactctcatgtgtgctcccaggtctgtttattcctgggacattgtcgttcagcgtgtggggaataagctcttcttcgataagcgcgatgggtcgcaacttgatttgctct

SEQ ID NO: 265520 - DNA, 333 bp, Glycine max
gagccacacatccggcagtgcatcagcttcatcgccttttttcccccaggcttctaagtgtgaaaaattgcaaattattagtagccgggagcccactttgtttgtttgtacttaaactacattcccatttgtttttgctttttgagatttcatcatcctgtatttttggtttttgttttcggacttcaatggaaattaatggatgagaactaatgaataaaaaatatatttaataattcatttaattaataattaagtaaatatatttacttacatatatttacttttacaacaataaaaaatataagtttacctgtctttttttttattttt

SEQ ID NO: 265521 - DNA, 381 bp, Glycine max
ggaattcccggcgggacgccacgcatccgcccacgcgtcctcatggcagcttcttttgcatctgcttcctccaaacttatactattcccccattctacatcttgttcccttatctccacacccttccgttcctccaccaacacccacaaactatcccctctctcctactccttcctccaccccaccaccttcctccgccgcaccccctactccaccactactcccacgttgactgccccggtcacgccgactacgtcaagaacatgatcaccttctcctcccatatggactgcgccatccttgtcttcttctgcgccaactgtcccatgccccaaaccaaataacacattctcttaaccaatcaagtcagtgtccccaaca

SEQ ID NO: 265522 - DNA, 415 bp, Glycine max
gcgtgcggaaactgtgtctctacttgatgtgatctttcctcaaaacatcaaggtctgggctaaaaaccagagatgggatgacaaaaattattcctgatcctgagatagaaaccagagggttgatgacatcccaaaagagctcccagaccccgaagccaagaagcctgaagattgggatgatgaggaagatggtgagtggacaccccctaccattgccaaccctgagtacaagggcccatggaaggcagagaaaatcaagaaccccaactataaaggaaaatggaaggcaccattgattgataacccagatttcaaggatgaccccgacctctatgttttccccaacttgaagtacgtggggattgaattgtggcaggtgaaatctggtactttgtttgacaatgtcttaattact

SEQ ID NO: 265523 - DNA, 371 bp, Glycine max
gccgatgtctaccgaagcggcgtggtttttagcaaagggaatccaataaatggtgacaggctgattgcaatcatgtctgccattgtgctgagggaacatccagcatcaaccatagtgactgatgctcgtactagcatggcactcactagattcataactgatatacgttgtcaccattgcctataccgtgtctcatacagaaatgtcattgacaagggagtgcatcttaacaatgacggaattgaaactcatcttatgatggaaacatctggtcatggtgctctcaaagaaaatcatttccttgatgactgtgcttacatggtggtgaacattataattgaaatggttaggatgaaacttgcttcatcaaa

SEQ ID NO: 265524 - DNA, 394 bp, Glycine max
gctataacctgatttatcgccaggataatattaacttgtttcggcgctttttaaatacagtaggtttcttaacatgtccatgccatatctcatgctaccaaaccttccctctccgaatgaaaactcgctattgtgatccttcttcttttttaaaattctcaacttttaagtcttctttttaatcacacaacatcctatcctttaaaaccataccttaataatgcttataaccaacaaattactacattaatatctaacaatttacatcatactctaaaacagttaaccaacaatctttcctttattctattgaactcttaatccatcacaacgacttatttatattctgcatatattacaccctactctctaatatcccatactattaaaaaca

SEQ ID NO: 265525 - DNA, 418 bp, Glycine max
ccgatgtcgaccgaagcggcgtggttgatagcaaagggaatccaataaatggtggcgggctgattgctctcatgtctgcaattgtgctgagggaacatccaggatcaaccatagtgactgatgctcgtactagcatggcactcactagattcataactgatagaggtggtcaccattgcctataccgtgtcggatacagaaatgtcattgacaagggagtgcatcttaacaatgacggaattgaaacgcatcttatgatggaaacatctggtcatggtgctctcaaagaaaatcatttccttgatgacggggcttacatggtggtgaagattataattgaaatggttaggatgaagcttgctggatcaaatgaagggattggtagtcttatagaagatcttgaagaaccgtatgaatc

SEQ ID NO: 265526 - DNA, 321 bp, Glycine max
ccgccgatgtctaccgaatctgcgtgtttttatatcaaagggaatccaataaatgacagaagcttattactctcatgtgtgcaattgtgctgagggaacatccatcatcaaccatagtgactgattctcgtactatcatggcactcactatattcattttttatttatttggacaccatttcctataccgtgtctcatacataaatgtcattgacatggtattgcatcttaacaatgacagtatttaaacgcatcttatgattgaaacatcttgtcatggtgctctcaaagaaaatcattttcttgatgactgtgcttaca

SEQ ID NO: 265527 - DNA, 416 bp, Glycine max
  unsure (1)..(416): unsure at all n locations
accacattcacctgagctttttgtgaggattccaaagcatggcttcccttgcagggggcactgctgctgcttcccttggcatgtcagaaatgcttggaaaccccatcaacctcagtggtgccacaaggccagctccatctgcctctagccctgcctccttcaagactgtggctcttttctccaaaaagaaggctgcacctccaaaaaaagctgcagctgctgctcctgccaatgatgagcttgccaagtggtatggtcctgacagaaggatcttcttgcctgagggtctcttggaccgatctgagatcccagagtacttgaccggagaagtccccggagactatggttatgacccatttggtcttagcaagaagccagaagatttttccaaatatcangcatttgaattgattcac

SEQ ID NO: 265528 - DNA, 395 bp, Glycine max
accacgcgtacgtccactcgtcctcataaacaaaagtgcaagaattaggttgcaggggccgatgttcatggagctggcaacagcgtcgagatcaacaatctacctcgctttgctgtataggaacaaaacaaaagatagaattcacttttggagttcgtgattgtgaatagtgcaaatcagcaagtggttgctggagtgaattactacataacattggatgcaaaatatggtctgattaaaaatgagtatgaatctaatgtctgactgaaggaatggttgaactccaaagagttgctagaattcaagccagtcaatgtctttagcacaccaatacgtggcattaccgatgtgactgcgaatagcctttagatcgacattttagcatcgtttgctat

SEQ ID NO: 265529 - DNA, 394 bp, Glycine max
ctgctataacctagattatcgcgaggagtttataaacgcgatcgtctctcttccttgcttgaggcattttagtagcatgggcatgccatggcacatgctaccaaacgttacctatccgaatgaaaactggctatcgtgagcgttcttctgaagtaaaatgcgcatgtttaatgcttgctgtttaagcacacaacatcctaacctttaaaaccattcctgaatagttcgtttaaccaacaaaagactacattaatggctaacaacttacatcagactctaaaacacttaaccaacaagctatctatcatgctactgaacgcaatgtccatcacaactacatatttactttcggcataaatcacaccgtactttctaatatcccatacttattaaa

SEQ ID NO: 265530 - DNA, 383 bp, Glycine max
cttcagcctttctctctaactccctcactcacactcacagttaagcaatggcggggaaaggaggaaaggggcttcttgcagcgaaaaccaccgcggctaacaaggacaaagacaaggacaagaagagacctatttctcgttcatctcgtgccggaatccagtttcctgtgggacgtatccataggcagctgaaacaaagggtccaagctaatggacgtgttggtgccactgctgccgtatacttagcctcaattcttgagtatcttactgctgaagttcttgaacttgctgggaatgcaagcaaggatctgaaggtgaaaaggataacaccaaggcatttgcagcttgctatcagaggagatgaggagttggacacccttatt

SEQ ID NO: 265531 - DNA, 424 bp, Glycine max
  unsure (1)..(424): unsure at all n locations
cccacgcgtccgcccacgcgtccgcacgaatcacactctccacagtgcgattcagtcgccaatggatcgcaacggcgttctctctctcgcattcatctgcattgtagtcgccggcgtcggaggacagtctcccgccgcagcgccgtcaaacactccggcaactcccgccgccgccactcccgcccaagcaccttccacagtaccgaaatcaccagctcccgttgcttctcccaaatcatctccaccagctgcaacccctgcatctactccggcggcatctcccaccaccacccccgccgcgcctgctccggtgaccaagccacctgcagcctctcctcctccggcgactcctccaccggcaactcctcctccggcgccggttcccgtgagctcttccnccggtcccgtgccggtgagttcttca

SEQ ID NO: 265532 - DNA, 390 bp, Glycine max
cttttgggcctatggcaaccaaatgcctccaggagggattctcactgctttgtgtgcgatttcacagtcatgacatctcaagaggaatattagccttagctttccttcttgttgtgtttaactgcttgagcagtttccagatatactcaatgcctgcttttgacagttttgaagctggctacaccagtaggacaaaccgtccctgctccatatgggtgagatcaggctttagagtcttctatggatttgtctccttctttataggagtggcacttcccttcctctcaagtcttgcaggtttgttaggaggactcactctcccagtcacttttgcatacccttgcttcatgtgggttcttataaaacagccaccaaaatatagcttcaact

SEQ ID NO: 265533 - DNA, 407 bp, Glycine max
ctgttgtctcttggcttcaagattgtattcttgtcaggaagatatcttgacaaaatggccgtaacagaagcaaacctaaagaaggctggcttccacacatgggagcagttaattctcaaggatccacatcttatcactccaaatgcactttcatacaaatcagcaatgagagagaatctgttgaggcagggatacagaattgttggaatcattggagaccaatggagcgatctgcttggagaccacagaggcgaaagcaggacctttaagcttcctaatcccatgtactacattgagtagtaccttcacctctctcaacaatctagctagagtttgctcctatctatatgtaataaggtatgctgatatgcactattcaaataggagcattagctatgtttgttaat

SEQ ID NO: 265534 - DNA, 335 bp, Glycine max
ctccatttccattttctctctcacttttcaagaatcgttagctatgggaaagtcttacccaactgtgagtgctgattaccacaaggcccttgacaaggcgaagaagaagctcatacgcttcatcgctgataagagatgcgctcctctaatgctccgtttggcatggcactctgctggaacctttgacaagggcacgaataccggtggacccttcggaaccatcaagcaccctgccgaactggctcacagcgctaacaacggtcttgacatcgctgttaggcttttggagccactcaaggcagagttccctattttgagctacgcccatttctacc

SEQ ID NO: 265535 - DNA, 390 bp, Glycine max
ggtttgggaatatggatgggtttcgttagcctgtgtcttctgtctgtatcagtatcgggtctgctccaacgcctagagcaccctgtcaaagctgatggctcacttagccttatggtcattggagactggggaaggaaaggaacatacaaccaatctcaagttgccactcagatgggaagggttgctgcaaagttaaatatcgactttgtgatatccactggagacaatttctacgatgatggattgactggtatagatgaccctgcatttgaaatttccttctcaaaaatctacactgccaagagcctccaaaagcaatggtatagtgtgttgggcaaccatgactacaggggtgatgttgaagctcaattgaatccaatccttcagaaa

SEQ ID NO: 265536 - DNA, 307 bp, Glycine max
ccggctggagccacgcatccgcccacgcgtccgcggacgcgtggaaaaccctacaagtcacgaatttgagattctaatgcggtcctctctctcgtacttcatcggaaccgaaacccttcgccgcaaaaaatgcctcccaaatctgccaaatccaaggaagctccagctgagcgacccatcctctgtcgattctcttctcacctcaaaattggcattgttggcttgccaaatgttggaaaatctactctctttaatactctcaccaagttggcaatacctgctgagaactttcccttttgcaccattg

SEQ ID NO: 265537 - DNA, 279 bp, Glycine max
gtcgggtcgttggatacttcggctaagagtaccgggtcgggtgggaagaagcgtgggggcgctccgtatagaatatttaacctggggaatacttcgccggttactgttcctactcttgtgagtatattggagcggcatttgaaggtgaaggcgaagaggaatattgtggacatgcctggaaacggtgacgttccttttactcacgcgaatattagttcggcccggagagagctcgggtacaagcccacgaccgatttgcaaaccggcttgaaaaagttc

SEQ ID NO: 265538 - DNA, 397 bp, Glycine max
tttcagtctttcttggaactttgtttttctcacacatgtctcgctcctagccttggctttcaaccattgttgtcttgcttctgcttctgatgcctattaaaataattgtcccactattgttgccaataccaaaactctttaattctaaaagccaccttttttaagggtccattttttatttacaccaactgtgtttctgtttgccaaacctaacttttcacttgaggacactgccttggcttccttctcatatgcttcttcaccaaacattgttaattttaaaaaattaattaacagtgctttcatataatatgatagatctatcatccttctactcgtgttgttaaattacccacttttgttttgataattaaggttacccattctactaatgttt

SEQ ID NO: 265539 - DNA, 418 bp, Glycine max
  unsure (1)..(418): unsure at all n locations
cgtccgagccaaaagacatgtccgttactgatgcgagtgttcactaagattgggagtcaccggtccatgggagactttgccgtgagaggcaaacatcccaaacacgaggttcagatttacacctggaaggacgctactctccgagaactcaccgatcttgacaaagaagttgctccggctgcaaggagaagaaacgccaaactctccttcgcctttgtattccccgacaaaaacggccgtttcaaagttcaagaggtgggcaagacattatcttatggaaatggaagattagatgatggcaaggctttagccgaacttggttttgaaatcggtgactacttggatgtggctattctgtagtttattatggatacttgcatgtggctggttatgtttgaaggcctngaaacacttattt

SEQ ID NO: 265540 - DNA, 356 bp, Glycine max
ctactcttcatactaccagcaacgtcatcttgccagtatttggggaacaaccttctcactcatcgcaagatattcctaaaaaaagacaacattattacctcgttcgctgtcatctttgacggtggtagcacaggaacccgcgtgcatgtcttccattttgaccagaatttggatctccttcccattggtgatagtcttgagcttaataaaaagatcacaccccgtttaagtgcttacgaggatgatcccgagcaagctgcagaatctctgattccacttttggaggaagcagaaagtgtagttcctgaggacttgcgtcccaacacacccgtttagctaggggcaactgcaggctt

SEQ ID NO: 265541 - DNA, 455 bp, Glycine max
  unsure (1)..(455): unsure at all n locations
ngcactaaactttccctcgcagcagccgcagcttcagaagccgccgcccacgcatgcggcgcagccgccaacccagccaagccgccaagccccaagccaatgatcacgcctttggtgctgcgcattcggttcagctggttcagcgccggctgcagaatgttgaacagaacccaccctattgctgctgggtgcatatttgagtatgacaaagctcatccagagggttctggcattggctttaaggaggaagacaaacccaacttcattggttctttctattccaaaactaaggctatggtcgaagagctcttgaaagaatatgacaatgtgtgcaccctcagggttcgcatgccaatttcatctgacttgagcaatccgcgcaatttcatcaccaagatttctcgttataacaaagtagtcaacatttcaaacagcatgaccattttggatgaact

SEQ ID NO: 265542 - DNA, 461 bp, Glycine max
gttcatctactctgagccgcatcacttcccggaatcgtgcatccctacgttcaatatgtcgctggtggcaaacgaggatttccagcacatacttcgtgttttgaacacgaacgtagatgggaagcagaagataatgttcgctcttacctcaatcaaaggtattgggaggcgatttgctaacatttgctgcaagaaggctgatgttgacatgaacaaaagagctggtgaactgagtgctgctgagttggatagtgtgatgactgtggttgccaacccccggcaattcaagattccggactggtttttgaacagaaagaaggactacaaggatggcaagtattctcaggtggtgtcaaatgcactggatatgaagttgagggatgacttggagagacttaagaaaatcaggaaccatcgaggtttgagacactactggggtcttcgtgtacgtggccagcata

SEQ ID NO: 265543 - DNA, 456 bp, Glycine max
  unsure (1)..(456): unsure at all n locations
tcgactacgcgtccgcccacgcgtccgctcacgcgtccgtccacgcgtccgtccacgcgtgcgctaggttatcgtgaggagaatatgaagttgtttgttttctttgttgctgcagtagttttggtagcatggccatgccatggcgcaggctaccaaaggttccctctccgaatgaaaactggctatggtgagcgttcttcggaggtaaaatgcgcaagttttaggcttgctgtggaagcacacaacatccgagcctttaaaaccattcctgaagagtgcgttgaaccaacaaaggactacattaatggcgaacaatttagatcagactctaaaacagttaaccaacaagctttcttttatgctagtgaacgcgaagtccatcacaacgacatatttatattcggcatagataacaccgtactctctaatatcccatactatgaanaacatggatat

SEQ ID NO: 265544 - DNA, 329 bp, Glycine max
ggcgagccacgcgtccgcccacgcgtccgataaaaaataagttatcccttttatcttcgcatcataacactctgggcatagcggactcataatgatgatttcacaaatttccacccacacccctcactgctttttcctttcccacaccccttcctatcgttgccaatagagtgagtcccttcactgtatagaaattaaacatggccaacaaagcttcattttcaaaccaccagacaataaaactgctttttgtgaaccttcaattcaagacaatttaatggtatgcagggaagcgctacttaaagcttctgttttcaactaatgcattc

SEQ ID NO: 265545 - DNA, 426 bp, Glycine max
cccacgcgtccgcttcagtgtgagttaaccctcttatcttggcttcttgagctctgcgctgaagggactcagaatctgcttccccaaattgccacccacacccctcactgcttcttccttccccacaccccttcctatcgttgccaatagagtgtgtcccttcactggaaagaaatcaaacatggccaacaaagtatcattttcaaaccacaagacaaagaaactgcagtttgtgaaccttcagtacaagagaatttggtgggaagcagggaagcgctacgtaaagcttcgtttgtcaactaatgcattgaatactatagaaaacaatggacttgatgcacttgcaaagaatgctggaattgatctcacgaagaaataagcctatctaataattattgtaatttgtattaaaatggaagaatacaa

SEQ ID NO: 265546 - DNA, 446 bp, Glycine max
  unsure (1)..(446): unsure at all n locations
cttcaacgaagacccagcttccttatacatattattctcttccttattgtccaccaaggaaaagggtggatagtgctgaaaatcttggataantgcttcgtggtgatcgcattgaaaattctcgttatgtgtttaaaatgcgtgaaccacaaatgtgcaatattgtgtgtaagcttaaacttgatgccaaaactgcaaaagagttcaaggagaagattgatgatgaatatcgagtgaacatgatccttgataaccttcctctggttgttcccataaaacggatggatgcagactctactgtttatcaactcggtttccatgttggactcaaagggctgtatagtgggagcaaggaggaagagtattttattcacaaccactttggcttttactgtcaagtatcataaagatacacttactgaatctggtagaattgtgggctttga

SEQ ID NO: 265547 - DNA, 279 bp, Glycine max
aaaggctgtaccctcttttatccctcaaaaactataaaccctaatggcagatcgcgggggtggcgagcgtggcagcgaccgtggcggtttcggacgcggctttggtgggcgagggcgcggaggtgacaggggcctaggccggcgcctaggtcctcgccgcgaggaatatgataaatgggtcccagtgaccaaactgggccgtctggtgaaggagggaagaatcctaagccttgaacagatctacctccactcgctcccgatcaaggagcaccagatcat

SEQ ID NO: 265548 - DNA, 469 bp, Glycine max
gcggagacatagttaggttagagcggtgaataggtgcggttagtttgggtgtagaaaagcgagtgagagacatacgatacatcggcgcagtgagatggaagaagaaggtgttccggtggaaggttcttcaggtacggtgagtcgggcacggaagcttctgtttcggcgaatgctggtggggatcaaagacggaaggttcttcttgggctccttctactgcatcgacaagcaaggcaacatcattctccaggacgccgtcgaatatcgcagcacgcgccaatcttcgccttctcccatggaacagaggtgcctcggccttattctcattccttcctcttgccgcacctcttgtcacgtcgattgcgctatccacgaacagttatctctcctttcgctgaatcaaacaccaccgcactagccagggttttactgtgccccttcaattgcttatatatgttactgaaaatta

SEQ ID NO: 265549 - DNA, 446 bp, Glycine max
gcggccacacgtccgggcacgtaaggcaggagcatttgtgatatttgtggttgatgcaagtggaagggtggtgttgaacatgatgcaggattcaaaaggtgcaacacttaagcttctggctgaaagttatacaagcagggatcaggtctctataatttcattccgtggagatgcatctgaagtacttatgccaccttctagatcaattgcaatggctaggaaacgtcttgagaggctttcatgttgtggaaggtccccacttgctcatggtcttacaacggttgttagagttggattaaatgcagagaaaagtggcgacgtatgacgtgttgatattgttgcaatcactgattgcagatccaatatatcattgaaaaggtctactgaccctgaatttgtcgcaactactgatgcttcaaaaccttttacacaagaattgaaagatg

SEQ ID NO: 265550 - DNA, 455 bp, Glycine max
cctttccttctttgcaaacacaattctccgattcagttcataatttcgatcgcaaagcaaatgagcccacagcaagaacccgattgcaatctcaatcacctcaaattatattacggaaagctgtttccgtttgctgatttagttagatgggtgtcgtatggcaacgatggaaagcaccctgcttgtgatcaatcctacattgggcgaagagagttttccttcactctggagaatgatatatatctgcgtttccaatctttccacaatgcacttgagctcgaaaactccatcaaagaaaagacccctgttaagatagatattggacctgtctacactcgtgatcctgcaaaaaggaatgcctatgcacagagtggcgataataatgtctttgccccacttgagagggagttgatttttgatatagatatgtcagattatgatgatgttagatactg

SEQ ID NO: 265551 - DNA, 215 bp, Glycine max
  unsure (1)..(215): unsure at all n locations
ccccctcccaccccccctccccctttcctcccccctcccccccccccttttttcccccctatcccccccccccctactcccccccttcccccccccctcttcccccctccttttcccccccccttcccccccccccccntaccccctcccctttctctccccctccccccccctcttcccccccccccctttccccccccccccattcccccccc

SEQ ID NO: 265552 - DNA, 452 bp, Glycine max
cccacgcgtccgcttttctactttgagtcttcttgatccttctttttctccttgagcgtcaaacgtggcagatgaggtggttctgctagatttctggccaagtccatttgggatgagggtcaggattgcacttgctgaaaagggtatcaaatatgagtacaaagaagaggacttgaggaacaagagtcctcttctcctccaaatgaacccggttcacaagaagattccggttctcatccacaatggcaaacccatttgtgaatccctcattgctgttcagtacattgaggaggtttggaatgacagaaatcccttgttgccttctgacccttaccagagagctcaggctagattctgggctgattatgttgataagaagatatatgatcttggaaggaagatttggacatcaaaaggagaagaaaaagaagctgccaagaaggagttcatag

SEQ ID NO: 265553 - DNA, 399 bp, Glycine max
cccacgcgtccgaaattagttcattctctttgcgcagttccctacctctcctttcaagatgcaggtcttcttcaagaccctcaccggaaagaccatcacccttgaggtggaaagctctgacaccatcgacaacgtcaaggccaacatccaggacaaggaaggaattcccccggatcagcaacgtctcatcttcgccggaaagcagctcgaggacggccgtaccctcgccgactacaacatccagaaggagtcaacccttcaccttgtccttcgtctccgtggtggcatgcacatcttcgtcaagactctcactggcaaaaccataaccctagaggtccaaagctctgacaccattgacaacgtcaaggccaacatccaggacaaggagggaaatccccc

SEQ ID NO: 265554 - DNA, 455 bp, Glycine max
  unsure (1)..(455): unsure at all n locations
gcgnggaaaggggtgctaangatgatgaaaagccaattgaagaacatgagaagggtggatttcttggtcagtggaggatttcattcaagacattggtgagaagattgagggagcagttgggtttgggaagccaactgcagatgtcactgggatacacattccatcaattaatcttgagaaggcagagctagttgttgatgttcttataaagaacccgaatccggtgccaattcccctaattgacataaactacttggtcgagagtgatgggaggaaactagtttcgggattgataccagattcgggcacaatccatgcacatggagaggagacagtcaagattcctcttactttgatttttgatgacataaggaatacctatgatgatattaaaccaggaagcatcattccttataaggtgaaggttgatctcattgtggatgttcctgtctttg

SEQ ID NO: 265555 - DNA, 424 bp, Glycine max
  unsure (1)..(424): unsure at all n locations
gcgnccacacgtncgcttttattatggattactcgttaaacaaatttggcatttcgaaatcacatgtgtctatggttgatgacagattagacactgatatcttgattgaacaaaatggtggttgcaaaactcttcttgtgctctcaagtgtcaccacactggccatgcttcatagccctaacaactacatacagccagacttttataccaataaaatttcacattttcttttcctgaaagctgcaattgtctgactataatatatatacattatccacacacgatggtgagaaaagccatgtatttaagaaataaattcacatttatacattacttgtttatatatattaatcaatattagtccctgcgaggactatacctattatgatattaaaccaagaagcatcattctttataaggtgaa

SEQ ID NO: 265556 - DNA, 454 bp, Glycine max
cccacgcgtccggtttgttgtgagctataagcttttttatcgtgaggagaatatgaggttgtttgttttctttgttgctgcagtagttttggtagcatggccatgccatggcgcaggctaccaaaggttccctctccgaatgaaaactggctatggtgagcgttcttcggaggtaaaatgcgcaagctttaggcttgctgtggaagcacacaacatccgagcctttaaaaccattcctgaagagtgcgtttaaccaacaaaggactacattaatggctaacaatttacatcagactctaaaacagttaaccaacaagctttcttttatgctagtgaacgcgaagtccatcacaactacatatgtatattctgcatagataacaccgtactctctaatatcccatactatgaaaaacatggatattgggtggaggaatttaatgaaaccttatat

SEQ ID NO: 265557 - DNA, 459 bp, Glycine max
ctgaaagcgaagaagtagagaacaaagaaagagagagagaattgaatgtgaatggggaatcaggagcagaagtggacgcaggacgaagaagatgctctcatcgccggcgttgaaaagcacggccccggaaagtggaagaacattctcaaggatccccaattcgcccctttcctcacttcccgttccaacatcgacctcaaggataaatggcgcaatttgagcgtcagcaacggtgctcagggctccaaagaaaaatctagggttcccaagcttaaagccctccctgctcctcctgctcctaccgccactcctcagaacgccgctcctgctctgcaaaacgcagcatctgatgtcactcccccagatgcttctcagaatgaccaagatgccaaaaaccctccaaggtataatgcaatgatttttgaagctctatcagcgctgaaagatagtaatggatct

SEQ ID NO: 265558 - DNA, 341 bp, Glycine max
gttgcattcacaagacaaatgggctgttacttttacggatgatgaaaatgacatgaggctcgtgggtgatgatccatggccggaggtcttcaacatggtgaagaggattttcatttgttcacgggaggacttgaagaagatgaaatgctgcaagctacctgcttcttcatcagacgttgaagaggttctattgagtccagattcacagaataaggatgagactcaacagtcttacatgccttagacaacttaaatttatttttttttttcctttttttttgggttctgggaatggaaatatatctcatggcataagttgcttcattttaatgaacttttac

SEQ ID NO: 265559 - DNA, 443 bp, Glycine max
ctcctctgtctttttctctctcttgctatccttttggctagtggcactgctgcaagtgcaacggcaagaagcgcagtgccaagccaccatgtttcaacattcaacagaagcctttttccttccacttttctctttggaattggttcttctgcttaccaggcagaaggagcagcaagtgtagatgggagaggaccaagcatatgggacacctacactagacagcatactgaaaagatttgggatcatagcaccggtgacatgggagctgatttttatcatcgatacaagggtgacataaaaatagcgaaagaaattgggctggactctttcagattctctatctcatggtcaagaatattcccaaagggcaagggagcagttaacccccttggggttaaattctacaacaatgtcatcgatgagatcctagccaatggtttaaa

SEQ ID NO: 265560 - DNA, 347 bp, Glycine max
caacaacacaaggccatcatcatggcttttgcttctcctatggcaagccaactcaagtgcaccggcactaaaactcttgtggctcccaagggcctctctgcctcttcaccactccacctcctgccttctaagaggcaatttagcttcactgttagggccatccaatcataaaagccaacctatcaagtgattcaaccaatcaacggtgatcccttcattggaagcctcgaaaccccagttacatccagccccttgattgcatggtacttatctaacctccccgcatacaggaccgtagttagcccactactaagagggatcgaagtgttccttgcccatggctacct

SEQ ID NO: 265561 - DNA, 464 bp, Glycine max
gcgaacagtgtgatgaaaatgaaggtccttgttttcttcgttgctacaattttggtagcatggcaaggccatgcgtacgatatgttccgtctccgaatgaacactggctatggtgcccgtactccggaggtgaaatgcgcaagttggaggcttgctgtggaagcacacaacatctttggctttgagaccattcctgaagagtgcgttgaagcaacaaaggaatacatccatggcgaacaatatagatcagactccaaaacagttaaccaacaagcttacttttatgccagagacctcgaagtccatcccaaggacacatttgtgttcagtatagatggcaccgtactctctaatattccatactacaaaaaacatggatatggggtggagaaatttaactcgaccttgtatgatgaatgggttaacaagggcaatgcaccggcactgcccgagactcttaagaa

SEQ ID NO: 265562 - DNA, 455 bp, Glycine max
ccgggcgacgcagcgtgcgccacgcgtccggggggtaggagatactctcattcacctcctatcatcattataatcattcatggcaacctgcccttattcttctggttcaatttcacacccatcatggaccgctttccgatcctctttctcgtcgccaccctcatcaccctcgcctccggtgcccgccacgatattcttcggttaccctccgaagcttccaggttcttcaaagcacctgctaatgccgatcaaaacgatgagggcaccaggtgggccgttttagttgccggttccaatggctactggaattacaggcaccagtctgatgtttgccatgcatatcaactactgaggaaaggtggtgtgaaagaggaaaatattgttgtatttatgtatgatgacattgctttcaatgaagagaacccacggcctggagtcattattaacagtccaca

SEQ ID NO: 265563 - DNA, 435 bp, Glycine max
cccacgcgtccgcaagaatggcacaaattaacatcatggcacacgggatacaaacccttaatcggaattccgatttccataaaccccaagttcctaaatcttcaagttttcttgtttttggatctaaaaaactgaaaaattcagcaaattctatgttggttttgaaaaaagattcaatttttatgcaaaagttttgttcctttaggatttcagcatcagtggctacagcctgcatgcttcacggtgcaagcagccggcccgcaaccgcccgcaaatcctctggcctttccggaaccgtccgcattcccggcgacaagtcgatctcccaccggtccttcatgttcggcggtctcgcgagcggtgaaacgcgcatcacctgccttctggaaggcgaggacgtcatcaatacgggcaaggccatgcaagccatgggcg

SEQ ID NO: 265564 - DNA, 314 bp, Glycine max
ccctctccggtctgaaagccagcgaccgcgcctccgtgccatggaagcaaaactccagcctctccttctccagcccgaagcccctcaagttctccagaacaatcagagcagcagccgccgacgagaccacagaggcaccaacaaaagtagaggctgcaccggtcgggttcaccccaccagaacttgacccaaacaccccttccccgatcttcgggggcagcaccggcgggctcctgcgcaaggcacaagtggaggagttttatgtcattacgtgggactcacccaaagaacacatctttgaaatgcccactggc

SEQ ID NO: 265565 - DNA, 455 bp, Glycine max
cgtttctcagttttattcgaatccctctctcaatctcctttccaaatggccagcgtggaggttgcgacagcaaacaccaacaacagttccagaaaatgaaacaaccgaggtaagcaagacccaggaaacaaccccagtcactgaggctcctgcaacagaacaaccagcagctgaggttcctgcaacagaacaaccagccgctgaggctcctgccccagaatcaaccaccgaagcaccaaaggaagaaaccaccgaggcaccaacagaaacagtagaaaaaacaactacagaagtagccccagaggagcctaaagaagttccagttgagaccgaggaggtggtggcaaaggagacagaggaagagaagccagcataagagaaatcagaggagaaaactgaagaagtgaaagaagaagcagaggagcctaaagaaactactgaaacagaatcagcag

SEQ ID NO: 265566 - DNA, 440 bp, Glycine max
aaaatgcgagtgctattttcaagcatgagagtttttcttcttcttgtgtggttgttggagctggtttgtgtttcggtgaccgccgtgaacccttctctgaacgacgacgttttggggcttatagtgttcaaagctgacatacgagatccgaaggggaagctcgcttcttggaacgaggacgatgagagcgcgtgtggtggtagttgggttggggtgaagtgcaaccctagatccaatagagtggtggaggttaaccttgatgggttctcgctctctgggagaataggtagagggttgcaaaggttgcagtttctaagaaagctttcactggcgaataataacctcactggtgggataaaccccaacattgctcggattgataaccttagggtcattgacttgagtgggaatagtctctcaggggaggtttctgatgatgt

SEQ ID NO: 265567 - DNA, 330 bp, Glycine max
gaaaagaaaagatgtttgagccacattagctatacactcgcgcgaagaccgaggaggtcgaccgtgaatcaggagaaaccctctacccatggctgagcgtcggctagaaccagctccgatggggtttcatccgcaaggtctacggcatcctcttcgcgcagatcgttctcaccaccctcgtcttcgtcaccaccgttttctatacttcaatcaatgacctccttaagggcaattccaccctacttctcatccttcttcttcttcccttcaactttatgattcctcttgtgaagtaccagctaaagcattctcatatttacatcttgcttg

SEQ ID NO: 265568 - DNA, 411 bp, Glycine max
tatcacttccctcaccatggccgagtcctgcctcctctcttctccctcctcactctggcacacgaaaaccaaaccctctctctttacacccccctccaaacccctcacactccaattttcatgcctcaactcctccgtctctctctccctcgccgcaccaactcaccgttctccccttgtaactttcgtggcccaaacttccgattgggctcaacaagaagaagaacagagcctcgctgaaaccgaagcgggcctggaaagttgggagcccaacggcgaagacgccggcgatgagagcttcgtcgaaccgccggaagaggccaagctcttcgttgggaacttgccttacgacgttgatagccagaaattggccatgcttttcgaacaggccggaaccgttgaaatcgctga

SEQ ID NO: 265569 - DNA, 465 bp, Glycine max
gacggctaggtttatccatctcattaatgagtagtacgtttattgcattactctcttgaaggctactcttgggaacagcgttcatacctactatgggttgttaatataaataaattaatagggcttaaatgtacttatatccatttactttgtttgaaaaaacataaaatcagctttacaattttatataatattcgctttccaaactaatttcattaattaatatatttttcatctttattgtaccatgcttcatattattaatatacatctttattgaaacattaaagctcttataaatgattttttaaatacaatataatatatattctatgacattgttattattgaaaatcattttttggaacatattatctaatctttttgaccttattttattatataaatgtactttttttaggtttgtgtctagaaacctgttctttttaaataagaattttctaa

SEQ ID NO: 265570 - DNA, 285 bp, Glycine max
ccctacttcttccgcggcgtttgcattttaattcctgtaatggctattgagaatatggttaaacatgaagccggtgaagaaaaaagagagcgggccaaaatggcttcttttgttggagccatggctattgctgacttggtgaagacaacctttgggccaaatgtaattgataaaattttgcatgcaacatgtagaggacgtgaatttactgtcactaatgatggtgctacaatcttgaagtcccatcatattgataacccagcttctaaagtccttgttgacata

SEQ ID NO: 265571 - DNA, 460 bp, Glycine max
gtccgcagggaagattcctatgtccatggccgcccttgtttatatggaagccttggttttacgaaacaggggtggaatgggtgagttgccttcttctttgaagaattgcagcactttatttatgctggacctgagtgaaaatatgttgtcgggtccaataccatcatggattggagaaagtatgcagcaattgataatcttgaacatgcgaagaaatcacctctcaggaaatctacccattcctctctgttatttgaaccgtattcaattgttggatctttcaaggaataacttgtcaagtggaattccaacatgcttaaagaatttcactgcaatgtctgaacagagcatcgactcaagtgacactatatctaatatatattggaataatcagacttacttagaaatttatggtggttacagatatggaggttatacgcttgacataacatggatgtgg

SEQ ID NO: 265572 - DNA, 427 bp, Glycine max
gccaccgacactctcactctcactagtgttggttgtgctgtttttcgccgccgtgggcgcgcagtttccggcgaccggcgagcttgcaacgttccgcgaggcgccggcattccgcaacggaagagaatgccgcaaccgcccgcgaagcgactccgtgatccacatcgcgatgacgcttgacgcgacctacctccgaggctccgtcgccggagtgttctccgtgctgcagcacgcgtcgtgtccggagaacgtcgtgttccacttcatagccaccacgcaccgccggacggagctccgtcgcatcatcaccgcgacgttcccgtacctctccttccacctctaccacttcgatgcgaacctcgtccgcggcaagatctcgtactcgatccggcgcgcactggatcaaccgctaaactacgcgcgcatg

SEQ ID NO: 265573 - DNA, 416 bp, Glycine max
  unsure (1)..(416): unsure at all n locations
cccacgcgtccgcccacgcggtccgctggctcgtatttgtggtcttacaatgaaaataagtccagactcctgtccaatacatgttggggggtggctcaccnttttttttttttctctctttttgtgcctttgtgtctggtttatatttggttctgcttggctgtgcctttttttgtttcctttgtcttttagtcttctttttgtgctctttttgtactttatttatttagtattctgggttttttttgattcattttttttctcctgttttttgcacgctttttggttctcttattactttgtgatgtatttcttttgtttttttttgggttttttttttatttttctttttttgtctctatttttttcgtcttctattatttttcgttttccttttgttttgccctttttttctt

SEQ ID NO: 265574 - DNA, 323 bp, Glycine max
  unsure (1)..(323): unsure at all n locations
agaatatgaatttgtttgtttcctttgtggctgcattagtgttggtggcatgaccatgccagggcgcaggctaccaaaggttccttctccgaatgaaaactggctatggtgagcgttcttcgaaggtaaaatgcgcacgttttaggcttgctgttgaagcacacaacatccgagcctttaaaaccattcctgaagagtgcgttgaaccaacaaaggactacattaaatgcgaacaatttacatcagactctataacagttaaccaacaagctttcttttatgctagttaacgcgaagtccatcacaacgacatantttatatt

SEQ ID NO: 265575 - DNA, 240 bp, Glycine max
ggcagtggcagctacgatcctgctcttggtgcctgctcggaggagctcggccggcgcgaccagtgggacctgcgctggggcagtaccggctgaacctgatggcgttctgcaaggacttcaacgcccgcacccagaagtacaaggcggagacacccattgccgttacgataacggcttacaaggacaacaccttcgagttcaccgttaagtcgccgccggtgtcgttgtacctgaagaaag

SEQ ID NO: 265576 - DNA, 411 bp, Glycine max
ctctaaacaacttgataaaaatgattttcccttttatcttcgtggctacaacactggtagcatggcaataccatgcgggcgatatgtaccctctccgaatgaacactggctatactgcccgtactccgcacgtgaaatgcgcaagatgtacgcttgctgtggaatcacacaacatctatggctcatataccattcctaaacagtgcgttgaagcagcaaatgaatacatccatgatgcacaatatacatcatactttaaatcagttaaccaacaatcttacttttatgccacataccttaaagtttattccaaggtcacatgagtgatcaatatatattgcacccaactttctaatatttcatactacaaaaaacattcatattgcttggataaatttaactctacctttt

SEQ ID NO: 265577 - DNA, 447 bp, Glycine max
ctagaaacagtgtgatgaaaatgaatgtccttgttttcttcgttgctacaattttgggagcatggcaatgccatgcgtacgatatgttccctctccgaatgaacactggctatggtgcccgtactccggaggtgaaatgcgcaagttggaggcttgctgtggaagcacacaacatctttggctttgagaccattcctgaagagtgcgttgaagcaacaaatgaatacatccatggcgaacaatatacatcagactccaaaacagttaaccaacaagcttacttttatgccagagacctcgaagtccatcccaaggacacatttgtgttcagtatagatggcaccgtactctctaatattccatactacaaaaaacatggatatggggtggagaaatttaactcgaccttgtatgatgaatgggttaacaagggcaatgcaccggcac

SEQ ID NO: 265578 - DNA, 425 bp, Glycine max
  unsure (1)..(425): unsure at all n locations
gatcgagataactagaaacagtgtgtttaaaatttatgtccttgntttcttcgttggtacaatggtggtagcatggcaatgccatgcgtactatatgttccctctccgaatgaacactggctatggtgcccgtactccggaggtgaaatgcgcaagttggaggcttgctgtggaagcacacaacatctttggctttgagaccattcctgaagagtgcgttgaagcaacaaaggaatacatccatggcgaacaatttatatcagactccaaaacagttaaccaacaagcttacttttatgccagagaccttgaagtccatcctaaggacacatttgtgttcagtatagatggcaccgtactctttaatattccatactacaaaaaacatggatatggtgtggagaaatttaactcgaccttgtatg

SEQ ID NO: 265579 - DNA, 323 bp, Glycine max
acactccctctgatgttcccaccggatttaacaagatcatcaatactgatatcactgcagcttctatctaacagggggaaaatgtccttgcctttagtgacatacatccacaagctcctacccatattctaatcattcctaaagttatggaattgcctaactggtctgtccaaggctgatgataggcactgtgagattctaggacgtcttttgtgcactgctaatctgcttgcaaagcaagaatgtcttgatgatggcttcatgattgtaattaatgatggactatacggttgccaatcattttaccacattcatgtgcacct

SEQ ID NO: 265580 - DNA, 465 bp, Glycine max
cccacgcgtccggcaatcttcagcttctactttggagactatggtcacatagcagtgcggggaccttacctgacctatgaggacacatatttggctgtgactggtgggtctggcatatttgagggtgttaaaggtcaagtgaagctgcgttatattgtgtatcctttcaagattttgtacacattttatctaaagggtatcaaggatttgcctcaggagcttcttgtcaagactgttgagccaattccatctgttgaaccttcccctgctgctaaggcccttgagcccaatgctaccattgctggcttcaccgactaattcatcaactttttttgtatttgctttggcctttgtagtagtatgatttaagttactgaataataataacaagtggggactatgatgggttttgtagtggtggagtttctatttaacgaatagcttgacattattcagttagtggtg

SEQ ID NO: 265581 - DNA, 407 bp, Glycine max
ctttgcacaaaccctaacacctaaaagccataagaagcgaaatcgtaatcgcaatctagcggatatgaaggtcgtcgctgcgtacttgctcgcagtgttgggagggaatccatctccttctgccgatgatatcaaaaacatcctcggcgcagttggagctgaggctgagcatgagttgattgagttgctcttgaccgaagtcaagggcaaagacttcaatgagctacttgctagtggaagtgaaaagatttctgcagtggctggtggtggtgcagcggttgctgttgctgctgcaccagcgggaggtgctggtggcggtgctgcacctgctgccgaagcaaaggaagaaaagaaagtagaagagaaggaggaatctgatgatgatatgggtttcagtttgttcgact

SEQ ID NO: 265582 - DNA, 427 bp, Glycine max
gtctggacccacgcgtacggactacagagagtttgagttagagaatagatggaaagagtagcaggggtatatcgggcgctgaaaatatacttccttgcattcttctcaccggggcacctaatgcctctggtccagctggctcgcttggtggcggcacgaggccagcacgtgaccatcatcaccacccacgccaacgctcaactctttgaccagaacatcgacaaggacaccgcctacggccaccacattcgcgtccacatcatcaagttccccaacgcccacgtacggctaccggaaggcatcgagcacctgtccgacgccaccaacaatgaaaccggctacaagatccacatggcggcgcatctcatcatgccccagctcgagtctatggtcaaacactcttcaacggacgtcttcatccctgaca

SEQ ID NO: 265583 - DNA, 429 bp, Glycine max
  unsure (1)..(429): unsure at all n locations
aacacacacatagaaacccaacaacatgaatgaagaagatgattctaaccctcttctgcaatatcattttatctctcctctccctctcccacgcctccgtggtggatttctgcgtagcagactacacaggccccaatggccccgcagggtactcatgcaagagcccagcaaaggtcacggtggacgacttcgtctactccggccttggcaccgccggcaacacctcaaacatcatcaaagccgcggtgacgccggcgttcgacgcgcaattccccggcgtcaacgggcttggaatctccattgcacgcctagacctagcagccggtggagtcatccctcttcacacgcaccctggtgcctcagagctgctggtggttgtgcagggaacaatctgcaccggcttcgttgcttcngacaacactgtgtacc

SEQ ID NO: 265584 - DNA, 438 bp, Glycine max
cggacgcgtgggttaatatcatgccctccttctgcatccaaaccttcattttgtagtgcgtgggggtttctcatttgtctgccgttccatggatcgggaaggaggatccaacggcggatcttgctactactccgttctcgggattcgtagggacgcctccttctctgatattcgcactgcctaccgcaaactcgctatgaggtggcacccggacaagtgggctcagaatcctgcaaccgctggcgaagccaagcggcggtttcagcaaatccaagaagcctactcagttctctccgatcagtctaaaaggtcaatgtacgatgcggggctctacgatcctttggaggaagaagaccaagacttttgtgacttcatgcaagagatgatctcaatgatgaacaatgtgaaagacgatgtggacaagttggaggacctaca

SEQ ID NO: 265585 - DNA, 451 bp, Glycine max
gttgagaactaagaaggagaagcaaatggtttcctcaatgatctcttccccagctgtacgactgtcaaccgtgccggtgccggcatggttgctccattcactggcctcaagtccatggctggcttccccaccaggaagaccaacaatgacattacctccattgctagcaacggtggaagagtgcaatgcatgcaggtgtggccaccagttggcaagaagaagtttgagactctttcctacctgccagaccttgatgatgcacaattggcaaaggaagtagaataccttcttaggaagggatggattccttgcttggaattcgagttggagcacggtttcgtgtaccgtgagcacaacaggtcaccaggatactacgatggacgctactggaccatgtggaagctgcctatgtttggttgcactgatgcttctcaggtgttgaaagagcttt

SEQ ID NO: 265586 - DNA, 417 bp, Glycine max
acgcgtccgttcactcgcacgaaaaatgggatcctggttttcgacacatctgtattgacatgatcttagtgaagttcgccaaaacggcgtggttgtggttgtccaatggacaagtggcggagattctcgttacctataatgccggcacgagcctcttggctgctcctctgatcctcgcttcatagaaaacaagttacatcctctctgacacattgaacttgaagagtaatactttcgaatgggtgagcgttgagttctctgtcaccaccgatttgcatgaaaggtccgattaaacccatgatgtgatttcttggtcttttgctttcaagttgtcacatggcagcattaatgatgctttgcatcttacaagctttgagctcaatgatgtcatctatcttttaacatcgttgttaaatg

SEQ ID NO: 265587 - DNA, 443 bp, Glycine max
gttgagcactctaaaggaaaaccaaatggtttgaacaaaggtccatgtaaaataaaataggtgcaattaaaatagcatgggggagccttgctaactatatgtttcctctcctaatgaacactggatatggagcccgttctcttgtagtgaaatgcgcaagttgaaggcttgctgcggaagctcacaacatctttggctataaaaccattcctgaaccaagcgtaaaagcaacaaaggaatacatccttggctaacattatatatcagactacaaaacagttcaccaacaagcttacttttatgccatagacctaaaagtccattccaaggacacatttgtgatcaatataaatggcaccgtactctctaatattctctactatatatatcatttttattgtgtactaaatatcaactctatcttttatgatcaatgctttaac

SEQ ID NO: 265588 - DNA, 365 bp, Glycine max
accacgcgtacgcacccgcaccggcctcatcctgacgctgcaggagatgggcgccgaggtcgaagtcatcaacccgcgccttgccggcggcgaagacgtggcggacctgcgcgttcgctcctccacgctgaagggcgtcacggtgccggaagaccgtgcgccttcgatgatcgacgaatatccgattctcgctgtcggcgtcgactttgcagaaggggcgaccgtgatgaacggtctggaagaactccgcgttaaggaaagcgaccgcctcttggacgtaggcaatggccttaagctcaatggcctacattgcgatgaatgctagacgtcgctaagtgtgcgtggacgacctgacggctaggggc

SEQ ID NO: 265589 - DNA, 465 bp, Glycine max
cccacgcgtccggcaagtgcttctaaaggactatgttaccggttttcccaaagaatccgggatgaatattgtcgaaagtaccataacattgaagcttccacaaggttccaatgatgtcttgctcaaaaatttgtatttgtcttgtgatccgtatatgaggaatctcatgaacaggcccgaaggccctcccaatagtcgtgcttacactcctggctctccattaataggatatggtgtgtctaaagtcctggaatctgggcacccagattataaggaaggtgatttagtgtggggctttaccaaatgggaagagtatagcttgttaccctcagctcaaatactcttcaaaattgagcacactgatgttccacttacctactacactggaattcttggtatgccaggagtgactgcatatgcaggtctatttgaagtaagatctcttcagaaagagaaaatgttttt

SEQ ID NO: 265590 - DNA, 463 bp, Glycine max
gtgagctataagctagtttatcgtgaggtgtattatgaagttgtttgttttctttgttggggcagtagttttggtagcatggccatgccatggcgcaggctaccaaaggttccctctccgaatgaaaactggctatggtgagcgttcttcggaggtaaaatgcgcaagttttaggcttgctgtggaagcacacaacatccgagcctttaaaaccattcctgaagagtgcgttgaaccaacaaaggactacattaatggcgaacaatttacatcagactctaaaacagttaaccaacaagctttcttttatgctagtgaacgcgaagtccatcacaacgacatatttatattcggcatagataacaccgtactctctaatatcccatactatgaaaaacatggatatggggtggaggaatttaatgaaaccttatatgatgaatgggttaacatgggcgactca

SEQ ID NO: 265591 - DNA, 408 bp, Glycine max
acctccggacacacgcgcgcggacggctggcgctcttggcaggagctttactcccttatgtgctggggttcttaaggtcttccttactttttgcttgctgcacccatgcctactcccaggcacctcctccaattgtggatggactttcatgggatttctataggacgagctgtcccatgcttgaagggatagtgagcaagcatctccagaaggtgttcaagaaggacaatggtcaagctcctgccttactcatgatcttcttccatgactgctttgttcagggttgcgatgggtcgatatcgttggatggaagtccaaatgaaaaggatcaaccggcaaacatagggataaggccagaggctttgcagaccattgaaaatctttcaactcttgttcacaagcagtgtg

SEQ ID NO: 265592 - DNA, 391 bp, Glycine max
cccgtctggacccacgcgtacagcagcttcggcttgggcacataaacttatagggtactgtgctggggacgctatggggagcccgtggaagaagaagcgtttgaggaggttgtagaggaaccgccgctagatgagacagagatccaagtaacgcgttaaacctagcgcgtgcctgacgcttttacaattgctgataggtgcgcatgggacacaccacacgttaatggcacatggcctctccatgaatgatggttgagacatgatggcggatacaggttcactatatgcggcatatgttattaacgtaactcatcgatatgactcgctactgtcatgagcaataagcatctatttgcgagaaattattggatgggagaacatataacttatc

SEQ ID NO: 265593 - DNA, 351 bp, Glycine max
cccacgcgtacgaggaagaccaataaagtttttacctacattgtttgcaacggtggacggggacaatgcatgcaggtgtgggctcaaattggcacgaagaaaagcgagactctatgctacttgccagacctagaagatgccaagttgtcaaaggaagtcgaataccttcaacggacaggatggacttcttgcttggaattcaagctggagcactgttacgtgcaccgggagtacaacaggtcacctggatactatgatggacgctactggaccatgtggaatctgtctatgtcgggctacactaatgcttcataagtgttgaaggaccttaaagaagctacgactgcatac

SEQ ID NO: 265594 - DNA, 467 bp, Glycine max
cccacgcgtccggcttgttgcggggcttctaggagtagagtctggacaagatgcagtttggagagaattgctgtatgaacgtaaagaacagttggtgccaccatatggcgtggccgtggaagagttcacaaaccgcatttctatacttaggagcaagttaggaaatagaggtttgaaagatgaaggcattgttgtgcctacagggctgggtgccgagggcaaagttagaggtaacattcttgctggtgacgtaaactcattggcatattcaaggactccagaagaaatattgaggatagtatatggaagtggtgatgaacatgttcgtggtggcttctatcctaaaggagcaagtggtcacatagctcaatcttacttaaagtaaactacatttattatggacttttatagattatatcacttgtctttaatccattgctaatttcctttgtggtaattaaatattg

SEQ ID NO: 265595 - DNA, 474 bp, Glycine max
cttcgattctcaggcggatgcgggagcgttcaagacgtatcctcagcaggctggtaccattcgcaagaatggctacatcgtcatcaaatccaggccttgcaaggttgtagaggtctctacgtcaaagacaggcaagcatggacatgcaaagtgtcactttgttgcaattgatatttttaatgggaaaaagcttgaagatattgttccatcatcccacaactgtgatgttccacatgtgaatcgcactgactatcagcttattgatatctctgaagacggctttgtgagtctgttgactgataatggaaataccaaggatgatctgaagcttcctactgatgaggcattgcttgctcagattaaagatggattttctgaaggaaaagatcttgtggtttctgttatgtctgcaatgggagaagaacagatctgttcactgaaggacatcggtcccaaaaattaatatgatgctat

SEQ ID NO: 265596 - DNA, 399 bp, Glycine max
agacctcgaaggttaggcaaccactagagtattctcatcaagcttcttcgcacaaagtatgtgtgcgtcaaattatgcaattggactagtagaactgaatggattcttaaagaaagtgtaagtcaaggaattttattgtacgactttgtgattgtgagccattatggaatatacaactacacttccattggagatgctattgctgctgcacccaataatacatagcctgaagatggatatttccttgtgtatgttatggagggactctatgaggaatatgtagttatttccaatgaatagaagaatatattgctagttggagatggtattaacaagactatcatcacatggaaccatattgtcatagatggttggactacttttaattctttcaccttt

SEQ ID NO: 265597 - DNA, 394 bp, Glycine max
cccacgcgttcgcccacgcgtacgcccacttgtccgcttacgtgttcacgcaattatcggggaaacttgcaaagtgtcacggggtcaaacctcatgaatggacagatcatgtacatgatgatgctactgcgcgcgactttgcatgtgttcttctgtattattgaccgtgtagtcgccaacatgaactctgagttgggtacaaagcgctactgtctaaaaggaacaatggcctgcgtcgtaatgccactagatctcagaatgggagatctacttgttcgcggaatgcataaactccggcctgaagcagggcgtcatattgctcgtcgggcaagagggcatgttcatggagcgcctagagagcgagtactccgttcagctgaggatcaaggtcttc

SEQ ID NO: 265598 - DNA, 468 bp, Glycine max
agcatacaacactaaatatgggatttactcagagagatgtggacttaacaatgtgatgatgtcatggggacacgatgactacatgtatctagtggcaaaggagaatgatactacactgccctctgcggctttgttcattataagataccattcattctatgcattacataaggaaggagcctataagcacttgatgaatgatgaggattttgagaatctgaaatggctccatattttcaacaaatatgacctttacagcaagagcaaaattcgaattgatgttgaaagggtcagaccgtactatctgtccctcattgaaaagtacttccctgcaaagctgaagtggtgaagagttaattggagccatgaagtgccaataatttaccatgatagccaactagtttcgtatggagtagagggaataataagctataaagctgtagttgcattaattaatttatatgcttt

SEQ ID NO: 265599 - DNA, 414 bp, Glycine max
attccatccgaatttgaataaaaaacataagaaaagaaaggtgacggggcaaagtgagaataatagctttcttctccgtctcaattcatctcttctctgagtctcaacctaattccccaatcaatcatctttacgtgtttgttcgagaccatggccaaaagccccttcaagcttgaacatcccttggaaagaaggcaggctgagtctgctcgcattagagacaagtatcctgatagaatacctgtgattgttgagaaagctgaaagaagtgacatcccagacatcgataagaagaagtaccttgtcccagcagatttgactgttggccaatttgtttatgttgtccgtaaaaggattaagttctggctgtacttatgaaccgaatctcttgttgcagccgctttgatgtcttct

SEQ ID NO: 265600 - DNA, 436 bp, Glycine max
cccacgcgtccgcccacgcgtccgaaaccatgtctacctccgcagcttctctcgcactgcgaaccctcactctccgaactcgacaacctctctgttctccccaatgcttctcctcgtccctctccctcacccctaactccaaacccatttccatttccgccgttttcctcaaaacaacgctgtcgtcgtcgtcgccgttgtcgctgtcgtctcgcttcgttccccgtgtctctgtgttggagcaggaggaggacaccttcggcgacggagacggccccagcttctcccgcgaccttaagctctttgtcgggaatctccccttcagtgtcgacagtgcgcggctcgcggagctcttcgagagtgcggggaatgtggaggtggttgaggttatttatgataagactactgtgaggagcacggggtttgggtttgtgac

SEQ ID NO: 265601 - DNA, 430 bp, Glycine max
ctcggcacctagagacgacgcagggccttttaagcggcgaaatgcttaggcgagtacagggtaagcgtatatccggggattcctgatatacgtgaacctttcggactgctggtgaattcacgggcaggcaagagacaacctggtgaactgaagcatcttagtagccagaggaaaagaaagcaaaagcgattccgagtaatatcggcgagcgaaatgagagcagcctagaccgcgataacagagctagtgcagatctatacaagggtctagctgctagcgcgaagcagcagagaatgctgtgccctagatggcgagagtgcagttgccgaacgcattactagcttacgctctgactgctaatagcatgcatcacgtggaatgacgtgtgaatcagcaaggaccacgttgcaaggctaaagactgctggatg

SEQ ID NO: 265602 - DNA, 375 bp, Glycine max
tccaaacattctgatgaacatgaacgagcttgtactgttcattgatgcaattttggtaggatgtccatgccatgcgtgcgagatgaaacctttccgaatgaacactggctatcgtgcccgtactccggaggttaaatgcgcatgttggaggctggatgtggaagcacacaacatattgggctttgacaccattcctgtagagtgcgttgatgcaacaaaagaatacatccatggcgaacaatatatatcagactacaaaacagctaaccaacaagcttacttttatgccagagacctggaagtccataccaaggacacattagcgttcagtgtacatggcaccgtactgtctaatattccatactacaaacaaca

SEQ ID NO: 265603 - DNA, 412 bp, Glycine max
cggaaaaattcacctctccaatcccaatcctatcgttgcaaatgatccgattcattctgttgcagaacaggcagggcaagacccgtcttgccaaatactacgttcctctcgaggactccgagaagcacaaggtcgaatacgaggttcatcggctcgtcgtaaacagagaccctaaatacacaaatttcgtcgagtttcgtacgcacaagataatatacaggcgatatgctgggttatttttctcactctgtgttgatatcactgataatgagttggcgtatttagagtgcatccatttgtttgtggaaatattgcatcacttcttcagcaatgtctgtgagctcgatttggtttttaactttcacaaggtctatcttatacttgatgaattcattctagcgggtgaactgca

SEQ ID NO: 265604 - DNA, 467 bp, Glycine max
tagaaacagtgtgatgaacatgaaggtccttgctttcttcgttgctacaattttggtagcatggcaatgccatgcgtacgatatgttccctctccgaatgaacactggctatggtgcccgtactccggaggtgaaatgcgcaagttggaggcttgctgtggaagcacacaacatctttggctttgagaccattcctgaagagtgcgttgaagcaacaaaggaatacatccatggcgaacaatatagatcagactccaaaacagttaaccaacaagcttacttttatgccagagacctcgaagtccataccaaggacacatttgcgttcagtatacatggcaccgtactgtctaatattccatactacaaaaaacatggatatggggtggagaaatttaactcgaccttgtatgatgaatggggtaacaagggccatgcaccggcactgtccgagactcttaagaatt

SEQ ID NO: 265605 - DNA, 437 bp, Glycine max
cccacgcgtccgcccacgcgttcgaaaccttgtctacctacgtagcttctctcgcactgcgaacccttactcttcgaactggacaacctctctgaacttcccaatgcttcttctagtccctctacctcacccctaacttcaaacccatttccattttcgccgtttttctcaaaacaaccctgtcttcgtcttcggcgttgtcgctgtcgactcgcttcgttccccatgtctatgtgtttgaacacgaggaggacactctttgcgacagagtactgccccagcttctaccgcgaccttaagctctttgtcaggaatctccccttcagtgtcgacagatcgcggctcgcttagctctttgagagtgctatgaatgtgtacgtcgttgaggttatttattataagactactgtgatgagcacaagcgcttggttttttac

SEQ ID NO: 265606 - DNA, 466 bp, Glycine max
tccacgcgtccgcttgtgcttttcctagccctcactgatcattcaagtgctctttattggttatgcaaagatggtgtgagtgatcaaacccttcagaaagcaatagattatgcttgtggaagtggagctgactgtacccctattctccaaaatggagcttgttaccaacccaacactgtgaaggatcactgtaactatgcagttaatagctattaccagagaaagggcaatgctccgggaacctgtgattttgcaggtgctgccacaaccaatgcaaatccacctactgcatcatctggatgcgtctacccctcaagtcctagcaatacaggaacaacaccatctattggttcaccaccaggcacaacaccatcaacaggtggtacaactccagggacaagtacaacacccaccacatttggaatgagtccaacatctacaactggtatcaacaatgacaatggag

SEQ ID NO: 265607 - DNA, 442 bp, Glycine max
aacgcgcatacaccagcacgtcacggactttacgacatggagccctgcggtgaggctgggccaggtggagtacgcgatggaggcggtgaatcagggctcggatgctatagggctcccatccaagacccacgtggtcctcgcatgcgtcaacaaggctaactgcgaactttcatcgcaccagaagaagatcttcaaggtcgacaaccacatcggcgtcgacatcgtcggcctcaccgacgacatgtcgatcctctcccgctacatgcgatccgagtgcatcaactataactacacctacgagtcaccgttccccgtacggagactcgtcgttcatctagccgataaggctcatgattgcacccagcggtcatggaaacggtcttatggaggtggactcctggtagctggattagatgaatcgggagcttacctctattacaac

SEQ ID NO: 265608 - DNA, 325 bp, Glycine max
cgacgcgtccgcaagaatactcatatttatatagtggctagcatagagctagtaatgatattaatattggtaagctagctctaagccatggctaatgaacgtgatctgttctcggcggagattgtgaaccgtggaattgaatcgtcaggaccaaacgctgggtcgttgacgttttcggtgagggtgagaaggcgcttaccggattttcttcaatcggtgaaccttaagtacgtgaaattgggttaccattatctgataaaccatggcatatacttgttcaccataccggttcttctcgtggtgtttagtgctgaggttggaagcc

SEQ ID NO: 265609 - DNA, 336 bp, Glycine max
cccacgcgtccgaccacgcgtccggcaaattatgatgttgcaatatcaacagcatgccagagacttgattatattgtggtggaaacaactaatgtagctcaagcatgtgttgagttacttcgtagagagaatcttggtgtcgctactttcatgatattggtatttttttattctttatattaatcaactcgtttttgtctctaaatggctgtttaatattttgaatggcatgaattaaatatgttcacttttacttctggacccttggatttgtataactgtgactgagttcatgctctacgatatatttgctaatttaaggacatgttggtataa

SEQ ID NO: 265610 - DNA, 463 bp, Glycine max
cccacgcgtccgcgtcgctccgcaccagtttcaccgcacgaatatcttgttgtttggagcgatccgagaaaaactctgtaaacatgttggtttaccaggacctccttacaggtgatgagcttctctctgactccttccgttacaaggaaattgagaatggaatgctgtgggaagttgaggggaagtgggttgttaaaggagcagttgatgtagacattggtgcaaacccttctgctgagggtggaggagaagatgagggagttgatgatgcagctgttaaggttgttgacattgttgacacattcagacttcaggagcaacccgcattcgataagaagcagtttgttaccttcatgaagaggtttatcaagaatttgactcccaagctcgatgcagagcaacaggagttgtttaagaagcacatcgagggagcaactaaatacctgctctctaagattaaaga

SEQ ID NO: 265611 - DNA, 287 bp, Glycine max
aattttgtacttcttaagagttttcaaacatgttattacctttcctttaaaaaaaaagagagaaaaaaaaaaaaaaaaaagaaaaaaaaaaaaaaaaaaaaaaaaaaaaaaaaaaaaaaaaaaaaaaaaaaaaaaaaaaaaaaaaaaaaaaaaaaaaaaacccaaaaaaaaaaaaagggggggcccttttaaagggcccaagtttaccaacccgggcctgccaacttaaaaccttttttagggggcccctaaattaaattcaagggcccggcttttaaaacccttga

SEQ ID NO: 265612 - DNA, 426 bp, Glycine max
atggtgtacttcttaagagttttcaaacattttattacctttcctttaaaaaaaaaaagaaaaattaaaaaaaaaaaaggaaaaaaaaaaaaaaaaaaaaaaaaaaaaaaaaaaaaaaaaaaaaaaaaaaaaaaaaaaaaaaaaaaaaaaaaaaaaaaacccaaaaaaaaaaaaaagggccccccttcaaaaagacccaatctttcccccccctcctttccaatataaaaccttttttttcgggcccctaaattaaattcaatggcccccttttaaaaaccttcatacctgaaaaacccttccctaccccaatttaatcccttttcaaaaaaacccctttttcccattttgccataatcctaaaatcccccaacctaatcccttttcaaaacattttctcacccaaatattctaattgaacccccc

SEQ ID NO: 265613 - DNA, 333 bp, Glycine max
cccacgcgtgcggtgaacttatggctgtcggcgtggttctgttggatacatgggccagcatgtttgggatgaggattaagattgcattacctgaaaagggtgttgcgtatgaatacaaggaataaaatctaatgtacaagagtcctttgcttttgcaaatgaacccaatatacatgaaaattccagttctgatccataatggcaaaccaatttgtgaatctgcaattatagtgcagtacattgatgaggtctggaatgataaagctccaatcttgccctctgacccttatgagagagctcaagccagattctgggtagattacattgacgaaa

SEQ ID NO: 265614 - DNA, 337 bp, Glycine max
cccacgcgtccggagaacgcatgcgtgcacaccacaattccacaacatgtttttcactgccgctacaggggtagcttcctagatttcttcttctattaacagtgtcaaatgtcttcgttcctccaagaactgctccattatatacccccttataaccacattgccctcaaaccgtggcatgtttgtgtcacacttagtggaacctttgtccattgggggtgccattaatacgcacaaaatgtgggggcctataatttctgctgctgtcgcacaagaagatgctcgttgcgtagctgatgatgaagtaaatgatggtgctgttttagctgaaaaatag

SEQ ID NO: 265615 - DNA, 445 bp, Glycine max
cagacgacaggttcaaaccggagcaaacattcttgttacgatggattcttccgacaagggggcactagaggaagtccttgaagcatggtacatggatgatagtgatgaacatcaaagacttccccaccacaaagaaccctacgagtttgtgtcgtagaaccaacttgctgaacttggagtccttagctggaaattatatgctgataaccatgaacatgatccacagctgaaaaagattcgtgaagagcgtgactacacctacatggatgtttgtgaggtctgcccagaagagttgccaaagtatgagcagaaaatgaaagacttctttgaagaacatcttgacactgatgaggagatccgcttatgtgctgctggaagtgggtatcttgatgctagggattgcaatgatgcttgtattcgagcgttggacaagaaatgatgaatg

SEQ ID NO: 265616 - DNA, 426 bp, Glycine max
cagaggactgcgcccactcgtacggcgctttattatccatttctacaatttggcaaatcgagcagttgagaggggagctggttcatatggtcagaagatatcttacacccttatcaagcatcgtatgggagatctgttctaccgattagtgtctcagaaatttgaggatccagcagaaggggaagctgctttggttgctaaatttcagaagttacacgaggacctgactaatggtttccgcaaccttgaggacgaaacccgatgattgaagatttggtatggtagtttgctcaaataatgtgttatttccaattgtaagaggcagtctagcatcgcagggttacaccgtcccgagtgttcttatatttgactgtttgattcattcatatcacatttatttccttttttgttgctggtttggctttt

SEQ ID NO: 265617 - DNA, 432 bp, Glycine max
aaaccctaaatctctctcgtcttcttcttcttcttcctccttcaaccatgagagagatccggcacgttcagggaggccaatgcggtaaccaaatcggttccaagttctgggaggtgatatgcgacgagcacggcatcgatcctaccggaaagtacaacgacgaaggcaacagcggcatccaactcgagaggatcaatgtctattacaatgaggcctctggcggaaggtacgttccgagagccgtgcttatggatctcgaacctggaaccatggacagcatcagatctggcccctacggcaagatcttccgccctgacaacttcgtcttcggccagtccggcgccggtaacaattgggccaaaggtcattacaccgaaggcgccgagctgatcgactccgttctcgatgtcgttcgcaaagaggctgaaaact

SEQ ID NO: 265618 - DNA, 455 bp, Glycine max
cccacgcgtccgcccacgcgtccggcgcaacattatccatttctacaatttggcaaatcaggcagtagagaggggagctggttcagatggtcagaagatatcttacacccttatcaagcatcgtatgggagatctgttctaccgattagtgtctcagaaatttgaggatccagcagaaggggaagctgctttggttgctaaatttcagaagttacacgaggacctgactaatggtttccgcaaccttgaggacgaaacccgatgattgaagatttggtatggtagtttgctcaaataatgtgttatttccaattgtaagaggcagtctagcatcgcagggttacaccgtcccgagtgttcttatatttgactgtttgattcattcatatcacatttatttcctttcttggtgctggtttggcttttgatctagtctcatgtgtagctataatcat

SEQ ID NO: 265619 - DNA, 427 bp, Glycine max
cccacgcgtccgggggggcaaaaggggtcacttttcagatccgagattgagctcctggacccatcatcatcatggagctcctcgggtacctgaatcagggtcacccttctagaggaacaacacttgttattactctttcattggtgctttcgacacttgtgtccttctccactttcacacatgccttctcttcttctgcgtttccggaactgaatcctataaaacctaggcactcacgtcttctcaggagtgccgtgcaacatgaaactcctacatcacagctttctgaaatatggtcacctctggaaagccaaggatggaaaccttatgttgaatcaaataagccaacattaccagagaagtccgagggatatatccaggtctttcttgatggaggtttgaaccaacaaaggatggggatatgtga

SEQ ID NO: 265620 - DNA, 352 bp, Glycine max
gaaagtgtctgagagtgtgtgtgacttatggagtccaattcagagttcgacgtgatgatcatcggagctggcgtcatgggcagctccaccgcctaccacgccaccaaacgcggccttaaaacccttctcctggaacagttcgacttcctccaccactgtggctcctcccacggcgaatcccgcaccatccgcctcacctatccccaccactactactaccctttagtcatggactcttaccgcctctggcaagaggcgcaggcccaagtcggctaccagatctacttcaaggcccatcacatggacatggcccatcacaacgagcccgccatgcgcgccctcatcgactact

SEQ ID NO: 265621 - DNA, 316 bp, Glycine max
gctgatatcacctgggccaggagaacctcaagattcaggcatatctttgcaaacggtgttggaacttggaccaactgtgccattgtttggtgtgtgcatgggtttgcaatgcattggagaggcttttggagggaagattgttcgttctcctcatggtgttatgcatggaaaaagctctatggtttactatgatgagaaaggagaagatggattacttgctggactatcaaatcctttcttggctggtagatatcacagccttgtaattgaaaaagaagctttcctcatgatgaacttgaggcaacagcattgacag

SEQ ID NO: 265622 - DNA, 382 bp, Glycine max
ctgacaaactacaacaattttcattttgttcttgttctttgaattattccgtcgttgtctgctacagcgtgcgtgaaccggcgaatatttagttcgaattgttcgattgcgatggctaggaagatgcttatcgacggtgaagctgaaattgctcaaggtggtggagaagaagtgtcgaattttgatttcgacttgtttattattggggctggaagtggtggcgttcgtgccgctagattttcgtcgaattttggagctaaggtggggatttgtgagcttccatttcatccaattagctcagaaacaattggaggagtcggtggaacgtgtgttattcgtggttgtgttcccaaaaagattttggtctatggagcatcttttg

SEQ ID NO: 265623 - DNA, 419 bp, Glycine max
cccgaacatcaatagcaatggtagcatttgtcttgatatcctgaaggagcagtggagccctgcactcaccatctctaaggtactgctttctatctgctcattgctgactgatccaaatcctgatgatccacttgttccggaaatcgctcacatgtacaaaactgaccgggccaagtatgaggccactgcacgcagctggacccagaagtatgccatgggctgatttgtgtttggataatgtatattgaaatggattgcatctatgaaaacttttgtgggtttgcttttcacttcctgttttctgggtaagattatgtttctgttatgaggggctagggaagggaggtgtcttaatttgataaaaaaaataactgtgttcaacaacccttccaaaacctttttgggggggtgatgttttt

SEQ ID NO: 265624 - DNA, 421 bp, Glycine max
cccacgcgtccggaaaacctaatttctcaaatttgatttcgcaccaaattttcctcactaaaatgtctggtcgtggaaagggtggcaagggtttgggaaagggaggtgccaagaggcacaggaaggttctgcgcgataacattcaaggaatcacgaaacctgcgattcgtaggttagcgagaagaggtggcgtgaaaaggatcagtggtttgatctacgaggaaaccagaggagttctgaagatattcttggagaacgtgattcgtgatgctgtgacctacactgagcacgctaggaggaagacagtgactgctatggacgtggtttatgctcttaagaggcagggaaggaccctctacggttttggaggctgaacaattctttttttttttgggggggcccccttttttttgtgctccta

SEQ ID NO: 265625 - DNA, 268 bp, Glycine max
taaaaaaaaaaaaaaaaaaaaaaaaaaaaaaaaaaaaaaaaaaaaaaaaaaaaaaaaaaaaaaaagaaaatttaaaaaaaaaataaaaaaaaaaaaaattaattattttatttttctatttttacattcttttttattctatttttttattttatattttttttttttaaattctatttaattctctttatttttctcaacttttttaactttaaaatttctttaaattttttaattttttttcttcttttttttctttatttccttt

SEQ ID NO: 265626 - DNA, 420 bp, Glycine max
agcacaaaggatcctggccagaacccattcactttcaaaatcggccaaggttctgggatcaaaggatgggatgaaggtgtgcttggcatgcaaattggtgaagttgctcgtctccggtgctctccggattatgcttatggtgctggtggctttcctgcttggggaatacggcccaactctgtcttggaatttgaaatcgaagtcttaagtgcgcaatgaaaaccttggtagtctgtctctgtcctaaagaataaaattcttccattttcatggacttgtacaatggtatccccacattgtgacttgtgggtgatatctacagtggttgagttgtccaagtgaaatactaaataactttctgaatgatctcaaactctctaatattttaaaattttaaattttttttttggggggtagcct

SEQ ID NO: 265627 - DNA, 422 bp, Glycine max
tctgactctcactctttcgcaccatcattctatctgctttattacactacctatattggaaaagtgtacttaagaacccgcgacataacatagctgaatatgtagaactacgcatctatagaccaaatcattgtatgacactaacatgaaaaaatacctgattccattgatggatatatttttcttgatctattatacaaacccattgtgctatcttgtggtcacaatgttctgatactggtgtgtctataattcaatgaattgtctgctgtagtctcaatgtccattatgtataaatcaatactatcactttccaacaatttgctcaattgcttcactttttgcttcttaagatctataccgttgcttacaaatataaagtaaagccatttaaaaccctttttttctttttttttttgaaa

SEQ ID NO: 265628 - DNA, 380 bp, Glycine max
cccacgcgtccgagaaaatacacattacattactaagtctttgttcatttgagtaggggtgatggctagcctcaaggttgcatgtgtggttgctgtgatgtgcatggttgtggtggccatgagtgctgcacccatggcacaggccgcaatcacgtgcgggcaggtcgccggcgacatgtctccgtgcttcagttatcttcgaagcggcggaaaaccgtcgcaggcctgctgcaacggagtgaagtccctcagcagcgcggcgaataccaccgcggaccgtcagggggcgtgcagttgcctgaaaaaccttgccaataatatgggacagagtttgaatgccggcaactcattctttctccctggcaaatgtggcgtcaaca

SEQ ID NO: 265629 - DNA, 390 bp, Glycine max
ggattcccgctcgaccaggcgtccgtccacgcgtccgaattctctcttattttctttgttattacctctttccaaagtccaggttttggagttccaccaaaccgaaccaaaccaaaatggcagcagcctcagcctcatccatgatatcaacaccagccttatctccaaccattcaaaagcaccatcatttgaagccattcaacgtgtgcttccaaggtcttagacccctcgcaaggtttcaccaaagccttatcaaccaaagtgagcaccaccaccaaaagggttattccaaagggtggtgttagagctgaacttaactcaacccttgtgataagcctcagcacttgcctctacctctttttgggaaggtttgtgttcttcaactttcaa

SEQ ID NO: 265630 - DNA, 415 bp, Glycine max
gctttcctttgtaagttgtaagcatttggcaccagcaagccctgtcttcttcttcgatcagagtagggcatttcatttctgcgatggccgcagcacccgctagagctcgtgccgattacgattacctcatcaagcttcttcttatcggcgacagcggtgtctggaagagttgtctgcttttgagattttctgatggctcattcacaaccagttttatcaccaccattggtatcgattttaagataagaaccattgaactagacggcaaacggattaagttacaaatctgggatactgctggtcatgaacggtttcgaactattaccacagcttattaccgtggagccatgggtatcttgctggtttatgatgttactgatgaaagttcctaaattttttcccttttttttttttc

SEQ ID NO: 265631 - DNA, 380 bp, Glycine max
gagataactagaaacagtgttatgaaaatgaaggtccttgttttcttcgtggctacggttttggtagcatggcaatgccatgcgtacgatatgttccctctccgaatgaacactggctatggtgcccgtactccggaggtgaaatgcgcaagttggaggcttgctgtggaagcacacaacatctttggctttgagaccattcctgaagagtgcgttgaagcaacaaaggaatacatccatggcgaacaatatagatcagactccaaaacagttaaccaacaagcttacttttatgccagagacctcgaagtccatcccaaggacacatttgtgttcagtatagatggcaccgtactctctaatattccatactacaaaaa

SEQ ID NO: 265632 - DNA, 390 bp, Glycine max
cccacgcgtccggcgtcgctccgcaccagtttcaccgcacgaatatcttgttgtttggagcgatccgagaaaaactctgtaaacatgttggtttaccaggacctccttacaggtgatgagcttctctctgactccttccgttacaaggaaattgagaatggaatgctgtgggaagttgaggggaagtgggttgttaaaggagcagttgatgtagacattggtgcaaacccttctgctgagggtggaggagaagatgagggagttgatgatgcagctgttaaggttgttgacattgttgacacattcagacttcaggagcaacccgcattcgataagaagcagtttgttaccttcatgaagaggtttatcaagaattttgactcccaaaaa

SEQ ID NO: 265633 - DNA, 407 bp, Glycine max
gccatcagcctaacttaattagcaaattcaaatttggcactttcttcttcatcatcttcaaggtccatatttgctttagctttgttcactcttttgcttataggaagttcttcagctcaactctctgagaacttctatgatagtaaatgtcccaaggttttctatgccgtaaaatccgttcttcaatctgctttggctaaagaacctctccagggagcatctatcgttcgcctcttctttcatgactgctttgtcaatcttggagggccatattggaaggttaaacttggtataagggattccacgactggatttttcaaccttgctagcaatggtatgctcccaggacctggttctttcctcagcgaccttatcaaaagatttgaattttggtaaaattttcccct

SEQ ID NO: 265634 - DNA, 380 bp, Glycine max
actcatatccttatcctgtttctttcaatggaagtcatttctgcttctagcttgaatcccaacgctccgatgttcgtgccactcgcctatcggacggtggaggatttctccgaccagtggtgggacctcgttcactcctacccctggttccgcgactactggctccgcgagtgcttccaagatccccagttccaaaacgacgacgctttcgacttcgactttgacctagatctccaagatgaagatgaaagggaacgaaaggaagggaaggaggtggtgtcgttggggctgctgaaatggcgaagctgtggaagaggatgggcccaggcgccgaggtatgtggaaaaggcccccaagtttgtgaagcccaaggtgagccc

SEQ ID NO: 265635 - DNA, 416 bp, Glycine max
  unsure (1)..(416): unsure at all n locations
cccacgcgtccggtttttttttttttcttgctctttctctgtgtcgatggcggcaaaaggagggaaggggcttgtggccggaaaaaccacggcagcgaacaaggacaaagacaaggataagaaaaggcctgtctctcgttcatcccgtgctgggatccagtttcctgtgggtcgtatccataggcagttgaagcaaagggtgcaagcaaatggacgtgtgggggcgactgctgctgtgtacttggcctccattctggaatatctgactgctgaggtgctggagctggcggggaatgctagcaaagatctgaaggtgaagaggatcacaccaaggcacttgcaactcgctatcaggggagacgaagagcttgacaccctcatcaaaaaaaaaaagngggggggggggaaaccattgc

SEQ ID NO: 265636 - DNA, 382 bp, Glycine max
ggcttccatctctcaaaagctcaaccacttgccatggcagcagcagcgtcaatgtgtatgagcttcaacctggcaacagcattcaagggtctctctttttcttcttcctcatcgttcttcgctggaagtggtagttattctctccgcgcgggtcccacctcggtggtgtcgctgccccggcgctgcccgctgaccatagagaacgcccacaagaagggggcgggcagcaccaagaacggccgcgactcgcagggcaagcgtctcggagtcaagatatacggcgaccaggtcgccaagcccggctccatcatcgtccgccagcgcggaaccaagtttcatgcaggaaagaatgtggggcttggcaaagattataccattttct

SEQ ID NO: 265637 - DNA, 415 bp, Glycine max
cccacgcgtccgcccacgcgtgcgcccacgcgttcggccacgcgtacgggcggccgggcggattgaatgcatctacggcaacaactacactttctcaaactacttcgacgccctcaaatccctcatgcacctcactcaactccaactcaacaacctctccgtcgctaaagacggtggcaaagcctctgagcttctcgcgggcctggcctgcgaccgattccacacttgcgccattctcctcataggctccgacgaaggcctaattggctacggaacccaatggctcgatgttagccaaagaattcaacctctaccatactggcagatgtgtgagtttctgagcatgggagggaacagcacgacgtggatgaacactgacgttttgggggggtttttaaaaaaaaccccccatcca

SEQ ID NO: 265638 - DNA, 307 bp, Glycine max
aggcagaatcagagactggcagctatgactggtgtgagcctttcatgcccatagggttggcgtcaaggtataactcgtgaccgcaaaacgcgcatgctgtaaagttctcacttccacccaggcaagcagtgcgaccgggtagtatcaagttgggtcgcgtgatgaggatccgacccgttcgcgctgagcctgatcgcatatcgtagaaggtggaggacagcataaataacgcgcatgaggcgtgcgccggcgatccgacgagctgctagtgcgtagcggcttgggacgaggtggaggagctgagcgc

SEQ ID NO: 265639 - DNA, 425 bp, Glycine max
ggttttctgattaactctttcttctcataactctgccgccgcaacagccccaaatccaatggcttcagagaagaaactttcgaacccaatgagggagataaaggtgcagaagctcgtcctcaatatctccgttggcgagagtggagatcgtcttaccagagccgctaaggtgttggaacagcttagtggccaagcccctgtgttttccaaagcaaggtacacggttcgttcctttgggattagaagaaatgagaagattgcatgctatgtcactgtcagaggtgacaaggcaatgcaacttttggagagtggtttgaaggtgaaggaatatgaacttctcagaaggaacttcagtgatactgggtgctttggctttggcattcaggagcatatcgatttgggaatcaagtatgatcctttcactg

SEQ ID NO: 265640 - DNA, 427 bp, Glycine max
cccacgcgtccgggaactagaaaatccatacaatcttcaccaccaaaaagaaaataatggcaatggccagtgcaacaactctagccacaatcactgttgtggcggctagccccagtgttggcagcagaaggagtgggaagaggaatgtgaacttcatcagagggttgaattcttttggagggttgaaggctcagaacaatgtgacattactaggccttcctgtgtgcactgagcagtgctttgcaaaggtggtgagctcattgaaatatccatcatcatcatcacgtaaggggagaggtggaagtgctgccttttcaacatgcaatgctgctggtgagattttccagattgcagccatcatgaatggccttgtgcttgttggggtggcaatagggtttgtccttcttcgagtcgaagcgtttgtgga

SEQ ID NO: 265641 - DNA, 423 bp, Glycine max
cccacgcgtccgatctttatataataatataaataagaataaaaaaataaaaaaaaagaaaagaatctatataaatataaaaataatatatataaggtacaaatagtaaatcgaggtacccattttatgataaactttccttccatttttgttcctctagtaggcctagtatttccggcaattgcaatggcttctttatttctttatgttcaaaaaaacaagattttttagatacagaaaacaaagtaaaattctggggttttttattccccaattataatactaaattcaaaaaaaggagagtaatgagtataatctttcgctcagacgatgtactgatatattctatggcggaggttcgaagaacaagcaatttattttgggccgttttcactttgttaggttcattgaggttattgatcg

SEQ ID NO: 265642 - DNA, 420 bp, Glycine max
cccacgcgtccggtcccaaagagctaacaagagattcaagaccggcatggcgtaatgaagaggaacagaaaaaccacctcttcggcatcaaagatctcggtcacaagactctccttcagagtgatgcactctatcagtatatacttgaaaccagtgtctatccaagagagcacgagtgcttgaaagagatacgcaagatgactgcaaaacacccactgaacatcatggcaacaccagcagacgaaggacaacttctgagcatgcttgttaagctcacgaattcaaagaacgccttggaaattggtgtattcactggttactctctgctctccactgccctggctcttccccctgatggaaagatcttggctttggatgtgaatcgcgaatactatgagttaggattgccaataattcaaa

SEQ ID NO: 265643 - DNA, 383 bp, Glycine max
cccacgcgtccggaaatataactaatattctttagaataatcaaaaagaatattaaaggcaaatggattttagatagaaaaaagacttaaaaaggaggatttgaaatgcgagatctaaaaacatatctttccgtggcaccagtagtaagtactctatggttcggggctttggcgggtctcttgatagagatcaatcgtttttttccagatgcattgatattcccttttttttcattctagttattgacacggaaaggggtgaagaatattatagatccaattaagtattaaatatatgtaattaatatgtaattaatctcctcttctttatttcgtcttttatttcttcttttttttacaattgtaatagaataagttaggaa

SEQ ID NO: 265644 - DNA, 413 bp, Glycine max
cccacgcgtccggtcccaaagagctaacaagagattcaagaccggcatggggaatgaggaggaacagaacaaccacgtcttcggcatcaaagatctgggtcacaagactctccttcagagtgatgctctctatcagtatagacttgaaaccagtgtctatccaagagagcacgaatgcttgaaagagatacgcttgatgactgcaaaacacccactgaacatcatggcaacaccatcagacgaaggacaacttctgagcatgcttgttaagctcacgaattcaaagaacgccttggaaataggtggattcactggttactctctgctatccactggcctggctcttcccgctgatggaaagatcttggctttggatgtgaatcgcgaatactaagagttacgaatgccaataa

SEQ ID NO: 265645 - DNA, 407 bp, Glycine max
gccacgcgtccgcctcatcttcctctttttctcaacaaaaaggggttcaagtctagctaggtctattacgtcgtccgcgaccatgaacatggcgatcgcgcttctgttcatggttttcgcagtttcatcagctttagacatgtcaataatatcacacgacaacgctcatgcggatagggccactatgcgcaccgacgaggaggtgatgtcaatgatcgaggagtggctggtgaaacacgacaaggtgtacaacgcgctcggtgagaaggacaagaggtttcaaatcttcaagcgcaatctgtgcattatcgatgaacgaaactctattagccgaacctacaagttgggacttaacgtgttcgctgatcttaccaatgctgggtacagagcccttttcctgctaacct

SEQ ID NO: 265646 - DNA, 419 bp, Glycine max
ggcgaagcgaaacgctgtcgttgcgccaatcgcggcgttgttgttggtggtgctactggcggcgagtgtggtggtggaggctcaggagaactcggacgtgaagacgctggtgaagcacatgcacgggaagaagtactgcgacaaaggatgggaatgtaagggctggtcaatttactgttgtaacctcactattactgattatttccagacctaccagttcgagaatctcttctccaagcggaactcgccggtggcgcacgccgtcggattttgggactaccactcgttcatcgccgctgccgcgcttttcgagccgcaagggttcggcaccaccgggaacaagacgatgcagatgatggaaattgcggcgttcctcggacacgtcggcagcaagacctcttgtggttatggagtggcta

SEQ ID NO: 265647 - DNA, 325 bp, Glycine max
catccacgcgttcgtccacgcgtccgcttgaaatgaattatgtgccacagaagtttaagctttgggcggctgggacagaagggcttgctattgaggttgatacccgcccgagaattgatgctgcaatctggcactatgtgaaggctaagaaatcgctaatcccaaatgacccttcctactttcactgtgagcagcctcttctgaaagtatttggagaagaaaagatgaaatttacaatgggttcacagaaaatatcatgatatttgttcccctcacagcctatacttttggagcataagatcaaggctttgggaaacaatcctgc

SEQ ID NO: 265648 - DNA, 392 bp, Glycine max
ggaaagcgaagttctcaatgcccttatggctcagaacccaaatatatataacattggtgcacttcaatcgttaggaaggcattttcctgataaagacaagggcttcaaggtgagtgggtcaaatctttggaaaaatgactcacaatgtatccaatggctagaccaatgggaaccttcctcagtcatatatgtgaattatggaagtattactgtgatgtccgaggatcatttgaaagaatttgcttggggactagcaaatagcaatttaccatttttgtggataaaaaggccagatttggtaatgggtgagttcacacaattgccacaagactttttagatgaggttaaagatagaggatacatatcacgttggtgccaccaagagcaagtgc

SEQ ID NO: 265649 - DNA, 429 bp, Glycine max
gtctttcgaagcaggaactaaatatggctgacttgttggaatggtcaaagcaagataggaaacgaatgcttcatgtcgtctaccgtgttggtgaccttgatcgcaccatcaaattttacacagaatgtttaggaatgaagcttttgaggcaaagagatatcccagaggagaaatatgctaatgcctttcttggatttggccctgaagaatcccattttgttgttgaattaacatataattatggggttacctcgtatgacattggcgatggctttggacattttgcaattgcaactcaggacatttataaattggttgagcacatcagggccaagggtggaaacatcacaagggaacctggtccagttcaaggtggaactactgttatcgcctttgttaaggatcctgatggttatacttttggactta

SEQ ID NO: 265650 - DNA, 398 bp, Glycine max
acggacgcagagccttcgatccagaaaccatgactaagagaacgaataaggcaggcgttgtcggaaaatatggtacccgatatggtgctagtttgcggaagcagattaagaagatggaagttagtcagcatagcaaattcttttgtgaattttgtgggaagtatgctgtgaagaggaaggctgtgggaatatggggatgcaaggattgtggtaaagtgaaagctggcggtgcctacactttgaatactgcaagtgctgtcactgtgcgcaggaccatccggaggttgaaggaacaaaccgatggttgagcttttaggttgatgttagattttgagcaaattaactggagaaatgattcgtttttgtttaagaagctgtattgggtcaacttacaatgc

SEQ ID NO: 265651 - DNA, 425 bp, Glycine max
tgtcaccccgtcacaggcaaataataaaggaatatggtcaagcaattcatgacttgggatcaaatgtatcacaaaaaatggctgagtctttgggtataatggataatgatttcaaggactggccattcattttgaggactattaaatatagttttaccccagatgttataggctccacgggagcacaattgcactcagatacaggatttatcactctacttcaagatgatgaacatgttagtggtcttgagatgatggatgattttggctcatttaaggcagttcctcccataccaggggccttcctttgcattgttggagatgttggacatgtttggagcaatggaaaattttggaatgccagacatcgtgtaatatgcaaggaaacgggtactcgttattcatttggtgcatttatgttatca

SEQ ID NO: 265652 - DNA, 420 bp, Glycine max
tggattccttgcttggaattcgagttggagcacggtttcgtgtaccgtgagcacaacgggtcaccaggatactacgatggacgctactggaccatgtggaagctgcctatgtttggttgcactgatgcttctcaagtgttgaaggagcttcaagaggctaagactgcataccccaacggcttcatccgtatcatcggattcgacaacgttcgccaagtgcagtgcatcagcttcatcgcctacaagcccccaggcttctaagtgtgaaaaatttgcaaagcatttgtagccgccaccccactttgtttggttgtacttaaactacattcccatttgattttgctttttgagatttcatcatcctgtatttttggtttctgctttcggacttcaatggaaattaatggatgagaactaatg

SEQ ID NO: 265653 - DNA, 412 bp, Glycine max
attaactctactgggtagttcatgtatgatctctgtttcatgtacagtcataccagcggggtaaagggattatacataggccactagcttgcctttgaatagctgggtgtcatttatgacactagttcgattctgctgcaagctgccctttattgtactaaggaatatatattgaacaaattaatctacataatatgtatatatatcacgatcccaaagtgcagtgcatcagcttcatcgcctacaagcccccaagcttctaagtgtgaaatattttcaaagcatttgtagccgccaccccactttgtttgtttgtacttaaactacattcccatttgattttgctttttgagatttcatcatcctgtatttttggttactgttttcggacttcaatggaaattaatggatg

SEQ ID NO: 265654 - DNA, 226 bp, Glycine max
gtgtaaagaacattaactatattgaaagagattgtaatttaccaaaataaaaaaaaaagaaaaaagtaaaaaaaaaaaaaaaaaaaaaaaaaaaaaaaaataaaaaaaaaaaaaaaaaaaaataaaaaaaaaaaaaaaaaaaaaaaaaataaaaaaaaataaaaaaaaataaataatttaaaaataattaaaagataaaaaatggtcattcttttataagaattaa

SEQ ID NO: 265655 - DNA, 239 bp, Glycine max
aaaaaaaaaaaaaaaacaaaaaaaaaaaaaaaaaaaaaaaaaaaaaaaaaaaaatctgggggatccgtacttacaagcgcatacatacaacgccataaaatctaatatacagaatcctaaattctatatcactgaatatcattttacaacatcttcaactcggaaaactctgtccttacccaacttcatttcctcgctcaacatcctcctttttcaagctgccgtaatatctctcactt

SEQ ID NO: 265656 - DNA, 349 bp, Glycine max
caatcgtcttctgcttcaaggaaggagagcttgttattctctatcaacaaggaaaatgtcaggtgaagaggttgttgttgcagctgagccagctgctgccatcccaggcgagcctatggatatcatgactgccttgcaacttgtgctcagaaaatctctggcttatggtggtcttgcacgaggccttcacgaaggggcaaaagtgattgagaagcatgctgcacaactctgtgttctagcagaagactgtgaccagcctgactatgttaaactggttaaggccctttgtgcagagcacaatgttagcctgctgacagttccgagtgcaaagacccttggagaatgggct

SEQ ID NO: 265657 - DNA, 320 bp, Glycine max
  unsure (1)..(320): unsure at all n locations
accggnccggacgacccagcgcgaccgcacacgccgacgcactggaaagcctacagatgataagaaatcactcaaggaactcactggcaagctcttccaggatatcagcaatctggatcatgcagcananattaagagcagcccagaagcagagaagtactatgctgctactgtatcttctctgaacgatgtccttgccaaacttggttaatgtgattaatttcttgctttcttgtgtaagctttgtgcatcattttctcagacactttgttgactgatattttaagaaaatcaaatgatgagggaaaattttctataaa

SEQ ID NO: 265658 - DNA, 386 bp, Glycine max
cccacgcgtccgcccacgcgtccgtgtggttatggaagatttcaattctttgtctttcaaactcctcaagttgggtttatgtgatgatggctctcaacatctcttctccagctgaagtcaagtccatttttttcgctgattccttcaagtctaactgcctcacagcaaaattctcaggtgggtttgcttttaagagaaaagagcgtagagcagcatctggaggacgggtttattgctcagtgcaggcaacaccaccaccaccagcctggccgggacgagcggttccggaacaaggtcgcaagacttgggatggaccaaaacccatttcaattgtggggagtactggttcaattggaactcagacactagatattgtggcagagaat

SEQ ID NO: 265659 - DNA, 319 bp, Glycine max
gctttaacacacacacttctacctcttcaaatggctcaaaaggttgtgttaaaggttatgactatgactggtgacaaaacaaagcaaagggctatagaagcagctgcagatatctatggggttgattcaattgttgctgatgtaaaggagcagaagttgactgtgattggtcaaatggacacagtgaaaatagtgaagaagctgaagaaagtaggaaaagtggatatagtatcagttggacctgccaaggaagagaagaaggaagaaaagaaagaggagaaaaaggaagaaaaaaaaagaagagaaaaaggaggagaag

SEQ ID NO: 265660 - DNA, 304 bp, Glycine max
  unsure (1)..(304): unsure at all n locations
atttggcttcnctcttcggtcaggctgtcaccgtttaggttgctgaggttatttataatagggccactgaccgcagtcgtgggtttggatttgttaccatgagtacacttgaagagcttaagaaggctgtcgagatgttcagtggttacgaactaaatggaagagtgttgactgttaataatgctgctccaaaaagagcacagtctgaacgcccaccacgcccaccacgttcctttagttctggtttaagagtctatgtntgcaacttgccatgggaagttgacgatgctcggctggagcaaat

SEQ ID NO: 265661 - DNA, 468 bp, Glycine max
  unsure (1)..(468): unsure at all n locations
ccacgcgtccggtttgttgtgagctataagctagtttatcgtgaggagaatatgaagttgtttgttttctttgttgctgcagtagttttggtagcatggccatgccatggcgcaggctaccaaaggttccctctccgaatgaaaactggctatggtgagcgttcttcggaggtaaaatgcgcaagttttaggcttgctgtggaagcacacaacatccgagcctttaaaaccattcctgaagagtgcgttgaaccaacaaaggactacattaatggcgaacaatttagatcagactctaaaacagttaaccaacaagctttcttttatgctagtgaacgcgaagtccatcacaacgacatatttatattcggcatagataacaccgtactctctaatattccatactatgaaaaacatggatatggggtggagggaattnatgaaaccttatatgatgaatgggtaaca

SEQ ID NO: 265662 - DNA, 409 bp, Glycine max
cgcctatcgagagttgtttgggtctctttcgttcccccaatgagtcactgagtgcagtcctgtgtgattggctcatcttttgtcttttctcggctctgataaaaccgagaattcgcaaaactctttgctctggttcagttctgtcgtgttgcaagttgcaactgaaccaatcaacaactttcttgtattccaaattatcttcaccattacaatcctcaaagtcaaaaagtgaagaccttaacataaaacaaaacacaatggtaatgtgggtatttgggtatggttctttgatctcgaaagctgggtttcactatgacgaacgtattgttggtttcatcaaaggctatcgacgagtcttctaccaaggctctactgaccacagaggaacccctgagttccctggaagaac

SEQ ID NO: 265663 - DNA, 283 bp, Glycine max
  unsure (1)..(283): unsure at all n locations
cgtacgcccacacntacatatcaacggttcatatatgctatgcatacaagtctctccaccgggtgctagtaaaaattttgaaactcgttcctaccttccacaccttgataatccacaattggcaaaagaagtagaattccttcatatgaagggatggattccttgcttgtaattcaagtaacagcactgtttcatgtaccatgatcacaacaattcaccaccatactacgatggacgctactgcaccatgtggaacctgcctatgtttggttgcactgatgct

SEQ ID NO: 265664 - DNA, 444 bp, Glycine max
caattctctgtatttcagggttgaaaattcacacgttgaattgaaatttggaaatcgtgacggcaaccctacaccaccatggcctccgtagacaaattttgggcttttgccctcgctcttgtcctccttgccttccctctcctccaagttgctaggtgtcagtcagactccgaagatgtattggaggctgctgaagaatcaagtgatatcggcattgatggtgatgatgtccaagactatggtgatgggaccttcccttctgctccaggaattgaaacaataagtgtttctccaaaaaatagtgcgagattgataacagctggagaagagacagagctgcttgctggtgttaaaaatgatggggattcaagcttgaatgttatcgcgatcaaggctagtgttcaccttccttttgatcaccgtatgctggatcaaaatcttact

SEQ ID NO: 265665 - DNA, 428 bp, Glycine max
gactcatatcgttatccattgacgaatatggtgcagcgtctcacctaccgcaagagtgacaggtatgcctccaaatccaaccaacacagggtcgacaaaacccctggtgggaagctcgtttatcataccaccaagaatagggccagcggtcccaagtgccccgtcactggcaagaggattcaggggattccacacttgatgcctgcagagtacaagagatcaaggttacccacaaaccgtaggactgtcaaccgtgcatatggcggaattttgtctggaagtgctgtcaggtagaggattatccgagctatcttagttgaagagcaaaagattgtgaacaatgtcttgaagatccagaatgcaaaggaaaagcaagcctcaaaagcttgaatttgaacaacacaatgagacatctttttggaggactt

SEQ ID NO: 265666 - DNA, 381 bp, Glycine max
  unsure (1)..(381): unsure at all n locations
gtccggagaaaaaaaaagggaaaaagaaagaaaggccttgaaaattgttaagcctttcagttgcttcggcttcttgttaaaccatttcttttttcccaaagccattcaatggcattcagttccgtcgctctgccacatgctccattccacccacaaaatgcagcgcttcggtgccagtggtgatgatgtctaaaaggacggaggaattgaaggaaattagacaaatgaccaccgaacanattaacgaagaggttgtcgaccttaagggcgagcttgtcatgcttcgccttcagaaatcggctcgcaacgagttcaagtccagcgaattcggtcgcatgcgcaagaggattgctcgcatgcttactgtgaaagcggaaagag

SEQ ID NO: 265667 - DNA, 383 bp, Glycine max
cttccggacaaattcggcgaggccgtgtggttaagggccgttgcacaaatcgtctaaaagggaggccttgactacttggccaacccaaacctgatccatgctcaaagcatccttgctatctgggctgttcaggttgtgctcatggggtttgttgaaggttacagagttggtggaggaccacttggtgaaggacttgacccaatctaccctggtggtgcttttgaccctcttggtctggctgatgaccctgatgcattcgctgagttgaaggtcaaggaactcaagaacggtcgcttggctatgttctccatgtttggtttctttgttcaggctattgtcactggcaagggccctattcagaacctttacgaccacgttgctga

SEQ ID NO: 265668 - DNA, 228 bp, Glycine max
cgtacactaatcaatcatcccagatggtttatgggtttaaattgtcctattccggcagacttgttatgtttcattggatacaactcaaaccattatttgcaatgtaccaatgtgtgtttttgattttgataagtttgccacattaacagatgctatatccaataaactttcatagctgaatgtgaagtgagtgacaaccatcatctaatgagtcgactccattgcctc

SEQ ID NO: 265669 - DNA, 389 bp, Glycine max
  unsure (1)..(389): unsure at all n locations
aagcccttttgccagaatgtttcagatttccctgnaactgaacggaggcgaatacacgtactttgaagaagatcttangaacaagagtgatcttcttatcaaatacaaccctattcacaagaaggtacctgtgcttgtccacaatggaagaccattggctgagtcccttgtgatccttgaatacattgatgagacatgggagaaccaccaccccatcttgcctcaacaaccttatgatagagccttggctcgattctggtcaaggttcattgatgacaaatgcatgcctgcaatatcaaaggcagcatttactgcatacaatgaggaaacgtacatgggcactgatgaatcactcgagtctctttaaattcttgagaatgtactcaaac

SEQ ID NO: 265670 - DNA, 409 bp, Glycine max
  unsure (1)..(409): unsure at all n locations
tagaggatcactcttcttccatcctttcctctctctctctccctctgcatttccggagttatgttgattttttgcggatagggctggatttgtcaatgctcagagcagatattagaagatggcagacgctgaggatattcaaccccttgtttgcgacaatggaactggaatggtgaaggcaggatttgcaggagacgatgccccacgtgcagtgtttcctagcattgttggtcgtcctcgtcacactggtgtgatggttggtatgggccagaaagatgcatatgttggtgatgaggcacaatctaaacgtggtattctgactctcaagtatcccattgagcatggtattgttagcaactgngatgatattgaaaagatttggcattataccttctataatgagcttcgt

SEQ ID NO: 265671 - DNA, 470 bp, Glycine max
cgtcggcccacgcttccggttggtggttgaaactcgttcttcttctttggttgttctgtgttggtgttggtttttggtctcacctgaaaatgtcttgctgcggtggtaactgtggttgcggaagctcctgcaagtgcggcaacggctgcggaggctgcaagatgtacccagacttgagctacactgagtcaaccaccaccgagaccttggtcatgggagtggcacctgttaaggctcaatttgagggtgctgaaatgggtgtgcccgctgagaacgatggctgcaaatgtggaccaaactgctcctgcaacccctgcacttgcaagtgaggtgttgggagagcaagcttcaagcagagatagcccttaattaagaataatgataaactattaatgtgtagctaaaaacttatgtattatgtctgtgatggttttcgtgcactctggtgttttgtgttaaacaaacattct

SEQ ID NO: 265672 - DNA, 451 bp, Glycine max
ggccaccagttggcaagaagaagtttgagactctttcctacctgccagaccttggggatgcagaattggcaaaggaagtagaataccttcttaggaagggatggattccttgcttggaattcgagttggagcacggtttcgtgtaccgtgagcacaacaggtcaccaggatactacgatggacgctactggaccatgtggaagctgcctatgtttggttgcactgatgcttctcaggtgttgaaggagcttcaagaggctaagactgcataccccaacggcttcatccgtatcatcggattcgacaacgttcgccaagtgcagtgcatcagcttcatcgcctacaagcccccaggcttctaagtgtgaaaaatttgcaaagcatttgtagccgccaccccacttttgtttgttgtacttaaactacattcccattttgttttgctttttga

SEQ ID NO: 265673 - DNA, 423 bp, Glycine max
cccacgcgtccgcccacgcgtccgcccacgcgtccgcccacgcgtccgcccacgcgtccgcccacgcgtccggaagaagagaaaagagagagaagggtaaggtaaccctagagtggtgaatcgaatctgcaaagatggaagctgtttctcgaagaagaggtggaggcattttcgaaagcctctacaaggtcgttatgcgtcgcaactctgtctacgttaccttcgtcatcgctggcgccttcctcggagaacgggctgtagattatggagtccacaagctctgggaggctaataatgttgggaaacgatatgaagacattcctgtgctagggcaaaggcagtcagaatagtgaccagcttgttagccattttgaagttttattattttcatgaaaatttgaagtgattaagagctggaagcag

SEQ ID NO: 265674 - DNA, 440 bp, Glycine max
catacaaagcattgaattcaaaaactaagttcatttcttgcgctttgctttattcggcaaaagcaaacatgtcgaacacatgcggcaactgtgactgcgctgacaagactaactgcaccaagggaaacagctatggtgttatagtagagactgagaagagctacatcgagactgttgacatggatgttccagcagctgagcatgatgggaagtgcaagtgtggcactaactgcacttgcacggactgcacttgtggccattaaggaatatgtatgaaaatgtaattgccatgtgtttggcaatacaaatctccaaataatgtaatcttcgtatgaataaatgtgtgctgttatcctacttcaggctctgtgtagacatgcattctgaatcatgtacagttcctgtcatagatattaacagccaatgttgtggcattctat

SEQ ID NO: 265675 - DNA, 389 bp, Glycine max
  unsure (1)..(389): unsure at all n locations
tggaattaaaattcctgtttctacatttaatcattttnttccttccatggcggttcggttccctctcctattttagaaggcctttctttggaggattcattgtcgcatcttgtcaaatgggcatttaaagagaaagaagaataagaaaagtatcctcatttggtaaatattggcaaagaaattgtgaaaaaatgcagaggcattccatttccactgagaacgttatggagtttgctattttcaaaatttgatgcatatgagtggcaatatgtgagaaacaatgaattttgtaattttccaccgtcaaagatgacattttaccagcacttaaactaaactacaatctcttgcctatttgagacagcgtctttcttttgttgtccctcccc

SEQ ID NO: 265676 - DNA, 367 bp, Glycine max
  unsure (1)..(367): unsure at all n locations
aaatttatactatttttaaatgctcttggcatatgtggagttccgtggctttgttggtggcctggcttgggtcaccggcaccgatgccctcgagaaagccttttcaatctacggcgacatcgttgaatcgaaggttatcaacgaccgtgagactggaaggtccagaggattcggatttgtgaccttcgcctcagagcagtcaatgaaagatgcgatcgcaggaatgaacggncaggaccttgacggccgtaacatcactgtcaacgaagctcagacccgcgccagcccgtgtggtggtggaagccgtggtttncngaagtggtggtggatacaaccgcngtagcggtggatatggtgggtgtggtgg

SEQ ID NO: 265677 - DNA, 455 bp, Glycine max
aaatgttgatctcgtggtggaaatttctttgcaaccatggcatgtttttaagcccgatggagtgatggtattctcagacattcttaccccactttctggaatgaatataccctttgatattgtgaagggtaagggtcctgttatatttgatcctattcacacagctgcccaggttgatcaagtgagggagtttattcctgaagaatcagttccatatgttggtgaagcactgacaattttgaggaaagaggtggataataaagctgcagtccttggttttgttggggcaccattcaccctggcatcatatgtggttgaaggtggttcatcaaaaaacttctcaaaaataaagagattggctttctctgaatccaagatcctgcactcattactgcagaagtttacaacatcaaatgccagatacattcaataccaagctgacaatggaactcaag

SEQ ID NO: 265678 - DNA, 388 bp, Glycine max
aaggctgggggtaaaacctaaaagaccaaaaaaccagcaccaaaatccgatgactggtacctcaaattacttgtcaagctttatcggttccttgttcgaaggactggcagcaatttcaatgctgttatactcaagcgcttgttcatgagcaaggttaacaagcctccaatttctttgtcaaggttaattaagtatacaaaggggaaggaggataaaattgctgtaatagtggggactgtaactgatgatatcagagtatatgaagttccagcattgaaaattacagcactcaagtttactgagagagcacgtgcaagaataaaaaaggctggtggtgaatgcttgacatttgatgagcttgcccttagggctcctttgggacagaata

SEQ ID NO: 265679 - DNA, 404 bp, Glycine max
tttggccgccgtgagttgcatctgcgtgtgactgcaagaaatggctctggttctcaacgtcggattgtgtgccatttctaaaccccatctttctctctcaacctccaatcccaacaaagcttcttcaactcttcctcttcctattctgggacttaaaacaaagcaaagtctccaaccatctcagaaactcacattttcattgggtgaatcagtggctggtgccaccctcgttgctctcctctctgcttctttcatctttgttgatcccgcacttgcattcaagggtggagggccatacgggcaggaagtgacaaggggacaagatctcactgggaaggactttagtggcaagactctgatcaaacaagacttcaaaacgtccatactgagacaagccaatttta

SEQ ID NO: 265680 - DNA, 398 bp, Glycine max
gggtttgatcactcggacattaatcttagttgatttgttccatgaatgttttggggttacattttgtccggcggtaggcatgaaatttcgtccttataaacccgatccaggtccactactgcatatttgttctctttgggaagttcaaccaaatgaagttataatgattggagatagccttaaagatgatgtgccttgtggaaggcaagcaggagcctttacatgcttgcttgatcaaacaggagtatatgattctcccgaatatgctgatgttgaatataaaccaaatttaaaggtgacttcccttgatgaaagtcactcatttctgaaggaaaattttgatttgtcaccatgatgtcaaggattgttaacgtgaaccattatttttgtggtttatg

SEQ ID NO: 265681 - DNA, 428 bp, Glycine max
cgtccggaaacagtgtaatgaaaatgaaggtccttgttttcttcgttgctacaattttggtagcatggcaatgcgatgcgtacgatatgttccctctccgaatgaacactggctatggtgcccgtactccggaggtgaaatgcgcaagttggaaggcttgctgtggaagcacacaacatctttggctttgagaccattcctgaagagtgcgttgaagcaacaaaggaatacatccatggcgaacaatatagatcagactccaaaacagttaaccaacaagcttacttttatgccagagacctcgaagtccatcccaaggacacatttgtgttcagtatagatggcaccgtactctctaatattccatactacaaaaaacatggatatggggtggagaaaattaactcgaccttgtatgatgaatgggt

SEQ ID NO: 265682 - DNA, 187 bp, Glycine max
  unsure (1)..(187): unsure at all n locations
gggtcggcccgcgcgtacatttaaggaaaccctctaccanatcttanctgttttcaatccctttaataatatggggaatgagcctattttgcttcctggcatcaacattaacaagttcacattctatcttgctggaactaatgtagaaaccaccactcatggtctatatttccttgatcagatttat

SEQ ID NO: 265683 - DNA, 461 bp, Glycine max
aaattaagagcatggctgcacaagctcttgtatcatcatcttctcttaccttctgagcggaggctgcaagacaaagtcttggaccaagatcactccaatctccatttggcttctccagaaaagcctcctttcttgttaaggcagctgctaccccccctgtcaagcaaggatcagacaggcctttgtggtttgcatcaaagcaaagtctttcttacttggatggcagccttccgggtgactatggatttgaccctctgggactttcagaccctgaaggaacaggagggttcattgagccgaaatggctagcatatggtgagataatcaatggtcgttatgcaatgttgggtgcagttggtgcaatagcacctgaaattctaggcaaggctggtctgatccctcaggagacagcactcccatggttcagaacgggtgtgttcccaccttgaggaacctacaac

SEQ ID NO: 265684 - DNA, 356 bp, Glycine max
tccaatttaagctttctttggatattgtaatggaagcaggttaaaaatcaatgcgagtttcggaggcttggaaggctcatgtggccatggctctggtgcagctattctatggtggctaccatgtcctaaccaaagtggcacttaatgttgggatcaaccaactagttttctgcttttaccgcgatttccttgccttcactattgttgctccgctcgctttttttcttgaaagacggactagaccacccattaccaagaagctactgatgtcattcttctttcttggattgactgggatatttggcaaccagctttttgtttcttattggtttaagttatactaatccaacttatgc

SEQ ID NO: 265685 - DNA, 441 bp, Glycine max
  unsure (1)..(441): unsure at all n locations
cccacgcgtccgggccatataattttttttaatttgaaataatgtccgggatcatccacatggttgaggggaccctccatgtgggagggcacaagaaagaggagcacaaaggagaacaccatggtgagcacaaaggtgaacacaaaggagaacaccatggtgagcacaaaggtgaacacaaaggagaacaacaccatggggagcacaaggagggacttgtggataagatcaaggacaagatccatggtgatggccatgacaagggtgagaaaaagaagaagaaagacaagaagatgaaggagcatggacatgaccatcatggtcatagcagcagcagtgacagtgattaaatcttatatgttaagcangtgtacggtacgatggtagtgaggagccaaaatccctcttcctgctttatgatatattaaaattaaattgcga

SEQ ID NO: 265686 - DNA, 219 bp, Glycine max
cattccaatctttttcaacttttgaatcaatttacaactttcgttgactggtactatttttttctctcaaaatgatcccaacaatgtaagaagatactgcatgtaagaatgatgaataggagttcaacacctgaccactatctgtactcatgatgagtgttaaaaataatactcaggtactgataaattgtcagaacaacaaaaagcttctgggtcgag

SEQ ID NO: 265687 - DNA, 289 bp, Glycine max
tctctactactttttcaacctatgcctgatccacgcccatagcgtcctttgcatctttgccacacaagttattctaatgtgtgccattgaatgttaccgtattgctggttgccccctcggtgaggtcactgacccaatctacccatgtggcagcttcgacccattgggccttgcttatgacccatatgcttttgctgagcttaatgtgaaggaactcataaactgactattggccatgtactctatgttttgcttctttgatcaagccattttcacccgaaagggttca

SEQ ID NO: 265688 - DNA, 424 bp, Glycine max
  unsure (1)..(424): unsure at all n locations
aaactcaagcatngcatctttctngatttgtagtttgttttgtgctttcgataaattttctgccaaggcaagaggggttttaagatcatagtgtgtgttttgcaacaatggctaagttctttgctgctatgatcttggcactcaatgccacttacattctctgtaccacagaattaaacgatctcaaatccattttccctcgtgttaaggatggagacgttccttatatatgcttagatcttgtatacgaatatacattgctcgttgatggatttggcatagatccgcagcaagagattacgttggtgaggcaagttgagtatcaagattctctcgtggaagcagcatggccactaggcagtgccatagaagccatatcatcattacctaaatttgagaaattaatgtatttcatttaagcttt

SEQ ID NO: 265689 - DNA, 407 bp, Glycine max
cccacgcgtccggattatcctaagtctttgtgaatagtgctgcaatggcttcaagtcagcgcgaggtgacccttttgggagctactggaagcccatttgtgtgcagggttcatattgccctcaagttgaagggagttcaatacaaatatgtcgaagaaaatttgaggaacaagagtgaactgcttctcaaatccaacccagttcacaagaaggttccagtgtttattcacaatgagaagcccatagcagagtctcttgtgattgttgaatacattgatgagacatggaagaacaaccccatcttgccttctgatccttaccaaagagccttggctcgtttctggtccaaattcattgatgataaggtttttggtgctgcatggaaatccggattcacagctgatgag

SEQ ID NO: 265690 - DNA, 332 bp, Glycine max
cccacgcgtccgaaaaaaaaaaaaaaaaaattaaaaaaaaaaaaaaaaaaaaaaaaaaaacgcaaaatttaaaaaaaaagaaagaaaaaaaaaaaaaaaaaaaaaaaattaaaaaaaaaaaaaaaaaaaaaaaaaaaaaaaaaaaaaaaaaaaaacggggcccccttttaaaaaatccaaatttaatttccttgtattacaaactaataattttttttaagggtaacctaaaataaatttactccccccgtttttaaaaacagtggcccagaaaaaatcttggtttacacaaattaatttcctttgaaaaaaatccctttttcccaatttgt

SEQ ID NO: 265691 - DNA, 349 bp, Glycine max
aaaacaaaaaaaaaaaaaaaaaaaaaaaaaataaaaaaaaaaaaaaaaaaaaaaaaaaaaccgccgaattcaaaaacacgggaagcaaaaaaaaaaaaaaaaaaaaaaaaaaacaaaaaaaaaaaacatacacccgccccccccccttaatggatcatcccttacaaccccttcccaacaactattttcttctatattgccaccccccaatcttaaaaccccccccgaagtctcacacctataccccttaaaaccccttcccgaaccacacaaaaaaacctgagcacctctacccttatccccaatctcttcaattcccgagagaccccctcacaaaaacctttcccta

SEQ ID NO: 265692 - DNA, 218 bp, Glycine max
gtttgttgatcgagataactagaaacagtgtgatgaaaatgaaggtccttgttttcttccgggctacaattttggtagcatggcaatgccatgcgtacgatatgttccctctccgaatgaacactggctatggtgcccgtactccggaggtgaaatgcgcaagttggaggcttgctttttaagcacacatcaatctttgtcttttagaccattccctt

SEQ ID NO: 265693 - DNA, 430 bp, Glycine max
caaggattgcactttcggagggatatggaatggtggtgggggagctggagaaaacaacttgtttattgcctcatttttctttgaagttgccgatgaggctggttttgttgatccaaacgcccccaatgccaaagttcgtcctgtggattttgagaatgcagcaaaggttgcctgtaacacagaattaaaggatctcaaatccattttccctcgtgttaaggatggagacgttccttatatatgcttagatcttgtatacgaatatacattgctcgttgatggatttggcatagatccgcagcaagagattacgttggtgaggcaagttgagtatcaagattctctcgtggaagcagcatggccactaggcagtgccatagaagccatatcatcattacctaaatttgagaaattaatgtatttcatttaa

SEQ ID NO: 265694 - DNA, 435 bp, Glycine max
caaccaatgccattggcaccccaagccttttttttaaccccacccctctccggtctcaaagccagcgaccgcgcctccgtgccatggaagcaaaactccagcctctccttctccagcccgaagcccctcaagttctccagaacaatcagagcagcagccgccgacgagaccacagaggcaccagcaaaagtagaggctgcaccggtcgggttcaccccaccagaacttgacccaaacaccccttccccgatcttcgggggcagcaccggcgggctcctgcgcaaggcacaggtggaggagttttatgtcattacgtgggactcacccaaagaacagatctttgaaatgcccactggcggcgccgctatcatgagggagggtcctaaccttctcaaagtggccaggaaagagcagtgcttggctcttgggactagg

SEQ ID NO: 265695 - DNA, 340 bp, Glycine max
aaaaaaaaaaaaaaaaaaaaaaaaaaaaaaattttaaaaaaaaaaaaaaaaaaaaaaaaaaaccgcaaattttaaacaaaacaaaacaaaaaaaacaaccctccccccttaacatttccatccttactctccctctcttcctacataacaattattttattatccccccacaattccattcattcaccacctttttacaactctccacctgtcaaaacccttccatcccccaatttaataacttttcatcacatccctttttccccaactccccaattctccaaaaccccccacccattcacccttccaaacacatccccaattataaacccaaataaca

SEQ ID NO: 265696 - DNA, 396 bp, Glycine max
  unsure (1)..(396): unsure at all n locations
ggaacacaggagcacacagtgttggtcgaacccattgtgtgaagttggtgcaccgtttgtgcccanagattgatccagctctgaaccctgaccacgtccctcacattctgaagaagtgccctgatgccattccagaccctaaggcggtgcagtacgtgagaaacgaccgtggcactcccatgattctagacaacaactactacagaaacatattagacagcaagggtctcttgatagtggatcaccaactagccaatgacaagaggaccaagccttatgtgaagaaaatggccaagagccaagactatttcttcaaggagttctctagagccattaccttgctctcagagaacaaccctctcactggcacaaaaggtgaggtcagaaagcaatgca

SEQ ID NO: 265697 - DNA, 462 bp, Glycine max
  unsure (1)..(462): unsure at all n locations
accgcaacaattaacatacatttagtgagagaatttatcatcaaccaaccatgtctgatattcccgtntttgttgccgaagagtatgatataaggacaaatcattatatgaagggtggttctttctcttttttttttttttatttctatttcatttttctttcttattatctttttttgtttttctcatttcttttttttttcttttttactttttttttctttttttatctcttttttctattttcttttttttttttttttatttttttttttttttatcttttatttttttttttttttttttttttatttttttttcttgtttgttggtttctctttattttttttattttcnattctatttttctttattatttttatcctttatctttatttctttcttttttttttgtttttatcttttattatttttttttcttttttcttttattttattttt

SEQ ID NO: 265698 - DNA, 428 bp, Glycine max
cccaaacctagcaaccattgagttttgtttgctttgaaacatcgtgtgcacagtaccccaggagatcgaacaaggatctccacaaagacaaaccccagttctcaactgtgttttacctctctctcacctactttcagaccatacccagggtttttgctttttctttttaaattagtttcagtgacattaacgaggctgagaagatgcagcagacaccgccaatgattcctatgatgccttctttcccacctacgaacataaccaccgagcagattcaaaaataccttgatgagaacaagaagctgattctggcaatattggacaatcaaaatcttggaaaacttgcagaatgtgcccagtaccaagctcagcttcaaaagaatttgatgtatttagctgcaattgctgatgcccagcctcaaaccccg

SEQ ID NO: 265699 - DNA, 239 bp, Glycine max
  unsure (1)..(239): unsure at all n locations
ctcgaaccctctcgttccacccaatcagtaggtttcacttcagcgatggcgtntagaggcaaaaccctaggatccagcgccgctaagaaggccacctcaaggagcagcaaagccggcctccaattccccgtcggtcgtatcgccaggttcctcaaggccggaaagtacgccgagcgcgtcggcgccggagcccccgtctacctcgccgccgttctcgaatatctcgctgctgaagtttt

SEQ ID NO: 265700 - DNA, 409 bp, Glycine max
  unsure (1)..(409): unsure at all n locations
cggcccggantcccggggccgcccacagccttccgttaaggaattgattaaatcgcccacacaaaattggccagggcttttttgattccagtttcggggttgccttggcggccactttctcctttcaagggaacggtgaaaaccttggtcgcaaaaccatggctgaagaagattcagcaagcaagacccctcatttccgtggttaacaaggctgcctctctatcttcccccgtgacagcacccagcgtcggcgttcggtttcggctggacaatttggggccgcaaccgggttcgaggaagagggctaagagaaagggtagaggaatatccgcagggcaaggggcaagttgtggttttgggatgagaggtcagaaatctcgatctggacctggcgttaggaagggtttcg

SEQ ID NO: 265701 - DNA, 402 bp, Glycine max
taggggtggaataaccgggtcggcgcaagccttccgccaacccttccgttcgttcttcttcttttgttgttctgcgtttgcgtttgatttttctctcggctgaaaatgtcttgcggaagctcctgcaagtgcggcaacggctgcggaggctgcaagatgtacccagacttgagctacactgagtcaaccaccaccgagaccttggtcatgggagtggcacctgttaaggctcaatttgagggtgctgaaatgcgtgcgcccgctgagaacgatagctgcaaatgtggaccaaactgttgctgcaacccctgcacttgctagctaggtgttgggagagcacgctttacgcagatatagctcttaattacgaataatgataaactattaatgtgtagctaaaaa

SEQ ID NO: 265702 - DNA, 360 bp, Glycine max
cccacgcgtccgggggatcatgcaagcatgattcaatttggtggagaaatagtgaattgggggtcatcagggtctcagacttccacccaaatgggtagtggacattttgctgaagagggttttgcaaaagcttcatattttaggaacatgcaagttgtggattgggataacaacttgattcccttgtcaaatttaaaggttctagctgatcaccccaattgctatgacatacaaggaggggttaataatgcgtgggggaattatttttactatggtggacccggcagaaatgtaaagtgtccctaaaggaatcaatgatatagaatttataggttataaacacaccattaccacctggac

SEQ ID NO: 265703 - DNA, 434 bp, Glycine max
  unsure (1)..(434): unsure at all n locations
ctttttctttcctcacttcccttgttctcacaaagtcacaatggaccccctctctctctgcggcaccggagccctccgcgccggcggcctctactggttcgtgtgcgttctgggccccgccgagcagaagggcaaacgcgccaccgatctttccggcggctccatctccgccgagaaagtccaagacaactacaaacagtactggtccttcttccgccgcccaaaggagatcgagaccgccgacaaagtccccgacttcgtcgacaccttctacaatctagtcacagacatctacgagtgggggtggggccagtccttccacttctccccctccatccccggcaagtcccaccgcgacgccacgcgcctncacgaggagatggccgtcgatctcatcgaggccaagcccggcaacagaatcctggatgtgggct

SEQ ID NO: 265704 - DNA, 414 bp, Glycine max
gccaccgctccttcgcttctacactcatctgggtcctctttcttctctcaatttcgtgccgttcaattctcttcttctttgctgttccctcatagtaacaagcatgggaatgcactggtctctgtgaaggcctctgtttctggggttgtgttggtggagaagtctgaggcagagaaggccaataggctcaaaacagcttacactgagaaaattattcccttgctcatggaagagttctcctacaccaacaaacaccaggtgcctaaaattgagaagattgtggtgaactgtggtatcggagatgctgcacaaaatgcaaagggtttggacgcggcaataagtgatctagcactgatcacagggcagagacctattaagactcgggccagggcttctcttgccacctttaagatc

SEQ ID NO: 265705 - DNA, 415 bp, Glycine max
aaaaaatgctattcctttagatattttgatatacaagttagtaaagtcatatgtgcgtgcgtcacctttgagacgtgcagcattgaagtctctcgcaaaagcattgaatgaagacgagctaatataccttagagcgcagtttaacctcttggagcctaaagatggctgcatctcacttgagaattttagagttgctctcatgaaaaatacaactgatgccatgaaggagtcaagggtccctgaaattttaaatttgatggagccactctcctataaaaaattggacttcaaagagttttgcgctgctgcaatcagtgtgtaccagcttgaagttcatcaagaatgggatagaatcgctaccacagctttcgagtattttgaggaaacaggaaaccgagtcatttcagttgaggag

SEQ ID NO: 265706 - DNA, 438 bp, Glycine max
  unsure (1)..(438): unsure at all n locations
agccgtcggccacgccttcggaacccggttcatgtctccaactgcaattccacgaaccccccaatgccgtctctttgcccacatgggccattcacgtgtccagtgtcgctgaatggattatagctatggctttggtgtggcaatacggagaaaaatctggatacccagcttggaagggcctttcttggggaatggtacctctacttggtggagctttttgtgcgtgcacatggcatttcttttataactctgagtccctcgaggtattggtggctcttcaagcggcactgactgttataggtaatgccacaatgtgcatagctgcatatcggatttacaaatcatcccaaggctcctagaacttttgaattgcatgaaaatgagaatctggaagcatgtatataggcctcaatgaaaatcaaaggctnttgctgattg

SEQ ID NO: 265707 - DNA, 432 bp, Glycine max
caaaaatttccggtccgtgaaaagggaggcaagggtttgggaaagggaggagccaagaggcacaggagggtgcttcgtgacagcatccagggtatcaccaaacccgcaattcggcgtttggctcgcagaggtggtgttaagagaatcagtggtctcatctacgaggagacacgtggcgtcctcaagatattcctcgagaacgttattcgcgacgctgttacctacaccgagcacgctagaagaaagaccgttaccgctatggatgttgtttatgctctcaagaggcagggcaggactctctacggtttcggtggttaatttatagggtttccatcagcgtaacagctgcttattggttattgttgtaaatggttgctttttaagcttcttggtatatttgcttcaattgtaatggaaccaaaagtattttgt

SEQ ID NO: 265708 - DNA, 433 bp, Glycine max
gaggaaccctacatagggtttggaagaagctgatccacgaagatggtgcagcgtctcacctggcgcaaacaccacagctgtgctaccaaattcaaccagcacagagtcgtcaagactcccggaggcaagcttgtttatcagaccacgaagaagagggccagcggacccaagtgccctgtcactggaaagaggattcaagggattccacatttaaggccagcagagtataatagatcaaggttacacagaaaccgaaggactgtgaaccgtgcatatggtggtgtgttgtctggcagtgctgttagagaaagaatcattcgagctttcttggttgaagagcaaaagattgtgaaaaaggtcttgaagatccaaaagacaaaggaaaaacaagctttgaagggctgagttttgagaaagagtgataaagatcttt

SEQ ID NO: 265709 - DNA, 425 bp, Glycine max
cagtgatgtgtcatgggctaaatttcagaactgcagtattttactgccataaagtccgtgagacaacagctttcatggttccattggtggctggtgatggaaccaaaactcaggcacttgctgtttgccactcagatacttctggaatgaatcatcacatgcttcatgaactcatgggagttgatcctggaactaaccctgtttgccatttccttggaagcaaggccattttatgggtacccaatatatctatggacactgcctatcagactaacgttgttgtttaattagtccatgcatctgcatcttgggcaccataagattgtatataaaataaattatggtgtgttgtgtatgttgtgcaagacctggaacttcacctttctacgtacgtgtgctgttaggatgcaatgtgctttgatgat

SEQ ID NO: 265710 - DNA, 432 bp, Glycine max
cccacgcgtccgagcatatactccacggaggggagcttcatccatgctattgaaatgaatgagcattttagaacaagagatcccaagaaagcacatgtgtttttccttccttttagcgtagtaatgatggttcgatacgtgtacataagggactcacacgattttggccccataaaaagaacagtcagggactatatcaatgtcattgctgcaagatacccttattggaatcgaagccttggagctgatcacttcatgctctcttgccatgattgggggccagaggcttcaaaattctcaccttacttgcgtaagaactctattcgtgtactttgcaatgccaacacctctgaaggattcgaccctagaaaggatgtttcatttccagaaattaatctccaacgtggtccaatagatggtttacttggtggg

SEQ ID NO: 265711 - DNA, 400 bp, Glycine max
cccacgcgtccgagagttaggctctattggaccgtacgattaagatcgttcggtgaaattgagcacgctggtgccgcataccctagcgttcctgttattctattgtggctgaaacaaaacagtgttgaacggcgaggtagaacgacgacccccttctgcgttttgaccttcaatctcaatcatggccaaagctgaaggtggcaaggaaccaataaatgaacaagcagtagcaaatatgtatgctgcaatgaggtctgagctcaaccaaatttactccaaaataactgaactggagatggaagttagtgagcacacattggttaccaatgccattcaaccacttgaccaatctagacgatgctatcgaatgattggaggggtgcttggggaagagaccatc

SEQ ID NO: 265712 - DNA, 394 bp, Glycine max
cccacgcgtccggtcgaagcgtggtcgtggtggttcggcggggaacaagttccgcatgtgggtgggtcttccagtggcggcgacggtgaactgcgccgacaacacgggggcgaagaacctctacatcatttcggtgaaagggatcaaaggccgtttgaaccgtcttccctcggcctgcgttggcgacatggtgatggccaccgtgaagaagggaaaacccgatctgaggaagaaggtcttgccagctgtcatcgttcgccagcgcaagccatggcgccgaaaggacggcgtctacatgtacttcgaagataatgctggtgttattgtcaatcccaaaggagaaatgaaaggttctgctatcactggtcccattggaaaagagtgtgctgatttg

SEQ ID NO: 265713 - DNA, 414 bp, Glycine max
ccaacccttccgttcagaaccaaactcaaatccaaactcgccaaaactagggttttgcatcgatggcactgtgcaaccgcgtcagatcgggaatctctctcttcaccaaatccacgttccttacttcccagcgatccagtctccaacgatccctcgttgcccctttcatttccctcgcctccagaaattacgccaacgtgccggggcaaaaggaaaccaaagttaaggtccctctggctttgtttggaggttcaggaaactatgcctctgctttgtatattgcatctgtgaaagccaatgcagtggaaaaggttgagactgagcttctgcaatttgttgaggcagtaaagaatagtcccatattttcacagtttataagggacttgtctgtggctaaggatgttagagtgaaag

SEQ ID NO: 265714 - DNA, 440 bp, Glycine max
cacaccgaaaacaaccacgcgtccatgccttttgttaaagaacacgcgcatctccaaagggagaaaggctgccaagaagagggcggctgatccctttgccaaaaaggattgctatgacattaaggccccttctctttttcaagtgaaaaatgttggcaaaaccctcgtctctcgtacgcagggtaccaagattgcttctgaaggacttaaacatagagtgtttgaggtctccttggctgatcttcaaggggatgaggatcatgcattcaagaagattaggttgagagctgaagatgtgcaagggaagaatgtcctgacaaatttctggcgaatggatttcacaactgacaagctgaggtcattgttgcgaaaatggcaaactctaattgaagcccatgtggatgtgaagacaactgataactacacattgaggatgtttt

SEQ ID NO: 265715 - DNA, 367 bp, Glycine max
  unsure (1)..(367): unsure at all n locations
gcgcaagccttccgcgaacccttggccggacccttggccggacccttgggttcacagcgaantcgtangaaggtttgaaaagatggagaacatgcagagcttctggcaattgggcgatgaactccgtggacactcaaaagcatcggaggatcacaaatggttaatggttgcttcgaaattggcggaacagacaagattgaaaggggagcgtgggaacaaccttgatctttcaaagggccccattagaacaaggtcaagggataaatttgggttccaggaagagaacaaatttgattctcttaacttaagcatgttgaacctggactctaaatttactgagaatgtgagcaaaagctcgcttcgaaat

SEQ ID NO: 265716 - DNA, 411 bp, Glycine max
gcgcaagccgtccgatcatcatttcggacaaaaagcaccatttccagtccaaggcagacgccggtgcctccaaagcgtacccttagcaagccggtaccattcgcaagaacggctacatcgtcatcaaaggacgcccctgcaaggttgtggaagtttcgacttccaaaactggaaagcacggtcacgccaagtgccactttgttggaattgatattttcactgccaagaaacttgaggatattgtgccctcttctcacaactgtgatgttcctcatgtgaatcagactgattaccagctcattgatattgctgaggatggatttttgagtctgcttactgaaaatgggaacaccaaggatgacctcaagcttcccactgatgagagtctgctcactcagataaaggatggat

SEQ ID NO: 265717 - DNA, 391 bp, Glycine max
agagagatgggttcgtccgtgaagctttcatggagggccttggaaactgagatgcccgtgatggttcagatgcaggaattgcaacgaggagctaagaatgccttgtctttggcccagggggtggtttactggcagcctcccaagcaagcgttggaaaaagtgaaagaacttgtatctgagcctttaattagtcgttatggtaacgatgaaggtattcctgaactcagagcagcattagtcaaaaagttgcgtgatgaaaataatttgcacaaatcttcagtaatggttacatcaggtgccaatcaggcatttgtgaatctaagtcttactctctgggatccgggtgattctgtggttatgtttgcttcttactacttcaatgcgtacatgt

SEQ ID NO: 265718 - DNA, 426 bp, Glycine max
attgaacacacacatagaaacccaacaacaagaatgaagaagatgattctaaccctcttcgtcaatatcattttatcggtcctctccctctcccacgcctccgtggtggatttctgcgtagcagactacacaggccccaatggccccgcagggtactcatgcaagagcccagcaaaggtcacggtggacgacttcgtctactccggccttggcaccgccggcaacacctcaaacatcatcaaagccgcggtgacgccggcgttcgacgcgcaattccccggcgtcaacgggcttggaatctccattgcacgcctagacctagcagccggtggagtcatccctcttcacacgcaccctggtgcctcagagctgctggtggttgtgcagggaacaatctgcaccggcttcggtgcttcggacaacact

SEQ ID NO: 265719 - DNA, 394 bp, Glycine max
  unsure (1)..(394): unsure at all n locations
aaaaaccagcctttaatatttttctaactgtttttccagagaacttgatagagagatggcgggtgcaacatctggtgctgggttaaatgggttgggatcttccttcttgagtggaggaaacaggagccaaacccttctggcctctgctattggaggcaaagttggtgctgctgttactgttaatcccagaagactcattgtggtagctgctgctgcaccaaagaagtcatggctccctggtgttagaggtggtggcaatctcgtcgacccagaatggcttgatggatcgctaccaggtgactatggttttgatccactaggccttgngaaggacccagcattcctcanatggtacagagaagctgagctcattcatgggaggtgggcaatggct

SEQ ID NO: 265720 - DNA, 391 bp, Glycine max
gcaagccgtcggccaacccttccaaccactataccaatagaaccttttgcttttgaaaaacccctaactcttgatcactacactagctagccacatacaatgtcgaccaaatttaaggtgtttcgtgaattcacaagcgatgactcattcctaaaccaagttatccctgaaaacatcaccgaattccaagtgactctgtccctcgctagagactacgatggcaacaactcaaccaacggaaagttcattccttactgggacactgaaaaggtcactcccgaagtgataaaaaaattcaagaaaaaatacgaacccaccgcactgagggttaaggttcttgtcagcattggaaacaaaaacaaacaatttcctttcaccattggctcggact

SEQ ID NO: 265721 - DNA, 421 bp, Glycine max
ccgcccgaatcctcgaaatttctttcgattgaactcatttctctcttcttcgccacgcactcttcgctctgtaagcggtgatggtggttctggacaatgtctcgtgtttatgttgggaatttagaccctcgagtcagtgagagggacctcgaagatgaatttcgtatatatggtgttcttaggagtgtctgggttgctcgaagaccaccgggatatgcatttattgagtttgatgataggagggatgcacttgatgcaattcaagccttggattgaaaaaatggttggcgtgtagagctttctcattattccaagggtggtggccgaggagggcgtgggcgtagaggtgaagacacaaaatgctatgaatgtggtgaacctggacactttgctcgggagtgccgattgcgcattggatcac

SEQ ID NO: 265722 - DNA, 400 bp, Glycine max
cggccggaatcccggtcgagcacgcgtccgcccacgcgttcgcccacgcgtccgaattcacattcatcaaagagagagatggtgaacgtggcgcaattgcataaacaggtgcagagtgggaatgtgaatgttgatgccaacggggaactcatgtatgtcaaggtcatgaccgatgaacagttggaaactctgaggaagcaaatagcagtttatggcaccatttgtgagcagcttattgagatgcactgaacactttcagctcaacaggatcttgcaggggttatattgggaaacatatactgtgacccattgatgacatctggtgggcacaaaataacatcaagacatatgtggacacctacacctgtgcagcttcaaattcttgaacgtatatttgatc

SEQ ID NO: 265723 - DNA, 429 bp, Glycine max
atcctaaacgggccaactattagcaggagattcatgcctgaaaaggggtctcctgaatatgatgcgttggctaagaaccctgagaaggagtttttgaagactattactggcaagaaggagaccctcattgaccttacagttatagaaatcttgtcaaggcacgcatctgatgagttctaccttgggcagagagatggtggtgactactggacttctgatgccggtccattagaggcatttaagaggtttggaaagaagcttgaagagattgaaaagaagcttatagagaagaacaaagatgagacattgagaaaccgctatgggccagctaaaatgccttacactctgctctatccttctagtgaggagggattgactttcagaggaattcccaacagtatctctatctaaggaccctatggttgctta

SEQ ID NO: 265724 - DNA, 429 bp, Glycine max
aactattgaagcacaaaaatcagattatgagaagttgaaggaattgctgacttcattgtgctttaaaatgtacaagaaaaagggtgacattgctgtatggaggaagtctccagataacaattgttataataagctggctagagattcctatccacctaaatgcgatgacagccttgaaccagattcagcatggtatactccacttcgtgcctgtattgtagttccagatactaagtttaagaaatcaggtctgctgtccatttctaagtggcctgagcgattgcacgttacaccagatcggatttcaatggttcctcgtggaagtgatagtactttcaaacatgatgacagtaagtggaaaaagcaggctgcgcactacaagaaggtgattcctgagcttgggactgacaaaataagaaatgtcatgga

SEQ ID NO: 265725 - DNA, 323 bp, Glycine max
  unsure (1)..(323): unsure at all n locations
gagaaagattacactcctaccttaataggtgggagaagaaagaaagagaaggggccaaaggagaaggtgtatgatatttatatggtccaaagttgaatcttctgccacaacatacaccatcatcctcctccaatccatcatcaatggccgtgaccactccctgtatcaatgccacagaaaagaagcactggtggctcaccaaccgaaagatcgtaaagaaatacatgagagacgctcggagtctgatagcgacgcangaacagagcgagatcggttcggcgctgaaccttctcgacgcggctctggcgatctatccgcggctg

SEQ ID NO: 265726 - DNA, 403 bp, Glycine max
  unsure (1)..(403): unsure at all n locations
ggggaaacagattgtgccggtgaaatcagttatctacgcgctctcccctttccagcaggagataatgccgggtctctggaaggacttgcccacaaagattcaccacaaggtctccgagaattggatcagcgccactctcttgcttggtcccctcgtcggaacctacacgtatgttcagaactacctggaaaaggagaagctgtctcacaggtactgaactcatgcaagagctgattggataaccttctagtttgttgccttgatcttgtttagccacccaataatgtgacactgttgaaacttgctctaccgtttggttttgagatgtctgagtntgagctttttaaacttcgacagtgtttattgatggtctatttcattaatccatattactttgatagac

SEQ ID NO: 265727 - DNA, 338 bp, Glycine max
gtctggagaagcgtcctcagtggcggaccgggcccaagtcccctggaagggggcgccagagagggtgagagccccggcgtgcccggaccctgtcgcaccacgaggcgctgtcggcgagtcgggttgtttgggaatgcagccccaatcgggcggtaaattccgtccaaggctaaatactggcaagtgttatcgattcaaacattttattgtattcttttaagatgtagctagttactctagtctaagtcttgtacacacaaaaaaaaaaagttactcaagtctaaattttatctttttctgtgtattttttgcattttagtgaatggaaattagtcttt

SEQ ID NO: 265728 - DNA, 361 bp, Glycine max
gtggtggaacctccgtccttcttctttggtggttctgggtttgggtttgttttttctctcaggggaaaatgtcttgctgcggtggtaactgtggttgcggaagctcctgcaagtgcggcaacggctgcggaggctgcaagatgtacccagacttgagctacactgagtcaaccaccaccgagaccttggtcatgggagtggcacctgttaaggctcaatttgagggtgctgaaatgggtgtgcccgctgagaacgatggctgcaaatgtggaccaaactgctcctgcaacccctgcacttgcaagtgaggtgttgggagagcaagcttcaagcagagatagcccttaattaggaataatga

SEQ ID NO: 265729 - DNA, 249 bp, Glycine max
aaaaaaaaaaaaaaaaaaaaaaaaaaaaaaaatttaaaaaaaaaaaaaaaaaaaaaaaaaaagagaaaaatattaaaaaaaaagaaagaaaaaaaaaaaaaaaaaataaaaaaaaaaaaaaaaaaaaaaaaaaaaaaataaaggggccgcccttttaaaaaattcaaattttacttccccttccttccaaaataaaaacttttttttagttcccctaaatttaatttaactgccccccttttaaaaacc

SEQ ID NO: 265730 - DNA, 328 bp, Glycine max
caactactttttcaacccaaacctaatccacacccagcgcattttttaaatctgggccacacaagttatcctaatttttcccattaaacgttaccgtattgctgatggccccctcggtgaggtcactgacccaatctacccaggtggcagcttcgacccattgggccttgcttatgacccataagcttttgctgagcttaacgtgaacgaactcaataacgtactattggccatgttctctatgtttggcttctttgttcaggccattttcacctgaaaggttccattgtagaacctctccgatcaccttgcttaccctttcaacaac

SEQ ID NO: 265731 - DNA, 374 bp, Glycine max
tggcaagaaggagaccctcattgaccttacaattatagaaatcctgtcaaggcacgcatcgcatgagttctacctgggggagagagatggtggtgacttctggacttctgatgctggtccactagaggccttcaagaggtttggaaagaagcttcaagagattgaacataagcttatacagaagaacaaggatgagacgttgagaaaccgcactgggccagctaaaatgccttacactctgctctatccttctagtgaggagggattgactttcagaggaattcccaacagtatctctatctaagggctctctcattgaggttgctgtactactctgcctgtttttcaataatgtggaataggaggaatatgat

SEQ ID NO: 265732 - DNA, 320 bp, Glycine max
cccacgcgtccgggcggcgattgaaggaggtgattgtgaagggaaatacttctggggaagcgcgttgtatcacgtggacgatttgccttttcaattggaggacatgccttccaattacggagggtttagggatagggttcagaaattggaggtaaggaagacaattgaagctttagatcatcttaagggaatgccttctcgcggtgattttgagcttggggagattccttccttaatggaccttggccttaatccatctgcgacaatgtcacaggatgggaagtttggtgccaatgcttatatgataggaggggagactg

SEQ ID NO: 265733 - DNA, 351 bp, Glycine max
acaagatatggttcaccccgcttgggaaattcatggacgagagggacgcggcgatcagggagaagctgagcagcgtggaggacacgtccgaagaagtgaaacaactggaggagaaagccaatgcttgcatggccgctttttgggccgagatagcggcggcgctgaacacgatgaagaaggagacgcaagctgaggtggaacaaaagattgctgaggggaggaagaaagtggaggctgaactgcaagaggctctggctgccttggagaattaaaaggaagaaaccatcaagtcccttgattcccagatcgcagcccttatccaggagattgttaataaagttctttccactg

SEQ ID NO: 265734 - DNA, 367 bp, Glycine max
acgcccacgcgtccgcccacgcgtccgcccacttttccgcccacgcgtccgaaaaaaaaaaaccgaaaaaaaaaaaaaaaagaaaaaaaaaaaaaaaaaaaaaaaaaaaaaaaaaaaaaaaaaaaaaaaaaaaaaaaaaaaaaaaaaaaaaaacgacgccctatttaaataataaaattataaaaattcaaataacaaaccaaaaattcacaatatttgaacctaaaaaacaaataataaacctaatttaaaaaactttcaactctataaaaactctgcaaataccaaaaaaaacaattatgaccaaattattattggaaaaaaaattaaataaaaataaatcccaaatctaacttcttttttaaaa

SEQ ID NO: 265735 - DNA, 433 bp, Glycine max
gcaaaaccctagcggcgcctgctttctttgttcgtgttttgcatcaggatggagtctcaggggaagcacgcacttgttgtcaaagttatgggtcgtactggatccagaggacaagtgacccaggttagagtgaagtttttggatgatcagaaccgtcacatcatgaggaatgtgaaaggacctgtgagagaaggagacattctcaccctactcgagtctgaaagggaagcaagaagattgcgctagatggtctcttttttttggcttgcctccaaattcgaacaaaagcaatatttttcttgatatttatggtagttagtcggtgctaaaggggttatagcaccctatcttattgttttggatctattttcattcgaattattgcttgaattttgtatgtttaaacttcgagattgaggtatgctttggttta

SEQ ID NO: 265736 - DNA, 406 bp, Glycine max
cccacgcgtccggtttttatttctctcttctctctgcatcgcttcaggttcttctgaaaagagctctcgcgtgtatgttggtaacttggattcacgagtcaccgagagagatctcgaagacgaattccgtgttttcggagttattcggagtgtttgggttgcacgtagaccacctggttatgcttttattgactttgatgaccgcagagatgcacaggatgctatccgtgaattggatggcaagaatggttggagggttgagctttctcacaactctagaggtggaggtggtggtcgtggtggtcgctctggtggttctgatttgaaatgttacgagtgtggtgaacctggtcattttgctcgtgaatgtcgcatgcgtggtggttcaagaaagaccccgtaccgt

SEQ ID NO: 265737 - DNA, 283 bp, Glycine max
ccggggcgaccgacgcgtccgcccactctttcgcccacgcgtccggataactagaaacagagagatgaaaatgaaggtgctgagtttcttcgttgctacaatttcggtagcatggcaatgccatgcgtacgatatgttccctctccgaatgaacactggctatggtgcccgtactccggaggtgaaatgcgcaagtaggaggcttgctgtggaagcacacaacatatctggctatgagaccattcctgaagagtgcgttgcagcaacaaaggaatacatccat

SEQ ID NO: 265738 - DNA, 347 bp, Glycine max
cccacgcgtccgcccacgcgtccggctgcatatgtcttgaaatgtgatgatgacacttttgggagggttgataccgtcttaaaagaaattgaagctgtacccgagcaaaagcccctttatatgggcaatctcaatctcttgcatcggcctctaagaaacggaaaatgggcagttacttttgaggagtggcctgaatcagtatatcctccttacgcaaatggccctgcatacataatttccagagacattgttactttcatcatatctcaacacaaggagaggagactgcggctctttaaaatggaggatgtaagcatgggaaatgtggttgagagatttaacaacac

SEQ ID NO: 265739 - DNA, 253 bp, Glycine max
  unsure (1)..(253): unsure at all n locations
gaagatttttggcatgctgttttgaccaaacattcccattccaagtttattgcgagatctgggaaatcctgcccctgcaagtgttgaaatcgatgatcaccctatgcaaattgaagaaacacagtacccgaaaaccttcttctataaagaagaccttcatccaggcaaaacaatgaaagtacaattcagcaagcctncctttcaacaaccatggggtgttggtacatggttaaaaggaaattaaagacacttc

SEQ ID NO: 265740 - DNA, 405 bp, Glycine max
cccacgcgtccgcccacgcgtccgcccacgcgtccgctgagagtgtttggttgaaagtagcgaagatgtttcctttcgggcaaaagggtcaaaagataaaggggactatggtggttatgcagaagaatgtgttggatatcaacagcatcaccagtgttggagggatcgttgaccaaggcttaggcttcataggcagtgcagtcgatgcacttacttttgcagccaccaaaatctccatccagttgattagtgctaccaaggctgatggtgggaaaggaaaaattggaaagagtacaaatttaagaggaaagataacattaccaaccttgggagctggcgaacaagcatacgatgttaattttgaatgggacagtgacttcggaattcccggtgcattttatatta

SEQ ID NO: 265741 - DNA, 432 bp, Glycine max
cccacgcgtccgggaaagcaaaagtgaggtgtagtggtagaaggataaggtgactataaagcgtggaaacggtggtgtagtgtgtgagtgtcattgtgaagttggaaacaatgctagcttcttcgctctccttcctccattcttgcacatccccctcttcctcttccttattgtcaatttcacctccaaaccccaaaccctctcacttcctacctttcgtggtcgaagccaaagacaggacccgcagggaagacaggaccgctcgccacactcgcatcagaaagaaggtcgaagggacgcccgagaggccgaggctgtccgtgttccggtcgaacaagcatctctctgtgcaggtgattgatgacaccgcaatgcgcacgcttgcttcggtgtcgacaatgcaaaaaacggttgctgatgagttcaactact

SEQ ID NO: 265742 - DNA, 396 bp, Glycine max
  unsure (1)..(396): unsure at all n locations
ggggggggggggggggggggggaangagaggagggggggggggggggaaggggggggggggggggggggggagggggggggagaaagggggggggnaaagggaggggggggggggggnnnaaggggggggggcggggagaggggggggggggggggagaacaacncggggggggggggaggggaggagggggccagggggangggaggggggggggggagggggaaggggaggggaaagggggggggaagacgggaggagggggagcgggggggganncgggggggggggggggggggacaggaaaaaggggggggggagagggggggggggacggggcacgagggagggaagggggggggggggggggagcaagggaggggcagggggggggggg

SEQ ID NO: 265743 - DNA, 305 bp, Glycine max
  unsure (1)..(305): unsure at all n locations
gggggggggggagggggggggaaaggggggggggggagggggggggggggggagtgggagggggggggaggggagagggggggggggggggggggggggggggggggggggggggggggggagggggtattnccgggggggaagggtggtgtgaaggacaatcaatatgagaaagtgggggcggcgcgtggggaaattgcgtctggtgtgggattgacgttcaacaatggactgggggataagggggggggggacgacgggggcacgatggcggaagagggactgggtagggttgaggaactata

SEQ ID NO: 265744 - DNA, 165 bp, Glycine max
ccattttatgataaactttccttccatttttgttcctctagtaagcctattatttccggcaattgcaatgacttctatatttctttatgagcaaaaaaacaacaatttttagatacagaaaacaaaggaaaattctggggttttttattccccaattataatact

SEQ ID NO: 265745 - DNA, 402 bp, Glycine max
ggctctactgttttctcttaccataatcatcaatggcttccttatccctctcctctcgcccatctctctcttccgcacaccacaacgcctccacgcgccttattctacgcacccctaactcccttaaactgcgcactccaccccactccctccccgccatccgcgccatcaccctcacccaggacgacctcaagagactcgccgccgacaaggccgtggagtccgtcaagagcggcatggtcctcggcctaggcaccggctccactgctgccttcgtcgtcgccaagcttggcgcccttctcgccttcggccaactctccgacatcgtcggtgtccccaccttcaaacgcacggaggagcaagcccgctccctcggcatccccctctccgtcctcgacgaca

SEQ ID NO: 265746 - DNA, 420 bp, Glycine max
gctcaatggcatcatcatttgtgggtactttattacccaaccacttcacacaaaccaagacactcagctgttcctgcaagtagatcaggtgctccaagaaggaggagagtgcacttagcaacaacaagagcagagaccatgactactgtcatagaaaaactgggcattaagattgagaggaaccctcctgagtccaagctcactcaactgggtgttaggcaatggcccaaatggggttgccctccaagtaagttcccatggacatatgaagccaaagagacttgctatcttctggaaggaaaagtgaaggtctttcctagtgggtcgaatgagtcagttgaaattgctgctggtgacttggttgtgtttcccaaagggatgagttgcacttgggatgtgtcctgtggtgttgacaagcac

SEQ ID NO: 265747 - DNA, 415 bp, Glycine max
  unsure (1)..(415): unsure at all n locations
caattttcaaactcaattaccattccataacctaaatctcctctttgtttccgagtcagagagcaatggcacgtaccaagcaaaccgctcgcaagtccaccggcggaaaggcgccgaggaagcaattggcgactaaagccgctcgcaagtcagctccggccaccggcggagtgaagaagccccaccgcttcaggcccggaacggtggctctgagggagatcagaaagtaccagaagagcactgaacttctgatccgaaaactcccattccagaggctcgtcagagaaatcgctcaggatttcaaaacagatcttcgtttccagagcagcgctgtttctgcgcttcaggaagccgcagaggcttatctcgttggactcttcgaggacaccaacctntgcgctattcacgccaagag

SEQ ID NO: 265748 - DNA, 395 bp, Glycine max
ggctaaccaacgctgacacttctgcttatgcgtttgctacgacatcatcgacgtcacaatgccgcaccatgcagaccactgccagatcgactacatcgacttacgcctcaccacaaatgaagactgatcgtcaaagcttcgtcgattaaacatcggaccattgtgtctgtggcggacgaagatctgactagatatcacctacgaaacctgcatggactggaaggacctgcgcgtcaccgtcaagctcaacgagcaaaaccacgcggcctacgtcacggtagtccgatcctgcgacgcgctcgtcatcaatgcccttaaggagccacagcgtgaccgcaagaaaacgaataacatcacgcacaactgctacatatcactagacgacgtcatcgaag

SEQ ID NO: 265749 - DNA, 399 bp, Glycine max
caaaaagcactcttgatcccgcaacctatggtgatcaaactagtaccataacaaaacaacagttggagattaacttgggtggggtcacagtagaagaggcaattagtgctcacagattattcatattagattaccatgatgcattcttcccgtatttgacgaagataaacagcctacctattgcaaaagcttatgccacaaggacaatcctgttcttgaaagacgatggatctttaaagccacttgctatcgaattaagcaagcctgcaacagtgagtaaagtggtgttgcctgcaacagaaggtgttgagagtacaatttggttgttggccaaggctcatgtcattgtgaatgactctggttatcatcagctcataagccattggttaaatactcatg

SEQ ID NO: 265750 - DNA, 412 bp, Glycine max
cccacgcgtccggcattccatagcctcccataaaaatgaagaatactatcttctctgctctctttctactttgtgccttcaccacctcatacctaccttcaaccaccgcggtggtcgataccgacggtgatattcttcagaatcctggcacatactttatcttgtccgtttttcgacccggcggctgagtataattcgccgccactggaaacgaaacttgccctctcactgtcgtgcagactctcttcgggaggggctttccagcaatattatcgtcccggttacgaatccctttcatcggcgaaggacaactcttcagcatcctgttccgtattgtgccatggtgcgccaccactccttctaagtggaccattgtggagggtttaccagaatcacccgcggtttaactcac

SEQ ID NO: 265751 - DNA, 319 bp, Glycine max
gagagacatgaaaaaaaatgctttaatttatttaaaaaaaaaaaaaaaaaaaaaaaaagaaaaaaaaaaaaaaaaaaaaaaaaaaaaaaaaaaaaaaaaaaaaaaaaaaaaaaaaaaaaaaaaaaaaaaaaaaaaaaaaaaaaaaaaaaaaaaaaatggccgccctttttaaaaaatccaacttaacttacccttcaatccaacttaaaacctttttatttgggccaccaaaattaaataaactgccccttttttaaaaactattgcccttaaaaacccttgcctttcccaaatttaaatcctttcaaaaaaatcccct

SEQ ID NO: 265752 - DNA, 288 bp, Glycine max
cccacgcgtccgcccacgcgtccggagctgaagaagcctgttgtggagaaagaagctcgagggcatgccatatgagggcatgcacgtacggcctcggaggggaaccagaaaattatgttaacaaaataatctggaaccctaatgtatcagtgtcatcatcagtgtgtagtttaagctagctttgctatggttacgttctttgagatgagagtcttgatgaacagtaccattctgatgtattgctttccttgaaagttaatgcatgcttcttatcttctgtctagctac

SEQ ID NO: 265753 - DNA, 373 bp, Glycine max
gataactagaaacagtgtgatgaaaatgaaggtccttgttttcttcgttgctacaattttggtagcatggcaatgccatgcgtacgatatgttccctctccgaatgaacactggctatggtgcccgtactccggaggtgaaatgcgcaagttggaggcttgctgtggaagcacacaacatctttggctttgagaccattcctgaagagtgcgttgaagcaacaaaggaatacatccatggcgaacaatatagatcagactccaaaacagttaaccaacaagcttacttttatgccagagacctcgaagtccatcccaaggacacatttgtgttcagtatagatggcaccgtactctctaatattccatactac

SEQ ID NO: 265754 - DNA, 405 bp, Glycine max
atcagccagttttgtgccagtgatgtgtggctcagctttcaaaaacaagggggtccagccattgctcgatgcggtagtggattatctaccatcaccacttgacttgccagcaatgaacggcagtgaccctgaaaacccagaagaaacaatagagagggtagcaagtgatgatgaaccatttgctggactggcttttaagatcatgagtgatccatctgtaggctcccttacgtttgtcagggtgtatgctgggaagctaagtgctgggtcttacgtactcaatgcatacaaaggcataaaggagagaattggtagacttttagaaatgcatgcaaacagcacagaggatgttaaagtagctttagctggtgatattattgcacttgcaggtttgaaagatactat

SEQ ID NO: 265755 - DNA, 180 bp, Glycine max
gagaaatacagtgaacaagatatggtagctctcaaaatttcgttgcatgaatgtttattgtatttgccaaagaaaaaaggaaaaaaaaaaaaaaaaaaaaaaacaaaaaagaaaaaaaaaaaaaaaaaaaagaaaatacaaaaaaaataaaatgtaaaaagtgaaagataagctattaag

SEQ ID NO: 265756 - DNA, 419 bp, Glycine max
cccacgcgtccgataagattgcagtagtgctaagtgctaacacctgcagtgaacaatggcctctgcatcagcatctctgctcaagtcttcacttgttcttgacaagtctgagtgggtgaagggacaaacccttcgccaaccttctgcatcagttgtgagatgcaaccccaccaccccatcaggcctcaccatcagagctggttcctatgctgatgagctcgttaagaccgcgaaaacagtggcttcaccagggaggggtattttggccatggatgagtccaatgctacctgtgggaagcgtttggcttcaattgggctagagaacactgaagctaaccgccaggcataccgtaccctcctcgtgacagttccaggccttggtcagtacatctctggtgccattctctttgaggaaacac

SEQ ID NO: 265757 - DNA, 399 bp, Glycine max
  unsure (1)..(399): unsure at all n locations
gagagtacaatgcatcgcacgtgtggccgccaattgtcaagaagaagggcgagactctttcctacttgccagacctcgatgatgcccaattggcaaaggaagtcgaataccttctaaggaaaggatggattccttgcttggaattcgagttggagcacggcttcgtgtaccgtgagcacaacatgtcacctggatactatgatggacgctactggaccatgtggaagctgcctatgtttggctgcactgatgcttctcaggtgttgaaggagcttcaagaggctaagactgcataccccaatggcttcatccgtatcattggatttgacaacgttcgccaagtgcagtgcatcatcttcatcgcctacaagccncccagcttctaagtcattgaaaaat

SEQ ID NO: 265758 - DNA, 349 bp, Glycine max
aaaaaagaaaaaaaaaaattaaaaaataaaaaaaaaaaaaaaaaaaaaagaaaaaaagggaaaaatataaaaaaaaaaaaaaaaaaaaaaaaaaaaaaaaaaaaaaaaaaaaataaaaaaaaaaaaaaaaagggggcggccgttttatagtatcaatgcttacttacccttgcttgcaaatcaatagctttttaatagggcaacctaattcaatttaactggccgccttttaaaaacgttgtaacttgaaaaaccctggctttaccaaatttaatcgctttgaaaaaaatcccctttttgcaagttggcttattaacaaaaagacccgaacctatcgcctttccaaaaa

SEQ ID NO: 265759 - DNA, 417 bp, Glycine max
cccacgcgtccgcccacgcgtccgggcattagaaatcagtgaccggcgtgagagagcgaagatggtggttcttggcaccacctcaccttcaatttcctgcttgccgtcttcaactcaaaccgactacaaggcgcgtcgatactgttcttttccgcaacgcccacgcccacgcccacgcccacgcgcttcacgtttcttttgcggatcccctttcgctccaaatgccatccattctccttctctgtctgtgacgaatgaagcactgaatgttatgatttctggggctcctgcttctggtaaaggaacccagtgccacctcatcaccaacaagtacggtttggttcatattgctgctggagatttacttagggcagaaattgccactggaagtgataatggaaagcgagccaaacaata

SEQ ID NO: 265760 - DNA, 399 bp, Glycine max
  unsure (1)..(399): unsure at all n locations
ctctaatctaggaataggaaaaagatgggcagcactagtgcgagtgccctcaggctatggtcgatggtcagcgtgtccccgaattgcaattgctcatcgatgacgcttatgaagaagacggcgatggcgatggcgatggctcctttttcacttgcaatgaaaatcaaaagcaaaaggggtggtattaggtgcgaggtggctattaatgcggtggatgaggagtcgaggacgtcaccggaggagacgaagatcggagcgcgtgtgaaggtgaaggaggcgggtttgaaggtgtaccacgtncccaaagttggggagcttgacctaacgggtctggaaggcgagatcaagcagtacgttggcctctggaacggtaagcgaaatctcgccaatcttccttac

SEQ ID NO: 265761 - DNA, 398 bp, Glycine max
ctcctatactctatttttcgcgtcacataaacaaaaaaaataaactggggagaagcatgttgttgatgttgggactatgcttcctattgttctctgcatttccacttgcgttctctgagagatgccacccacaagacaagaaagcgttgctccaactccagaaggacctcggcaacccttatcacatcatatcctggaacgcaaaggaggattgctgcgagtggttctgctgcgttaagtgtgacgagaaaacaaaccgcgtcattagcgttgccttatcatccccttttccagacaccaatctctcggcccaaatacctccctctgtgggtgacctcccttacctcgagtccctcgtcttccacaaattccccaaactcgtgggcccaatccagccc

SEQ ID NO: 265762 - DNA, 381 bp, Glycine max
gggccttccatggcttccgcttgtgcttcctctgcaattacagctgttgcgatctctacgccgagttccgggcagaagaatggatcaggaggttgttttcttagtggaaggaaattgagggtgaaaaaggagagagcagcaattggaggacgatcgatgggcactacagtgtgcgcagttgctgagcctgacagacctctatggttcccaggcagcacccctcctccatggcttgatggcactctacctggagacttcggctttgaccctcttggtcttggatctgacccggagagtctgagatggaatgttcaggcagagctagtgcactgcagatgggcaatgttgggtgctgctggcattttcattccagaattccta

SEQ ID NO: 265763 - DNA, 346 bp, Glycine max
gcacaacatgctggctctctttaagtgaataccttataaaaaccctgatacaattaagagttttcttgtttctcgttttaacatgtccatagtgtcatacaaaggcaaaagatcaaattgagttacaatgtgttaaaaaaaaaaaaaaaaaacaaaaaaaaacaaataaaaaaatccaaaataataatcatagaacaaaaaataagattgcaaaaaataatataaaataaaaaaaataaataaaagggggcgtcccttttaaaggatccaagtcttattaccctggtttccaaactctaatctcttttatggggtacctaaatttaatataatggcccgcttattt

SEQ ID NO: 265764 - DNA, 410 bp, Glycine max
tggttgaaagccatgagcatgatggctgcgtatttgcgtgtacccacatcggggcccggtactccgcaatctggcacagctacgaggaccaaatgcagaaatctgaaaacctcttgctccgttaatgccgccaaaattccaatgccccctctaaaccctaaagaccccttcctctccaagctagctttcatcgctgcctcttcccccgacacgctcctcaacactcccaaaaactccgacacccctccttttctcgacatcttcgactcccccaaactcatggccactcccgctcaagttgaaagatctgcttcatacaacgaacaccgacccagaaggccaccgtctgacctgccttcgctgcttctccatggtagaattgtttacattggcatgcccttggtgccagc

SEQ ID NO: 265765 - DNA, 418 bp, Glycine max
tcccactcgtccgcgcttctaacgtcaccgactcagttgttgtcagcgagtgagtgagtcgtttctctgcagcaacaaggtttagccactccaaacagacgagaaatgggtcgtggggtcagtgctggtggtggtcagagttccttaggttatctctttggcagtggggtgcctgccatcagtgcaaacagtcagcctgcaaatggtgctcgcactcaaaatgctagtgctccttcaccaccagtcgataagcaaagtccagcaccagcaccagcaccagcaccagcacctgcatcatcaccaattgataagcaaattccagctggaattcctggaagtctcaaaaacaattaccatcgtgctgatgggcaaaactgtggcaactttcttactgatcgggcatttacaaagttcatgc

SEQ ID NO: 265766 - DNA, 398 bp, Glycine max
  unsure (1)..(398): unsure at all n locations
tcttcctctccacatcgtccgtttttttttttttttttttttttttttttttattaagggtnttttgaaaatttaaaaaaatttaattttttttttaatnaaaaaaaaaaaatatttttaaaataataaaaaaattttttaaaaaaatttaaatttttaattattaaaaaaaaattttataattatattaatattatatataatttttttatattttttttattaaaatattataaaaataaattttttttatatttttgatattttttaataattttaaaaaaaattaaaattttaaatattttgttattttattttttttatatatattattaattatttttttttattaatttttttttttttttttttttatttttttttataattattttttt

SEQ ID NO: 265767 - DNA, 406 bp, Glycine max
aatgaaagcaataagtccctccttcctctgccttataattcttgtgacccttttggctggtagcattgaaagtgcaccagcaaacgtgaagccaagccattatgctgcacccttcaataggagtgtttttccttctggttttctatttggaataggctctgcagcttaccagatagaaggagcagcagctatagatggcagaggaccaagtatatgggacacctatactaaacagcaaccagggaagatttgggatcatagtgatggaagtctagcaattgatttttatcaccggtacaagagcgacataaagatggtgaaagaagttgggttggattcatacagattttccatctcatggtccagaatattccccaagggcaagggagcaattaacaccttgggg

SEQ ID NO: 265768 - DNA, 429 bp, Glycine max
ctagaaacagtgtgatgaaaatgaaggtccttgttttcttcgttgctacaattttgggagcatggcaatgccatgcgtacgatatgttccctctccgaatgaacactggctatggtgcccgtactccggaggtgaaatgcgcaagttggaggcttgctgtggaagcacacaacatctttggctttgagaccattcctgaagagtgcgttgaagcaacaaaggaatacatccatggcgaacaatatagatcagactccaaaacagttaaccaacaagcttacttttatgccagagacctcgaagtccatcccaaggacacatttgtgttcagtatagatggcaccgtactctctaatattccatactacaaaaaacatggatatggggtggagaaatttaactcgaccttgtatgatgaatgggttaaca

SEQ ID NO: 265769 - DNA, 430 bp, Glycine max
gcggaaagaacacaattgtgttgcacaacacttgtgaggattcactgttagctgctccgattatcttggacttggtccttcttgctgagcttagcactcgaatcgagtttaaagctgaaaatgagggaaagttccactcattccacccagttgcgaccatcctcagttacctgaccaaggcccctctggttccaccgagtacgccagtggttaatgcactgtcaaagcagcgagctatgctggaaaacatcctaagggcttgtgttggattagctcctgagaacaacatgatcctggagtacaagtgaagttcaaagtcttaagagtaatggtttgggatactgtagttgaatgagatcaaaacttaactcatatcccataccctcttttctgttatatatttatggcaaatgtgaaatttaaaagatcg

SEQ ID NO: 265770 - DNA, 375 bp, Glycine max
gagaatcataccatatccattcagcctaacgcataggatctaaaagatctgagactttgggaatctaatagcgcgggaaacatcattttcttgtcttaatcattctatctacacactatcaacaccaatcttactattctatcagattattataacattatgaatattttccactatatttagactcataaatgttaattcaaatttaacatatttactttttttccgtttacataactcattattattttctgcaatatcttctattctcttcttgatcttaattattattgcttagattttactttagtcttataattactctttaattttttctttcttatttttatattattttttttttattattatttt

SEQ ID NO: 265771 - DNA, 396 bp, Glycine max
gagaaatttaactcgaccttgtatgatgaatgggttaacaagggcaatgcagcggcactgcccgagactcttaagaattacaacaagctggtgtctcttggcttcaagattatattcttgtcaggaagaacactggacaaacaggccgtaacagaagcaaacttaaagaaggctggctaccacacatgggaaaaattaattctcaaggatccacaagatccttccactccaaatgcagtttcatacaaaacagcagcgagagagaaactgataaggcagggatacaacattgttgggatcattggagaccaatggagcgatctccttggaggccacagaggctaaagcaggacctttaagcttcctaatccccctgtactacattcagtagttcct

SEQ ID NO: 265772 - DNA, 426 bp, Glycine max
acctcaccaaaggaactaataatttcattgaggctagagaaagtggtgatggatatgtgaaagaatccaaaagttgtctttgatattctaattggaaagatgaaagctggacgagtagtgatggagttgtttgccgatgcaaccccaaaaacagctgaaaacttcacggctctctgcactggggaaaaggggattggacgatctgcgaaacctttacactacaaaggttctgtatttcatcgaattattccagaatttatgtgtcaggtaggagatttcacaagagggaatgggaccggaggtgagtcaatctacggttccaaatttgaagatgagaatttcaatctgaggcataccggtcctggtattctctccatggcaaatgctggagctcatactaatggttctcagttcttcatatgtact

SEQ ID NO: 265773 - DNA, 418 bp, Glycine max
cgcactcgtccgcccactcgtccgctttctcgtccgatcgagataactagaaacagggtgatgaaaatgaaggtccgggttttcttcgttgctacaattttggtagcatggcaatgccatgcgtacgatatgttccctctccgaatgaacactggctatggtgcccgtactccggaggtgaaatgcgcaagttggaggcttgctgtggaagcacacaacatctttggctttgagaccattcctgaagagtgcgttgaagcaacaaaggaatacatccatggcgaacaatatagatcagactccaaaacagttaaccaacaagcttacttttatgccagagacctcgaagtccattccaaggacacatttgtgttcagtatagattgcaccgtactctctaatattccatactacaaaa

SEQ ID NO: 265774 - DNA, 371 bp, Glycine max
tccacgcgtccggaaacgatgagggctttaagtgcgttaatggtggctgggatgtggacgctttaccactcgctccctgtccttggcaacgaaagcatacccttcggatcggtgtggtggttcgcctatgccggcgtctcctgtttcctcgtcctcttcgctggcatcatgtccggtctcaccctcggactcatgtctctgggcctcgtggacctcgagatcctcgaacgcagtggttctcctgccgagaaaatgcaagctgcgattatacttcctgttgttaaggctaggggaaaaggcaaagaaactccacaaatcattgatgaagagaaaaatgaagaaaacaaaagcattggtggggattcacagtt

SEQ ID NO: 265775 - DNA, 414 bp, Glycine max
cccacgcgtccgcccacgcgtccgcccacgcgtccggctgaaattgtcacgaccatgttgtcattattcaccaacttgctcctcttcctatccctgctaatcggtctatgcaattgcagggtaacaacaacaaatgaagaggtgcaaaccctaaacacaaacactcacttcaacccacaggtcccacccctccgaaccctctcttcctcgaagcggttcgagggttcctcggagttcgtgaagctcaaataccacatgggacctgtgctatcgtctccgatcaacatctacctcatctggtacggcaagtggccccaatcccagaagctcctcatcaaggacttcctcaactcaatctccgacgaccaccaccgcgccttcccctcttcctccgtctccgactggtggcgcact

SEQ ID NO: 265776 - DNA, 378 bp, Glycine max
gatatttcgtggttaaaaaaaaaaaaataaaaaaaaaaaaaaaaaaaaaaaaaaaaaaagaaaaaggaaaaaaaaaaaaagaaaaaaaaaaaaaaaaaaaaaaaaaaaaaaaaaaaaaaaaaaaaaaaaaaaaaaaaaaaaaaaaaaaagggcgcccctttaaaaaaacccaatttaactaacccttctatccaacttaaaacctttttaatagggcccccaaaattaaattaattgcccttcttttaaaaaaattataactggaaaaaccctggcttacccaaactaaatccccttaaaaaaaaatccctttttcccaaattgcctaaataccaaaaagcccctaaccaatctcctttcaaaaaaatttcccaacct

SEQ ID NO: 265777 - DNA, 263 bp, Glycine max
cccactcgtccgcatggccttccacgcttctcttgcttctacaaggatcccgtcaaacgcaaagttcccatccaaggcctctcactctttcccaacccaatgcgccttaaagagacttgaggtgacagaattctctgtgcttacatccacttaatgtctcacatatgctaaccaccctagagaatcttttcctactaaccttgtatactttttaactgattctttagaccattctatctactattgctattttctaatcccat

SEQ ID NO: 265778 - DNA, 410 bp, Glycine max
  unsure (1)..(410): unsure at all n locations
atnccggagccactctctcttcttattccaacagtttatgtacctcaaattcccaaaactgggaccttagtagaattttaaataagcgcaagatcataaaattattgctggattattatcaatggaaaggtatatgatatcacaccatctttggattaccatccaccagtttatataacttttactgacatcaacattgaatgatcccaccattgattttgaagatgttttccacaatcattctgatatacaaatgatttataaatacttaattaacaaggtagacacttccactattatcacacaaaattaaccataaactgtcacaacctactcttacacatgtcgctggcaatcaatcttctcgattagttgtaaagatcttgaaattcctgattcacatttttata

SEQ ID NO: 265779 - DNA, 317 bp, Glycine max
tcccacgcgtccgtttcgatttctcggttgccattgccattgccattgcgggttcaagtgcaagtaagaagaagagcagaatggggaaaagtggtaatgagcatggaggcaggtattggagtgatgggcaccaagttgggtatgatgagctatttcgaatccgacggagaggttgttcctgtcactgtcgtgggtttcaaagaaggcaacatcgtcacccatatcaatactgatgccaccgatggatacgactccgtccatgttggttaccgaagggtcagagaccgcaaatttgaccaaacctctattgggtcatc

SEQ ID NO: 265780 - DNA, 407 bp, Glycine max
  unsure (1)..(407): unsure at all n locations
gtgtggttgaaagttaagaagtagcaaagatgtttccattcgggcacaggggtcaagagataaaggggactatggtggttatgcanaagaatgtgttggatatcaacagcatcaccagtgttgacgggatcgtcggcaccggcttatacttcttatgcagtgcactcgatacagttacttttttagcctcctccatctccatccaacttattagtgctaccaaggctgatggtgggaaaggaaaagttggaaaggctacaaatttgagaggaaagataacattaccaaccataggagctaaggaagaagcatacgatgctcaatttgattgggacagtgacttcggaattcccggtgcatnttatattaagaacttcatgcaaaacgagttctacctcaagtcttta

SEQ ID NO: 265781 - DNA, 414 bp, Glycine max
  unsure (1)..(414): unsure at all n locations
cccacgcgtccggttttctgatcgctcatagagagttcgacgcggcggttgcagaaggagattgcaagatgaagttcagcatcgcgagtcccaccactggatgccagaagaagctcgagatcgacgacgatcagaaactacgagcattttgggacaagaggatctcacaggaggtcagcggagatgcacttggtgaggaatttaagggctatgtcttcaaaattactggaggttgtgacaaacaaggattcccgatgaaacagggagtgcttactcctggtcgtgttcgacttttgcttcacaggggaactccttgcttccgtggatatggaaggcgtaatggagaacgtangagaaagtctgttcgtgggtgcattgtcagcccaaacctttctgttttgaacttggtaaatt

SEQ ID NO: 265782 - DNA, 387 bp, Glycine max
gttctttcctcacttcaaacttgccaaaaatggcatcagaattggcatcatctcccagttgggttccaagcgcagccacatgtttggcagcctttgccgccctccttctcctcttcctccgcggtctccgccgccgccgatacaacctccccccaggcccaaagccctggcccatcataggcaacctaaacttaattgggtcccttccacatcggtcgatccacacgcttggcaaaaaatacgggcccatcatgcacgtatggttcgggtcgagctccgtggtggtgggctcgtccgttgaaattgccaaagccgtcctcaaaacccacgacgccaccctcgccggcaggccgaagttcgcggcgggcaaatacacaacctacaact

SEQ ID NO: 265783 - DNA, 453 bp, Glycine max
  unsure (1)..(453): unsure at all n locations
cacaaagaatgtttaccaagtatgggagttacccatattattgaagcattgtaaaacagttcnttgccagtacatgtccggggactacctgctggtgactaattgttttacaatgcttcaataatatgggtatatttcattccagggataccgtctactaacgttcgcatttatcgtcccgtgtatttctttcttgttcttgctgtccttcctgtcttttcattatcgattcgtattattatttttttttattacttttttttattttttcattttctttttcttattattactttctatttattattttttttccttattcttaatttttttattttccttttctttttgtttaattatattatttttttttcttttttttatctttatttatttttttttttatgtattatatattctaatttttattttatttttgtttttatatttttt

SEQ ID NO: 265784 - DNA, 404 bp, Glycine max
cccacgcgtccgcaccacaccactctctctgctcttcttctacctttcaagtttttagagtattgagatggcagagacattcctatttacctcagagtcagtgaacgagggacaccctgacaagctctgcgaccaaatctccgatgctgtcctcgacgcttgccttgaacaggacccagacagcaaggttgcctgcgaaacatgcaccaagaccaacttggtcatggtcttcggagagatcaccaccaaggccaacgttgactacgagaagatcgtgcgtgacacctgcaggaacatcggcttcgtctcaaacgatgtgggacttgatgctgacaactgcaaggtccttgtaaacattgagcagcagagccctgatattgcccagggtgtgcacggccacctta

SEQ ID NO: 265785 - DNA, 429 bp, Glycine max
tcgatccatagacatggctcaccgtctacttttgtcagccgttgcttattccctcatgcactggcgctcaaggcaagcgcagtgcaaagtgagtgccgcagttaaagtctcagctccccaagccacaaggttgggcatcaaggcttcgctgaaagacgttggagtcgctgttgtggccactgccgcgagtgcagtgctggctagcaacgccatggccattgaagtgttgctgggtggtgatgactggtctctggctttcgttcccaacaatttctccgtggcctctggggagaagatcgtgttcaagaacaacgcacgtttccctcacaacgttgtgttcgacgaggacgagattcctagcggcgtggatgcaaggaaaatctccatgagcgatgaagaccttttcaatgcgcctggtgagacttacag

SEQ ID NO: 265786 - DNA, 408 bp, Glycine max
gtcattacaattgttccgagttcaaccttggatcaggtctagggaatggctgcaatcggagctcgaaaatcgctccttgctcttcgtgcgcgccaattggctgtaagcggtcaagggctgcacagctcccaatactatggccttcggttaagtgcacactccttctctaccaaaagagaggatgaggaaagggagcaactcgcaaaggacatttcaaaggattggagttctgtctttgaacgtagcattaacactctctttctcactgaaatggttcgaggactaatgctgactctgaaatacttctttgaaacaaaagttacaatcaattatccatttgagaaaggccctttgagccctcgtttccgtggtgaacatgcacttctgcgatattcaacaagggaggaa

SEQ ID NO: 265787 - DNA, 428 bp, Glycine max
ttctttagttgtaactgacaaagttttctgagaaaataaggattattattgagagaatggctggctcatcggaagagggacaagtcattagctgccacaccgttgaagaatggaacgatcaactccagaagggcaacgaatccaagaaactcattgttgtggattttactgcttcttggtgtggaccatgccgtttcattgcaccattcttggctgagctggctaagaagttcacaagtgtcatattcctaaaggtggatgtggacgaattaaagagtgtttctcaagattgggctattgaggctatgcccacttttgtgtttgtgaaagagggaacgcttctggacaaagtggtgggagcaaagaaagatgagctgcagcagaaaatacagaatcatgttgctttcaactagtgcttaatctagctt

SEQ ID NO: 265788 - DNA, 377 bp, Glycine max
agcaagctcattctaatttaaaaatggcacacctccggcatgcgctatcttccccatgcttgggggccaaggcccttaatcttttcccatcatccccctaagtcgggagggtcagcatgatgaagaccgtcaccaatcattccttcttcttaagcccatggtacttcccataccgcgtcaagtacttgtgcccattctctgtcgagcccccgtcctacctcactgtctagttcccatgtgactactgctgttacactgtttgtctttcttcctacccataaaccttctccataaaccgttatctcgaattgatccactccatgtgtgccattctctttgccttgggcttcgtcttcccccaactattgtccctcaac

SEQ ID NO: 265789 - DNA, 333 bp, Glycine max
ctttgttgcaatatcacaaacacctcgtccgtcacaatgcatctagctgtggctgggaacgctgtcgtttcaccgtcgccgttccgacctcatccccttctccggtcatccttctccggcgtctccgttaagctcactccccaatccataacgttttcacgcttgaagcccctcaccgtcttcgccgccaccaataaggccgtcgctgtcctcaaggggacctccgccgtcgaaggcgtcgccactctcattcaagaagacgattgcccgacaacagtttctgttagcatcactggccttactccggggcttcatggttttcacctacatgag

SEQ ID NO: 265790 - DNA, 403 bp, Glycine max
gttttcgctcacccgtgtgcagtcgagctctcccgaagaaaaagcgaaaatgccgtcgcgcaagacattcagaatcaagaagaagttggcgaagaagatgaggcagaacaggcccatcccctactggatccgcatgaggaccgacaacaccatcaggtacaacgcgaagcgccgtcactggcgtcgcaccaagcttggattctgaggtgcttgctttgcctcgattcagtttatccaattaattagtgttttattttcttgagccaaaaacaatgctttggagtttttaatattttgcattttattccaagactatattgtgtaaggaatttattgtagtacgtttgacgtgggtctatttgcaatttcgagtatttggcaaaaccaatctgttttggcagag

SEQ ID NO: 265791 - DNA, 387 bp, Glycine max
aaagcattgaattcaaaaacttaagttcattccttgtgttttgctttcttcctcaaagccaaacatgtcgaacacatgcggcaactgcgactgcgctgacaagactagctgcaccaagggaaacagctatggtgttattgtagagactgagaagagttacatcgagactgttgtcatggatgttccagcagctgagcatgatgggaagtgcaagtgtggcactaactgcacttgcacggactgcacctgtggccattaaggaatatgtatgaaaatgtaattgccatgtgtttggcaatacaaatatccaaataatgtaatctccgtatgaataaatgtgtgtgctgatatcctacttcaagtctgtgtagtcatgcagtctgaatc

SEQ ID NO: 265792 - DNA, 248 bp, Glycine max
ctatcgggaggagaatattacattgagcgtattgtttattgctccaggagttactggagcattgccataccatgtctcatgctaccaaaggaaccctatcctaatgaaaactgactatggtaagcgttcttcgtaggcaaaatgctcaagttttatacttgctgatcaatcacacaacatcctatcctttaaaaccattccttaatagtgctttaaaccaacaaatgactacattaatgtcgaacaat

SEQ ID NO: 265793 - DNA, 388 bp, Glycine max
tgcaaagaaaatacacattacattacttagtctttgttcatttgagttgtggtgatggctagcctcaaggttgcatgtgtggttgctgtgatgtgcatggttgtggtggccatgagtgctgtacccatgtctcatgccgcaatcacgttcgggcaggtcgtctgcaacatgtctccgtgcttcagttatcttctaagcggcggaaaaccgtctcatgccttctgcaacggagtgaagtccctcagcaacgcggcgtataccaccgcggaccgccatgatgcgttcagttgcctgaaaaaccttgccaatattatgggacagagtttgaatgccggtaacgcaggctatcttcctggcaaatgtggcgtcaacattccttacaagatca

SEQ ID NO: 265794 - DNA, 416 bp, Glycine max
gaagtacaccccatagggaaaaaatttcttcacatttacaatgaagctggccactcggttcctattcctattccacctggctcatgctgctctgtctgacgaagctactttcattagagatggcctcaaatcctattcccagcttgatctccctcactcggtttttggttctgaaagtgtagccttcgattgccatggtaaaggaccatatgttggcgtgtctgatggtagaatcctcaagtggcacgagacaaagagagagtggattgactttgcagttacctcgccacacaggaacaagaaattatgtgatgggttaacaaatgacaagatggaatcaatgtgtggaagacccttgtgcctcaaattcaacacttttacttgtgaactgtacattgccgattcatactttgggc

SEQ ID NO: 265795 - DNA, 403 bp, Glycine max
cccacgcgtccgcccacgcgtccgatcccttcctatccacaggtaagtttggttgatgaatatgggttttttttttgctgggtagcagtgaggatcaaattcaaatggctatggccacagctgtcgtgtgtcctcagaacatcaccggagccatcgtgggctcacccaagaagagagtggtgcacgtgagagggttaaattcatttgggggactgaaggctagcaatggtgttgtctctttgggacttcctatgagcactgagaagtgctttgctaaagttgtgagttcagtgaaagcagcaacatcaaatggaaaaggaaagggtggaggggcactcttcttcacgtgcaacgccgcaggtgagatattcacgattgctgctttcatcaatggacttgttct

SEQ ID NO: 265796 - DNA, 425 bp, Glycine max
attcctcaaggtgtgacaaaggtaccctaatgagtccaggagagatagagaatgattgacattcgtctccaaaatcttgtgccacttcaattgtggatcaacaacaatgccattcttctaaattagaggtcagagatgtggaagttgacagccaagctacaattgtcaggtggtccaagaggcatgcaaccaaattggccaaaaaagacactctacacagcaaagatttaagagagattagtgcagaagcccaagcatcatgggatattgacgagtcaaacattgacacttccaagttacagagagaggaagccaaaatcattgcgtgggagaatttgcagaaagcaaaagctgaaactgcaatacggaaacttgagatgaaattggaaaagaagagatcatcatcaacggataaaattctaaac

SEQ ID NO: 265797 - DNA, 428 bp, Glycine max
caccaatgataacatcaaatcttgcttttgaacttacttgtatgagctacaggtacagctgaagtcacaacgaatctgggccatgactgaactaataaaaaatccaagcattatgaagaaagtgcaagaagaaattagaggcttaagtggtaagaaagatttcttggatgaagatgatattcaaaagttttcctacttaagggcagtgataaaagagacacttagattgcacttaccagcaccactacttataccaagagaaacaaataaaaaatgcatgttagatggctacgaaattccagccaagacattattatatgtgaatgcttgggcaattcatagagatcctaaggcttggaaagatccagaagagtttataccctataggtttttaaattgcgacatacatctttaagggacaggatttt

SEQ ID NO: 265798 - DNA, 424 bp, Glycine max
gccatggccacctccaacttctctattgttctctccgtctccctagccgtctttttggtgctacttaccaaggcacactcgaccgataccgtttctttcaccttcaacaagttcaacccagtccaaccaaacattatgctccaaaaagatgctagtatttcatcctctggggtgttacaactcaccaaagttggcagcaactgcgtgcccacctcgggatctctcggtcgtgccctttacgctgccccaatccagatttgggacagcgaaaccggcaaggtagccagctgggctacatcctttaaattcaacattttcgcacccaacaaatcaaactcagctgacgggcttgccttcttcttggcacccgtcgggtctcatccccaatccgacgatggatttcttggtcttttcaacagtccct

SEQ ID NO: 265799 - DNA, 396 bp, Glycine max
ttcagaggcacttatgctgactatggaggtggttggcaaggtggtcatgccacattgtatggtggaggtgatgcatctggcacaatgggaggggcttgtggatatggaaatttgtacagccaagggtatggcactaacactgcagcactcagcactgctctattcaacaatggcatgagttgcgggtcttgctatgagatgaaatgtgacactgaccccaaatggtgcctccccggtagcataatcgttactgccacaaacttctgcccccctaactttgcattggctaacaacaatggtggctggtgcaaccctcctttgcaacactttgatcttgctgagcctgctttcttgcaaattgctcaatacaaagctggaattggtccaatttccttc

SEQ ID NO: 265800 - DNA, 252 bp, Glycine max
aggttgggtcgggtgatgaggatccgacccgttcgcgcagctccagagcgcatttcggagaaggtggaggagagcataaagaacgcgcaggaggcgtgcgccggcgacccgacgagcggcgagtgcgtggcggcgtgggacgaggtggaggagctgagcgcggcggcgagccacgccaaatacaagcaaaaggaaaaggactccgacccgctcgagacctactgcaaggacaatccggagaccattgagtgc

SEQ ID NO: 265801 - DNA, 332 bp, Glycine max
aaaaaaaaaatagcccatcattaccaatgggaatcaagaaattttgaacagtttgtaaataatcgaaaccaaaatgacttgatgaaattaaatgaacccaaactattgaaccaagcccctctgcttgaaaacatctagcatggcagctccaattttggcaggggacttcacaaccatgaccccagctttcctgagggttttaattttgtcttgtgcagtgcccttgccacccgacacaatagctccagcatgacccatacgacggccagggggagcagttaaaccagcaataaaagcaacaacaggcttctcagttccactatccttaatta

SEQ ID NO: 265802 - DNA, 147 bp, Glycine max
ggggggggagggaaaaaaaaaaaaaaaaaaaaaaaaaaaaaaaaaaaaaaagaaaggaaaaaaaaaaaaaaaaaaaaaaaaaaaaagaaaaaaaaaaaaaaagggggggggggttaaaaagaaacaaagtaaaagaaggggggaagg

SEQ ID NO: 265803 - DNA, 105 bp, Glycine max
  unsure (1)..(105): unsure at all n locations
gccgctatcatcggccaagacggaagcgtttgggctcagagcaccaacttccctcagttcaaacctgaggaaataactgccatcaataatgactntaatgagcct

SEQ ID NO: 265804 - DNA, 347 bp, Glycine max
  unsure (1)..(347): unsure at all n locations
tcgaaattggcggaacagacaagattgaagggggagcgtgtgaacaaccttgatctttcaaagggccccattgaaacaaggtcaagggataaatttgggttccaggaagagaacaaatttgattctcttaacttaagcatgttgaacctggactctaaatttactgagaatgtgagcaaaagctcgcttcgaaatggtgtntatggtatgaaagcagtgtatcagaaaaacaatgcanactnggtgagtaatgtgatcagtaacaagtacaatggtaaatatcttcataacaaagagatcaacaacaacaccaacantgaaaagcacaacacanatgcaaccgacaa

SEQ ID NO: 265805 - DNA, 201 bp, Glycine max
ctcggcagccattgccatgttctttcacggctcaagtgagaagaagagggaaagggaaagtggtaatgagcatggaggcaggcattggagtgatgggcaccaagttgggtatgatgagctatttcgaatccgacggagaggttgttcctgtcactgtcgtgggtttcaaagaaggcaacatcgtcacccagatcaaaactg

SEQ ID NO: 265806 - DNA, 130 bp, Glycine max
cttgtttgcaaggcacagaagcaagaggatattgatgtcagcccaatctctcgccggttagctctaaccgtgctcattggtgctgctgctgttggctccaaaagccaacctgctgatccagcttatgggg

SEQ ID NO: 265807 - DNA, 205 bp, Glycine max
gtacccattttatgataaactttccttccatttttgttcctctagtaggcctagtatttccggcaattgcaatggcttctttatttctttatgttcaaaaaaacaagattttttagatacagaaaacaaagtaaaattctggggttttttattccccaattataatactaaattaaaaaaaagaagagtaatgagtataatcttt

SEQ ID NO: 265808 - DNA, 321 bp, Glycine max
  unsure (1)..(321): unsure at all n locations
gggctgntgaagatctgnttgaccgtgtttctgcaagggagaaatttgtttatgaaattgaaactacagatatgaaccgcaatcatatgggagaaactcgatannnnnnnnggatgggaaggcttgttcttcaatgaagaataatgaggcaaattggtctagtttttctgtaacctcaatccctaactgtggggaaggatgtgtttggagagcagatataataataagctttggagtgtggtgtatcaaacgtgttctggacctctccctaatggagagccgaccagagctgtgggggaagtacacttatgtactcaatcg

SEQ ID NO: 265809 - DNA, 371 bp, Glycine max
  unsure (1)..(371): unsure at all n locations
nntcccttcnncacaccatagggcatcgaaaggatctcgaagacccaccaacgcacgagggccgggatctttcagaaaatggattcctattcgaagggtgcataaccgnnngataagctcacactaacccgtcaatttgggatccaattcggttccttaggaggtatcgggaaggaattttggaatgtaataatatcgattcatacagatacagaagaaagggttctctattgattcaaacgctctacctacgagatagggatagagaaagaggaaaaaaccgaggatttcacatagtacttttggtcgaaaaatcgatctgatttttttcgtacttttcgctcaatgatgaaatgggtcagattctacag

SEQ ID NO: 265810 - DNA, 352 bp, Glycine max
gaattctctaaaagagatctttttctgctctttgaagaaagaagggtctttgcttgattgtggagatgtctctgctctcagatctcatcaaccttaacctctccgataccacgagaaggtgatcgcagagtacatatggatcggtggatcaggaatggacctgaggagcaaagcaaggactctcccaggaccagttagcgacccttcagagcttcccaagtggaactatgatggttccagcacaggtcaagctcctggtgaagacagtgaagtgattttatacccacaagccattttcagggatccaattcaaaagggtaacaatatcttggtatctgtgatgcctacactc

SEQ ID NO: 265811 - DNA, 348 bp, Glycine max
  unsure (1)..(348): unsure at all n locations
aatggagctcatcaaaatccaaacctcattagtggcatagctccaaatggccttaactttcacaacaagtgtttattccaaaagggtgtgctgtctcatggtaacaagttaagggtggtcagaaaaaacttcactcccaaaggcagcatgtcagcatcatcatcatcatcatctangcctgggtctcagccaaagttcatccagcacaagaaggaagcattttggttctacaggtttctctctattgtgtatgaccacatcataaacccggggcactggaccgaagacatgagagacgaggcactggagcctgctgatctctacaaccgcaacctgagagtggtggat

SEQ ID NO: 265812 - DNA, 239 bp, Glycine max
aaaaaaaaaaaaaaaaaaaaaaaaaaaaaatttaaaaacaacaaaaaaaaaaaaaaacaaagaggcatacacaaacatacaccatacccaactctaaaatacaatcaccttactccacttcacttccctcacattcacaacttcctacctaatctatccatcacattacccatctaaaccttcaaataacacatctctcttcctccatcctacatcatatcaaatactcccttatcaaa

SEQ ID NO: 265813 - DNA, 402 bp, Glycine max
tctacgtgttctccattccctctctcactcctccatctacgtttcttaaatcatttccttgtttctctctttctttatcttctcattttcctcattacactcttttttttctctcaacttttctcttattaaccatagttcacatattatatcatcacatatcatagtgatatattatatcatatcacaatgtgtggcatacttgctgtgcttggttgctctgattcatctcaagccaaaagggttcgcgtccttgagctttctcgcagattgaagcaccgtggtcctgactggagtgggctccaccaatatggtgataactatttggctcatcaaagggttaccctaagtggacccagcttctggtgatcaacccctcttcaatgaagacaaaactgtcgt

SEQ ID NO: 265814 - DNA, 292 bp, Glycine max
  unsure (1)..(292): unsure at all n locations
gcagtctcttgctcacttggatcaatcactgaagtctcttggatccagacttgtgctcatggaaacccacagtactgtcacggctctcgtggagtgcgtaaaggccattcaagcaacaaaagtagtgtttaaccatctgtatgatccggtttcacttgtccgtgatcacaacatcaaagaaaaactagtggaacaaggcatatcagtccaaagctacaatggagatctgttgtatgagccatgggaagtatatagcgagagtggacgtgcctttactacctntaatgccttt

SEQ ID NO: 265815 - DNA, 456 bp, Glycine max
tgacttttcattttgccatctccacgattttcggcaccttctccaccgccgctgcacccagagtgcgccttcgtcaatagcctttaccgctccagcttcagtttgttgattgaagacaacaacttccagcgaagcagcgtaagtgttagtaaaagattttatttttctctctctctcttccttctaaacgccgcttccgcatctctcttccttttctaactatagattttatttttccctctgattcttcctcttcctcttcctcttcctcttcctctccaccctccacatagcttccaccctctcaacccccaccaacttcatcaagtcctcctgcagcaccacccagtacccagccctctgcatccagtccctctccgtctacgccttcaccatccagcaagacccccacgagctcgtccagacagccctctccctctccctcaaccacaccga

SEQ ID NO: 265816 - DNA, 460 bp, Glycine max
gggggaagcaaagggaaaggaagaagaagtgttagcctcagttcactcaaccgtgttcaaagaatcagaaagccttgatggaaagtgtgttaagattgagggctatgatttcaaccgcggcgtcaattatccgttgctactcagctccatggtcacaactgggtttcaagcttccaacctcggtgatgccatccaagtcgttaatcaaatgctagattggaggctagttgatgaacccgtagctgaggattgcagtgaccaagagagggatttggagtaccgaaaatctgtgacgtgtaaagtgtttctgggtttcacttctaatcttatttcttctggtgttagagatactgtgaggtttcttcttcagcatcgcatggttgatgtagttgttacaactacaggtggcattgaagaagatcttataaagtgcctggcaccaacatataaaggagatttc

SEQ ID NO: 265817 - DNA, 451 bp, Glycine max
cccacgcgtccggtgtacttgtgttaattgtgttgttgttgtaggaaatttaagtgaagagagaatgatgatgaagtctgctatgtgtgcattggtgcttgtggcactggttgtggttgaagtggggcccatggctgaggctgcggtgacttgcaacccaacacagttgactccttgtcttccggcaattaattcaggttctgcaccttcgagtgcttgttgccagaagctgaaggagcaaaagccatgcttctgtggctacctcaaaaaccctagcttgaagcagtatgttaactctcctaatgccaaaaaaaccgttagttcttgtggtattgccaatccaacttgttaagcacctcttatatatatatttaaaaggtgtgaacattatttttatattgattaaaaattttagttaaattattttccccatttggatcttataaaacca

SEQ ID NO: 265818 - DNA, 373 bp, Glycine max
ctgcaacttcttaaccgctgcagtctccactcctgctaatagtttagcacactctttgttgttactgtggggtcctgaagcacagggagattttacccgttggtgtcaattaggtggtctgtggacttttgttgctctccacggcgctttcgcattaataggtttcatgttacgtcaatttgaacttgctcgatctgttcaattgcggccttataatgcaatcgcattctctggtccaattgctgtttttgtttctgtattccttatttatccactgggtcagtctggttggttctttgcttctagttttggtgtagcaactatatttcgattcatcctctttttccaagggtttcataattggacattaaac

SEQ ID NO: 265819 - DNA, 368 bp, Glycine max
  unsure (1)..(368): unsure at all n locations
gcgccgcaataataatactaaaacatgtccaactctgatggagccactaacgccgtccctgccaacgacgccaacaacaacacaatcgttgagtaccagcagcgaaccaccaccaccaccaccgccgccgccgccgccctcgccgtcaagaaaccgccttccaaggaccgccacagcaaggtcgacggccgcgggcgccgcattcgcatgccgatcatctgcgccgcccgcgtcttccagctcacgcgcgagctcggccacaagtccgacggccagaccatcgagtggctcctccgccaggcggaaccctccatcatcgccgctaccggctccggcaccactccggcgagcttctncactgtctccga

SEQ ID NO: 265820 - DNA, 183 bp, Glycine max
cttagtcgtaagtatttataggagtgcttattcaaatggttgtaaagtagttaggactatagaaaactcaagtttaatataagaattcatattttgatccaaaaaaagatccaaaaaaaaaaaaaaaaaaaaaaaaaaaaaaaaaaaaaaaaaaaaaaaaaaaaaaaaaaaaaacagcaaact

SEQ ID NO: 265821 - DNA, 411 bp, Glycine max
caaaaacatattttgctagaattgaacatgaacaagatgactggtcttgctcttggtggagtggtggcggctattttaatggttctacagtacgcagaggcacagacaagttacgttgttggagatggcacgggttggagagttccacaagatgcttccacataccaaaattgggcttctgacaagaatttcacagttggagatactctatcattcattttccagacagggttgcataacgtaattgaagtgtcggaagagtcatacaattcgtgcagttcagcgaatcctataggtacaacctacaacacgggccctgccaacgttacactgaacagaggtggtgaacattactacatttgtagcttttgtaatcactgcaacaatggcagaaggtaggcatcactgtct

SEQ ID NO: 265822 - DNA, 352 bp, Glycine max
cccacgcgtccgagctgttgcaaatttctactatttttcaatggcttctgcagatgttgaggtccgttgctttgttggtgggcttgcttgggtcaccggcaacgatgccctcgagaaagccttttcaatctacggcgacatcgttgaatcgaaggttatcaacgaccgtgagactggaaggtccagaggattcggatttgtgaccttcgcctcagagcagtcaatgaaagatgcgatcgcaggaatgaacggccaggaccttgacagccgtaacatcactgtcaacgaagctcagacccgcgccagcccgtgtggtagtggaaggcggggtttccgaagtggtggtggatac

SEQ ID NO: 265823 - DNA, 312 bp, Glycine max
gaccgacgcgtccggagatatatgatccgtctttagaccctaatttatctggagatccatacaagacactgttagttgcatttcttagggatgagaggactgatcaccgactcaaaagggagtttgaagcatatgggccaataaaacggttaaggatgattactgataaggagactaataaaccaagaggatatgccttcatagaatactttcatacactatacatgaaatctgcatacaagcaatctgattgacggaaaatggatatttaaatatttctttgagatatctacccgtgtcataactgttcct

SEQ ID NO: 265824 - DNA, 317 bp, Glycine max
aaaggacatatgcagggatggcggtatatttaagaagataattactgagggggagaaatgggagaaccctaaggatcctgatgaagtattggttaagtatgaagttcatctagaaaatggaaagcttttagcaaagtctgatggggaggagttcacagtcagagagggtcattattgtcctgcattgtcaaaggctgttaaaaccatgaagaagggagagaaagtgcttttgacagttaagccacaatatggatttggtgagaaggggaagccagaacaaggggatgaaggtgcagttccaccaaatgcaacaatgc

SEQ ID NO: 265825 - DNA, 450 bp, Glycine max
  unsure (1)..(450): unsure at all n locations
ctcaactttactcctcttcaatcagttgcatattctttgctattccaatggccactgttgaggttgtgtcagccaaggttgccctcccagaggacacaaaagaggcatcattgaaggttgacgaggagaagaacacagaagaagttgttgagactccaacaccagaaactgtagtcactgagcaaaccaaggaggaaagtactgaggccccacgacctgcagcttcagaagacaagccctcggttgaagttcagactaaagaggtggcagaggaagttgtgtctgagaccgtcacacangagccaacagttgagatacatgaagctgctgagggaacaaangaaaatgccgatcctgctgagattaagacaccagaagcttcagaagatgttaatgttaaggaagagaaggaagctgaggctgaagctaaggaggaggaggcccccgcag

SEQ ID NO: 265826 - DNA, 405 bp, Glycine max
  unsure (1)..(405): unsure at all n locations
gatggatcggatgctaagaccgggaggacgagtgtatatacgcgacaccacacttgttataggtgagcttcaagaaattgcaactgcattgggatggtcaactaccataaatgatgtaggagagggtccctattcaagctggaagatattaaggtctgataaacggttctgaattgctcaattgcgtcagtaacttatagaacaccatatatggtactcccaactgaaatctcattttgtgccagaaatgttggccaaaactaacccataatttgccagaaacggtagtcttaattacaatngtgaatcccaactaacaggtttttctctaaacactttanagaaactggctttnaatcaatctctacagaattaactggatatggttagatgaatttttttttt

SEQ ID NO: 265827 - DNA, 327 bp, Glycine max
caagattctcacaaacaactcttgagaaagaaagaatggctgccaacacattgatgagttgtgccatctcagccttcccatctctcctttcctcctcaaaatccagatttgccgcagcagttcctctttccagctttgttgtcaccaatgcctcttcttctcgcttttccatgagtgctgattggatgcctggccagcctagacccccctaccttgatggttcagcacctggtgactttggattcgaccctcttcgtcttggtgaagtaccagagaatcttgagaggttcaaagagtcagaactcattcactgcagatgggccatgc

SEQ ID NO: 265828 - DNA, 405 bp, Glycine max
cccacgcgtccggtccagttcaccctttggaaccatatcacatcccggatatgatgaaatgggatgaattgagacggtattttgtaagtacataattatcttgaataaattcactatttctttattttccgatcgcctggaaagaacaagatgtttcttttgttctttcttcaacaatttctgatctctagtagacctctcagtaggattcgaactcagatgaagttctgaccatctgtcagagaaaaaagaacgagtagctctgtatcaatggaatctcatcatccatccataacgaattggtgtggtatattcaaatcataccatatgaccagtaaaaactagtattttaattgaaactagacctcatagggaggaaattggattaatgattggattaaattt

SEQ ID NO: 265829 - DNA, 322 bp, Glycine max
tctcaagcaaccatggcaatggcaacccaagcccttctcttaaccccacccctctccggtggcaaagccagcgaccgcgcctccgtgccatggaagcaaaactccagcctctccttctccagcccgaagcccctcaagttctccagaacaatcagagcagcagccgccgacgagaccacagaggcaccagcaaaagtagaggctgcaccggtcgggttcaccccaccagaacttgacccaaacaccccttccccgatcttcgggggcagcaccggcgggctcctgcgcaaggcacaggtggaggagttttatgtcattacgt

SEQ ID NO: 265830 - DNA, 301 bp, Glycine max
cggacgcgtgggaaacacggggcactggtttcgaaccctcgttgtggttaggtcttcttcagctttcgaattttggaatgcatgggtcagggaactccgggcggcatgaaccggcagggcgaccggaagccggacggcggcgacaagaaggagaagaagttcgagccgtcggctccgccggcgcgcgtggggcggaaacagcggaagcagaaaggtccggaggcggcggcgcggttggcgacagtgactccggtgacgaagtgcaaactgcggtttctgaagctggagcggatcaaggact

SEQ ID NO: 265831 - DNA, 437 bp, Glycine max
ggttgcttggcggggataagattaaagattcaacaatggcctctgcttctgctactcttgtcaagtcatctcctgttcttgacaagtgcgagtgggtcaaaggccagacccttcgccaacctctcggagatgtaacccttcctcagcatcagctctcaccatcaaagctgcttcctatgctgacgagctcgtcaaaaccgccaaaacagtggcctcaccggggcgtggtattttggcgatggatgagtcaaatgcaacctgcgggaagcgtttggcatctattgggttagagaacacagaaactaatcggcaggcataccgtcccctacttgtgacagtacctggtcttggtgaatacatctctggtgccattctctttgaggaaactctctaccaatccactgtcgatggaaggaagatcgtcgacgtacttgttg

SEQ ID NO: 265832 - DNA, 443 bp, Glycine max
gagagagagagagagagaaggctctttttttcttttttgttggtttctcttgtttttttggttgggtaggtactgaggaagaaagaccaaaactttatccgcttgcttcacttagctcaagagcgacaattcaggcaaaggccttgaagtcggagtgtgtgttaaggatttcttaggagttgcttctgtcttgactgaagaaatggaggtatatggcaaatctatggttgcaggtcctgcaaatgttatttttctgtcaagtattttgggccaagaaggtccagttcccggtcacaaatgcgactggaaatgtcaaaatgaacatgtttgtggaaacatgtatcgctgcaagctaactgggctgactcacatctgtgataaaaactgtaaccagagaattctgtatgacaaccatagctccctttgtcgagctagtggtcaaa

SEQ ID NO: 265833 - DNA, 334 bp, Glycine max
tcttcctctttttctcaacaaaaatgtgttcaattctagctagttctattacgtgggccgggaccattaacatggcgagcgcgcttctgttcatggttttcgcagtttcatcaactttagcatgtcaataatatcacacgacaacgctcatgcggatagggccactaggcgcaccgacgaggaggtgatgtcaatgttcgaggagtggctggtgaaacacgacaaggtgtacaacgcgctcggtgagaaggagaagaagtttcaaatcttcaagcacaatctgcccattatcgatgaacgaaactctcttaaccgaacctacaagttgggactc

SEQ ID NO: 265834 - DNA, 317 bp, Glycine max
acccacgcgtccgctcgttcttcttcggcgttatcttcttcttttgttgtttgtgtgttggcgttttctctcacctgaaaatgtcttgctgcggtggtaactgtggttgcggaagcgcctgcaatgcggcaacggctgcggaggctgcaagatgtacccagacttgagctacaccgagtcaaccaccaccgagaccttggtcatgggagtggcaccagttaaggctcaattcgagagtgctgaaatgggtgttcccgctgagaacgatggctgcaaatgtggagctaactgcacctgcaacccctgcacttgcaagt

SEQ ID NO: 265835 - DNA, 444 bp, Glycine max
gcagagagagagatagagacaatgctcttttctatttaattcccctctccaaatttcaaccgcgcgcggctctccttaacagcatcatcacatgcacccgcgattcctactatcccttcccatggtctttatctcaagcctcgccgtaccttctagaaccttccctcagatctcaattccccttccgctttctcctttcatggaaatggcttccactccccgcaccgtcgaagagatcttcaaggactacaccgcccgcagaaccgccatcgttcgcgctctctctcaagatgtggatgaattctacggactctgcgatccagataaggagaacttgtgcctctatggacatccgaatgaaacatgggaggtgactttgccggcagaggaagttcctccggagcttccggagcctgcactcggaatcaattttgctagggatgg

SEQ ID NO: 265836 - DNA, 400 bp, Glycine max
  unsure (1)..(400): unsure at all n locations
gggcgagccgcgcgtccganttcattcatttttatttcttttcttttctttttatttattattattatttttttgcgcgccgccatggtctttcttgctcttctctgcttcctttccctgacaatctcattttcacttcctttcatctctgagacccaaaagctgcttcttctgcttctcatttccccaaaaccattcactctcttgattcatcaaaaagctgttttatttcccttttctcctggcttctgattcagattcagttcacctcttttttttcttcattttttttcgcttttgttaattttcttggtgtcattgtgtttgcaaagagaattttatgtgtaccattgatttaaacgtttcacctttgaaattgaattcttgtggcgtgtgtgta

SEQ ID NO: 265837 - DNA, 434 bp, Glycine max
  unsure (1)..(434): unsure at all n locations
cgcccacgcgtncncccacgcgtncgancgaagattttttgtcgtggaaagggaggcaagggttccgcagttttattagccaagaggcacacgaatctgcttcttgacaacatccagggtatcaccaaaccgcaattcggcgtttggctcgcataggtggtgttaaaagaatcagtggtctcatctacgaggagacacgtggcgtcctcaagatattcctctagaacgttattcgcgacgctgttacctacaccgagcacgctataagaaagaccgctaccgctatggatgttgtttatgctctcaaaaggcaaggcaggactctctaccgtttcggtggttaatttctacggtttccatcggcgtaacaactgcttattggttattgttgtaaatggttgctttttacgcttcttgctatatttgcttcaatt

SEQ ID NO: 265838 - DNA, 399 bp, Glycine max
  unsure (1)..(399): unsure at all n locations
cggcgattgggattaaaaatgaactnatgcttatatctgaacttcagcacacgaatcttgtacagcgactgggattctgcattcatgaagaaaaaagaattctaatttacgagtatatgccaaacaaaagctggatttctatctgttcgattgcactagaagcatgttactagactggaagaagcgcttcaacataatagaaaggatttctcaaggaatactctatcttcataagtactcaagactaaaaatcattcacagagacttgaaagctagtaacatactacttgatgagaatatgaacccaaaaatttctgattttggattggcaagaatgtttatgcaacaagagttcacaggaactactagtatgattgttgggacatatgggtacatgtc

SEQ ID NO: 265839 - DNA, 230 bp, Glycine max
cgggcgagactatctttatataataatataaataagattttaaaaataaaaaaaaaaaaaagaatctatggaaatataaaaataggatatatggaggtacaaatagtaaatcgaggtacccattttatgataaacttccttccattttttgttcctttagtacgcctaatattttccgcatttgctatgggcttctctttttctttatgttcaaaaaaaaccaaattttt

SEQ ID NO: 265840 - DNA, 448 bp, Glycine max
  unsure (1)..(448): unsure at all n locations
cgtgcgcccacgcgtncgataaaaacactcaaaagaggataaaaaaagaagaaaagaatggtaacaataggtggtggtgtgagtctttcaagccctancanggtatttgctaatgctaagggaatagactcagccaaaaggcccaggccgtgaggtttccagctctgtcgaggcccattcaaaagtggcctggtttggtgaagacccggcccgttcgggcgacgccggagaagatatcggagaacgtagaggagagcataaagagcgcggaggaggcgtgctcgggaagcggtggtgacgcggaatgcgcggcagtctgtgacgaggtggaggaactgagcgcggcggcgagccacgccagggagaagcagaagcagtctgacccgctcgaaaattactgcaaggacaatccagagactgatgagtgccgcacctatgataattgatg

SEQ ID NO: 265841 - DNA, 418 bp, Glycine max
  unsure (1)..(418): unsure at all n locations
cggcgacaagctcccngaggccaccttctcctacctgtactcgtccggcgaggtgcatactacgacgcggtctgtactgacgaaggggaagaaggctgtgctgttcgcggtccccggcgctttcaccccacgtgctcgcagaaacacgtgccgggcttcttggagaaatcaggggagctgagggcgaaggggatcgacacaatcgcatgcattttggtcaacgacgccttcttcatgaatgcatggaaggaggacctcaaggtcaacgaggaagtcctcctgttatctgacggtaacggaacctttaccaaagccattggggtcgaactttatctcaccgacaagcccgttggtttgggcgttaggtctatgcgttacacgcttttggcccatgatggggttgtcaagctcttcaatt

SEQ ID NO: 265842 - DNA, 374 bp, Glycine max
  unsure (1)..(374): unsure at all n locations
tatactccaaatgcactttatacaaagcatttttganagagaatctgttgaggcanggacgcagaattgttggaatcattggagaccaatggancgatctgcttggagaccacagaggcgaagcaggacctttaagcttcctaatcccatgtactacattgagtagtaccttcacctctctcaacaatctagctagagtttgctcctatctatatgtaataaggtatgctgatatgcactattcaaataggagcattagctatgtttgttaatgtcactttatgttatgtgggtaagtcacctaagacactccacgtacctacgttgttgtctcttaccggctttaataaatcttctgcccttgttccatattt

SEQ ID NO: 265843 - DNA, 229 bp, Glycine max
  unsure (1)..(229): unsure at all n locations
tttttttttttttattttttttttntnaacactaaatttaaaaatacccgccttttttttaacagcgggggcgctttttttttttttttttttttttttataattttttttttttttaaaaaaaaaaatctctcctataaataaataaaaaaaacatttaatagctttttattttaatataaataacacctattaattttataaaaaaatattttcaaaattttataat

SEQ ID NO: 265844 - DNA, 400 bp, Glycine max
  unsure (1)..(400): unsure at all n locations
ttatatttaattttctagtccagntaatctcaacttgggacggcgtgcttaccgaactgaggaaggaaaacctcttgttttgaatgtantgaggcgagttgaaagcaactcataaatgacgtgtcacgcaacaaggaatatattccgatcgttgggcttgctgattttaataaattgagtgctaagcttatttttggggctgacagccctgctattcaagacaacagggttaccactgttcaatgcttgtctggaactggttctttaagagttgggggtgaatttttggctaaacactatcaccaacggactatatacttgccaacaccaacttggggcaatcacccgaaggttttcaacttagcaggcttgtctgtcaaaacatacccctactatgctc

SEQ ID NO: 265845 - DNA, 449 bp, Glycine max
  unsure (1)..(449): unsure at all n locations
gaannnccgggncgagcggggcgtacgaacacgcatccgatgaaaatgaacgtccttgttttcttctatgctacaattttggtagcatggcggtgccttgcgtacgagatgggccatcttctaatgaacactgactatggtgcccgtactcaaatgtgaaatgcacatgttggaggcttgctgtagaagcacacaacatctttggctttgagaccattcctgaagagtgcgttcaagcaacaaaggaatacatccatcgcgaacaatatatatcaaacttcaaaacactttaccaacaagcttacttttatgccagttacctcgaagtccatcccaaggacacatttgtgttcagtgtagatggcactcgactctctaatattccatactacaaaaaacatggatatggggtggagaaatttaacttaaccttgtatgatgaatgggtt

SEQ ID NO: 265846 - DNA, 293 bp, Glycine max
ctcttactcttcttcttgccgcagatattcatacgggagacgaagatttttaccatgctgtttggccaaacactcccattccacttcattgccaaatcttttaaaacctctccctacaactgttcatatcaatgatcaccctatgcaaaaccataaaacacagcacccaaaaaccttcttctataaataatacctttatccagacctaactttcaacgtacaattcaacaagccttcctttcaacatccatttcgacatcctacatggtttaaggcaatttaaaacactacta

SEQ ID NO: 265847 - DNA, 439 bp, Glycine max
tggagaagcgccttcgtgaccgggggacagagactgaggaacagatcctgaagcgactacgaagggctgatgctgagattgagcaagggaaatcttctcaaatatttgatttcatcctatacaatgacatcttgaggagtgtcatgagagacttaagaaactattgggacttgacggttttgtcactgctccacctatatcaggccctatagagattgatttaccaatggatcattcagtgtcaaaaattgataacaaaatcatcataaactgcatctcctcaggagagaaggaatcaaagaatttggtcattttggatgtttcctcactaaaagggggtgcacctggacggacaagaggcctaaatttccaagccattggctctttctcaaatggtttgaatgggatagatcaacttagctaacattcaatgcacttg

SEQ ID NO: 265848 - DNA, 327 bp, Glycine max
  unsure (1)..(327): unsure at all n locations
atggcttcaaatcaaaaatacgcgacgcgcttttttaaactactggaagcccaattttttncaatattcatatttccctcaaattgaaacagttcaatacaaatatgtccaataaaatttgatgaacaagagttaactgcttctcaaatccaacccatttcacaagaaggttccaatttttatttacaattaaaatcccataacataatctcttgttattcttgaatacatttattaaacatttaataacaaccctatcttacctttttatccttaccaaaaaacctttactcgattctcttccaaattcattcattataatttttt

SEQ ID NO: 265849 - DNA, 314 bp, Glycine max
cgtccgccaccaccagagtggtgttggtgaagtctcaggccacagcacctgcttcttctgaggctgtggcggcgacacctgtgtcttctgagatgaaggcatgggtctatggggaatatgggggtgtggatgttctaagctggactccaatgttactgtgcctgatgtgaaggaagatcaggttctaatcaaagttgttgctgctgctcttaaccctgttgatgccaagaggaggcagggaaagtttaaggccactgtttctccctttccgactgttccgggttacaatgtaccggttgtggtggaaaaggttg

SEQ ID NO: 265850 - DNA, 361 bp, Glycine max
cccacgcgtcctgcacggtttctataccgttattcaacaggtcacctggatactattacggacgcttctttaccatgtggaagctgcctattttttactgcactgattcttttcacatgttaaagacctttaataagctaagactgcataccccaatggcttcattccttataattggatttgacaacgtttcccaagtgcagtgcatcaccttaatcgcctacaagcccccatgcttttaattcattaaaaaatttgaaaagcatctttatccaccccactttgttggttgcacttaaactacattcccatttgtttttcctttataaaatttaataatcctgtatttttgctttcattt

SEQ ID NO: 265851 - DNA, 420 bp, Glycine max
  unsure (1)..(420): unsure at all n locations
cgccacgcgtccgaaactacactctccacacacacacacacactcaccggcgtatcgttcacacgnagccgatccaaaccccactctctctctctccgccgcaaacgacccttctccggggcggcgccacctacaacccccgatttaactaaaggagcaacagaaggagctgcttggttacaaatggcggccaccgcaagcaacaatgacgtcgccgccgccaacgacggtcccgtgatgagccttatcaacaagcgcctccgcgctctccgcaagaagctgaaccgcatcctcgccatggaagaggccgtcaccttgggcaagcccttgaacaaggagcaggaagaggttctacgctccaaaccctccgtcctcgccctcatcgatgagctcgataagctccggcaacctttcgccacc

SEQ ID NO: 265852 - DNA, 356 bp, Glycine max
accactcgtcaaccggtgcgcggtgcaccccatgtgctgcctccattcacgtggcgctcacaggccatgcgctggcgttgcccaccagaagagaccacacaatgacacttacactgcattcgctagcaacgagcggaagaacagcacatgcatcgcaggtgtcggccacccagctggcatagaagaagtttgagacgtctttcctacctcgccagaccttgatgatgcacaattggcaaaagaagtacaataccttcttaggaagggatggattccttgcttggaacacgaaccagaccacggtttcgtctaccgtgggcacaacatggcaccaggatactaccatggacgctgct

SEQ ID NO: 265853 - DNA, 443 bp, Glycine max
cgtaaccaggctctggttttgcggttagggtagctctttctactcaaaacaaaacaaaacatcaatttctgtttcagttcgcggagatcaatatttgtcgctgaggtcgatcgtcgataaaaggcaatgtttttgtgggattggttttatgggattctagcgtcgcttggcctgtggcagaaggaggccaagatcttattcttgggcctcgataacgctggcaaaaccaccttgcttcacatgctcaaagatgagagattagtccagcatcagcctacccaatatcctacatcagaagagttgagtattgggaagatcaagtttaaagcttttgatctcgggggtcatcagattgctcgaagaagttggaaagattactatgcccaggtggatgcaagggtgtacttggttgatgcttatgacaaggaaagatttgctgagtc

SEQ ID NO: 265854 - DNA, 389 bp, Glycine max
  unsure (1)..(389): unsure at all n locations
ggactttttgctgaccctgagggaatgggtttaagagctcttgcaaagtcccaggtggatgagatacttacaccggctgcttgcaccattgtttcatctctcagaaatgatcatgtcgactcctatgttctgtctgagtccagtctctttgtttatgcctacaagatcatcatcaaaacctgtggtactacaaagctactgcttgcaatcccacccatattgaaatttgctgaaatgctttccctcaatgttagatctgtgaattacaccaggggaagtttcatctttcccggtgctcagccctatccccatcgcaacttttctgaggaagttgctattcttgatggctactttggcaagctagtgcangaagcaatgcttatattttg

SEQ ID NO: 265855 - DNA, 89 bp, Glycine max
gggtaagtcacctaagacactccacgtacctacgttgttgtctcttaccggctttaataagtcttctggccttgttccatatttaaaaa

SEQ ID NO: 265856 - DNA, 431 bp, Glycine max
gttgatcgagataactagaaacagtgtgatgaaaatgaaggtccttgttttcttcgttgctacaattttggtagcatggcaatgccatgcgtacgatatgttccctctccgaatgaacactggctatggtgcccgtactccggaggtgaaatgcgcaagttggaggcttgctgtggaagcacacaacatctttggctttgagaccattcctgaagagtgcgttgaagcaacaaaggaatacatccatggcgaacaatatagatcagactccaaaacagttaaccaacaagcttacttttatgccagagacctcgaagtccatcccaaggacacatttgtgttcagtatagatggcaccgtactctctaatattccatactacaaaaaaacatgatatggggtggagaaattaactcgacctgtatgatgaa

SEQ ID NO: 265857 - DNA, 356 bp, Glycine max
cccacgcgtacgattaccttctacaacatgccaaacgacagcgttctgagactggggttggtcggtaccctctccacatgccttctatctgctacttcccaccatgaccatattttcctaccgagtcaactccatgaccatgactcaccgaggtgcactgcaaccgacccaagccttaactacaagccggtgatcggaatcctgacccaccccggcgactgtgcctgtggccgactcagcaacgccacccgggtttcttacatcgacgactactacgagaaattcgtggagtccggtggagctagagctattccccttatctacaacgagccacctgagaaccttaacaagaagct

SEQ ID NO: 265858 - DNA, 415 bp, Glycine max
  unsure (1)..(415): unsure at all n locations
gcttccaagagtcacagtgaagctgaaaggagacgcagggagagaatcaataaccatcttgctaagctgcgcagcttgttgcctagcacaaccaaaacagataaagcatcattgctagcagaagtgatccagcatgtgaaggagctgaagcgtcaaacctctctgatagcagaaacgagtccggttccaacagaagctgatgagttaacagtagtggacgaagctgatgaagatggaaactcagtgatcaaagcctctttgtgctgcgaagataggtcagatctgttccctgaactcatcaagaccttgaaagcgttgaggctaagaacgcttaaggctgagataacaacgcttggtgggcgcgtcaagaacgtatngttcatcactggagaagaaacagactcatcaagcagtg

SEQ ID NO: 265859 - DNA, 382 bp, Glycine max
cccacgcgtacgggctaaagagaaacccactcacacacacacacacagaaatatgtgttcgccaagcaagcgccgagagatggacttgatgaaactgatgatgagtgattacaaggtcgagatgattaatgatggaatgcaagaattttatgtgcaattccatggacccaatgacagtccttatcatggtggtgtgtggaaagtaagagttgagttgccggatgcttatccttacaaatctccttccattggatttatcaacaagatctatcacccgaatgttgatgagatgtcaggatcagtttgtctggatgttatcaatcaaacctggagccccatgttcgatcttgttaatgtgtttgaggtgtttctacctcaactt

SEQ ID NO: 265860 - DNA, 397 bp, Glycine max
aaaaaaaaaaaaaaaaaaaaaaaaaaaaaattaaaaaaaataaaaaaaaaaaaaaaaaaaaagaaaaaaagaaaaaaaaaaaaaaaaaaaaagaaaaaaaaaaaaaaaaaaaaaaaaaaaaaaaaaaaaaaaaaaaaaaaaaaaaaggggcgccctttttaaaggacccaattttacttccccttccttccaacttaatactttttttttagggccccctaatttaaattcattgcccgccttttaaaaacttcgaaattggaaaacccttggctttccccaatttaatccctttgcaaaaaatccccttttccccacttggcttaataccaaaaagccccgccccaatcgcctttccaaacagttgcccaccctaaattgcaattggaacccccct

SEQ ID NO: 265861 - DNA, 473 bp, Glycine max
cccacgcgtccgcccacgcgtccgcccacgcgtccgcccacgcgtccgcccacgcgtccgcgcacgcgtgcgagaggagtgaagcagcagagggaggagcggcattaaaaatgcagatcttcgtgaaaaccctaacggggaagaccataaccctcgaggtcgaaagcagcgacaccattgacaatgtcaaggctaagattcaagacaaggaaggcatccctccggatcagcagcgtttgattttcgccggaaagcaacttgaagatggaaggaccttggccgattacaacatccagaaggaatcaacccttcaccttgtcctcaggcttcgtggtggcatcatcgagccttccctcatggctttggctcgcaaatacaaccaggacaagatgatttgccgcaaatgctatgctcgtctgcaccctatggctgtgaactgccgtaagaagaagtgcggtcatagtaaccagttg

SEQ ID NO: 265862 - DNA, 417 bp, Glycine max
cccacgcgtccggaaaagttggtagcgaaagaaagatgtcgatcttcgagtacaacgggagggccctagtggctatggtggggaagaactgcttcgccatcgcgagcgatcggagactcggggttcagctccagaccattgccaccgatttccagaggatttcaaaaatccacgacaagctcttcatcggtctctccggcctcgccaccgacgcccagaccctgtaccagcgcctccttttccgccacaaattgtatcagctccgcgaagagagggacatgaagccccaaacctttgccagcctagtctccgctattctctacgagaaaaggtttggtccatacttttgccagcctgtaattgctggactaggagatgatgacaaaccattcatttgcacaatggatgccattggag

SEQ ID NO: 265863 - DNA, 406 bp, Glycine max
attgatgcaatttttgggactattcggcccgtgagtgttccaaggaagagtgccatttatgtgtgggggtacaatcaatcagggcagacaggtagaaaggggaaagaggatcagttgaggattcccaaacagcttcctcctgagctgtttggatgtccggctggcaccaatgcgtgttggttggatgttgcctgtggtcgggagcacacggctgcgatagcctctgatggctcactcttcacttggggggctaatgactttggtcaattgggtgatggaactgaagagcgaaggaaacatccagaaaaagtaaagcaattagagtcagagtttgtaaaatctgtatcctgtggagcacattgctctgcttgcattgctgaaccctctgaaaatgatggttccatct

SEQ ID NO: 265864 - DNA, 433 bp, Glycine max
  unsure (1)..(433): unsure at all n locations
agaaaatgcaggtgaagtggtgtcagctcaacatgaacaggcgaaccaacaagcagatgtggagtataatgagcgagatgtagaggcaaaggaccagcagtcataccccaggaggggttatcagaaccatagaggtggtcgtggtggaggtggtcgcaggggttactcaaatggtcgtggaggtcgaagtggtggcagaggaggctaccaaaacgggcgcaatcaatactacgatcagcctggaaattattatccaaggaacaactattataacaacagaggaaggggcggcagaggtggtggctattacaacaaccatggtgcaggcggtcaagttaatcatgtcgcangtgatgtggnggtgcaatcatgataagttatgagttgtttatagtggttattactgtcactagtttgtggggaaaccattttt

SEQ ID NO: 265865 - DNA, 273 bp, Glycine max
acgataaagttgatttcagtttagtttttaaatttaaaaaaaaaaaaaaaaaaaaaaaaaaaaaaaaaaaataaaaaaaaaagaagggaaaaaaaaaaaaaaaaaaaaaaaaaaaaaaaaaaaaaaaaaaaaaaaaaaaaaaaaaaaaaaggggcgccccttttaaaaaacccaattttacttccccttccttccaacttaataatttttttatatggccccctaaattaaattcactgccctccttttaaaaactttgtaactggaaaaccc

SEQ ID NO: 265866 - DNA, 370 bp, Glycine max
gtccgacacggaaaccacgcccgaacaacctttcactccgtcgcaaacggaagctccgcggcagcccggccccttcgccggcgtctccttcagcatatggccccccactcagcgcacccgcgacgccgtcgtcaaacgcttgatcgagaccctcttcggcccctccgtcctcttcaagcgctacggcactctctccttcgacgaagccttcgtcggcgtccgacagatcgaggacgaggccttctgcgccgtcaccgcagactccgcttcggccgccgccgacggcattgagaccctccaagtctactccaaggagatcagcaagcggatgctcgacaccgtcaaggccagagcttcgtcgagtcccgcc

SEQ ID NO: 265867 - DNA, 391 bp, Glycine max
gttccaagctagtgatctgggtctgcttgttgaaaacacctcagtggagcagcttggttgggctaggaaaattaccatctccaaggattctaccactgtcattgctgatgctgcgacaaaggatgagttgcaagccagggttgctcagttaaagaaggagctgtctcagacagactcagtatatgatactgagaaactggctgagaggatagctaaactgtctggtggagttgcagtcatcaaggttggtgctgctacagagactgagcttgaggatcggaagctccgaatagaggatgccaagaatgcaacttttgctgccattgaggaaggtattgtacctgggggtggcactgcactggttcatctctccactcatgtcccagcaatc

SEQ ID NO: 265868 - DNA, 440 bp, Glycine max
  unsure (1)..(440): unsure at all n locations
cccacgcgtccgatttgaccgtggttatatttctccatactttgttactgacagtgagaaaatgggcgttgaatatgagaactgtaagttgctgttagttgacaaaaagataaccaatgcaagggatcttatcaacatactggaggatgctattagaagtggataccctatattaattattgctgaggatattgaacaagaagctttagcaactcttgtggtgaacaaacttagaggatcactgaaaattgcagcactcaaggcccctgggtttggagatcgcaagagccagtaccttgatgatattgccatcttgactggaggtactgtaatcagagaagaggttggccttactttggacaaagctgggaaagaggttctcggatatgcctncaaggtgtttctcaccaatgatacaaccacaattgttggtgatggaa

SEQ ID NO: 265869 - DNA, 373 bp, Glycine max
  unsure (1)..(373): unsure at all n locations
cccacgcgtccgcccacgcgtccggcatccctcttgatttgtagtttgttttgtgctttagataaaagttctgccaaatcaagaggggttttaagatcatagtgtgtgttttgcaacaatggctaagttctttgctgctatgatcttggcactctttgccatttccatacttcaaacagtggtaatggctgctaatgaacaaggaggccacttgtatgacaacaagagcaaatatggaagtggaagtgtcaagagttaccaatgcccatcacaatgctcgaggagatgtagccagacccaataccacaagccctgcatgtttttctgtcagaagtgctgcaagaaatgcctgtgtgtgcccccggngtattat

SEQ ID NO: 265870 - DNA, 475 bp, Glycine max
aaaccatttaggctctcttaaaacaaaggtccctcaaaccactttccccacactctttagggtgtcatgtttttttttgctctttccccacaaagaggtcttggacccttcttctgtgtagtgcaatggccatggctaaggttttctgtgttctgcttctggcactccttggcatttccatgatcacaactcaggttatggcaacagattctgcttatcacttggatggaaggaattatggacctgggagtctcaagagctcacagtgcccttctgaatgcacaagaagatgtatccagacacagtaccacaagccctgcatggtcttctgcaaacaatgctgcaaaaggtgcctttgtgttcctcctggctactatgggaacaagtctgtgtgcccctgctacaataactggaagacaagcgtggaggacccaaatgcccctgaaaattgaaaatttaagcataatttcaccta

SEQ ID NO: 265871 - DNA, 421 bp, Glycine max
aatttctctttctctctttttttgtgtgttcaaaatggctcctagttctactcacaacaagtggttcgatgtgcttatgctagttgggatagtggttagcgctatggttgctatttgtgctgctagcttctaccaagactttgatccaacatgggttggtgaccgtgctaagatattcaatggtggccagcttctatcactttccctagacaaagtctccggctctggcttcaaatcaaagaaagaatacctatttgggaagattgatatgcagctcaagctcattgccggcaactctgctggcacagtcactgcttactacgtgcgacaatcccttgtggatggcgtatagacccagaatcgatgccgctgtagccccagtgaataaagacagcgggggcgacattccttgtgtgggctc

SEQ ID NO: 265872 - DNA, 413 bp, Glycine max
ctctctctctcgttcgtgttcttcgtcgcaaattcaaaggaggatctctcttgcgttttcgctaggttttcgctatggcgtcgaagcgaattttgaaggagcttaaggatttgcagaaggatcctccaacatcttgcagtgccggtcctgttgttgctgaagatatgttccattggcaagctacaattatgggtcctccagacagtccctatgcaggaggtgttttcctagtgaccattcatttccctccagattatccctttaagccacccaaggttgcattcaggacaaaggttttccacccaaatataaatagcaatggaagcatttgccttgatatattgaaggagcagtggagccctgctctaaccatttccaaagtgttgctctcaatttgttccctattgacggat

SEQ ID NO: 265873 - DNA, 413 bp, Glycine max
caatcatatagcattctaagaaatgaagagccctaccattttcattctctttctactttgtgccttctgcacctcactcctaccttcagccaccgctcaagtcgtggttgacatggaaggtaatgatcttcaaaatggtgggaaatattatgtgttgccagtaatagagtcatcatatggtggaataagagtagccgcaactggaaaagaaagatgccctctcactgttgtacaatctgccgatccgtatgataaggggattgcaacaattatttcaaccccatatcgagttcctgttatccgcgaaggctttcctttgaacattacgttcggtaattttgcagttatactgccttgtgtcccccttcgttctgagtggaccgtcgttaatggccaaccagaaggacccgcag

SEQ ID NO: 265874 - DNA, 371 bp, Glycine max
caataacctatttttcaagcctgacatggaatcttttctaccaaaggtatatgatacatatatcttaaatacatttaatcaatcttaaacacttatgaattgttacttatattcttctcacacataatatatctatttcttacaatattttttttaatattcaaacctttcttcattttgtctttaataatcttttcttaccatactttatcccattttattttaatctatcctaataatatattttactcttttaattattaaatctatttctataaatatttctttatatttcaaatatattacttcttcttagtttataataatttatataataaaacattctaatacattttattactttattaatt

SEQ ID NO: 265875 - DNA, 317 bp, Glycine max
ctcaggcgtgcgctattggctggtttatcgtgaggcgtatatgcagagggatggcaccttggtcacggcacccagcgtgttatcaggtccattccttcgaacaagctaccaaaagctgcttccttcgaatgaatactcactatggtgagacagcaatactagggataatgcggacgctttttgctctatatgactgcacactacatctgatcctgtaaaaccataggtaaagagcgcgttgtaccaacacagtacttagctaataggagacaattcatatcatgcgctactacaattaagccacaagctttctttta

SEQ ID NO: 265876 - DNA, 444 bp, Glycine max
gttgatcgagataactagaaacagtgtgatgaaaatgaaggtccttgttttcttcgttgctacaattttggtagcatggcaatgccatgcgtacgatatgttccctctccgaatgaacactggctatggtgcccgtactccggaggtgaaatgcgcaagttggaggcttgctgtggaagcacacaacatctttggctttgagaccattcctgaagagtgcgttgaagcaacaaaggaatacatccatggcgaacaatatagatcagactccaaaacagttaaccaacaagcttacttttatgccagagacctcgaagtccatcccaaggacacatttgtgttcagtatagatggcaccgtactctctaatattccatactacaaaaaacatggatatggggtggagaaatttaactcgaccctgtatgatgaatggggtaacaa

SEQ ID NO: 265877 - DNA, 397 bp, Glycine max
gtgcaccgtaagggttgtgaagcaggcagagaagagccatggtgcacgtttctttctaccgaaacgatgggaaaacgttcaagaagcctcgtcgtccctacgagaaggagcgtttggacgccgagttgaagctggtcggtgagtacgggcttcgctgcaagagggagttatggagggtccagtacgccctgagccgcatccgtaacaacgccagaaacctattgacccttgatgagaagaaccctcgccgtatcttcgagggtgaagcccttctccgaagaatgttccgttacggactcctcgacgagacacagaacaagctggattatgtgttggctctcaccgtcgagaactttttcgaacgccgcctccaaaccctcgtcttcaagtctggcat

SEQ ID NO: 265878 - DNA, 361 bp, Glycine max
gggcgaagagaagaagatggaggttagtttatcctcaacatcatgtatacccttaagctgggagttgaagcataagcatggccttttccactctcaaattcccattcccacagcttcaaccaaaaccagaagaacaaaacctttgtccatagttaacgcctccagacaaacctttgtcctccaactggctcgtttctccacacgatttttctgcatccaccgcttccccatggcttcccagattcgaagagctcgacgccaccaacatgcttctccgtcaaagaattatttttttgggttctcaggtggatgatatgactgcagattttatcattagtcagcttttgtttttggatgctga

SEQ ID NO: 265879 - DNA, 401 bp, Glycine max
cccacgcgtccgaaaacagcagagagaagagaaggtgtagacaaacacaatctctaatggcgctcaggatgtgggcttcttccactgccaatgcactcaaagtctcttctacctccagacctcatctcttgcatcctttttctttctccagatgcttgtcttccgtcttggatggacttaagtatgcagattcacacgaatgggtcaagcacgaaggctcagtcgccaccattggtatcactgaccatgcccaggaccatcttggagaggttgtgtatgtggagctgccagaatcaggtggcacagttacccagaagtctggcttcggagccgttgaaagtgttaaagcaacaagtgacataaactctccaatctcgggggaaattgttgaggttaacaaa

SEQ ID NO: 265880 - DNA, 374 bp, Glycine max
cccacgcgtccgcccacgcgtccgctcagtagtgtcatttacgcttctcttctctgcagggactatgcctaaccctaaggtcttcttcgacatgaccatcggcggtcaatctgctggccgcatcgtgatggagctctacgccgacgtcactccccgcaccgccgagaacttccgcgcgctttgcaccggcgagaagggcgtagggcggagcggcaagcccctccactacaagggctcgtccttccaccgcgtgatcccgagtttcatgtgtcagggtggcgacttcaccgccggaaacggaaccggcggcgagtcgatttatggcgccaagttcgccgacgagaacttcgtgaagaagcacaccggtccccgca

SEQ ID NO: 265881 - DNA, 389 bp, Glycine max
gccaaacccaaatccaccgctctttattttcgtcttttctacccttcccggatcccaatcgctaatcggtctaccactctcactccaaaaatctctaattttttcatctgggaagatcggttgacgaatcgaggatccgatcgcttgcgaggaactagggtttcaatcgatcgcatcacacacaaacaatcatgtttagccggatgttcggtaaacctaaacaggaaaccaatgctgttgccactttggacaagctaaacgagacacttgaaatgctggagaaaaaggagaaagtgctccttaaaaaggtggcagcggaagttgaaaaggccaaagaattcacaagggggaagaacaaaagggcggcaatacaatgtctgaagaggaag

SEQ ID NO: 265882 - DNA, 237 bp, Glycine max
acgatacattctggcgtatgcccgaatgctacattcacggtttttccatccagtaccttatgggtcctctggaacttattgacagagtccaggaagaaacaaagagccatactgatcgcaaaccccttgttgtgggactgtcgaacattacagaagtatcctatgatgcgtcctggttgaccttaaccaaaatgaattgttacctgccttaattaatgtgtacctaaagtacaagga

SEQ ID NO: 265883 - DNA, 415 bp, Glycine max
gatgaacccatcatcatcaatgcctattgctccacttactgccttgcaccctttctcaagggcctggaccacaaattcggcatgatcaacggtaccatcaccaccactcactcctacaccggtgaccaaaggctttttgatgcgatccaccgtgacctgaggcatgcaagggcaccaacactcaacattgtacccacttcaacatgagcaacaaaggcagagtgccttgttctaccaaccctcaaacgcacactcaatggcattgcactacgtgtgccaacaccgaacgtctcaatggtggacctagtcgatcaggtctcacagaagacctttgcagaaataattgaatgcatcattcagagagagtgcagacattgagctaaagggaatcctctctgagtgagatgagccactt

SEQ ID NO: 265884 - DNA, 345 bp, Glycine max
aggagatgagcgagcgtgatgtgccggtgtccgattctggtagtggagttcctaaaagtgcatccggaagccgagtttggaagaaattcttcacagattactcattttttgaagcctgagacttttcaaggggttgtaaaagccataaacgagaggattctttctgttttggatgagaatggttcaggcaggctggatctgggaatgttttttgctattcttgctcctatttgtggcggtcctccggatagactcaaaagggttgcctttgatgcacttttgtggcgtcctatgaacgaagatggtgctaatattaggaaatttgatgtcactttatacatcaag

SEQ ID NO: 265885 - DNA, 336 bp, Glycine max
  unsure (1)..(336): unsure at all n locations
gttttgaatcttttgagcgaaaatgcagtcgagtcctttgcttctggaggaacccataaggatggcctccatcctcgagccatccaagcctagtttctttccagcgatgacaaagattgttggcacacttggcccaaagtcacgatcggttgacgtgatttcccaatgtcttgaggcaggaatgtctgtggcaaggtttgatttttcatggggtgatcctgaataccaccaagagacgttggaaaatttaagggctgctatcaaaagtaccaagaanacttgtgcggtatgctgataccgtggtcagacntacagtgcacaaactgacaccaattc

SEQ ID NO: 265886 - DNA, 285 bp, Glycine max
gtactcttatgctcggtggattatataatagtcattatcggttaaattcttctaaaaaaaaaaaaaagaaaaaaaaaaaaaaaaaaaaaaaaaaaaaaaaaaaaaaaaaaaaaaaaaaaaaaaaaaaaaaaaaaaaaaaaaaaaaaaaaaaaaaaaaaaaaaaaaaaaaaaaaaaaaaaaaaaaagccaacaatttaaaagtaccaaaacttaaaaaacccgttaatttaaaccaaaaaaacttttataatagtaaccccaaaataaaaacaattgcccaatttt

SEQ ID NO: 265887 - DNA, 460 bp, Glycine max
tgtgactgaaaaaaggttttagatcgtaaaaactaatcactacgaaaacaagagatatcggagatggcgctgcccaaagctaaggagatcgtgtcgtccaattccgtcgtcgttttcagcaaaacctattgccctttctgcgtcgatgtgaagaagctcttcggtgacctcggtgccaattacaaggccatcgaactcgacactgaatccgatggaaaagagctccaagcagcattagttgagtggacggaccagcgaaccgtgcctaatgtgtttattggtggaaaccacattggtggctgtgactcaacaactgccctgcacactcaggggaagctggttcctctgctgatatctgctggagctgttgccaaatcaactgcttaaaggatctcccatttctaggttatgcagttaaataaaaattaaaacccaagtagttgggtcggttatataattc

SEQ ID NO: 265888 - DNA, 392 bp, Glycine max
gaccactcgtccgaccacgcgtccggcagctcgagcttgtgctagaacaacttcatttctagctatgaagctgactttacttttctgcttgtgtcgtgggtgatattcatccgattcatttgcagcctctaaattgaacccgggcttggagacattgtaaactttagtttcattagattgatgaagtgtttgtgacgaggaatttgagcatgcaggtgtggccaccagttggcaagaagaagtttgagactctatcctacctgccagaccttgatgatgcacaattggcacatgaagtacaataccttcttaagaagggatggattccttgctaggaattctagtttgagcacggtttcgtgtaccgtgagcacaacaggtcaccaggatac

SEQ ID NO: 265889 - DNA, 277 bp, Glycine max
  unsure (1)..(277): unsure at all n locations
cccacgcgttcgcccacgcgtccgcttaagtttcggatcaggtctgagcaatctggttgggagaacctttggtcttagagagtcaagttttatgtctgaattagacgatcaaattcctactgccttcgatccttttgctgatgcaaatgctgatgactcgggtgctgggtcaaaggagtatgtgcatattcgcgtacagcagcgaaatggaaggaaaagcctgacaaccgttcagggattgaanaaagaattcagctattacaagatacttaaagat

SEQ ID NO: 265890 - DNA, 315 bp, Glycine max
acagcatcaccagtgttggagggatcgttgaccaaggcttaggcttcataggcagtgcaggcgatgcacttacttttgcagccaccaaaatctccatccagttgattagtgctaccaaggttgatggtgggaaaggaaaaattggaaagagtacaaatttaagaggaaagataacattaccaaccttgggagctggcgaacaagcatacgatgttaattttgaatgggacagtgacttcggaattcccggtgcattttatattaagaacttcatgcaaaatgagttctacctcaagtctctaattctcgaagaca

SEQ ID NO: 265891 - DNA, 280 bp, Glycine max
gccgcgctgtcaaatggaaaagaggagttagagaatggcaacgatcatggcggctcacgtggcgttcctggaggtgccaccggaggttacttcaccagcctcttgaacaacctatttcctgacctattcactggacagagcatggacgataggagggacgatcatagagatcacaatcataggaacatacttggaagattacgcggagccataagtcgccgcttaactgaacggtaaaacttcagatgaatctgttcacaccctacactactacatggat

SEQ ID NO: 265892 - DNA, 321 bp, Glycine max
  unsure (1)..(321): unsure at all n locations
cccacgcgtccgaccattgtgggttcttacaatgtcactcctaatcaaccaactgcaaaggatccttcatggctatccgatagtgaccaaatcggtgtcctaggtcatgtagccattgtctacatatacgaagcaaatcccaacagcaacaccattgagagattgaggaactctcttagcaagcttttggtgtactactatccattcgctggcagattcagcttgacaaaaagtggtcgcatagaagtggattgtaacgcaaagggagtgacattgattgaagctaaaacctcacacacactngatgattatggagacttt

SEQ ID NO: 265893 - DNA, 296 bp, Glycine max
acgcccacgcgtccggagaataacagatagagatccatccatcaattccaatggccgggcagcggtcctacttacagatcggcgagttcaaagaagccttcaccctcttctacaaggacggggatggttgtcttaccaccaacgaacttgggaccgtgatgcggtcacttggccagaacccaactgatgcagatctgcaagacatgataaatgaggttgatgctgatggcaatagtaccattgatttcccagaattcctgcatctcatggctcgcatgatgaaatacactgattca

SEQ ID NO: 265894 - DNA, 208 bp, Glycine max
accgtcttgaatgacccacccgtgcgccaaaaccctagcggcgcctgctttcttcgttcgtcttttgcatcagccatcaggatggagtctcaggggaagcatgctcttgttgtcaaagttatgggtcgtactggatccagaggacaggtgactcaggttagagtgaagtttttggatgatcagaaccgtcatatcatgaggaaatgtt

SEQ ID NO: 265895 - DNA, 152 bp, Glycine max
ctcactctctgtgtttgctgctgatgattttgaacgagttaccttcttcgtttctaccagagtttaaggaaacattggtaaggaaaggggtcacatcaacattgtcgtcattggacaatgtcactctgggaagtcaactaccactgttcact

SEQ ID NO: 265896 - DNA, 416 bp, Glycine max
ctcatatgtctgtctacaaatcctactttctttatactcttcgctgctcactgttgacatggctgacatagtaggaggagcggtaagaggaaatgcatgttagggcatggctgttgctgagcatagcgtgaacaccttcctggattgttagtacgaaagttcatcgctatgtgattttaaaagacgatgataaaccgacagaggtcatcattcaagaaactaaactcgctgctgaaagctatgatgacttgaatgcatcgttccctgaaaatgattgccgatacgctgtctttgactatgagaaagggacatgagaaatctgcctagaaaagaaaattttttatagaataaggttttttttaggggcccgtattcccctttaaaagctatttgccatatttagggaccggtttaaa

SEQ ID NO: 265897 - DNA, 246 bp, Glycine max
tgagctctgcgagatcttgaatcgccgatttgaaaagatgagttagcttcaaagtgatgctgggggtgaagccatctcaagaatcatggccgattccaaggagaagaatcgcaaatttggggagaccatcgaactgccaatcggtttgaagaactactatccacagaacgacaagcggttcattggcttcggcaagctggcccacattccttggcccaagaagaaaatttgcatgcttggtgatgc

SEQ ID NO: 265898 - DNA, 388 bp, Glycine max
cagaacttttgaagtaacaaaaaaggtctgggcagaggttttcttataccttgctgagaacggtgacctttttgagggtattcttattaagcctagcatggttacacctggaactgagtgcaaggacaaagccagtcctcaaacagttgctaattacaccctcaagctccttgacaggataattgcccctgctgtacctggaattatgattatgtctggtagacagtctgaggttgaagctaccctcaacttgaatgccatgaaccaatctccaaacccgtagcacgtgtcgttctcgtatgccagaaccctgcaaaacacttgctttgaaacatggggagggccgccaaaaaaacgtgaaggcggaacaagatgccctctttttccg

SEQ ID NO: 265899 - DNA, 309 bp, Glycine max
ataaaagccattatatgtttggtattgtttggatcaattgaactgctttacatctcggcttctatctgcaaagttcctgaaggaggatggatcccccttgtgctatcttttatctttatgagtataatgttcacttggaactatggaacaatgaagaaacatgaatttgatgtggagaacaaggtttcaatgagcaagatactatccttgggaccttgcttaggcatggtccgtgtcccgggaataggggtcattttcagcaatctggcttcaggtgttccagctatttttggccattttgttacaaac

SEQ ID NO: 265900 - DNA, 447 bp, Glycine max
cttaaacttaatgacttgcctggagcaatgaagctatgttcacaggtgcttgatgttgaagggtgcaatgcgaaagcttattacagacgagcacaagcatatatagaaactggagattatctattagcagatgtagacatcaagaaagctcatgtggtggacccacaaatcagagatgttaaggtaattcaaaagacatggaagcatcttgaagctgacagtgacaaagtagatgctagactatatgaaaacatgcttggatgtgaaacagacgacccatctatggctataaagagattgaacgtcgagaacgatgaggcggataatgtagaggttgcatgaatggaaattgacgaacttgctgatagcgcaatgattcaatagatgattcatggtgaacatgtatagagtataatataaagcttctattaacaaaatactgaaact

SEQ ID NO: 265901 - DNA, 351 bp, Glycine max
cccacgcgtacgctttgtctgatcagtttgaggctaagcgtgcaaagaacaaggctagcagggaaaggaaacttgctcggagggaggagcgcttatcccaaggtcctattgacaagacatctactgcacccagtgccccagctgccacatcaccctagtctacccatgcgccaaagaaatccaagaagtgagtagcatatcctggaattcaaaggacgtggagtctttaatagctctggcaaaatctttagtctgctaaagtagttgtgacgaatctcttttcgatggtttagactttgtacggtttggatgtataagaacttcatatcttgcatatcgtaaattatatat

SEQ ID NO: 265902 - DNA, 327 bp, Glycine max
gaaaaataaagcgttccatagcctcccataaaaatgaagaatactatcttctctgctctctggctactttgtgccttcaccacctcatacctaccttcaaccaccgcggtggtcgataccaacggtgatattcttcagaatcctggcacatactttatcttgtccgtttttcgacccggcggcggagtataattcgccgccactggaaacgaaacttgccctctcactgttgtgcagactctcttcgggaggggatttccacgaatcttatcggcccacgtacgaattcctatcatcggcgaacgacaactttcagcatctgttcga

SEQ ID NO: 265903 - DNA, 328 bp, Glycine max
gtgaaaataactataaatacgatctttcttattggaataccgtctgaaaactgaaaagtagaggcgaaagactttaggtttggaattgggaattagggttgttcgcgtcacgaagatgatcgaggtggtgttgaacgatcgattggggaagaaggtgcgcgtgaagtgcaacgacgatgacaccatcggcgacctgaagaagctggtggcggctcagacgggcacaagagccgacaagatccgcatccagaagtggtacaccatatacaaggatcacatcactctcaaggattacgagatccacgacggcatgggtctcgaactctac

SEQ ID NO: 265904 - DNA, 331 bp, Glycine max
aaagcactgacttcaaaaacttaagttcattccttgcgtcatgctttcttactcaaaaccaagcatgtcgaacacatgcagcaactgcgactgcgctgacaagactagctgcaccaagggaaacagctatggggttatcgcagagactgagaagagttacatcgagactgatgtcatggacgttccagcagctgagcatgatgggaagtgcaagtgtggcactaactgcacttgcacggactgcacctgtggtcattaaagaatatgtatgaaaatgtaattgccatgtgtttggcactacaaatatgcaaatgatgtaaactgcgtatga

SEQ ID NO: 265905 - DNA, 321 bp, Glycine max
gcgaggcatctggtgttattggtgagggatctatagttgcagagcctgttgcaactgcccctgctgcagacacaaaggctggttttgctgacgatgaccatgatgatgatggggatttgttcggggaagagacagaagaagagaagaaggcagcagaagaacgggcagctgcagcgaaggcatctacgaaagaaaaagagtctgggaaatcatctggtctggtggatgtgaaaccatgggacgatgaaactgacatgaaaaagcctcgagaatcagtgagatctgttcagatggaagggttgctttggggtgcattcaaac

SEQ ID NO: 265906 - DNA, 454 bp, Glycine max
gcagtatgggaatcaaggtttgaggtttatgagaggtgtggctggaaccgcgaaatagctcgtggagcagttcgaaagtttcccagtattgtgaagttgtcagaggaagtgtttataaaaaaaatgagtttcctagtgaaggatatgggttgttcatcagaagatattgctgaatatcctcaagttgtaacgtacaacttggagaagaggattatccctagattctcgataatcaaaatgttgaaatcaaaaggtctgctcaagaaaaatttgcacttcagtgccattatttgcataaccgaggcaaattttttggagaaatttgtcatcaattttcagaaagatttgcctttcttgccagattactacaacagtttggcaaatcaacagaatgtattataagctttgaaggcttttgctggtgattgccctaacttccagcttttctctttca

SEQ ID NO: 265907 - DNA, 237 bp, Glycine max
tgcatacctatgttcttctttttaaaatttaaagtctttgtattttgtatgtaaagatgtgggatggtgattattaggtggtgcatgtgtcgcgtcatgggccaatgttatcctctgcttttaagttggaagaggcccaactcatgtgtgatgtacggctgtgattgtgtaatttaatttgcaaaatcataaataacaccagagtcatatatatgcatctctttattttctctggcc

SEQ ID NO: 265908 - DNA, 355 bp, Glycine max
cccacgcgtccggcgagacgagccgtttctaattaatgataggtgtcaagtggaagtgcagtgatgtatgcagctgaggcatcctaacagaccggaagactccagaggaaattcgcaagacctttaacattaagaatgacttcacccctgaggaggaagaggaagttcgtcgggaaaaccaatgggcatttgaatgattttgttaatctcaaaaaatctgaatcaaagatctgccatgtggatttatgctatgcttgtttgtttatcaaagatctctcttgtagatttgcctatgctatataccttgttgttttatattcaagactatttccgttgactggtgtcactacaacta

SEQ ID NO: 265909 - DNA, 334 bp, Glycine max
cccacgcgttcgcccacgcgtccgcccacgcgtccggatcgagataactagaaacagtgtgatgaaaatgaaggtccttgttttcttcgttgctacaattttggtagcatggcaatgccatgcgtacgatatgttccctcttcgaatgaacactggctatggtgcccgtactccggaggtgaaatgcgcaagttggaagcttgctgtggaagcacacaacatctttggctttgagaccatttctgaagagtgcgttgaaacaacaaaggaatacattcattgcgaacaatattgatcagacttcaaaacagttaaccaacaagcttacttttat

SEQ ID NO: 265910 - DNA, 396 bp, Glycine max
cccacgcgtccggcctgctgtcatattcaacaacgagaaggcttgggatgaccagtggatctgtgtgggttggacccttcatcggtgctgctcttgctgcattctaccaccagtccgtgttgagggcccaagcagcaaaggctctagggtctttcacgagctcctcaaacctgtaattctggccaagctatttgagctacgagagacatgcttcattgaattgtgttcttaattaatttgcttatacatggtggattggaataatctgtatatcctcgtcactatgtttatttaatttatgtttactatatttgtggtgacgtccatctgaacagacatgtgcatgttaattagtgtatgtatttgtaagtgttacgtacatgtgcgttagtatcc

SEQ ID NO: 265911 - DNA, 447 bp, Glycine max
  unsure (1)..(447): unsure at all n locations
gtttgttgtgagctataagctagtttatcgtgaggagaatatgaagttgtttgttttctttgttgctgcagtagttttggtagcatggccatgccatggcgcaggctaccaaaggttccctctccgaatgaaaactggctatggtgagcgttcttcggaggtaaaatgcgcaagttttaggcttgctgtggaagcacacaacatccgagcctttaaaaccattcctgaagagtgcgttgaaccaacaaaggactacattaatggcgaacaatttagatcagactctaaaacagttaaccaacaagctttcttttatgctagtgaacgcgaagtccatcacaacgacatatttatattcggcatagataacaccgtactctctaatatcccatactatgaaaaacatggatatggggtggagggacttaantgaaccttatatgatga

SEQ ID NO: 265912 - DNA, 459 bp, Glycine max
gaagtccatcccaaggacacatttgtgttcagtatagatggcaccgtactctctaatattccgatactacaaaaaacatggatatggggtggagaaatttaactcgaccttgtatgatgaatgggttaacaagggcaatgcaccggcactgcccgagactcttaagaattacaacaagctggtgtctcttggcttcaagattatattcttgtcaggaagaacactggacaaacaggccgtaacagaagcaaacttaaagaaggctggctaccacacatgggaaaaattaattctcaaggatccacaagatccttccactccaaatgcagtttcatacaaaacagcagcgagagagaaactgataaggcagggatacaacattgttgggatcattggagaccaatggagcgatctcctcggaggccacagaggcgaaagcaggacctttaagcttcctaa

SEQ ID NO: 265913 - DNA, 459 bp, Glycine max
atcgagataactagaaacagtgtgatgaaaatgaaggtccttgttttcttcgttgctacaatgttggtagcatggcaatgccatgcgtacgatatgttccctctccgaatgaacactggctatggtgcccgtactccggaggtgaaatgcgcaagttggaggcttgctgtggaagcacacaacatctttggctttgagaccattcctgaagagtgcgttgaagcaacaaaggaatacatccatggcgaacaatatagatcagactccaaaacagttaaccaacaagcttacttttatgccagagacctcgaagtccatcccaaggacacatttgtgttcagtatagatggcaccgtactctctaatattccatactacaaaaaacatggatatggggtggagaaatttaactcgaccttgtatgatgaatgggttaacaagggcaatgcaccggcactg

SEQ ID NO: 265914 - DNA, 424 bp, Glycine max
cccacgcgtccgggagctatggcagttgaggttgtgggatttgagatggttcaagggccagtggagaatggtgctaaagaagacatatctatttcagaaaaaactgaaaatgggaaattggaacaagacacaggagttgctgagccaacaaaatttgggtcacatggagatgaatctgctaaaccagaagcaaatgttgtttcagatgccaatgtccccaaagatgcagttgacgattggcctgcgccaaggcagatacattctttttattttgctaggttccggccttatgatgatcccaacattaaagcaaaacttgagaagtatgataaagagattagccaggaaaatccagcacgaattcaggtcactgatgctttaaaggcaaaaaggacagaaccaacaagggggatttcttaaaata

SEQ ID NO: 265915 - DNA, 387 bp, Glycine max
  unsure (1)..(387): unsure at all n locations
attgactcaaagaattttgcatcacctttgaaccaggtgcatagcagaatatggctgatgcattggagtctgttcatcttttttaatcatgacaatgggagaacacaaataattgatctgttcaatcaggacaagtatctaaatgctatccaaactagtgctacacaccttttgcgatacttggccacagcattcattgttaacaagaggaggaggcctcaattcaaagattttattaaagttattcaacaggagcagcattcctataaggaccccatcactgagtttttggctagagtttatgttaactatgactttgatggggcacataagatgatgagggaatgtgaagaagtcatacttaatgatcccttncttgtaaaagag

SEQ ID NO: 265916 - DNA, 286 bp, Glycine max
tgcgaactaacaagaaggaaatggcttactcaatgatctcctcctcagttgataccaccggaaaccgttccggtgccgtcatggttgctccattcaccggcctcaaatacatggctggcttgcccacgaggaagaccatctatgacattaccttcattgctagcaacggtggaagagtacaatgcatgcaggtgtggccaccaattggcaagaagaagttcgagactctctcctacttgacagatctcgatgatgcccaattggcaaaggaagtcgaataccttct

SEQ ID NO: 265917 - DNA, 399 bp, Glycine max
gaatccacacaaactcagggtagggcagagagagagagagagagagagagagagagagagaatgggagggtgggctatcgcggtgcatggtggcgctggtgtcgaccctaatctcccactcgagcgccaagaagaagcgaaacaacttctcacgcgctgtctcaatcttggaatctctgctctaaattctaatcttcccgccatagatgtcgtcgaacttgtggtgagggaattggaaacggatccgctgttcaattcaggccgtggatctgccctgacagaaaaaggaacggtggggatgggggcttcatcatggatgtcaaacgacatctgcgcgttcggtctacacgtaaaaccactccttgtgttgtatgcaatccgatctactgcttcggcgaa

SEQ ID NO: 265918 - DNA, 465 bp, Glycine max
aaaaaaaaaaaaaaaaaaaaaggaaaaaaaatgaaaaaaaaaaaaaaaaaaattaccaaaaaaggaaaaaaaaaaaaaaaaaaaaaaaaaaaaaaaaaaaaaaaaaaaaaaaaaaaaaaaaaaaaaaaagggcaagtatagggggtgttcgttttttaggttttactttttagaacgtgatctttttttttttttattttttttttattaaattctaatttcattttattgcccgtcattttaaaaaatcttgattggaaaaaccttgttgttttcaaattaattcccttttttgcaatttccttttttgccagttaggttaatagcaaagagctttttacccatttgctttcctaaaattttgaaaagttgaatgcctattggaactgcttttttaacctcggctttaagggtttcgggctttttggttactctaatcgttacctttttatttgcctttgtttt

SEQ ID NO: 265919 - DNA, 395 bp, Glycine max
ctcagaattctctaaaagagatctttttctgctctttgaagaaagaagggtctttgcttgattttggagatgtctctgctctcagatctcatcaaccttaacctctccgataccaccgagaaggtgatcgcagagtacatatggatcggtggatcaggaatggacctgaggagcaaagcaaggactctcccaggaccagttagcgacccttcagagcttcccaagtggaactatgatggttccagcacaggtcaagctcctggtgaagacagtgaagtgattttatacccacaagccattttcagggatccattcagaaggggtaacaatatcttggttatctgtgatgcctacactcctgctggaaaacctattcccactaacaagaagcacgc

SEQ ID NO: 265920 - DNA, 409 bp, Glycine max
attttaaaggataagtacgagaatgatccagaagtttggaagatggagatagagttgaaaaaagtgcgagaggaactagagacgtatcaaaatttctacgaattgggggagagagaagtgctgatggaagagatacaaagcttatgaagccaacttgaattttatgttgactctttattcacatcatcaaggaagcaatatccgttattgtaattgacttactctgctgaaccacagatgtgagcgaccctcactgtcattccagagttgacagaggagacagaagacacagatgaaacttgtgcatcatacaagaatgatactggagcacaatttgaacaagaaagaattaaattgacagatgcagaaagcacgttgattgctctttctgaagaactgaaagctgagc

SEQ ID NO: 265921 - DNA, 369 bp, Glycine max
ggaaatgcgaattctgatggttggtcttgatgctgctggtaagaccactatcctgtacaagctcaagctcggagagatcgttaccacaattcctaccatcgggttcaatgttgagactgtggaatacaagaacattagcttcactgtttgggatgttggtggccaggacaagattcgtcccttgaggaggcactactttcagaacacccagggtcttatttttgttgtagacagcaatgatagggacagagttgttgaggccagagatgagttgcataggatgttgaatgaggatgaactgagagatgcagtattgcttgagtttgccaacaaacaagatcttcctaatgcaatgaatgctgctgagat

SEQ ID NO: 265922 - DNA, 272 bp, Glycine max
cccacgcgtacgcccacgcgtccgacatatctctatatattccctgcatttctgagaatggcgaaggctgcggagaagaagccagcggctgagaagtctccggcgcagaagaagcctaaggcagagcaatagatgccgaatgaaggcggtggcgagaagaagaagaagaggtcgaagaagagcgtggagacctactagagctatatcttgaaggagctgaagcatgtacaccctgacatcgggatttctagcatggccatgggatcatgaca

SEQ ID NO: 265923 - DNA, 391 bp, Glycine max
  unsure (1)..(391): unsure at all n locations
gtgcaatgcatgcaggtgtggccaccagttggcaagaagaagtttgagactctttcctacgtggccagaccttgatgatgcacaattggcaaaggaagtagaatcccttcttaggaagggatggattccttgcttggaattcgagttggagcacggtttcgtgtaccgtgagcacaacaggtcaccaggatactacgatggacgctactggaccatgtggaagctgcctatgtttggttgcactgatgcttctcaggtgttgaaggagcttcaagaggctaagactgcataccccaacggcttcatccgtatcatcggattcgacaacgttcgccaagtgcagtgcatcagcttcatcgnctacaagcccccaggcttcttagtgtgaaaa

SEQ ID NO: 265924 - DNA, 368 bp, Glycine max
gaagaaagaatggcagcttgcactgtctactcaacacaatctctgagcacaaattgctccatgtcaaccccatcaaagacgcaactcagttttttccaccaaaagcaggtagttttctggaggaacagcatgaagggcagctgcagcagcagaagaagctatgtgataacatgtgcagcaggtgactcacagacagtggtgattggcctggctgcagactcagggtgtgggaagagcaccttcatgaggaggctgaccagtgtgtttggaggagcagcagagccaccaaagggtggcaaccctgactccaacactctcatcagtgacaccaccacttgcatatgcctggatgattaccaatctttgga

SEQ ID NO: 265925 - DNA, 432 bp, Glycine max
  unsure (1)..(432): unsure at all n locations
gattcagtgattcctctgttcagagtgatatcaaattgtggcctttcaaggtcattcctggtgctgctgacaagccaatgatcgtggttaactacaagggtgaagagaagcaatttgccgcagaagaaatctcttccatggtgctcatcaagatgcgtgagattgctgaggcttacctaggctccacagtgaagaatgctgttgtcaccgtccctgcttacttcaatgattctcagcgtcaagctaccaaagacgctggtgtcattgctggtctaaatgtgatgcgaattatcaatgagcctactgcagctgccattgcatatggtcttgataagaaagccacgagtgttggtgagaagaatgtgttgatttttgaccttggtggtgggacatttgatgtgtctttactcaccattgangaaggtatctttg

SEQ ID NO: 265926 - DNA, 433 bp, Glycine max
cccacgcgtccgaccacgcgtacgattaaggttaacaggtatgctcagcagacagatgcaggacagttaacaagaacccttctgcttgaacctcgtgcgactgtaaatgttaaaccgaatcttcagattgtggctgatgatgttaagtgctcccatggagctgctataagcgacctggaagaaagtcaactcttatatttccaagctcgcggcattgacatatagactgctagaagagttctggtttttgcttttgggagtgaggcgatagataagtttccttattcttccattaaagacagaatgcgtcgtagattaaaaatttggtgggatccatattcgattgatcataatttaagggtggaccggatttgaacctttttaacttcccggtaccatggttaaccggaatcaccatggaaattggtttccc

SEQ ID NO: 265927 - DNA, 439 bp, Glycine max
atgttggtgaaggtgtacggtccaacctatggagcccccaagagggtgctggtgtgtctgatgtgagaaggaaattgagtttgaaacagtacatattgatctcttcaagggagagaataaggaacctgagttcctaaagctgcagccatttggatcacttcctgttattcaagatggtgattatactctctatgaatctcgtgcaataatcagatactttgcagagaagtataaagaccaagggacagacttgttgggaaagacaatagaagaaaaaggtctagtggaacaatggcttgaagtagaagctcataactttcacccaccactctacaatttggttattaatgttctgtttgccccattaacgggtgctccttctgaccaaaaagtgatagaagagagtgataaaaagattgagaaagtgctggatgtttat

SEQ ID NO: 265928 - DNA, 371 bp, Glycine max
ctgacgcgtgggcatttttcacaccaccaagccaacagaagatgtttctccacattgttggggtccgttcccttctctcatccactgcccatgccactgtccaagacttctgtgtggcagaccttaagggtgcagacaccccttcaggctacccctgcaagccacctgcagatgtaacttcagatgactttgtgtacacaggcttagctgaagctgctgatgtcacaaacataatcaatgctgctgtgaccccagcttttgatgctcaattcccaggtctcaatggccttgacctctctgcagcaagattagaccttggtgctggtggtgttatcccactgcacactcacactggtgccaatgaactactc

SEQ ID NO: 265929 - DNA, 320 bp, Glycine max
accacgcgttcgctcattggttccctttgttccaggggaatgctcgattcagctcttgaatggaagaaccagttgctgaaagaaaactgcaagcccaccgtcgttacttacactattttaatagaagcatctcttttgcagggtgggattgatgaagcaatgaagctcttggatgagatgttggaaattaatcttgaacctgatatgttcacttacaactgcatcataaggcgtatgtgcagagaaggatacgtggatcgtgcgtatcataatattagcagcataagtggcagggctatccccggatgtcatacttaata

SEQ ID NO: 265930 - DNA, 424 bp, Glycine max
caacaaaggagtatcgctctgttgttttcaaagaacctcgtgctgttgaatattggggatgtgcagctcctgagttggagtatggaataatgaacattggcagtcgctcataatagcgaaagccaagcgtctgaattgaatcactacatgctattacttggatacttgcatggacacatacgaggtttcatttgccagcgtggcttggtcacgtaccactacttaagcatgtacttgagaaagatccgatgaatgtacagatgctttaggacatgtacaagcaatggactctcttcatggtcaccctgaacttggacgtaatggcgtttgcttaaggagacctcggaatttgagtcctatttgactaactactaatatcagaatagcttcgttcaaatggggtaaatttaatagctttttacgt

SEQ ID NO: 265931 - DNA, 271 bp, Glycine max
cccacgcgtccgggtgtacaacgcgctcggtgagaaggagaagaggtttcaaatcttcaagcgcaatctgcgcattatcgatgaacgaaactctctgaaccgaacctacaagttgggactcaacgtgttcgctgatctcaccaatgcggagtacagagccatgtacctgcgaaccttggacgagggtccgaggttgggcttggatacgccgtcaagaaaccactacgtgccacgtgttggagataacataccctgatcccgtgattggagg

SEQ ID NO: 265932 - DNA, 379 bp, Glycine max
gtaacttgagccacattccgtccctggtggactcaagaagagtctatcataggacagttgggattatagcttgcaaaaagggttcactagctaacattgcaatggcctcaacctcttatgctctcactatatactcttcttccacccttcttgatggcaaggctccaagacagtcaccagctgctttccctcaatgtgtgagccttcccccttcccctttgcactctcagaaccgttcatggaagaccactgcttattgtcgcaaggttgctcgaaaagttatggcaatggccacaagagaggcaccagctgaagctaccccaactgaggtgccagagattgtcaagactcttcaagaaacttgggacaaaggtgatga

SEQ ID NO: 265933 - DNA, 443 bp, Glycine max
accttgctttacttggaaagctgtgtcctcggattcagcatgttgaattgagtggacttcagggagtaacagatgcagggtttcttccactgctggagagctctgaggctggtctggttaaagttaatctaagtggttgtgtaaatctgacggacagagtagttttgtccatggttaactcacatggatggactctcgaggtgctaagccttgatggttgtaaaagagtcagtgatgctagcttgatggctattgcaagtaagtgcccagtgctcgctgatctcgatgtttccaagtgtgcaatcactgatactggtatcgcagcccttgcccgaagaaaacaagtcaacctggaggtactttctttggcaagttgcgcattggtttcagacaagagcgtgcctgcattgaaaaaattgggcccgtcccttgctggattaaat

SEQ ID NO: 265934 - DNA, 454 bp, Glycine max
agccactctaaagaaaatggcggtgcctctactctcgaagaagatcgtgaagaagagggtgaagaagttcaagaggcctcagagtgacaggaaaatttctgtcaagacaaactggcgcagaccaaagggtatcgattcccgtgttaggagaaagttcaagggatgcactttgatgccaaacattggttatggttcagacaagaagacccgccactatctccctaatggttttaagaaatttgttgttcacaatgtgaaggacttggaactgctcatgatgcacaacaggacttactgtgctgagattgcccacaatatatccacaagaaagaggaaagatatagttgagagagccgcgcagcttgatgttgttgtgacaaacaaaacagccagattacgcagccaggaggatgaatagtctaaatgactaaaaaagtcacttatctgtagtgat

SEQ ID NO: 265935 - DNA, 336 bp, Glycine max
cccacgcgtacgctctgctcgtgcctctagggttatcatatctccatttccatttcctctgtctcaggttccaagaatcttaagctatgggaaagtcttacccaaccgtgagcgctgattaccagaaggccgttgagaaggcgaagaagaagctcataggcttcatcgctgagaagagatgcgctcctctaatgctccgtttggcgtacgctctgctttccatttaactttagatcactgttatgtacgactctgaggatgttgactgtcggtttgacacgttttggtacgtttcgtgagcagatggcactctgctggaacttacgacgtgagctc

SEQ ID NO: 265936 - DNA, 222 bp, Glycine max
gcgctttctgcaaaccgaacatttcatctccaaagggatcaacaggtcgaaggagaaatggggctgacattcacgaagcttttcagccggcttttcgcgaagaaggaaatgcgaattctgatggttggtcttgatgctgctggtaagaccactatcctctacaagctcaagctcggagagatcgttactacaattcctaccattgggttcaatgttgagact

SEQ ID NO: 265937 - DNA, 346 bp, Glycine max
caattttctagggtttatacaattttcgatggcttcttcagatgttgagtaccgttgctttgtcggtgggctcgcttgggccactgacgaccaagctctcgagagagccttctctcagtacggcgaaatcgttgaaacgaagattatcaacgatcgtgagactggaagatccaggggttttggatttgtgaccttcgcctcggagcagtccatgaaagacgccatcgaagggatgaacggccaaaaccttgacggccgtaacatcactgttaacgaagctcagtcccgtggtggcggtggcggcggaggctgtggacgtggtggatattggtcgggtcgcggtggt

SEQ ID NO: 265938 - DNA, 448 bp, Glycine max
  unsure (1)..(448): unsure at all n locations
ggcatcgcttcgaagcctcttcacgtctacgccaaacccacctacgagtgcgcgtggttctgactcgccggaaacaacaaaaaagtttcctccaccgtcggttacaagatcctccccgactggggctacggccacgtctacaccgtcgtcatcgtgaactgcacctttccgggacccttaaacgccgacaactccggcgggaagctcgtcctcttcgcctccacctncggtggcggcgacgccagcttcaacaccactgatagaatcgaagctctcacggaacaacctcgcaccgctcgacacaacctttgttcttcttcgaaagccccaaatacgattaccttgtactttggggtctttcgctctacggggaaccttgaacccgcaaccgcgttgaaggaagtgcgatcggcgtaaccacgtgaaacgttcttcgggacccaaaatc

SEQ ID NO: 265939 - DNA, 458 bp, Glycine max
cccacgcgtccgagacaccgacagacccctttggtatccgggcgccaaagcgcccgaataccgcgatgggagtcttgtcggagactacgggttcgatccgtttgggctagggaagcccgcggagtacctgcagttcgagctggactcgctggaccagaaccttgcgaagaacgtggctggggacatcattggaaccaggaccgagctcgcggacgtgaagtccacgccgtttcagccctacagcgaggtgtttgggctccagaagttccgtgagtgcgaactcatccatggaaggtgggccatgctcgccactctcggagctctcactggtgagtggctcactggtgttacatggcaagacgccggaaaggtggagctagtagaagggtcatcataccttgggcaaccacttgcattctcaatcaccacactgatctggatcgaggtactcgtaattg

SEQ ID NO: 265940 - DNA, 385 bp, Glycine max
atccgtatcatcggatgaagccggtggcgtcttcattcttagcctctcgaagctccttcaacgcctgagaagcaaatggcttcgtcaatgatctctgccccagctggtaccactgtcaaccgtgccggtgccggcatggttgctacattcactggcctcaagttcatggctggttttcgcaccaggaagaccaacagtgtcattacctgcattgctagcaacggcggaagagtgcaatgcatgcaggcgtggccaccagttggcacgaagaagactgagactctttcctacctgccagaccttgatgatgcacaattggcataggaagtataataccttcttaggaagggatggattccttgcttgtaattcgagctggagcacg

SEQ ID NO: 265941 - DNA, 414 bp, Glycine max
gttttcttcagaaaatttgccatcgttgagggaagcgcgagagccttcgttgttcaagatgagagctaagtggaagaagaagcgcatgaggaggttgaagaggaagcgccgaaagatgagacaaagatctaagtaggtgcttgaacaaggagtggagatgatgtgcttttccatctgctaccagcttcatgacattttatgctgtcatggctcttatgatgatcttgaggtctagtggcgaggggagcttccatcttgactttagtttagctttactggtctaaagattgctgttttagtgtgggttaagttatgatattgagagttttgtgttatctaattatgtactggtacgttttgtatactttttggtttatcttaatagcttaaatattagtattttgagacgtgcat

SEQ ID NO: 265942 - DNA, 451 bp, Glycine max
atttcttccttgccactgccagtgtgtcaccaccatggccaccgtcacaacccaagcctccggcgcgattttccggccatgtgcctcgaaatcgaggtttctgaccggctcttccggtaaactcaaccgggaagtgactatgaggccaatggggtgccctccttctgcctctttcaaggttgaagccaagaagggagagtggttacctggcttggcctccccaacttacctcaatggcactcttcctggtgacaatggatttgaccctctgggactagctgaggacccagagaacttgaggtggtacgttcaagccgagcttgtgaatggacgttgggccatgttgggtgttgcaggaatgctacttcctgaggttttcaccaagattggaatcatcaatgcccctcaatggtatgatgcttggaaatcggagtactttgcttcatcgtcg

SEQ ID NO: 265943 - DNA, 191 bp, Glycine max
agcagatctttcaagaatggcacaaattaacaacatggctcaagggatacaaacccttaatcccaattccaatttccataaaccccgatgttcctaatctgttgtttaattgtgcatatgttgtatgtacttgaagtacacttgacaacaagaaagtccaataaatatgatatatgttcgtcctttcttcc

SEQ ID NO: 265944 - DNA, 393 bp, Glycine max
atgatgcgagcgccgcccttgcaacttctgatttgttctctctctgtccctagccttctttgtagtgctactgaccaaggcaaactcaaccaacaccggttctttcaccgtcagcaagacttccccacgccaacaaaaccttatcttccaaggagatgctgctatctcaccctccggggtgttacgactcaccaaggttgacagcatcgacgtgccaacgacgggatccctatgacgtgccctttatgctaccccaatccagatttgggacagtgaaacaagcaaggtagctagctggactacatcggttaaattcaaagttttctcgcccaacaagacggccgacgggctttgcttcttccttgcgccccgtcgggtccaagccccaatcca

SEQ ID NO: 265945 - DNA, 454 bp, Glycine max
cgaagagtgaagaaagatgcttccctcatttctaagcctggtgtcagtgtacagcctctacctgcgacgctgcttcacgggcgcggggctctcatcgcagacgcttagagtggacgacgaatccacgctccacttctgggccccgacaaacccaacggcccagaagccttccctggttctgatccacgggtttgggccggagtccatatggcagtggcgcaaacaggtccaattcttagcccctcacttcaacgtgtacgttccggacctaatattcttcggaggatcgagcaccaagtccagcgaaaggagcgaaacgtttcaggcagcgtcggtggggaagcttttggacaagttggaggttgagaagttccacgtggtggggacgagttatgggggcatggtggcttacaatttggccaagatgttgggtgaagacagggtgcaaaaagtg

SEQ ID NO: 265946 - DNA, 415 bp, Glycine max
gtgacttgagaatggccttgccagtggtcgtcgacgcagagtacctcaaagaggtcgacaaggctcgccgcgatctccgcgcactcatcgctaacaggaactgcgctcctctcatgcttcgattggcctggcacgatgccggaacttacgatgctaagaccaagactggtggacctaacggttcgatccgtaacgaggaagagtattctcacggcgccaacaatggcttgaagaaggctattgatttctgtgaggaagtgaaggaaaaacatcctaaaattacatatgcagatctctaccagcttgcgggtgttgttgcagttgaggttaccgggggtcccacaattgatttcgctcctggtagaagggattcaaaaatatctcctaatgaaagggcggctcctgatgctaaaaa

SEQ ID NO: 265947 - DNA, 333 bp, Glycine max
ccaaaacgcatacacactctcaaaaactctttctccttcttctataaactgtaactgttttggtctctcccagatcttcggcgcagaaaaaggttctcgaatttcatcgcttcctcctttcgcgatgatgctatagtagaagaagaagacaaagagagaaaaaaaaatggacgatagaggtagctcattcatcactgttaggagaattccccacggagaaacctgccattcaaattctgctgaggttgtggtagggtcagccgcatggcttgggcgaggtctgtcttgtgtctgtgtacaaagaagagatagtgatgcttctaacactttcga

SEQ ID NO: 265948 - DNA, 415 bp, Glycine max
  unsure (1)..(415): unsure at all n locations
agaaaagcttacaagaaagctttcaaaaaggaggagattgggaatgtgatgactcttctaattggatcagctgctggtgcaatttcgagtagtgcaacatttccacttgaggtggctcgtaagcatatgcaagctggggctctaaatggaagacaatatgggaacatgcttcatgcacttgtgagtatacttgaaaaggaaggagttggtggcttgtatagaggtttgggaccaagttgcttaaaattggttcctgctgctgggatttctttcatgtgctacgaagcttgcaagaggatacttgttgaaaatgaacaagattaattacaagtggatcactgcatattctttccatgggatatatnggcattgntttgtgtttatgaagagggaaataatttgtcgagctaatttt

SEQ ID NO: 265949 - DNA, 444 bp, Glycine max
caaaaatggcacctgcaacactgtctctgtctctcctcctcctgttctcactcagcatcgccgtaaccgtgagatcgagcgactacgactacgattgtgtgtacactgcatacgttagaaccggttcggtgttgaagggcggaacggactctaagatcgggctgaagctgtacgacaagtacggctactacatctacattaaaaacctcgaagcatggggcggcttgatgggcaagggctacgactacttcgagcgcggcaacctcgacatcttcagcggaaggggaccctgtcttgacggacccgtctgtgccgttaacgttacttctgacggatcgggttctcaccacggctggtaccttaactacgtccaggtcacctacactgggccccacctttcctgcgctcaggatcagtacgaggtggagcagtggttcgctctcg

SEQ ID NO: 265950 - DNA, 454 bp, Glycine max
cccacgcgtccgctgaaattttcagtaacccaaaggtccaagcagaagttccatggtatggaatagaacaagagtacaccttacttcaaacaaatgtgaaatggccattaggttggcccgttggtggctatcctggtcctcagggtccttattattgcagcgctggggcagacaagtcatttggacgtgacatatctgatgctcattacaaggcttgcttatatgctggaattaacatcagtggtaccaatggggaggttatgcctgggcagtgggagtaccaagttggtcctagtgtaggtattgaggctggtgatcatatctgggcttcaaggtacatcctcgagagaattaccgagcaagctggtgttgtgctctctcttgatccaaaaccaataaagggtgactggaatggagcaggatgccacaccaattacagtacaaagagcatgag

SEQ ID NO: 265951 - DNA, 417 bp, Glycine max
  unsure (1)..(417): unsure at all n locations
cgaagagtgaagaaagatgcttccctcatttctaagcctggtgtcagtgtacagcctctacctccgacgctgcttcacgggcgcggggctctcatcgcagacgcttagagtggacgacgaatccacgctccacttctgggccccgacaaacccaacggcccagaagccttccctggttctgatccacgggtttgggccggagtccatatggcagtggcgcaaacaggtccaattcttagcccctcacttcaacgtgtacgttccggacctaatattcttcggaggatcgagcaccaagtccagcgaaaggagcgaaacgtttcaggcagcgtcggtggggaagcttttggacaagtgggaggttgagaagttncacgtggtggggacgagttatgggggcatggtggcttacaattt

SEQ ID NO: 265952 - DNA, 455 bp, Glycine max
caaagcttgcttcagatgctctcactgcaaaggaacattaaagctgagcaactattcctcaatggaaggcgttctttactgcacgcctcactatgagcagctcttcaaggagagcggctccttcagcaagaacttccagtcacctgcaaagctagctgataagacaactcctgagctgacaaggtctcctagtaaagctgcgagcatgttttctggcacacaagaaaagtgtgccacatgtggcaaaactgcttatccattagagaacgtaacagtggaagggcaggcctatcacaaatcatgtttcaagtgttcacatggtggatgtcccataacgccatcaaattatgcaccccttgaaggcattttgtattgcaagcaccacttctcccagctttttaaggagaaagggagctataatcatcttactaagtctgcatcagtcaaacgggcag

SEQ ID NO: 265953 - DNA, 442 bp, Glycine max
gtcacattcacataataataaaaaaatggcatcggcggcggctgtgacggtgctactcccacctaggattccgaccaccaccaacgttacccgctgctctgctttgccttctctacctcctcgcgtctacaacaccaaaaccactttgttctcacctttcctcaacaacttttcagtgtccggaaaatcttctatgcttcagaccagatcttcttcagaggaatcatcctcatgtgatgccaatgaggcgttcacagattcgaaggaaaagtgggatgctcttgaaaacaagtacacagtacttctttatggtggagaggctatagttgctattgggctatcgccaattctcgagagcgccgtcaactcagttccctttggtgcaaagatcatggaagtggaagggcttggatacactgtatggctagtctaccgatacctt

SEQ ID NO: 265954 - DNA, 323 bp, Glycine max
agtagttgagaactaagaagaaggaaatggcttcctcaatgatctcctccccagctgttaccaccgtcaaccgtgccggtgccggcatggttgctccattcaccggcctcaaatccatggctggcttccccacgaggaagaccaacaatgacattacctccattgctagcaacggtggaagagtacaatgcatgcaggtgtggccaccaattggcaagaagaagttcgagactctttcctacttgccagacctcgatgatgcccaattggcaaaggaagtcgaataccttctagggaaaggatggattccttgcttggaattc

SEQ ID NO: 265955 - DNA, 458 bp, Glycine max
attctctatcactcttcaccttcctctgcgcaatttgtgcgcactccgtcgccgtcacctccgcggcatatccttccatccccggcacggaaaccggagagtgctccctccgcggcgtcggcgtcggcgacggtgttctggtccctccgcggcgagaagtgtacgaggaggggcgaatcttcgacatcacccacaggtatgtccccgagatgccggtgtgggactcgacggaggggctcgggcagcacttcctgtggctcgaaaagagcatgaagaatggctcgcgcgctaacaactccaacatgaagctcggtgttcacaccggcacccatgtcgacgcgcccggtcacttttacgacaattactacgacgccggcttcgatgttgactcactcgacctaacactcctcaatggccttgcacttttggttgatgttccacgggataaaaacattact

SEQ ID NO: 265956 - DNA, 424 bp, Glycine max
tgaagtaccagagaatcttgagaggttcaaagagtcagaactcattcactgcagatgggccatgcttgctgttccagggattttggttccagaggcatcgggcttaagcaactgggtaaaggctcatgaatgggcagcagttcctgggggccaagctacctacctaggcaatccagttccatggggcaccctacccaccattctggccattgaattccttgctatttcctttgtggagcaccaaaggagcatggagaaggacccagagaagaagaaataccctggtggtgcttttgatcctttgggatactctaaggaccctaaaacattccatgaatacaaagtcaaagaacttaagaatggacgtcttgctctgttggcttttgtgggattctgtgttcaacaatcagcttatcccggcact

SEQ ID NO: 265957 - DNA, 440 bp, Glycine max
cccacgcgtccgctctttcaagaagcatctgagtatttactattttgtactatatatatatatatatagtcactcaagcttctaggatttgtgccagctacatgaaaatgggaagcaacttcaggtttttgagtctttgcctcttggcattgattgcatcaactcatgctcaacttcagcttggtttttatgccaagagttgcccaaacgctgagcaaatcgttttgaaatttgtccatgaccatatccacaatgctccatcactagcagctgcattgataagaatgcacttccatgactgttttgtaaggggatgtgatgcatcagtccttctgaactcaacaaccaatcaagctgaaaagaatgctcctccaaatctcacagtaagaggctttgacttcattgacagaataaagagccttgttgaggcagaatgccct

SEQ ID NO: 265958 - DNA, 469 bp, Glycine max
tgccttcatggccaagccagtgtccattgaggtatggaacccaagtggcaaatacagagttgttagcaccaaaccaatgcctggaactcgttggatcaatcttctcgttcaaaatgatgttcgccttgaaatatgtaccgagaagaaaacgattctgtcagttgaagacatcattgctttgattggtgataagtgtgatggagttattggacagctgactgaagactggggagaacagttgttctctactttgagcaaagccggaggcaaagctttcagtaacatggctgttggttataacaacgtggatgttgatgctgcaaacaagtatggtgttgctgttggaaatactcctggagtgctcactgagacaacagctgagttggcagcttcattgtctttggcagctgctagaaggatagttgaggcagatgagttcatgagggcaggattatatgatggatggcta

SEQ ID NO: 265959 - DNA, 462 bp, Glycine max
  unsure (1)..(462): unsure at all n locations
gttgttggctgtgcgatcactcatctcacctcttctcatcaacgctgcgaaagacaatggagctgacaccccagcagctgagccaatacaacggcacggacccatcgaagccgatctacgtggcggtgaagggccgcgtctacgacgtcaccaccggaaaatccttttacggccccggcggcccctacgccatgttcgccggcaaagacgccagcagagccctggcgaagatgagcaagaacgacgacgacatctnccnctccctcgacggcctctccgacaaggagatcggcgttctcaacgactgggagaacaaattccaagctaagtaccctgtcgttgctcgggttctcaattaatcatatgataacctaagtggattttgtacctcatcatgtgagtggcatgatctctttctgtaaccgaactcaatcaccctttaatccctaataatattaataa

SEQ ID NO: 265960 - DNA, 429 bp, Glycine max
cccacgcgtccgcgcttggataatggaggcatgaagttattccaaagcaaaaattaagtcagtgcctaaagtgcctgaccggacgcgtgggtggactttccccaacttacaatgacattacctgatggtcgtgaagaatctgtcatgaagcgcacaacactagtggctaacacttcaaacatgccagtggctgctcgtgaagcttcaatttatacaggaatcacattagctgagtattttagagatatgggttataatgtcagcatgatggcagattctacatctagatgggcagaagcattgcgtgaaatctctggacggctggcagaaatgcctgcagatagtggatatcctgcataccttgctgcacgtttagcctctatctatgaacgtgctgggaagggtaaatgtctaggaggccctgaacgt

SEQ ID NO: 265961 - DNA, 439 bp, Glycine max
ttgcctctcagagaagtctccttgaggtcatggctgaatttccatcagccaaacctccaattggtgtcttttttgcagcagttgctcctcgcctgcagcctagattttattcgatctcctcatctccaagaatggtgccaaacagaattcatgttacctgtgcattagtacatgagaaaatgcccaccggaaggattcacaaaggagtgtgttcaacatggatgaagaattctgtaccattggagaaaagccaggactgcagttgggctcctatttttgttaggacctccaactttagactcccttctgataataaagtgcctataatcatgattggtcctggcactggattggctcctttcagaggtttcttgcaagaaagattagctctgaaagaaggaggagctgaactcggcccctcagttttattctttggatg

SEQ ID NO: 265962 - DNA, 451 bp, Glycine max
cccacgcgtccgctctttcaagaagcatctgagtatttactattttgtactatatatatatatatatagtcactcaagcttctaggatttgtgccagctacatgaaaatgggaagcaacttcaggtttttgagtctttgcctcttggcattgattgcatcaactcatgctcaacttcagcttggtttttatgccaagagttgcccaaacgctgagcaaatcgttttgaaatttgtccatgaccatatccacaatgctccatcactagcagctgcattgataagaatgcacttccatgactgttttgtaaggggatgtgatgcatcagtccttctgaactcaacaaccaatcaagctgaaaagaatgctcctccaaatctcacagtaagaggctttgacttcattgacagaataaagagccttgttgaggcagaatgccctggtgtggtctc

SEQ ID NO: 265963 - DNA, 418 bp, Glycine max
cccacgcgtccgagggtttgcagtcactgctctgtttcaccgagtttgggcgtttagatcagaaccaaatcgtgttctcttccattggcaaacatggcaactcaaatgagcaagaagagaaagtttgttgcggacggagtgttctttgccgaactgaacgaggttctgacacgtgaattggcggaggacggttactccggcgtcgaagttagggttacgccgatgcgcaccgagatcatcatcagagccaccagaacccaagccgttctaggtgagaagggaaggagaattagggaacttacctcagtggtgcagaagaggttcaaattccccgaaaacagcgtcgagctttatgctgagaaggtcaacaacagatgcctgtgtgccattgctcatgccgagtcgcttcgctacaagc

SEQ ID NO: 265964 - DNA, 278 bp, Glycine max
cccacgcgtccggataactagaaacagtgtgatgaaaatgaaggtccttgttttcttcgttgctacaattttggtagcatggcaatgccatgcgtacgatatgttccctctccgaatgaacactggctatggtgcccgtactccggaggtgaaatgcgcaagttggaggcttgctgtggaagcacacaacatctttggctttgagaccattcctgaagagtgcgttgaagcaacaaaggaatacatccatggcgaacaatatagatcagactccaaaa

SEQ ID NO: 265965 - DNA, 448 bp, Glycine max
  unsure (1)..(448): unsure at all n locations
aaaagaacgcagaaactgaaataaaaaatggcagaacccaaggttgaatacgatcgtcaactcagaatatggggtgaacaaggacaggcagcccttgagaagtctagtatttgcttacttaactgtggtcctactggttctgaaacacttaagaatcttgttcttggtggggttggaagcatcactgtagttgatggatctaaagttgaagcgggagacctcggaaacaattttttggtggatgaagcaagtcttgggaagtcaaaggcaaaatgtgtatgctcatttcttcaagagctgaatgatgcagttaaagcaaaaattgtagaagagtcttcaaaaccattgattgagacaaatncatcattcttttctcaatttactttgggtgttgcactcagctcatggaaaattcaatgataaagcttgaccaaatctgcagggaggt

SEQ ID NO: 265966 - DNA, 317 bp, Glycine max
caagtttgccaggataccactttgcgggatgatatctcaatataaccaggcttggacagaaagagaaggcgtcaggaatcttttgaatttggtgggcaaggaagtaagaatggaagggtttttgctgaaaacacatttcaatcgttttggagactttgcaaaagagattgagggccacataaaagaagggaggcttaagcccaagactaaaataaacttcggaattgagagctttttggatagcttgaaactcctgttttctagctctaatattggaaaagtagttattcaagtaataaggcttaagtatgcttgat

SEQ ID NO: 265967 - DNA, 352 bp, Glycine max
  unsure (1)..(352): unsure at all n locations
ctctccaatggccaaagacctcgaaacggagattcaaagtgggttgcctcacaaggactaccacgacccaccccccgccccattctacgaccccgccgagctccgaaagtggtccttcttccgagccctcatcgccgagttcgtcgccaccctcctcttcctctacgtcaccatcctcaccgtcatcggctacaaccaccagacagccaccgccgncgagccctgcagcggcgtcggcgtcctcggcatcgcttgggcctttggaggcatgatttttgtcctcgtctattgcaccgncggcatatcagggggacacataaacccggcggtgacgttcgggttgtttttggcg

SEQ ID NO: 265968 - DNA, 425 bp, Glycine max
tgaagtaccagagaatcttgagaggttcaaagagtcagaactcattcactgcagatgggccatgcttgctgttccagggattttggttccagaagcattgggcttaggcaactgggtataggctcacgaatgggcagcacatcctgggggccaagcaacctacctaggcaatgcaggtacatggagcaccctacccaccattctggccattgaattccttgctatttcctttgtggagcaccaaaagagcatggtgaaggacccaaagaaagaagaaatacccttggggtgcttgtgatcctttgggatactctaaggaccctataacattccatgaatacgaagtccaagaacttaagaatggacgtcttgctttgatggcttttgcgggattctgtgttcaacaatcagcttatcccggcact

SEQ ID NO: 265969 - DNA, 407 bp, Glycine max
attcctcttaagcttgctactgagtttccacactgcataccttatgtcttccgaattcgaagttaatttgcaagatggctaaggaaaaggctcagatcaacattgtggtggttggtcatgtggaccctgaggaggcaaccaccattaacgagctgaagaagcctgttgtggagaaagaagctccagggcatgccatatgagggcatgcacgtacggcctcggaggggaaccagaaaattatgttaacaaaataatctggaaccctaatgtatcagtgtcatcatcagtgtgtagtttaagctagctttgctatggttacgttctttgagatgagagtcttgatgaacagtaccattctgatgtattgctttccttgaaagttaatgcatgcttcttatcttctgtct

SEQ ID NO: 265970 - DNA, 452 bp, Glycine max
cccacgcgtccgcccacgcgtccgagatttcctgccatacaatggagatggattcaaactatctattccctcaaagtggaacccaagcaaagaagttgagtacacgggtcaggttgttagatatgaggataactttgactcaaccaccaacgtggttgtcaccatcactccaactgataagaagtccatcactgactatggttcacccgaagagttcctctctaaggtggattatttactaggaaaacaggccttcttcggcgaaacacaagctgagggtggttttgatccaaatgcagtggccacggctaacatcttagagactgcaacacctgtgattgacgggaagccatactattttttgtctgtgttgacaagaactgctgatggagatgaaggtggcaagcaccacataattagagcaactgtaaaagatggaaaactggtcattt

SEQ ID NO: 265971 - DNA, 450 bp, Glycine max
gcaccatgaggctctcacagaggctcttccaggtgacaatgttggctttaatgtgaagaatgttgcagtcaaggatctcaagcgtggttttgttgcatccaactccaaggatgaccctgccaaggaagctgccaacttcacatctcaagtcattatcatgaaccaccctggccagattggaaatggatacgcaccggtgcttgattgccacacttctcacattgctgtcaagttttctgaaatcttgaccaagattgacaggcgatctggtaaggagcttgagaaggagcccaaatttttgaagaatggtgatgcatgtatggttaagatgattccaaccaagcccatggtggttgaaactttctctgagtatcctccccttggtcgttttgctgtgagggacatgcgtcaaactgtggctgtcggagtcatcaagagtgttgagaagaa

SEQ ID NO: 265972 - DNA, 422 bp, Glycine max
  unsure (1)..(422): unsure at all n locations
cccacgcgtccggcagaaagcaagctcatcctagagttataaaaatggcagcagcctactccatggctctctcttccccatccttggctggcaaggccgtgaagctgggcccatcagcccccgaagtcgggagggtcagcatgaggaagaccgtcaccaagcaggcctcctccggaagcccatggtacggcccacaccgcgtcaagtacttgggcccattctctggcgagcccccgtcctacctcactggcgagttcccaggtgactacggctgggacactgctgggctttcggccgacccagaaaccttcgccagaaaccgtgagctcgaagtgatccactccaggtgggccatgctcggggccttgggctgcgtcttccccgaactattgtcccgcaacggngtcaagtttggagaagct

SEQ ID NO: 265973 - DNA, 468 bp, Glycine max
  unsure (1)..(468): unsure at all n locations
gtcttccatttccaattctctgtgtagaagccatgtctaagggtcctggtctctactctgacattggcaagaaagccagagatctcctgttcaaggactaccacagtgaccagaagtttaccatcactacctactcacccactggagttgctataacatcctcggggaccaagaaaggtgacctttttgtggcggatgttaacacccagttgaagaacaagaacatcaccactgatatcaaagtggacaccggttccaatcttttcacaactatcactgtcaatgagcctgctcctggtctcaagactatttttagctntagagttcctgatcaaaggtctggaaaggtggaagtccagtacttgcatgactatgctggaataagcaccagtgtgggtttaacagcanacccaattgtcaacttctccggcgttgtaggaactaatgtactngcccttggtactgatg

SEQ ID NO: 265974 - DNA, 307 bp, Glycine max
caaagcttgcttcagatgctctcactgcaaaggaacattaaagctgagcaactattcctcagtggaaggtgttctttactgtaagcctcactatgagcagctcttcaaggagagtggctccttcagcaagaacttccagtcacctgcaaagctagctgataagacaactcctgagctgacaaggtctcctagtaaagctgcgagcatgttttctggcacacaagaaaagtgtgccacatgtggcaaaactgcttatccattagagaaggtaacagtggaaaggcaggcctatcacaaatcatggttc

SEQ ID NO: 265975 - DNA, 387 bp, Glycine max
aaaagaacgcagaaactgaaataaaaaatggcagaacccaaggttaaatacgatcgtcaactgagaatatggggtgaacaaggacaggcagcccttgagaagtctagtatttgcttacttaactgtggtcctactggttctgaaacacttaagaatcttgttcttggtggggttggaagcatcactgtagttgatggatctaaagttgaagcgggagacctcggaaacaattttttggtggatgaagcaagtcttgggaaggtaaagggcaaatgtgtatgctcatttcttcaagagcttgatgatgcagttaaagcaaaatttgtagaagagtcttcagaaacattgattgagacaaatccatcattcttttctcaatttactttg

SEQ ID NO: 265976 - DNA, 403 bp, Glycine max
cccacgcgtccgcctttgactgcgaatggcgtcgttcgatcaggcacctaccggcgatgtataatccggggacaaaatctttaggaccaagtgtgctcattgttacaccgtccaataaggtgccggtcacaagcagggacccaatctgaatggttcgttcggaaggcattcaggcactactcccggttattcttactcttcagctaacaagaacatggctgctacttgggaagaaatgacactatacgattacttgcttaaccccaaaaagtatattccagggaccaagatggtattgcctggtcttaagaagcctcaggaacgtgctgatcttattgcatatctgagagaatgcactgcacagtgattatacattttcatacattcaatttttgcagagtgc

SEQ ID NO: 265977 - DNA, 410 bp, Glycine max
  unsure (1)..(410): unsure at all n locations
cccacgcgtccgcccacgcgttcgaccacgcgtccgcccacgcgtacgtccacgcgtccggccatatctctttctcacacagacacactctcttcttcttgctattccttcctcgtcatggagtcgcgagtgctgtcacgcgccggaaccttgttctccctccctcacctccgcaagctgccgcgggaggtcggcgccggcccctccctcgtcgccgtgaaggccgtgggctccgtggcggacggcgggaacctgatttgggggaggcaactgcgcccagagctctgctcgccggcgctgaagaaggaggccgtcctcctncggccatgcctcgccgccgccttctcgacggccgagggcagtgattccgccggagaagcaaaggttgctccggcggggtttttcgagaa

SEQ ID NO: 265978 - DNA, 426 bp, Glycine max
gaattgtatacaaacgaatatgttaacattcttgccttcaaaaattatgtaacggtaggcttatcgtgaaaataaaaaaaaaaaagaatacaaaaaaaaaaatataaaaataaaaaaaaaaaaaaaaaaagagaaaatagaaaaaaaaaaaaaacaaggtttacgcttgttgaggaaacacacaacatgcgagcctttaaaaccattcatgaatagtgctttgaaccaaaaaaggactacattaatggacgaataatatagatcagactgtaaaacagttaacctacaatcatttcttttatgctagagaacacgaagccaatcacaacgacatatttatattagagatagataacaccggactctctaatatccaatactacgaaaaacatgaatatggcgcgcaggaatttaatgaaacactat

SEQ ID NO: 265979 - DNA, 453 bp, Glycine max
ctagtttatcgtgaggagaatatgaagttgtttgctttctttgttgctgcagtagttttggtagcatggccatgccatggcgcaggctaccaaaggttccctctccgaatgaaaactggctatggtgagcgttcttcggaggtaaaatgcgcaagttttaggcttgctgtggaagcacacaacatccgagcctttaaaaccattcctgaagagtgctttgaaccaacaaaggactacattaatggcgaacaatttagatcagactctaaaacagttaaccaacaagctttcttttatgctagtgaacgcgaagtccatcacaacgacatatttatattcggcatagataacaccgtactctctaatatcccatactatgaaaaacatggatatggggtggaggaatttaatgaaaccttatatgatgaatgggttaacaagggcgacgcaccg

SEQ ID NO: 265980 - DNA, 241 bp, Glycine max
cccaagcatccggaggaagagcatgcacatgcttgagttctaaaaatgggaaaaggctactgcagggctgtctctgccgcatccttggctggcaacgagcttattctgggtgcatcaccccccatagtcagcagggtcagcatgaagaataccgttgcctagcgggccttctacaaaagcccatcgtgcgaaccattccgagtaccgtacttgagcgcattgtctgacgagcccccttcct

SEQ ID NO: 265981 - DNA, 417 bp, Glycine max
ctcaaaataaaacaaccaaaccacacacttcacaccctcttcaacatcctcagcaagtacaagaacaagaagaaacaatgtcttgctccaatctcacaatgttggtgtcctcaaaaccttccctttccgatccctccaatctctccttccgctctgtcctcaacccttttcagctcccttcacaaaacccaacttcatgcactccttcacgctcctcaaccacccaaattcagtgtggtctgagagaactcagaacccgcattgattccgtgaagaacactcagaaaatcaccgaggctatgaagcttgtggctgcagccaaagtgagaagagctcaagaagctgttgtcaacggaagacccttctcagagaaccctcgtgaagtcctctacaacatcaacgagcagctcctaactg

SEQ ID NO: 265982 - DNA, 465 bp, Glycine max
  unsure (1)..(465): unsure at all n locations
cccacgcgtccgcttcccttctccaacatgccaaacgacagcgttgtgagtcttttcttctgcgttaccctcttcacatgccttctctctgctacttcccacgatgaccatattttcctaccgagtcaactccatgacgatgactcagtgagttgcactgcaaccgacccaagccttaactacaagccggtgatcggaatcctgacccaccccggcgacggtgcctctggccggctcagcaacgccaccggggtttcttacatcgccgcctcctacgttaaattcgtggagtccggtggtgctagagttattccccttatctacaatgagtcacctgagaaccttaacaagaagctcgatttggtcaatggagtgctcttcactggtgggtgggctgtttctggtccatatttggatactcttggaaacatttttaagaaagctttagaganaaatgatgctgga

SEQ ID NO: 265983 - DNA, 414 bp, Glycine max
  unsure (1)..(414): unsure at all n locations
cagcagctcatgatcttaacttttggttcactagctaactcaaccccatacctaggagggggccttctggtgattgttcttgtctggttatcagcggccaagtcgcttgatacccagtttactgcattgcgccgagaagaagaacttgagaaagagatggaaagagcagcagctgttaagataccagtggtggccaaggatgaggatgaaaatggttctcttaaaagtgttccactgttaaatccaacagctggtgactcctcaagtatattgaattgaactcaactcacagtatntaaagcttanactacattgactngcaaggcaggaggagtaagccanactcatgagatttggtagctcaaactannttgtgtagggtcatatctcatctgagtttgattgtcacttttt

SEQ ID NO: 265984 - DNA, 448 bp, Glycine max
cccacgcgtccgcggacgcgtgggttgttgttgtaactcgttcttcttcttttgttgttctgtgtttgtgtttgttttttctctcacctgaaaatgtcttgctgcggtggtaactgtggttgcggaagctcctgaaagtgcggcaacggctgcggaggctgcaagatgtacccagacttgagctacactgagtcaaccaccaccgagaccttggtcatgggagtggcacctgttaaggctcaatttgagggtgctgaaatgggtgtgcccgctgagaacgatggctgcaaatgtggaccaaactgctcctgcaacccctgcacttgcaagtgaggtgttgggagagcaagcttcaagcatagatagcccttaattaggaataatgatcaactattaatgtgtagctaaaaacttatgtattatgtctgtgatggttttcgtgcactct

SEQ ID NO: 265985 - DNA, 291 bp, Glycine max
cagaagctggaggaaaatggatacaacatcattggaaacattggagaccaatggagcgttttattatgaaccaacacaggccttaggacctttaagttgcctgatcccatgtactacattagttgaggtctctaggctcttatgaatgaaatgagatatgtagtaattaataatggagagacttaacctaggggcactcgttattgctatgtttcatatgtatgtgactttgtgtgagacagtagttacgtgagactgcacaagcacaacttaacgttgttttatcgaaaa

SEQ ID NO: 265986 - DNA, 452 bp, Glycine max
tgttgatcgagataactagaaacagtgtgatgaaaatgaaggtccttgttttcttcgttgctacaattttggtagcatggcaatgccatgcgtacgatatgttccctctccgaatgaacactggctatggtgcccgtactccggaggtgaaatgcgcaagttggaggcttgctgtggaagcacacaacatctttggctttgagaccattcctgaagagtgcgttgaagcaacaaaggaatacatccatggcgaacaatatagatcagactccaaaacagttaaccaacaagcttacttttatgccagagacctcgaagtccatcccaaggacacatttgtgttcagtatagatggcaccgtactctctaatattccatactacaaaaaacatggatatggggtggagaaatttaactcgaccttgtatgatgaatgggttaacaagggcaat

SEQ ID NO: 265987 - DNA, 431 bp, Glycine max
taaaaaaaaaaataacaaaataacttgaaaaatttaaataaaaaaaaaaaaaataaggggatgaggcaaatttagaaagcgatgaaaatgccatacgttcaaaaaaattcactatattaatgaaacactggctatcgttcccgtactccataggtgaaatgcgcatgtttgtatgcttgctgtggtagcacacaccatctttgtctgtaagaccattactgatgtgtgcgttgaatcaacaaataattacatgcatctccaacaatatacatcatactccttttcttttaaccaacatgcttacttttatgccagtgacctcgaatttcattccatggacacatttttgttcaatatagatgtcaccgtactctctaatatcccatactacaaaaaacattgattatgggtggacaaatttatcttctcct

SEQ ID NO: 265988 - DNA, 337 bp, Glycine max
  unsure (1)..(337): unsure at all n locations
ctgctttggtctagtctagcagctttacaatttaattttacaaacattcttcttgaaagcctggaaacttatgtgcgtttcaatgccatacntaccatattttacactctccataaaacaattactattatgcccctactaagaaccttatttcgcaaaatgtatgctttatcttcaagtacacaataaatgcatctttgaaacaatacacaatgactgcactcaaacaacctatgaatacatcctcttcggacattatagatgtgactcatgctcattgatacaacattcttacttttatcataaactcctcgctatgcatccttactactcattt

SEQ ID NO: 265989 - DNA, 383 bp, Glycine max
cagaagctggaggaaaatggatacaacatcattggaaacattggagaccaatggagcgatatattaggaaccaacacaggccttaggacctttaagttgcctgatcccatgtactacattagttgaggtctctaggctcttatgaatgaaatgagatatgtagtaattaataatggagagacttaacctaggggcactcgttattgctatgtttcatatgtatgtgactttgtgtgagacagtagttacgtgagactgcacaagcacaacttaacgttgttttatcaaaaaaaaaaaataaaaacaaaaaaataaaaaaccatacaaaggacacataaacactcagaatatattgaacaaaaccaacgaaaactccatactat

SEQ ID NO: 265990 - DNA, 456 bp, Glycine max
  unsure (1)..(456): unsure at all n locations
ttttgttccctctgtaggtgatggcgagtacaaacacatagtggggactctgttgaaagcaacggggacaccgaacttggtggattattttccagtgttgagggtgtttgatccacaagggatcaggaggcacaccaccaactacattgacaagttgttcgatgtgttcgatcccatgattgatgaacgcatgaggaggaggggagagaagggttatgccactagccatgacatgttggatatcttgctggatatttctgaccagagtagcgagaagattcataggaagcagatcaagcatttgttccttgacctattcgttgcggngacggatacaacagcctacggcttagagagaacaatgacggaactaatgcacaatccagaagccatgagaaaagcgaagaaggagatagcagaaacaataggagtaggaaaactcgtggaggaatccga

SEQ ID NO: 265991 - DNA, 422 bp, Glycine max
cgtaaaccctagctccggaaagatcgtcaacctctgcctctaaggatcgcaagctcttcgccggcatcgcggaacccgtggttcggtcggagcgtcacgaacagatcatgggatcaatggaaaaggtgctgaatctcagacgcttaactgtcggtggcggcgcgggactcactttctgtggggtcaaggaagccaatagcgctcgcacatcgttctagaggctcctgtcttccattgagcgtaacgaaaaagcaaaaacgaactattgcgagtgcgaatcatgctaaggcgtacatactgctggcttcattggagcgacacaacatctggaatgatggtacttgagtgagtcttgtgcacactattcactctgttgtagctgtggaaaacactgtcttgtcctatgtgaccctaggggcgtg

SEQ ID NO: 265992 - DNA, 365 bp, Glycine max
cgcaaacgttcgtacacactagtacttctacctctgtctctatgtatcagcaagcagctttagtaatttacagtaacatatccaatggtcgcacgttcacgaaccaatcaacgtatcacaagaaaacgtgctcatcttcagccttcaaatttccaggaggggagtgatgttctctttaagagaggtcagtgcagagcaaaagggctggcacaccggattcaaaggatcctgtcttgcatcgtgcaggaggaaataggcaataccatcctttgctgatgaaaatcaacccattgagtacagaccgtcagctttatgatggcgacaacacatctggtgtgacagcatgatggtagacacatggacac

SEQ ID NO: 265993 - DNA, 430 bp, Glycine max
  unsure (1)..(430): unsure at all n locations
atcgagataactagaaacagtgtgatgaaaatgaaggtccttgttttcttcgttgctacaatgttggtagcatggcaatgccatgcgtacgatatgttccctctccgaatgaacactggctatggtgcccgtactccggaggtgaaatgcgcacgttggaggcttgctgtggaagcacacaacatctttggctttgagaccattcctgaagagtgcgttgaagcaacaaaggaatacatccatggcgaacaatatagatcagactccaaaacagttaaccaacaagcttacttttatgccagagacctcgaagtccatcccaaggacacatttgtgttcagtatagatggcaccgtactctctaatattccatactacanaaaacatgggatatggggtggagaaatttaactcgaccttgtatgatgaa

SEQ ID NO: 265994 - DNA, 411 bp, Glycine max
gcaaaacgtggagatgcagatcgagcacaagcaatgtcgccgatcaagccttaaaccaccacggggaaccctgatttggttagggggattggcacgtattcgaggtcgcatatgtaccacatgaggggcatctgggccatcaaggccaaaaacggcggcgttttgtcccgccacgatcccatgcccattcccgatgccccggcccaaaagccgaccaagttataccccgcggtcgatgttaataagccactcttcatcaagcacaagcccaaacccgcgaaactcaagtctagcattactccagggactgtgttgatcctgcttgctggtacgttcaagggaaagatggttcgcttcctgaagcatctcccatctggattgcttcttgtaactggtccctttaacatcaat

SEQ ID NO: 265995 - DNA, 285 bp, Glycine max
cagaagctggaggaaaatggatacaacatcattggaaacattggagaccaatggagcgatatgttaggaaccaacacaggccttaggacctttaagttgcctgatcccatgtactacattagttgaggtctctaggctcttatgaatgaaatgagatatgtagtaattaataatggagagacttaacctaggggcactcgttattgctatgtttcatatgtatgtgactttgtgtgagacagtagttacgtgagactgcacaagcacaacttaacgttgttttat

SEQ ID NO: 265996 - DNA, 452 bp, Glycine max
  unsure (1)..(452): unsure at all n locations
caaaaatagtctaattaacgagggaagttattgggtggaaaaggcgtgaaaaaaaggacaaaagattttatttcaaacatgccttgctttctataagaagataaaatggaccatttcatgttagttgtaaaacacaacaccatatactagttatgttaatcaaacaagttgtccacaggggattaagaaataaatatatggacaaacagattaaggtacgataatcatttttcaattttcacttgcttaactctactaatttgtttacatgacccttgacaggtacgtgtatatacaccaaagagggtgtttcaagagctagaagttgcaaaggacgaatacattcgagctaacttaagcgtacgcaaggaccaaaaaatactcttaccaaagcttngtgagtcattcaacaaggactcaagtttgtgccccattggtgtcaatgatatgat

SEQ ID NO: 265997 - DNA, 410 bp, Glycine max
  unsure (1)..(410): unsure at all n locations
cgagataactagaaacagtgtgatgaaaatgaaggtccttgttttcttcgttgctacaattgtggtagcatggcaatgccatgcgtacgatatgttccctctccgaatgaacactggctatggtgcccgtactccggaggtgaaatgcgcaagttggaggcttgctgtggaagcacacaacatctttggctttgagaccattcctgaagagtgcgttgaagcaacaaaggaatacatccatggcgaacaatatagatcagactccaaaacagttaaccaacaagcttacttttatgccagagacctcgaagtccatcccaaggacacannttgtgtcagtatagatggcaccgtactctctaatattccatactacnaaaaacatgaattatgggtggaagaaatttaac

SEQ ID NO: 265998 - DNA, 462 bp, Glycine max
  unsure (1)..(462): unsure at all n locations
cggacgacccacgcgtncgaccacgcgtnncgccacgcgtncggaaacagtgtgatgaaaatgaaggtccttgttttctgcgttgctgcaattttggtagcatggcaatgccatgcgtacgatatgttccctctccgaatgaacactggctatggtgcccgtactccggaggtgaaatgcgcaagttggaggcttgctgtggaagcacacaacatctttggctttgagaccattcctgaagagtgcgttgaagcaacaaaggaatacatccatggcgaacaatatagatcagactccaaaacagttaaccaacaagcttacttttatgccagagacctcgaagtccatcccaaggacacatttgtgttcagtatagatggcaccgtactctctaatattccatactacaaaaaacatggatatggggtggagaaatttaactcgaccttgtatgatgaatgg

SEQ ID NO: 265999 - DNA, 417 bp, Glycine max
  unsure (1)..(417): unsure at all n locations
cccacgcgtncgtgctttaccaaattccaatttccaattcaaaaccctaactccgttcgaagcaccaaagcgtgatggcaccaaaggcagagaaaaagccagcagagaagaagcccgcggaggagaagaaaatcgacggtgggagacaaggctccggcggagaagaagccaaaggccggaaagaagcttccgaaagagggaggcgccggcggagaagggaagaagaagaagagaaacaagaagagcgtggagacatacaagatctacatcttcaagggtctgaagcaggttcaccctgacattggtatctcaagcaaggccatgggaatcatgaacagcttcatcaacgacatcttcgagaagcttgcccaggaatcttctagacttgtccgctacaacaagaaacccaccatcact

SEQ ID NO: 266000 - DNA, 340 bp, Glycine max
gcgctgatcatcaaaatgggattcgaagcagactcaatttccctctgcagctgttagagaaaaaggacattgaggacgtcacggaacaaccttgttccaccaccagcgtggtaactgctactactactgctattactactactactacttcagataacaacgacctccacttggcggagcagtccaagaagcctccgccgaaacggagttccaccaaggaccgccacacgaaggtcgatgggcgaggccgccggatccgcatgccggcggcctgcgctgccagagtgttccagctcacgcgtgagctgggacataagtctgacggcgagaccatcgagtg

SEQ ID NO: 266001 - DNA, 429 bp, Glycine max
gcgattactactttctctctctttgtaactcgtaagcatggagtcctcaaacatcgaggcttacgtcttactttgcatgctcttcctctactccgccactcccattctcggatgtggctactgtggcaaaccctccaaaaagcacatgcctggtaaaacaccaaagacacccacagtacccgttgttaagccaccagtcacaatccctcccattgttaattcaccagacacaatcccttccattgttaatccaccagtgacagctccacccgttgtgcttccaccaatagcgaagcccccgggttttctccctccaattcttaacccaccaagtacaccaacaccgtcgccggggaagggagggaacactccatgtccaccaccaaagtctcctgcacaggctacatgccccattgacacgctcaaact

SEQ ID NO: 266002 - DNA, 435 bp, Glycine max
aacaaaaaataaagcgttccatagcctcccataaaaatgaagaatactatcttctgggctctcggtctactttgtgccttcaccacctcatacctaccttcaaccaccgcggtggtcgataccaacggtgatattcttcagaatcctggcacatactttatcttgtccgtttttcgacccggcggcggagtagaattcgccgccactggaaacgaaacttgccctctcactgttgtgcagactctcttcgggaggggatttccagtaatcttatcgtcccagttacgaatccctatcatcggcgaaggacaactcttcagcatcctgttccgtattgtgccatggtgcgccaccactccttctaagtggaccattgtggagggtttaccagaatcacccgcggttaaactcactgcgtacgacaacacagtgcct

SEQ ID NO: 266003 - DNA, 426 bp, Glycine max
cccacgcgtccgcccacgcgtccggttccagatcgcaatgctggcatcccttcaactagtggggttgattctgatttaacttctgaagatgaagttgtccgtttgttgaactgctctgatcattatgcagcactgggattcacgcggtatcaaaatatagatgtttcaatactaaagcgggaatataggaaaaaggcaatgttggtacatcctgataaaaatatgggtaatgagaaggctgcagaagcctttaagaaacttcaaaatgcatatgagattctaatggattcgttgaagcgaaaagcttatgatgatgagctaaggagagaggagattttgagtgtatttcgtagatttcatgatgcttctcgtaagaatggtaggcatggattctttccttcaggatttgcacgatctgatgcagat

SEQ ID NO: 266004 - DNA, 448 bp, Glycine max
ccgggccgaccgacgcgtccgcccacgcgtacgcccacacattctgttccatatcgcaatgctggcatcccttgagctatcggcgttctttctgacgttaacttgttaatatcaacctttccccttcttgaactgctctgatcattatgcaacactggaattcacgcggcatcaaaatatatatgtctcaatactaaaccgggactataggaaaaaggccatgttcgtacatcctgataaacatatggctaatgagaaggctgtataagcctttaaaaaacttcaaaatgcatatgacattctactggattctatgaagcgaaaagctcatgatgatgagctaatgagagaggagatttcgagtgtctttcctacatttcatgatgcttctcgtaagaatggtaggcatggattctttccttcatgatctgcacgatctgatgcacat

SEQ ID NO: 266005 - DNA, 438 bp, Glycine max
gcgcagagcagcaaccaccgaccagaccacagaggcaccggttgggttcaccccaccggaactggacccaaacaccccttccccgatcttcggaggcagcaccggcgggctcctgcgcaaggcccaagtggaggagttttatgtcatcacatgggactccccgaaagaacagatctttgaaatgcccactggcggcgctgccatcatgagggagggtcccaaccttctcaagttggcgaggaaggagcagtgcttggctcttgggactaggctcaggtcaaagtacaagatcaagtaccagttttacagggtcttccccaatggggaggttcagtatttgcaccccaaggatggtgtgtaccctgagaaggtcaacgccggacgccaaggggttggtcagaacttcaggtctattggtaagaatgttagtcctattga

SEQ ID NO: 266006 - DNA, 420 bp, Glycine max
gtgaacactatactcttcttctgcatttatgcaggaaaaaaatggttcatcttggcttctgccttctggggtgtctctccatgatctcatatgctaatggttatgtcagcaatgggggttggaccaatgcccatgctacattctatggtggaagtgatgcttctgggacaatgggtggggcttgtggttatggaaacttgtatagtcaaggatatgggactaacacagcagcacttagcactgccttgttcaacaatggcttgagttgtggctcatgctaccaaatcaaatgtgcaaatgacccacaatggtgcctccgtggcaccattgtagtcactgccactaatttctgcccccctggtggatggtgtgaccctcccaatcaccattttgatctttctcaacctgtgtttcagcaaa

SEQ ID NO: 266007 - DNA, 427 bp, Glycine max
  unsure (1)..(427): unsure at all n locations
ttttcttcctcagaaacacattctaatggcagagcgcggaggtggcgatcgtggcggcgggcgtggcggtttcggacgtggattcngcgggcgaggacgcggaggtgacaggggccgaggccggcgccgaggcccccgccgcgaggaagaggagaagtgggtcccagtgaccaaactgggccgcctggtgaaggagggaagaatccgaagccttgaacagatctacctccactcgctcccgatcaaggagcaccagatcatcgacacgctcgtgggtcccaccctcaaggacgaggtgatgaagatcacgccggtccagaagcagacccgggccgggcagaggacccggttcaaggccttcgtcgtcgtcggagacaacaacggccacgtcgggctgggcgtgaagtgcaagcaggaagtggcgaca

SEQ ID NO: 266008 - DNA, 428 bp, Glycine max
cccacgcgtccggtgagctagttcagaaatatgtcggtgagggggctaggatggttcgtgagctatttcagatggctcgttcaaagaaggcatgcattgtgttttttgatgaagttgatgcaattggaggtgcacgatttgatgatggtgttggtggtgataatgaggttcagcgcaccatgcttgaaattgtgaatcagcttgatgggtttgatgctcggggaaacatcaaagttttgatggcaactaacaggcctgacactctagatcctgcactactacggcctgggcggttggaccgtaaagttgaattcggccttcctgacttagagagtaggactcagatattcaagatacacacaagaaccatgaactgcgaaagggatatccgatttgaacttctggctcggctttgcccaaattccact

SEQ ID NO: 266009 - DNA, 408 bp, Glycine max
  unsure (1)..(408): unsure at all n locations
gtggtttcagtgagtgatcggtgttcacttgatccttcataagtcgtcatcaggatcatgagcatcaccgttgattgaagaagatgccgatcagaaacatcgccatcggaaggcctgaagaggctactcaccccgacacgttgaaggcggggttggctgagttcatctccaccttgatcttcgtgttcgccggttcaggttccggcatcgcctacaacaagctcaccgacaacggcgccgccactcccgccggcctcatctccgcttccatcgcccatgctttcgccctcttcgtcgccgtctccgtcggcgccaacatctncggcggccacgtcaaccccgccgtcaccttcggcgccttcgtgggcggcaacatcaccttactccgcggcatcgtctacgtcatcg

SEQ ID NO: 266010 - DNA, 427 bp, Glycine max
gatgcatcagattcgtggggtttgtctgtgagctttctcagcataatcttgctaccaatagttggaaatgcagctgaacatgcaggagcaatcatatttgctttcaagaacaagctggacatttcattgggtgttgcattgggttcagcaactcagattgccatgtttgtggtcccattatgtgtaatcgttgcttggataatgggtatcgatatggacctgaacttcaacctcctagagacaggttcccttgcgttggcaataatagtcacaggcttcactttacaggatgggacttctcactacatgaaaggccttgttctcctgctgtgctacattgttattggggcatgcttcttcgtacaaagaacaccctttaataatcaagctgatgttactaacatcacacttaaaccaaccactaatg

SEQ ID NO: 266011 - DNA, 308 bp, Glycine max
accacgcgtccggcttctatttctcacgcaaccgtatgctttcatcaatggctacactcgacctatctgcgttgcaagctctaacctgccatcgcttatcctttgcttttccccaaagcggatgaaccacacagagaaactctaacccaaacttggaaaacttggatggaagaatacataataaggagtgaacaagttccacctggcactgaatccggaaatgccacttgggtcatgcagccacctacacagaagcctgatcttcgattaacgcccgatcaccacatgctattgaccgtgcctcttga

SEQ ID NO: 266012 - DNA, 424 bp, Glycine max
attccaattccgctctcgattttcgatttcgaagtttgatagcaacgttggaaggaaaggtgagagcggaatcgttggaagaatctggtttttgtgtctgcggtgttcgtttcgcgatcaaaacgatgtcttcgccggacattgtctcgatattggagaactcggacgagttccatcgggtgaggaaagaacaagaggatattctgtctgagatcaacaaacttcacaagaagcttcaagctactcctgaagtagttgagaagcctggggataactcattggctaggctgaaatttttgtacactcaagcaaaagatctttcaaaaagtgaaacaagtatttccaacttactgataaaccaaattgatgccctactgcctacgggtccacaagggcaaacacgaagaagaatagaggtaatgag

SEQ ID NO: 266013 - DNA, 430 bp, Glycine max
  unsure (1)..(430): unsure at all n locations
cccacgcgtncgagaagaacaagtagttgagaactaagaatgagaagcaaatggcttcctgagtgatcggttccccagctgttaccactgtcaaccgtgccggtgccggcatggttgctccattcactggcctcaagtccatggctggcttccccaccagaaagaccaacaatgacattacctccattgctagcaacggtggaagagtgcaatgcatgcaggtgtggccaccagttggcaagaagaagtttgagactctttcctacctgccagaccttgatgatgcacaattggcaaaggaagtagaataccttcttaggaagggatggattccttgcttggaattcgagttggagcacggtttcgtgtaccgtgagcacaacaggtcaccaggatactacgatggacgctactggaccatgtggaagct

SEQ ID NO: 266014 - DNA, 410 bp, Glycine max
  unsure (1)..(410): unsure at all n locations
gctctntagattttatttggtggtcttcttctttatgagccctaacttggggacccatcggcgtcgtcgtctttagccatgtcgctgaggaaggtctttcgctcccgcaagttcttcagatcgttcaaggaagtgctgccggcggagggcgccgcaattgtcggcggcgaagacggggtcgccggcgccggtgaggagtcgtcgaatgggaataatggttggtccaacatgctttcagagatcctcggcgagatcgtgcggcgcgtggatgccgccgaggaacagtggccgaaccgccagaacgtcgtcgcatgcgcgtgcgtctgcaagcgttggcgtgacatcacgcgcgaggtcgtgcgcgtgcccttccacaccgggaaaataaccttccctgcgtgccttaagca

SEQ ID NO: 266015 - DNA, 428 bp, Glycine max
aaaacagcatcgaacccgtcgtagcagaaatacttgtcaccatggtttcttccgacaaggagccacgagaggatgtccttcaagcctggtacatggatgatagtgatgaagatcaaagactcccccaccacaaagaacccaaggagtttgtctcgttggaccaacttgctgaacttggagtccttagctggaaactagatgctgataaccatgaaaatgatccagagctgaagaagattcgtgaagagcgtggttacacctacatggatgtttgtgaggtctgcccagaaaagttgccaaattatgaacagaaaatcaaaagcttctttgaagagcatcttcacactgatgaggagatccgcttttgtgctgctggaagtggctattttgatgttagggatcgcaatgaagcttggattcgtgtgtgg

SEQ ID NO: 266016 - DNA, 385 bp, Glycine max
attgttgctgctctcttcctgaaacagtttgttgatgaaaaggttcaatggatgcacattgacatggctggtcctgtgtggaatgacaagaagcgctcaccaacaggatttggcattgctactttagtggaatgggttttgaaaaatgcttcaaatgccaactgaaatttcaaatcttgttacatcgtatgtgaaacacaagatgagataagctcatcttgtgatgtttgtgctttaatggggtttgggtatatgaaataagttatttaaagggatggaaaatgtggtaaaatgaagcattttttagtgtattcaaacttttttctagatacaaaaaacaacctttttggtttttcacatttaccaataattcaatttgcctttc

SEQ ID NO: 266017 - DNA, 428 bp, Glycine max
  unsure (1)..(428): unsure at all n locations
cccacgcgtccgcttaatccaaatatcatcatctgaaacgatggctgccatgggaaccacgaccctctcttcaaacccgaaactctcatttttccacggaaagcccgttacatattcttcccgcgtcgcacccaccaccaagttattctcatccaaacaaggcacaatctccatgtccctaacccaacccccatacgacctccaatccttcaaattccaacccatcaaagaatccatcgtctcacgcgaaatgacgcgccgctacatgaccgacatgataacctacgccgacaccgacgtcgtaatcgtcggagccggctcggcggggctctcctgtgcgtacgagatcagcaagaaccccgccgtgagcgtcgccataatcgagcagtccgtgagcccncgcggcggcgcgtggctcggcggacaac

SEQ ID NO: 266018 - DNA, 435 bp, Glycine max
cccacgcgtccggttccttaccctacctttgacgtatcgaaaccttaaatttgggattaggtctgagcaatctgggtagaacctttggtcttagagagtcaagttttatgtctggattagacgatcaaattcctactgccttcgatccttttgctgatgcaaatgctgatgactcgggtgctgggtcaaaggagtatgtgcatattcgcgttcagcagcgaaatggtaggaaaagcctgacaaccgttcagggattgaaaaaagaattcagctataacaagatacttaaagacgttaagaaagagttctgttgcaatggaacagttgttcaggacccataactaggacaggttattcaacttcaaggtgatcagaggaagaatgtttctactttcctagtacaggctggtatcgtgaagaaggatcatatcaaga

SEQ ID NO: 266019 - DNA, 425 bp, Glycine max
aacaggaggggttactaaatacctggagccatctggtgctgggtttcttttgcaaaaagaacttgattgccttgttggggcggtatcaagccccaaaaggccatttgctgccattgttggtggttccaaagtctcatctaaaattggagtgattgagtcacttttggaaaaagttgacattcttcttcttggtggaagaatgatcttcacattttacaaggcacaaggtctttcagtgggttcatcccttgtagaagaagataagttggatcttgctacatcactacttgcaaaagccaaggaaaaaggggtgtctctcttgttaccaagtgatgtggtgattgcagacaaatttgcccccgatgcaaacagcaaggtcgggccagcatctgccatccctgatggctggatgggattggatattg

SEQ ID NO: 266020 - DNA, 369 bp, Glycine max
attttatactatacccacattttgataattatttttctagttgataagccatggctactcgaggaaagcgtgaggttgacgttgatctcaagtctaacgcagacaagtactggcaacccttaggaactccactgaaatattccccaaggccttccccaatgattacaaaagcattgaggttcttgagggtgatggcaaatcacctggttctatccgccacataagttatggtgaaagttcaccacttgtgaagtcatcctttgagaagattgaggctgttgatgaaaaaaagaaggtagtgtcgtacactatcattgatggagaactcctccagcactacaaaacattcaagggagacatttctgtgac

SEQ ID NO: 266021 - DNA, 163 bp, Glycine max
attacacccaacgagctacctgaagctgatggcttattgcttggtttccccacaagatttggactgatggctgatcacattaaagctttcatggatgcaactggaggcctgtggcgcacacacgcactagctggaaagcctgcacgaatcttttacagcactg

SEQ ID NO: 266022 - DNA, 442 bp, Glycine max
cccacgcgtccgcccacgcgtccgtccagattcaggtggagaatgtggagtccctgcagagaccatgtattattttcctgctgagaatagagccaaattctggtataaagcagattatggcctgtttcgtttctgcatagcagatagtgaacatgactggagagaaggatcagaacaatacaaattcattgagcattgtcttgcaacagtagatagaaagcatcaaccatggctaatcttttcagctcatcgtccccttggctactcctctaatctttggtatggcatggagggttcatttgaagagcccatgggaagggaaagtttgcagaagctttggcaaaagtacaaagtagacattggattttatggtcatgtccataactatgaaagagtatgccccatttatcagaatcaatgtgtgaatgaagaaaagcatcac

SEQ ID NO: 266023 - DNA, 443 bp, Glycine max
  unsure (1)..(443): unsure at all n locations
cccacgcgtncggggagctcttgttcccaccgagtccgaatcgctctcaacctcaaagggggtaaatacgaatacaagcccgtcaatctgctcaagggagaacaatctcgccctgagtttctccagctcaatcctgttggttgtgtccccgttctagtggatgaccacgttgttctctatgactctttcgccattattatgtatttggaagataagtatcctcacaatcctttgctccctcatgatatttacaagagagcaatcaatttccaggctgctagtgttgtttcctcaacaatacaacctcttcataacttgagtttactgaactacattggggagaaagttggccctgatgaaaaacttccttgggcccaaagtataattagaagaggctntaaagcactggaaaagctattgaaagaccacacaggaagatatgc

SEQ ID NO: 266024 - DNA, 431 bp, Glycine max
gcagactccatggcattgtggagtgtggtgatcgacataagcacatttatcaaagaacagtgctacttgtggagcaagttaaagtgagtaaaggaagcccacttgtcacttgtctccttgaaggttcccgtggaagtggtaaaactgcactttcagctactgttggtattgacagtgacttcccatatgtcaagatagtttcagctgaatcaatgattggtctacatgagagcaccaaatgtgcacagattattaaggtttttgaggatgcatacaaatcaccattgagtgtcatcattcttgatgacattgagagattattggagtatgtgcccattggttctcgattttcaaactttatttctcagacactactggttctgcttaaacggcttcctccaaaggggaaaaaactcatggttattggcaca

SEQ ID NO: 266025 - DNA, 427 bp, Glycine max
ctgagaacttgggcaagcttacgtctctaaataagttgattctgagtggaaaccttatctgcggtgtgatcccggggacgctggggctgtgtaaggctttgcagttgctggatataagtaacaataggatcactggttctattcctgatgagatcggttatttgcaagaattagatatcctcttgaacttgagttggaattctcttactggccccattccagagaccttctcaaatctctcaaaactatccatcttggatctctctcacaacaagctcacaggtacactcacagttctggttagtcttgacaatctagtgtctctaaatgtctcctacaatagcttttctggttctcttcctgatacaaagttcttccgggatctacccactgctgcgtttgctggtaaccctgacctttgcattag

SEQ ID NO: 266026 - DNA, 434 bp, Glycine max
gttgatcgagataactagaaacagtgtgatgaaaatgaaggtccttgttttcttcgttgggacaattttggtagcatggcaatgccatgcgtacgatatgttccctctccgaatgaacactggctatggtgcccgtactccggaggtgaaatgcgcaagttggaggcttgctgtggaagcacacaacatctttggctttgagaccattcctgaagagtgcgttgaagcaacaaaggaatacatccatggcgaacaatatagatcagactccaaaacagttaaccaacaagcttacttttatgccagagacctcgaagtccatcccaaggacacatttgtgttcagtatagatggcaccgtactctctaatattccatactacaaaaaacatggatatggcgtggagaaatttaactcgaccttgtatgatgaat

SEQ ID NO: 266027 - DNA, 424 bp, Glycine max
  unsure (1)..(424): unsure at all n locations
gccacgcgtncggccacgcgttcgggatgagtttcaaggtagaaagtggcgatgcgagggagcttcagagaaccgtcctgcacacggggagttggtacaagatgggttccaggcagtccaacatcatgggatcctccactcatgtcatccgcgacggcgccgtctccgtcctcttctgcgtcctcatcgtcgcattgggtcccatccaattcggcttcacgtgtgggtattcttctccaacccaaggggctatagttcgtgatctaaacctctctatttcggagttttctttctttggatcattgtctaacgtgggagcgatggtaggagctatagctagtggtcagatagctgaatacatcgggcgcaaagggtcattgatgattgctgcgattcccaatataatagggtggcttgctatttc

SEQ ID NO: 266028 - DNA, 392 bp, Glycine max
  unsure (1)..(392): unsure at all n locations
cccacgcgtncgcagtttcggatctctcccttctctcaccaatttccaggatttgaaaaatggcagattgcaaaccaggattgaggaagccagtgttcaccaaggtcgatcagcttcgtccaaggaccagcgggcacactttaactgtgaaagtggtcgatgctaagatggtgatgcagaaaggtcgttctgatggtcctcaatcccgccaaatgcgaattgctgaatgtttggttggtgatgagactggaatgatcatattcactgccagaaatgatcaagtggatatgatgaaagagggtgctactgtgaccctgcgcaatgccaaaattgacatgttcaaaagatcaatgaggcttgctgcggacaagtggggccgtgtggaagtcaca

SEQ ID NO: 266029 - DNA, 361 bp, Glycine max
  unsure (1)..(361): unsure at all n locations
gaggctgaaaagggagcgccgaaagattgagacagagatccaagtagtgcgttaaacctagtgtgtttgcgttgcttttacaagtgcttatgttgtcaaataagacacccagttgttagtggcactggtctctcctttttgatgttttgatacattttgttggattttatttcgtcttatgttcttagctgaaaacaatgctgttactgcgtttgcgaatcaacaggatatcttgtttgcataanactgaaatgatcatattcactgccagaaatgatcaagtggatattaatgaaagagggtgctactgtgaccctgcgcaatgtcgaaactgtcatgttcaaacgatctttcaggcttg

SEQ ID NO: 266030 - DNA, 414 bp, Glycine max
  unsure (1)..(414): unsure at all n locations
gntctagatcgctgcaaaggcaatgttgttcatcaacttactgncgaagtgctgaatcggtcaaatgagaataccgtgaagctgctgagcaacataaacaacagggtgtaagctctttggtgggagatgttgagtctagtcaaggtgctttccagtattttggactgaaagaagaacaagtacctctaattatcattcaacacaatgacgggaaaaagttttttaaacccaatttggaagctgatcacattccaacttggttgaaggcgtacaaggatggtaatgttgcaccatttgtgaagtctgaacccattcctgaagctaacgatgaacctgttaaagtggtagttgggaacagtcttgaggacattgttttcaaatctgggaagaatgttctgctggagttttatgctc

SEQ ID NO: 266031 - DNA, 446 bp, Glycine max
gcgcccacgcatccgatggaacctactctactgattttattgatgagtgggtcaaaattggcttgcctgcagaggcaaacgtgaagacacagcatggggataccccttttgctgaggtgtgctcacactgtgagaaggaatctgtgaatgttttccttggaaacctgctaacttacccatttgttagagatggcttggagaacaaaacattgtcactgaaaggaggatactatgactttgttaaaggatcttttgagctctggggccttcactttggccttgcatcctctttctccgtatgaacatcaaccattatcaatgacctcatcttggttacctaagtattctcctatctaaaacgaactctgtgactaattgctcttgttataaagcatgcatgtgctgaatttcctaataataaaagtggatatggagatttctccaca

SEQ ID NO: 266032 - DNA, 374 bp, Glycine max
tcaactcaagacctgagttattaacggtgttacatatgtggctatacaaatgggatctgagagtggatcggcaaagattgggtttgatattgtcctttgcggacatcttaggaaacgtcttaaggcctgtattgaatcctgtggagagcaagaatggaacttaaatatgtaacttcataattccattgacgattgcttactagaaagcgtccttggagttatcgatgcccaaacacttgctgactcgctggctatctacctagaaaatattctacccagtgttgttggtagagcaaccattggatctatgatcatacttgctcgcacacttactttagcattaactctcttacattcacagttaggatttcctg

SEQ ID NO: 266033 - DNA, 368 bp, Glycine max
atggcttctttatttctttatgttcaaaaaaacaagattttttagatacagaagacaaaggagaaattctggggggttttattccccaattattatactaaatactatacttggagagtaatgagtataatctttggctcagacgatgacactggtatattatatggcggagggtctaaaaacaagcaatttattttgggccgttatgactttggtaggttcattggagctattgttcgttggagattccaggtatgttggcatggatatgatctttatttctgataaaattagagatttttcttttattccgaacattatttattttccatttattccacaaggggccacgatagctttttatggaa

SEQ ID NO: 266034 - DNA, 433 bp, Glycine max
cccacgcgtccggtcgattttaaattgaaaagtgacactaacctctttgaaattgcaaagggcaagacttctgtttcggctattgaggttagtccacatggtaagcaattttccattacatcacctgatcggagaatacgtgtgttttggttcagtacaggtaaactaaggcgagtttatgatgaatccctggaggttgctcaagatctccaaagaagtgatgctccattataccggttggaagccattgattttggtcgaagaatggctgtcgagaaggaaatagagaagacagaaagtgcactacttccaaatgcagtttttgacgaaagttccaattttcttatatatgcaaccttgcttgggattaaaattgttaatctgcacaccaataaagttgctcgaatacttggaaaggtggagaataatgata

SEQ ID NO: 266035 - DNA, 406 bp, Glycine max
ggaagacaaaacacaagacagagtcattcagcaaggcttgaaacgagaagcgaggatgccgatcagatgtattctgcattggcaaccgaaccaaggaagcgttgtgaacagccaagtcctgaatgagatctcgcagtgcgtcgaaagccttaacggcgtcaaagaaggaagatgcaaagccttcctcactttctacagacccaatttacgagaccaatcggtgaccatcgattttcctcgcgattttctggggatatcgatgctggagcagccgaacaaatactacttaatcattcgcggccagaagattgttctcgaggccgattcttctatcttgcttatcatggagaaactccagtcctacaagtccaaagtcgcccttcatttcgagggagtgctgtataaa

SEQ ID NO: 266036 - DNA, 413 bp, Glycine max
  unsure (1)..(413): unsure at all n locations
cccacgcgtncgaccgaatctaaaagagccgatgccaaacttgctgtgaataagaagggcgcggccacgaagactaggaaacccgccggaaaggggaaggcagcgaaagatcctaacaagccaaagaggcctccaagtgctttcttcgttttcatggaggaattcaggaaggtgttcaacaaggaacatcccgacaacaaagcagtgtctgctgtgggcaaagctgctggagcaaaatggaagacgatgtctgatgctgaaaaagcaccttatgtggcaaagtctgagaaaaggaaagtggagtacgagaagaacatgagagcttataacaagaaacaggcggaaggtcctactggtggggatgaagaagaatctgagaagtctgtatctgaggtgaatgatgaggatgatga

SEQ ID NO: 266037 - DNA, 373 bp, Glycine max
cccacgcgtccgaccacacgtacgaaagtcgttgagaacttagatggagaagcaaatggcggcctcagcgatcttttgcccagctgctaccactgtcaaccgtgccggggcccgcatgggtgctccattcactggcctgaagtccatggctggcttgcccaccacgaagaccaacaatgacattacctccattgctaccaaccgtggaagagtgcaatgcatgcaggtgtggccaccaggtggcaagaagaagatggagactctttcctacctgccagaccttgatgatgcacaattggcgaaggcaagaagataccttcttatgaagggatggattccttgcttggaatactagttggagcacggattcatg

SEQ ID NO: 266038 - DNA, 413 bp, Glycine max
ccatacatagccacttcacactcactcactcttgttgccttcatggccaagccagtgtccagtgaggtatggaacccaagtggcaaatacagagttgtcagcaccaaaccaatgcctggaactcgttggatcaatcttctcattcaaaatgatgttcgccttgaaatatgtaccgagaagaaaacgattttgtcagttgaagacatcattgctttgattggtgataagtgcgatggagttattggacagttgactgaagactggggagaagagttgttctctgctttgagcaaagcgggaggcaaagctttcagtaacatggctgttggttataacaacgtggatgttgatgctgcaaacaagtatggtgttgctgttggaaatactcctggagtgctcactgagacaacagc

SEQ ID NO: 266039 - DNA, 429 bp, Glycine max
ggagggggagcttgggattaaggtgctgagggtgcataatgctcatgacatggggccacaggcgccggggttgattttcaacgaggattcgccgcagtggttgctgaagctggtggaggggtggtttccgtggtgttacttgcacgttggagaggagttgcagttggaccataagaaatccccgtttctcaaccctgacggggatgcttcctgcgcccataacttggaggctcacttgcacttgctagatggataccatgggaagaatcgtggatttgagcgaacaagtgagagggaccttgctctggtgaacaaggactgtgacttcttgaaagatgagcattcggtgccaccacggtggaggcaagacttgaacaaaaacatggtcaggactgaagatggacgctgggtgctcgctgatcgtccact

SEQ ID NO: 266040 - DNA, 397 bp, Glycine max
gaatttccataatgctccttacatggagccaccggcgccgtgcttgatcttcaacgaatattcaccgtagtggttgctgaaactggtggaggggtggtttccgtggtgttacttgcacgttggagaggagttgcagttggaccataagaaatccccgtttctcaaccctgacggagatgcttcctgcgcccataacttggaggctcacttgcacttgctagatggataccatgggaagaatcgtggatttgagcgaacaagtgagaaggaccttgctctggtgaacaaagactgtgacttcttgaaagatgagcattccgtgccaccacggtggaggcaagacttgaacaaaaacatggtcaggactgaagatggacacttcgtgctcgctgatcgt

SEQ ID NO: 266041 - DNA, 422 bp, Glycine max
gtggaaaggaggttactattaaggaattggtcgagttgatgaaggaagtggtgggatttgagggtgatcttgtttgggattctacgaaaccagatgggactccaaggaagctgatggatagctccaaacttgcaagtctgggttggacaccaaaagtctcactcaaggatgggcttgctgatacctacaaatggtacttggagaacgtcaatctatgattcggttaaacagaatatgtggtgtcaaattctataagtacttgttatttcacaacgaagaattttttgttaaaaaaaaaattatccagagaacagtacttgaccaatttttctgtaccaattatgtgcaatgaaaatttcagtttttttttccgtgttttctagagatcatgagattaagaacccgtgttaaaaactatgaac

SEQ ID NO: 266042 - DNA, 430 bp, Glycine max
gcaaaagagcgtcgtagtcgcaaccctaatcagaagaagcgcagcttcaagcgagtgacagccaccagcgatgggtcgtatgcacagccgcggtaagggtatatcctcttctgctttgccctacaaaaggacacctcctagctggctcaagatctcttcgcaagatgtcgaagaaaatatctgcaagtttgcgaagaaaggtttgaccccgtctcagattggtgtcattctcagagattctcacggtattgctcaggtcaatagcgtcactggcagcaaaatccttcgcatcctcaaagctcacggacttgcgcctgaaattccagaggacctgtaccatttgattaagaaggcagtttcaattaggaagcatcttgagaggaacaggaaggacaaggactccaagttcaggttgattcttgttgagagc

SEQ ID NO: 266043 - DNA, 444 bp, Glycine max
  unsure (1)..(444): unsure at all n locations
gcgcccacgcgtncgnccacgcgtncgnccacgcgtncgggcccccctctctctcaccctcctgttcacacggtttctgtgcgctctaacaaacattctcgttcacactttcagattgtgtgaagatgggggcgggtggccgaactgatgttcctcctgccaacaggaagtcagaggttgaccctttgaagcgggtgccatttgaaaaacctccatttagtctcagccaaatcaagaaggtcattccacctcactgtttccagcgttctgttttccgctcattctcctatgttgtttacgacctcaccatagccttctgcctctattatgttgccacccattacttccacctccttcccagccctctctctttcttggcatggccaatctactgggctgtccaaggttgcatccttactggagtttgcgtcattgcccatgagt

SEQ ID NO: 266044 - DNA, 396 bp, Glycine max
cggacgcgtgggaccacacatgggaaaaattaattctcaaggatccacaagatccttccacgccaaatggagtttcatacaaaacagcagcgagagagaaactgataaggcagggatacaacattgttgggatcattggagaccaatggagcgatctcctcggaggccacagaggcgaaagcaggacctttaagcttcctaatcccctgtactacattcagtagttccttcacctctcaacaatctagcttgctcctatctatctatatgtaataagatgcgttcaaataggggcactagcttcactttatgttgtttcagctgtgtgtcaacaagtcatgtaagagacttcactatgttgttttctctttcgtggctttaataaattatgcgccc

SEQ ID NO: 266045 - DNA, 425 bp, Glycine max
  unsure (1)..(425): unsure at all n locations
cccacgcgtccggtcagttgcaggaaaaatggtttcgctgaaactgcagaagcggctcgcggccagcgtcctcaagtgtggcacangaaaggtttggcttgaccccaatgaagtcaacgaaatctccatggctaattctcgccaaaacataaggaagctggttaaggatgggtttattatcaggaagcccaccaagattcactctcgctcacgtgcccgccgaatgaaggaagccaagaggaaaggacgtcactctggatatggtaagcgtaagggtacaagggaggcaaggcttcccactaaaatcctttggatgaggagaatgcgtgtgcttagacgcttgcttcgcaaatacagggaatctaagaagattgacaagcacatgtatcatgacatgtacatgaaggtcaagggtaacgttttca

SEQ ID NO: 266046 - DNA, 432 bp, Glycine max
caagggtttggcggatttggaagctgcactttgcctatgcaccgcaattaagagcaatgtgcttggaatcaacttgaacgtacctgtgacgctcagcgtgatccttagtgcttgtcaaaagactgtccctcctggtttccaatgtccctcctgagataatcaaattaggttcatgagatatctctcgtcatcagagaaatgtttagatatgcacttaacatgaaattgattgactgcctatgtaagcatttctttggcaatttgcagagtgttatatatgtttttttttatgtattactgtagttgctgtttttttgttgggggtttatatcgttgttaatgctagtgcacgtacatgttctaaataatgttgtattgttttgcttcgttaaattatgaattgggcaagcttgtttgccttaatttgtcaaa

SEQ ID NO: 266047 - DNA, 295 bp, Glycine max
gttcgcgatgagagccaagtggaagaagaagcgtgtgaggaggttgtagaggaagcgccgaaagatgagacagagatccaagtagtgcgttaaacctagtttgtttctgttgcttttacaattgcttatgttgtcgaatgggacacccagttgttagtggcactggtttctcctttttgatgtttgatacattttcgtggattcaagtagtttatgttcgtcttatgttattagctcaaaacaatgttgttactgcttttgctaatcaacatgatctcctatttgcatctctgaa

SEQ ID NO: 266048 - DNA, 452 bp, Glycine max
  unsure (1)..(452): unsure at all n locations
gacgcccacgcgtncggtgaagatggggtcagaggtgtctaaacagatggagcgaagaaagacagtccagacggagaagaagagtctgtccgatctgaaaagcagcggagaagactaccctggctccgactaccgtccccaagacagaaaaaactggatgtcccatctcgaccctcagaaactccgcatcaaccaaatcgtctggcccggcacccacgactccgcaaccaacaaaattggcattcctctcctcactcgccccttcgcccagtgccaatccctctccatctaccgccagctcttcctcggcacccgcgtcctcgacatccgcgtncaagaacaccgccgcgtctgccacggtatcctcctcacctacggcgttgacctcgtcctcaacgacgtcaagaagttcctttccgacacgcagtccgaaatcataatcctggagatta

SEQ ID NO: 266049 - DNA, 369 bp, Glycine max
  unsure (1)..(369): unsure at all n locations
accaccgtcgccaccgtncgccacctncgaaaatctctttcgttcagattaggttaccgggcagtgaggcatggcaaaaccaaagcgaatctctctgcgtatctttgcgctgctcctcttgatttccacctcttcgtttcagcttctccgcgcttccgatgacgccgatgatgatgcgatcttctatgattcgttcgacgaggattttgaagaccgttgggttgtgtctcagaaagatgagtacagtggtgtctggaaacatgccaagagtgagggacatgatgattatgggcttcttgtcagtgagaaagcaaggaaatatgctatagtaaaagaacttgatgaggccgtgagtctcaaggatgaaac

SEQ ID NO: 266050 - DNA, 423 bp, Glycine max
acacaacaaaaaaagacaacacagagagaagcgtcttaataaacgctcttctctgaaaaacgtgatttcttctcttcttctcttctctttcgtttcgatcttcgatctctgaaaatgagagagtgcatttcaatccacatcggtcaggccggtattcaggtcggaaacgcctgctgggagctctactgcctcgaacacggcattcagcctgatgggcagatgccaagtgataagactgttggtggaggtgatgatgctttcaacaccttcttcagtgaaactggggctggaaagcacgtgcctcgtgcgatttttgtagatctcgagcctactgtgattgatgaagttaggactgggacataccgccaactatttcatcctgagcagctcattagcggaaaggaggatgctgcaaacaacttt

SEQ ID NO: 266051 - DNA, 432 bp, Glycine max
cggacgcgtgggttctgctacccactctcttcttccaagtccaaccacgcttttctctacagtcatgggcaaggtcaagatcggaatcaacggatttggaagaattggccgtttggttgccagagtcgctctgcaaagagacgatgtggagctcgttgccgttaacgaccctttcattaccaccgattacatgacatacatgtttaaatacgacagtgttcacggacactggaagcatcacgatgtcaccgttaaggacgagaagacccttctcttcggtgacaagccagtcactgtttttggacacaggaaccctgaagagatcccatgggggtcaactggagctgatatcattgttgagtccaccggagttttcaccgataaggacaaggccgccgcacatttgaagggtggtgcgaagaagttattatt

SEQ ID NO: 266052 - DNA, 394 bp, Glycine max
  unsure (1)..(394): unsure at all n locations
cccacgcgtncgcacaagccaagtgaaagtgagaaaaaataaaaatcaaagagcataatgcgagggatcatccacacgattggggagacccttcatgtgggagggcacaagaaggaggaggagcataatggtgagcaccatgctggagaatacaaaggggagcaccatggtgaacacagtagtgagtacaaaggagagcatcatggtgaacacaaagctggagagtaccatggtgagcacaagccagagcacatagaggggttcctagacaaagtcaaggacaagatccatggtgagggcggcgccgccgagggcgagaagaagaagaaggagaagaagaagaatgagcatggccatgagcatggccatgacagcagcagcagcaatgacagtg

SEQ ID NO: 266053 - DNA, 190 bp, Glycine max
tgcacacgccgaggacactgaatttgtatgatattcttgatgcggataagcttgtgctcacgcagggtgctgtggattacttgaatcagacgtatgggggtgattatcaagggagtgatgatgaagatgaagaagaagaagaagagggatattaaaagggtgaagaagaaagtgtaatggatggtgaaaa

SEQ ID NO: 266054 - DNA, 291 bp, Glycine max
cgaatgaacactggctatggcgcccgtactccggaagtgaaatgcgcaacgtggaggcttgctgtggaagcacacaacatcttttgctttgggaccattcctgaagagtgcgttgaagcaacaaaagaatacatgcatggcgaacaatatagatcagactccaaaacagttaaccaacaagcttacttttatgccagagacctcgaagtccatgccaaagacacatttgtgttcaatatagatggcaccgtactctctaatattccatactacaaaaaacatggatatggg

SEQ ID NO: 266055 - DNA, 426 bp, Glycine max
cccacgcgtccgagctgcttctcctatggcaagccaactcaagtccaccttcactaagactcttgtagctcccaagggcctctctgcctcttcaccactccacctcctgccttctaagaggcaatttagcttcactgttagggccatccaatcagaaaagccaacctatcaagtgattcaaccaatcaacggtgatcccttcattggaagccttgaaaccccagttacatccagccccttgattgcatggtacttatcgaacctccccgcatacaggaccgcagtgagcccactactaagagggatcgaggtgggcctggcccatggctaccttctggtgggcccattcgtgaaggccgggcctctgaggaacaccgagatcgccgggcaagcgggctctctcgccgctggtgggcttgtggtgat

SEQ ID NO: 266056 - DNA, 289 bp, Glycine max
cccacgcgtccgcagactcggacgactcagagtgttcatacaatgtacgcatcattggagcgagttgccatcatatctagcagcatagggcagagaaccagtagaggaaaacgcgactcttggaccagataggagagatggcgaacatgtctcttggcctggctggcatatctgcctactttagtgataccttcattcatgtcactgacctgtctgagaggacaacgctttctctcatcactgatggtatgaatgttaatgatgacagatatgaatgatctacttatgc

SEQ ID NO: 266057 - DNA, 320 bp, Glycine max
gctacgcctgcgatatcctatacgagttcaacacatgtacaacttcactcgggctagggaaactctcaagggccattctgcctcttaaccactccaccttctgacttctaagaggcaacttaacttcactgctaaggccatgcaatcagaaaagccaacctatcaagtgattcaaccaaataacggtgataccttcattggaagcctctgaaccccagatacatacaggcccttgattgcatggcacttatcgaacctcaccgcatacatgaccgccctgaactcactactacaaagcatcgacgagggccttgcccatg

SEQ ID NO: 266058 - DNA, 433 bp, Glycine max
  unsure (1)..(433): unsure at all n locations
atacagttcctcactatggcagaggaatctaagcctaaatgggaaggtaaatccgtgactgagctaccaggcacggatgcagaacaagtatggactgcgttagaggatttctgcaacctacacaagtggtggcccatagaaacatgttaccaactagagggtgtaccaggtcaacctggtctaatccgctactgtgcttccaccgttgaagaagctgttgttggtgctcagaagacaacaacaaccatcaagtggaccaaagagaagctactcgcgatcgatcccgtccaacgttgtttgtcctatgaaattgtggaaaacaacatgggatttaagtcctatgtggcaacactcaaagtgctgcccctgaatggagatgggtgcaagatagattggnggtttgtctgtgatcctgttgaaggtggagtttcca

SEQ ID NO: 266059 - DNA, 419 bp, Glycine max
gaaagatgatgaggttaaggtggagtttagtcgtaacggtcacgttcgctgttttgctgttttggagtggatcgctgcaagttcaagcctctaattctgtttccgccttcgttcaaaacgccatctactccaacagaatcgccgttttctccaaatcctattgcccctactgtttgcgcgccaaacgcttgcttgctgagctcaatgagaaaccgtttgtggtggagctcgatttgcgagatgatgggtatcaaattcagagtgttcttctggatttgataggtagaaggacagtcccgcaagtatttgtgaatggcaaacatattggtggatcagatgatctcagtgctgccgtccaaagtggtgaaatgcagaaacttctcagtgcaagtgatggtgtactagagattacgagcact

SEQ ID NO: 266060 - DNA, 415 bp, Glycine max
tcgccacgcgtccgatagccatggctacttcatcaaccacattattgcactcatcactcgatacctgcagcatcccatcattcaactctggatccattcagtttttttgcttcaaaaccgttctttgaatcgacccaagaagagagtttccttcgttgttcaagcagccaagccccctattggtgtggaaattccaaaggtgcagcctcaatttaagcctccagttcttgggttcactaagactgcagaagtatggaactctagagcttgcatgattggaatcattggagttggtatcgtagagattataataaacaagggcatacttcaagtgattggggttgacgttggcaaaagccttaatattgctctctgaacattatttttggctgtgctcgtgaatgttggcatatat

SEQ ID NO: 266061 - DNA, 358 bp, Glycine max
cggacgcgtgggcggacgcgtgtgcgaactgtaggttggcgtgaccctggttggatggacacaagtttcttaaaagaactgtggccaaattttacgtacacttacatgttggggcatatgctgtctaacggttcttatgtatggagtaagatgtattcattcaaggcatacccatatcctggacagaactctttgcaacgggttatcatatttggtgacatgggaaaggctgagcgtgatggttcaaatgaatatgctgattatcaaccggattctctaaacaccacaggaccaactcgttaatgatttagaaaaatatgacattgttttgcacatacgatacatgccttatgcaaat

SEQ ID NO: 266062 - DNA, 430 bp, Glycine max
gtcactcataactaaaaaggagaagcaaatggcttcctcaatgatctcttccccagctggtaccactgtcaaccgtgccggtgccggcatggttgctccattcactggccttaagttcatggctggcttccccaccagaaagaccaacaatgacattacctccattgctagcaacggtggaagagtgcaatgcatgcaggtgtggccaccagttggcaagaagaactttgagactctttcctacctgccagaccttgatgatgcacaattggcaaaggaagtagaataccttcttatgaagggatggattccttgcttggaattcgagttggagcacggtttcgtgttccgtgagcacaacaggtcacccggatactacgatggacgctactggaccatgtggagctgcctatgttggttgcactgatgc

SEQ ID NO: 266063 - DNA, 341 bp, Glycine max
cccacgcgtccggtcggtttctgttggtgtgactaataaactcatagcttcaagtgttgctggtgcccatgttggttccaatagaaagactgtataacgtaaggaatcacgaattgtgaagcaacctattcctgtgccatccaatgtcacggtcaaattggtaggacaggatatacaagtgaaaggtcctttgtgagaacttgcattaacttatcctcgagaagtgttggttgagagggaagagtcagggactctaagggttaaaaaggcagttgaaaccagaatggccaatctaatgcatgggctttttaggacacttacagacaacctggtgattggag

SEQ ID NO: 266064 - DNA, 338 bp, Glycine max
  unsure (1)..(338): unsure at all n locations
cccacgcgtncggaacataccaatctacattaaacgatgattctcattatctccctcagggtttcgggtctatctttctcccatgcttatgtcctatatttctgcgttgcagattatgcaggtcctattggacctgccagatatttctgcaagatgccttcaaaggtcacagcagatgattgtgcttacagtggccttggcattgctggttacacctcaaacattatcaaagctgcagtgacccctgcatttgatgctcagtttgctggtctcaacggtcttggcatttccgcaacacgtttggacttaacagcacgtggagttataccacttcacac

SEQ ID NO: 266065 - DNA, 412 bp, Glycine max
gcactttcacttttgctttgagatggctaagtcgaagaatcacacagcacacaatcagtcctacaaggcccacaaaaacggcatcaagaaacccaagaggcatcgccacacttccaccaaagggatggatcccaagtttctgaggaatcagaggtacgcgaggaagcacaacatgaagagtggtgaaacagccaccgaggaagagtgaaatggcactttctaacggaaccattacggtttttttatgctcatttttttggttaaactttgcttgaaatcaacgttcagcagtataattaatttgtttacagagaatgcagtacttttatagcaattttactggtttctactgaaaacccttcaattacttattatcatcaatggaatgctaatgcgttacgtgttttttagt

SEQ ID NO: 266066 - DNA, 420 bp, Glycine max
ccgattgctagaatggaatttcgatgctcagtcatctcttttaccattctcttctctgttgctcttgcaggagagagccatgtccatgcatcgctacctgaggaagattattgggaagctgtttggccaaacactcccattcccactgcactgcgagagcttctaaagcctctccctgcaggtgttgaaatcgatgaactccctaagcaaattgatgatacacagtacccaaaaacattcttctataaagaagaccttcatccaggcaaaacaatgaaagtacaattcaccaagcgtccctatgcacaaccttatggtgtatatacatggttaacggatattaaagacacctctaaagaaggatatacgcttgaagagatatgcatcaagaaagaagcgtttgagggagaagagaagttt

SEQ ID NO: 266067 - DNA, 429 bp, Glycine max
  unsure (1)..(429): unsure at all n locations
ctttagttcttcagtaatttattgtgggattctattctaagattttgagaatgtctagctgtgggtgtggaagcagctgcaactgtggcagcaactgcggttgcaacaagtactcttttgacttgagttacgttgagaagacaaccacagatactctagttttgggtgttgggcctgtgaaggcccaattggagggtgctgaaatgggtgttgcatctgagaacggtggctgcaactgtggatcaagctgcacctgtgacccatgcaactgcaagtaaggtcaagatgtataaccttgaagcagagatagctgtaatatatgtatcaacaaataatangaagtagaagttgcgtatggagctttagaataaagtgtatgctatgtgtcttggtggtcctttataaatatgtaacttgaatcatcaatct

SEQ ID NO: 266068 - DNA, 367 bp, Glycine max
tgacctgccccccaatcccattcatcctctgactcttcttctcttcaaaacaaacaaaggaatatccgtttttccaaaactccattaccattaccattcacaatgagttattacaaccagcagcaaccgccggtcggagttgcgccgccgcaaggttatccgccggaggggtacggaaaggagggatatccaccgccgggatacccgccagcgggatacccgccagcgggatacccaccgccgggatatccgccacaacaaggctatcctccgccgtcctacccggcgcatgggtatgctccgacctacgctcctcaatacgctcagactgcgccccgtcaacaaaattcaactggccctggttgtt

SEQ ID NO: 266069 - DNA, 362 bp, Glycine max
ctattgcaaagaatctgtctgacctcagttgtaaggtggtgaccacaattattggaggaggagattctgttgcagctgtggagaaagtaagagttgctagtgtcatgagccacatatctactggtggtggtgccagtttggagttattggaaggcaaagagcttccaggagtccttgctcttgatgaatccgtcccagtcgctgcgtaagacacttttcatcttggaaaattttcccatcctcacgtgtcagtgctgtcaatcttgtaaaagagcatatgttctaggacccttcgtagtctgttagagtaaattttatcttgcttgagttattattggcttcacacataaattgcgcgtaac

SEQ ID NO: 266070 - DNA, 428 bp, Glycine max
ctctactatactgcttcaccttctgctctagaaaattcagtgctgaaacatggcttcggctactctctctgtagccaaaccagcccttcaggcaaatgggaaaggcttctctgaattctctggcctccgaagctcatcaggcttccttcccttttctagaaaatcttcagaggatttccattctgtcattgccttccagacctatgcagttggaagcagtggaggatacaagaagggtgtgacagaagcaaaactgaaggttgccataaacgggtttggaaggattggaaggaacttcttgaggtgctggcacggtcgcaaagactcccctcttgatgtcattgccatcaacgacaccggcggcgtgaaacaagcctctcaccttctcaaatacgattccatcctcggaaccttcgatgctgatgtca

SEQ ID NO: 266071 - DNA, 431 bp, Glycine max
cccacgcgtccgacttatcatgaccactttcaaaacggtgggacggttaactttgatgtgtggggatggaaccaatgatgttggagctttgaaacaggcccatgtaggaattgctcttctgaatgcattgccttcaactcaaagtggaaactcctcttcagattcatctaaggaagaaggttcaaaatctggcaagcaaaagaaatctaagcctgctagtgaaggcacttcaaaagccaaagttgcttcaaaatcagattccactagtcactcatctggtaaccgtcatcaggcagctgttgagatgcaacggcagaagcttaaaaagatgatggacgagcttaatgaggagggagatggtcatgcacccattgtcaagcttggggatgcctcaatgcatctccattcactgctaagcatgcatctgttgc

SEQ ID NO: 266072 - DNA, 398 bp, Glycine max
cagggattcagtggaactttaacagaaccagttgagaaaacaggtgatcaaattaaagaaatggaactgaaggttcatccaaaattgagacaacctttgacagcactatgcagtgatccaaataccacagttgttgtgctcagtggaagcggtagacaagtcctagatgataacttcaaagaatacgacatgtggttggcagctgagaatggaatgtttttacatccttcaaagggtgagtggatgactacaatgccagagcatctgaatatggaatgggttgatagtgtgaagcatgtttttgagtacttcacagaaagaacacctcggtcacattttgtttttgaagaaagggaaacttcacttgtatggaattacaaatattcagatgttgagtt

SEQ ID NO: 266073 - DNA, 408 bp, Glycine max
gaaaaaacaacaccggtttaacatgtggaagcattcatacttgaagacttgtgctggcattgatcgctaactagagcagaatcgcaagatagattcattttacagtggaacaactgtcttgtcaattgttagacagggtgaactcattatcattgcaaacgtcggtgactctcgtgctgtgttagctacaacatcagatgatggaagtttggtaccagatcagctgacagtagatttcaagcccaatttacctcaggaagcagagagaatacttgagtccaatggacgagttttctgcttagacgacgagcccggagtgcacagggtgtggttgccggatgaggagtttccaggacttgccatgtcaatggcttttggagactactgcgtcaaaaagtatggccttat

SEQ ID NO: 266074 - DNA, 336 bp, Glycine max
gccactcctcctatggcacgctaactcaaggccacctttactaatgctctcggatcggctaacggcctctctgcctctgcaccactccacctactgccttctaagaggcaatacagcctgactgatagggccatccaatcagaaaagccaacctatcaagtgattcaaccaatcaacggtgatcaccttcattggaagcctagaaaccccagttacatacagccccttgatcgcatgggacttatcgaacctgccagcatacaggaccgcagtgagcccattactaatacagatcgacgtgagcctggcccatggctaccttatgatggtcccatt

SEQ ID NO: 266075 - DNA, 403 bp, Glycine max
cccacgcgtccggtgagtttgttgatcgttataactagaaacagtgtgatgaaaatgaaggtccttgttttcttcgttgctacaattttggtagcatggcaatgccatgcgtacgatatgttccctctccgaatgaacactgtctatggtgcccgtactcctgaggtgaaatgcgcaagttggaggcttgctgtggaagcacacaacatctttggctttgagaccattcctgaagagtgcgttgaagcaacataggaatacattcatggcgaacaatatagatcagactccaaaacagtttaccaacaagcttacttttatgccagagacctcgaagtccatcccaaggacacattttgtgttcaatatagatggcaccgtactctctaatattccatactac

SEQ ID NO: 266076 - DNA, 337 bp, Glycine max
cccacgcgttcgcccactcgtccgcccactcgtccgtaaaaaaaaaaaaaaaaaaaaaaggaaaaaaaaaaaaaaaaaaaaaaaaaaaaaaaaaaaaaaaaaaaaaaaaaaaaaaaaaaaaaaaaaaaaaaaaaaaaaaaaaaaaaaaaaaaaaaaaaaaaaaaaaaaaaaaaaaaaaaaaaaaaataaaaaaatataaaaaaaaaaaaaaaaaaaaataattatattgggggggggggccctttaaaaaaataaatgttatatcacaggtgtggtaaaatataatatttttttaaatgtgaaaaaaaaaaaaaatatgcggggcgtttttttttat

SEQ ID NO: 266077 - DNA, 490 bp, Glycine max
  unsure (1)..(490): unsure at all n locations
ttcccgggntcgactccacgtcgtctcgcaccaaagagtaagccattagcaccctaggagtcagcaacaaccctagtctcagnnctgaaatgggccgtgcttcgagtgatggcgatctgtggcgcctcaaaccctgcnnccctttcatctgggttgagacagtcctcnnagtgagaggccccttccctctcttcttcaaggaaccctcttcttcattcagagtctgtggcccagtggcaagtaagatccaagactgacaaactcttatggaattaatggtggcatggctttgagggatggaactgatgcatctggcaggaaaggaaagggaaagggtgtttaccagtttgtagacaaatacggtgctaatgtcgatggttacagtcctatctacgacaccaaggactggtctncaaccggtgatgtctacgctggcggtacgactggcttngctatctgngctgtgactctacttggtcttttagctggt

SEQ ID NO: 266078 - DNA, 269 bp, Glycine max
ataatatattatttatatttttttattttatttttatttttattttttattaaaaaatttataaatttttaataatattaatatttataaattttattaaaaaaaaaaaaaataaataaaaaagatggaaattattttttaaaaaaaaaaaaaaaaaaaaataaaattaccattttataaacaaatattttaaaaaaatatataattacataaattttttattaaaagaacaattaaaaaataatatgttaaaaaaaaatatataaaaa

SEQ ID NO: 266079 - DNA, 416 bp, Glycine max
gacgaaaatgaaggtgcttgttttgttccatgatacattcttggtagcatgggaatgggatgcgtgcgatatattccatctccgaatgaacactggctatgagtgccgtactacggaggtgaaatgcgcaaggtgaaggctagctgtggaagcacacaacatctttggctctgagaccattcctgatcagtgcgttgaagcaacatatgaatacatacatgactaacaatatacatcagacttcaaaacagctgaccaactagcttactttcatgccagagacctagaagttcattccaaggacacatttgtgtgtagtatacatggtcccgtactctataatattccatactacagaaaacatggatatggcctgtagaaacttaactcgaccttgtatgatgaatgggttaaca

SEQ ID NO: 266080 - DNA, 425 bp, Glycine max
  unsure (1)..(425): unsure at all n locations
cacgttcttctctccatctcgaaacaccatctctgcctcagtcccaacccatcaccagtctcatggctgctctagctctagcacttcttcttctggctttcaccggcacttcaagtgctacatggtgcgtttgcaaggatggaagcgacgcgatcctgcagaagacgttagactatgcttgtggagctggtgctgactgtaaccctcttcacctaaacgggccttgttttcagcccaacaccgtcagggcccactgtaactacgccgtgaacagctacttccaaaagaagggtcaagctcaagggtcatgcgagtttgcgggaacagccactgttactgcatctgaccccagctctagcggctgtgtctacccttctagcgtcagcgctgcangcacttgtacaactnctgtgactactacacca

SEQ ID NO: 266081 - DNA, 387 bp, Glycine max
gaaacctctcagcccctctccgatcaaatggccaccgtaatcgacggcaaatccgttgcgcaaacgatccgatctgaaatcgccgacgaggtgcgccagctctctcaaaaatacggcaaggttccgggattagcggtggtgatagtagggaacagaaaagattcacagagctatgttggaatgaagagaaaggcatgcgctgaattgggaatcaaatccttcgatgtggaccttcccgaacaagtctcccaagctgaactaatcaaacaagttcaccagttgaatgctaaccctgacgtacatggtatattggttcagctcccgttgcctaagcacataaatgaagaagaagttctgactgaaaatcagccttgagaggatgtagat

SEQ ID NO: 266082 - DNA, 380 bp, Glycine max
cccacgcgtccgcaaggagaggctgatactattccaactccggtagttattattgatcaagactctgatccagatgcaactgtggtcgagataacctttggtgatcgccttggggctcttcttgacactatgaatgcgttaaaaaacttggggctgaatgttgttaaggcaaatgtctttctagattcttctggcaagcacaacaagttttccatcacaaaagctgattctggaagaaaagtggaagatccggagttgttagaggcaatccgcttgacaatattgaataatatgattcagtatcacccggaatcaatcgcccaattagctctgggagcagcttttggacttgtgcctccaaaatagcacgttgacgtgga

SEQ ID NO: 266083 - DNA, 365 bp, Glycine max
cacacaagaaaatccatggttttacaccattacccatgaaaatgtgaattcgggagccatgtacgagccttctttgaaaaaatggcatcatccaactatatcaacaccgcccacaaaattgattgttttacctgtggcttcttctggcggcttagtttgctttcttgacattggtcatcgaaacttctttgtttgtaacccactgactcaatccttcaaggagttgccagctcgatcagtcaaggtctggtctcgtgttgctgtagggatgatggcaaatggaaactttgctggttcaagctacaagatcgtatgggtaggttgtgatggagaatatgaagtatacgactcagtcagaaattctt

SEQ ID NO: 266084 - DNA, 353 bp, Glycine max
tgtccattttattccgaaagatactagaaagttttacataatatatataatatagtacgaaagatgatacactgtttatgtacaagcacactcacaagagcagcaaatcacataattttgcttcatgctggtccacgacatggcagttgatccattgagtgtaggaaacttgggacttcagatggctcgtactatggaaaaatttgaggcactagaaggttttgtaaaccaggcagatcaccttaggcaacatactctgctgcacatgtcacgcatcctgtcaattcaccaagctggtcgcggcttgctggctctcgaagaatactttcatcgtcttcgtaccctttgctctc

SEQ ID NO: 266085 - DNA, 431 bp, Glycine max
cgccggatctgctaaaatacgcttgatccatatgggcctcctcgaccacttgtgggacgacaccgtcgccggcccaaggccggaaaacggtctcggcaagctccggaaacaccacaccttcactttccgacctagctccggcaaggaagcggagggcgggagcgtgagatcgtacggtgacgaatcgtcggaggaagcgactagagtgacgcgtagtatcatgatcgtgaaaccgccagggtaccagagtggatcgcctccggtttctcctgccggttctactcctccgatttctccgttttccggaggaaaagattcgcttcggtttcgaagaaggtcgggatctgatgcgtacgagaagagagggcagaacagatcaggcccttcttctcctttcgatgtgtgacgcattttctcgtacctgaaagctg

SEQ ID NO: 266086 - DNA, 406 bp, Glycine max
ctccaaaaatgggaagatcaccatgctgtgacaaggtgggtttaaagaagggaccgtggacgccagaggaagatcagaagctcttggcttatattgaagaacatggccatggaagctggcgtgctttgccagcaaaagctggacttcagaggtgtggcaaaagttgcaggttgagatggactaattatctaaggcctgatattaagaggggaaagttcagcatgcaagaggagcaaaccatcattcaactccatgcactattagggaacaggtggtcttcaatagctacacatttgccaaagagaacagataatgagatcaagaactactggaacactcatcttaagaaaaggttagacaaaatgggcattgaccctgtgacccacaagcccaagaacgatgccct

SEQ ID NO: 266087 - DNA, 386 bp, Glycine max
  unsure (1)..(386): unsure at all n locations
ccctgttggattcaacattgttgatgtcttggcttggggctccattggccatgttgttgcttactacatcttggccaccactagcaatggctatgaccctgcattctttggctgatttaatttcatcatcatgttgttccaactgtgtttcttgcttactttttagtatgtaatgtaatcaatgtcatgatgtataggttctctctaaagatccaacaagttcagcatatgctaatttgatcactattttcggttgcaatttggtttgctattatgattaatggaaaatgggacttctctaaaaaaaaaaagannnaanaaaacatactaaaacatacaactaaanaaatcttaaaaaaaaacaatctaatttcactgtacttgac

SEQ ID NO: 266088 - DNA, 373 bp, Glycine max
ctctgagaccattcctgaagagtgcgttgtagcaacataggaatacatccatggcgaacaatatagatcagactccaaaacagttaaccaacaagcttacttttatgccagagacctcgaagtccatcccaaggacacatttgtgttcagtatagatggcaccgtactctctaatattccatactacaaaaaacatggatatggggtggagaaatttaactcgaccttgtatgatgaatgggttaacaagggcaatgcaccggcactgtccgagactcttaagaattacaacaagctggcgtctcttggcttcaagattatattcttgtcaggaagaacactggacaaacaggccgtaacagaaggaaactta

SEQ ID NO: 266089 - DNA, 384 bp, Glycine max
  unsure (1)..(384): unsure at all n locations
cccacgcgtccgcccacgcgtncgatcgagataactagaaacagtgtgatgaaaatgaaggtccttgttttcttcgttgctacaattttggtagcatggctatgccatgcgtacgatatgttccctctccgaatgaacactggctatggtgcccgtactccggaggtgaaatgcgcaagttggaggcttgctgtggaatcacacaacatctttggctttgagaccattcctgaagagtgcgttgaagcaacaaaggaatacatccatggcgaacaatatatatcagactccataacagttaaccaacaagcttacttttatgccagagacctcgaagtccatcccaaggacacatttgtgttcagtatttatggcaccgtactc

SEQ ID NO: 266090 - DNA, 434 bp, Glycine max
aagattttatccaattgaaattttaaatatgactgggataaacttaagaattcaattggtgaaattgaataagtaaacaatttaattggattggtcgaatggtatcaaaaaaatggagtactaactcccatttcttatttattattgaattaaccgatcaacttgctttgttatcgaacatttctttttgatttcaaaaattttccggaaaaaatttgaatctatttttatatgcgaatcaatcctactacttctggtcctgaggtttctgcgcttaaaaaaaaaaatctgggacgtatcgcccaaataattggtccggtactagatgtagcttttcccccatgtaagatgcctaatatttacaacgctctgatagttaagggtcgagatactgttggtcaacaaattaatgtgacttgtgaagtacagcaatt

SEQ ID NO: 266091 - DNA, 434 bp, Glycine max
atcgagataactagaaacagtgtgatgaaaatgaaggtccttgttttcttcgttgctacaattttggtagcatggcaatgccatgcgtacgatatgttccctctccgaatgaacactggctatggtgcccgtactccggaggtgaaatgcgcaagttggaggcttgctgtggaagcacacaacatctttggctttgagaccattcctgaagagtgcgttgaagcaacaaaggaatacatccatggcgaacaatatagatcagactccaaaacagttaaccaacaagcttacttttatgccagagacctcgaagtccatcccaaggacacatttgtgttcagtatagatggcaccgtactctctaatattccatactacaaaaaacatggatatggggtggagaaatttaactcgaccttgtatgatgaatgggt

SEQ ID NO: 266092 - DNA, 372 bp, Glycine max
ctctagggtttttagctcctccaaattcttcgcccaacatgggtcttcaaaatgatggtgatgtgctaaatcccccggctgagcttgagaagaggaaacacaagctcaagcgtcttgttcagtcaccaaactctttcttcatggatgttaagtgccagggttgcttcaacataaccactgtctttagccactctcagactgttgttgtatgcggaaattgccagaccgtcttgtgccagccgacaggcggccggtcaaggctaaccgagggatgctcctttaggaagaagggagactgagtggtgtgccatctttttttgcctgtgattggagagtttcagtaatgcactcttttgttttggttatgggcaa

SEQ ID NO: 266093 - DNA, 365 bp, Glycine max
gtaaaactcaaaatctagtttcatactttttttcttcttcttgaaatggctctccaggcggcttctgttgttcctgcttctttctcggttcttaaagagggaaagagtggcgtgtctctcaaggactccaccttgttcggtctttcattttcagaacctatcaaagctaacttcagctcttctgcattgaggtgcaagagggaattcgaacaaaagctctgtgctgtgagggccgaaacagtggctacagcctctccagcatttaccaagtctacaccataaggcaagaaaacattgatgaagggcagcgttgtgataactggggcttcatctggactaagcctggccactgctaatgctttggc

SEQ ID NO: 266094 - DNA, 443 bp, Glycine max
ctttcttcttattgttcatgtaatagtaataatttcatggctattccatctcctaaaagtttcctgctcttaacattcttcttctcacattctatagctgtgaagtcctccaatgtttccacaaccccaacattgcatgcaaccttcccatttcctgaagttagcagcttcaattcatctaagctttcaatctcaataaacataaatccaaacatcatcaacacccttcttcagtccctccaagcagcaatatctgaagccacaaaactatctgatctattaaacaacgctggacataacatcatagagaacaaaataggagcagtccaagactgtagagaacttcaacaatccaccttagcttcctttaaaagatcactatcaggaatccgttccaagactccagaaactagttgatgcaagaacctacctcagtgcagcac

SEQ ID NO: 266095 - DNA, 391 bp, Glycine max
ctcaaagtctccacattatattatagagcaataataataataataatatgggtaacagcggaaggtgttgtttggcttgcattcttccgtgtggagccctagacttgatccgcatagtgcacttgaacgggtacgtggaagaaatcacgcgtccaatcacggctggggaggttctgaaggcaaatccaaaccatgtcttgagcaaacctagctcccaaggcgtggttcgccggattctgatcctcgcaccggagaccgagctcaagagaggaggcatatacttcttgatcccggcggcatcgttaccggcggagaaaaagaaaagacacatgaaacatgtgaaacacgtgagtggtaaccacggtgggtagtgatagtagtaataagaatg

SEQ ID NO: 266096 - DNA, 325 bp, Glycine max
  unsure (1)..(325): unsure at all n locations
tcgcccacgcgtccggcattgcattggcgagaccaccgcggtggagcgagcgagcgagcaagcgacgacggaaattgaattgctcgtgcgcgtgcgtgcgtgatcgtttgattgtttggatcttgtggtcgatcgaggacgatgtcggagatggcgagcccagatcccgagggactcgacggagtccggatgacgtggaacgtgtggccgcggacgaaggtggaatcaagcaagtgcgtgatccctctggcggcgacggtggctctgatccgtgcccaccctgacattcaccgncttccgtacgcccctctacgttgtaagacct

SEQ ID NO: 266097 - DNA, 316 bp, Glycine max
attgtaaatccaggcatttaggacattcatttcacgttacatgatttatgttcattgagaacgcacgatacgtgatgatgaatatgtcacataggggtctgaaaacatgagccagcgctctattgagggatcaagacacaccgagattgcaatgggtgcctaccaacctcatcatacgtggccatgaacgcagtattatcctcgtggtcagagtgcttcgtacaaccacatagccttgaatgcctgtgttgcgttacaagcgtaacgtgaagtattacatcgagtagaagcggaaagtgtgtacaccatataagtg

SEQ ID NO: 266098 - DNA, 398 bp, Glycine max
tgctcgtactcggttccggacattcccgtggtcgactccacgtcgtctcgatgcgccactcgtcactttctgcagtccgttgtctattccactcatctcactaggcactcagaggcagagcgcaggtcaaagtgcagtgcgcgcagttgaaagtctcagcatcctcaagccacaagcgttgggcatcaatggcttcgctgaaagacgttggagtcgatgttgtggccactgccgcgagtgcagcgctggctagcaacgccatggccattgaagtgttgctgggtggtgatgacgggtctctggctttcgatcccaacaatttctccgtagcctctgtggagaagatcgagttcaagaacaacgcaagtttcccccacaacgttgtgttcgacgaggac

SEQ ID NO: 266099 - DNA, 388 bp, Glycine max
cccacgcgtccgcgtcgtcaaagcctaagtttgggacatactggattaaagatgggagagttgttggggtctttctggaaggtggaactcctgaagagaaccaggctattgctaaagttgctaaggtccagcctccggttgcagatgtagatcaacttgctaaggaaggcctttcctttgctagtaaaatataatggttttaatagggaaggataaaaatgcttggtggtttgcatagaagattgtatctgatctggctatattttactctgaattatgcattacagaagctttattttgtgttattcgtttgatgtggttgcacgggatatatatatatatatatattgccgtatctatttcaaaaaaaaaaaaaaaaagggcgggc

SEQ ID NO: 266100 - DNA, 419 bp, Glycine max
ctcacgcgtacgatcggagtggtggttgaatggactcagtgactactcggggttccggaaacgtagttggagtagcggattccaaacatggcgtggagtggtgtgggcactttcagatgccactggactatccaaggtacacccaagctgactatgaggcaatgccagagtggaggcttgactgcttgctcaaagagtatggattaccaatctttggggatgttgagagcaagagaaagcttgccatgggtgccttcctatggatcaagtgagcttccaatgttcttaggcatgttcttgccatgaccctcttggaattttgcacttgttatatttgatataagtgtgggagtttttaataatgattagtattagttagttaatactagtatgttgtggtataattaacacataattat

SEQ ID NO: 266101 - DNA, 390 bp, Glycine max
ctctctttcaattccttcacactctcccctctccattcaccattactcccctcttcttccacttttgctcttcccaccacctctgcttcaagagcaaacgtgattctgcccccgaagcccttgaatggagttcgaatctcgacacccaaaaggaggactgagtcggtgattgtctccgccgccgcggaggacgcgagttcggctgtggagggtgggtcgccgccgcctcctccggcggagagcgagaaagagagcggcgcctccgtggagaagcttccgttggagtcgaaggtgaaggagagagaggagcaaaagctgaggatgaagctggcgaagaagataaggttgaggcggaaaaggcttcttcgggaacgcaagttgagaaagagg

SEQ ID NO: 266102 - DNA, 312 bp, Glycine max
tccttcgtctgcaaccctagctttccgttgtttgcaaatctatggctggtgaatctgatggacccgagaacaccctctcttgtgctaactgtggcaaacctgcgaatcttcagtgtccaaaatgtatggaattgaagcttcctcgagaaggtgctgccttctgctctcaggattgtttcaagtcttcatggagctcgcacaaatcagtgcatctgaaggcaaaactatccccacctggcacacaaaattcagactcacttgatgaaggttggttatattgtttgaagagagggcaggctcgaacgccaaagc

SEQ ID NO: 266103 - DNA, 441 bp, Glycine max
cccacgcgtccgcaaattcacacaggcgtgccagcaacccctcaatggacagagtggactggtaagagctgaatgcttgaaaggagataacagcccaagttcctttccaaaggttctggtggatggtccatatggggcgccagcgcaagactacagggagtatgaggtggtgttgctagtggggcttggaattggggctaccccaatgataagtatactaaaggacatggtgaacaattttaaggccattgatgatgaggagggaataggtggtgctaaatcaccaacgaggttgagtgacttcaagacaagtagggcatacttctattgggtgactagagagcagggttcatttgactggttcaaaggggtcatgaacgaagtggcctaagaggaccgaaggaaagtgattgaactccacagctactgcaccagcgtcta

SEQ ID NO: 266104 - DNA, 411 bp, Glycine max
gcgatcactcgaaacagtgtgatgaaaatgaaggtccttgttttcttcggtgctacaattctgggagcatggcaatgccatgcgtacgatatgttccctcttcgaatgaacactggctatggtgcccgtactccggaggtgaaatgcgcaagttggaggcttgctgtggaagcacacaacatctttggctttgacaccattcctgaagagtgcgttgaagcaacaaaggaatacatccatggcgaacaatatagatcagacttcaaaacaggtaaccaacaagcttacttttatgccagagacctcgaagtccatcccaaggacacatttgtgttcaatataaatggcaccgtactctctaatattccatactacaaaaaacatggatatggagtggagacatttaactcg

SEQ ID NO: 266105 - DNA, 454 bp, Glycine max
  unsure (1)..(454): unsure at all n locations
gcgatttgccacgaaggtgaaagagagcaacggggcaggtaatgattcggcggcgctatggactttgattccattcgcattcgcaggtctactgtagaatcagcacgcagccatggcggaccgttctcggagcttcatgaaggacgtgaagcgcgtggtcatcaaggtcggcaccgccgtggtgactcgcgaagagggaaggttagcggtcggaagattaggcgctctctgcgagcagattaagcaactcaactctctcggatacgacattattcttgtctcctccggcgccgtcggcatcggccgacaacgactccgctaccgcaaattgatcaacagtagcttcgccgaccttcaaaaaccccaactcgaactcgacggcaaggcatgcgccgncgtcgggcagaacagtctcatggctctctatgatattctcttcactcagctcgatgtg

SEQ ID NO: 266106 - DNA, 265 bp, Glycine max
gtcaagcattcgcatacttgtgctgatcgttatctgtctctacacctcttcctcggattgggagatcggaaaaacttgcggggcatacaacaaatgcgacactggacttaactgtcaaacatgtactgccaatgggaatacccgaaccagacgctcgcggatacaatcatggagcccaaggtgtaaggtgaaaggcttaccgagaaaccgctattcatggatgacgacttacaactcatatgctctgggcgaagccagatgctgc

SEQ ID NO: 266107 - DNA, 330 bp, Glycine max
ctcacgcgttcgcccacgcgtccgcccactcgtccgtgataactagaatcagggtgatggagatcatagtacttggtatcttcgatgctacaattctggtagcatggcaatgccatgcatacgatatgttccctgtacgaatgaacactggctatggtgcccatactccagaggtgaaatgcgcaagttggaggcttgatgcggaatcacacaacatctgaggctttgataccattccttaaaagtgcgttaaatctacaaatgaatacatccatggcgaacaatatacatcatactccagagcaggttaccaacacccttacttttatg

SEQ ID NO: 266108 - DNA, 396 bp, Glycine max
gccaatcactcgaagagactttcttttgctcaaacccaaccctttatcttaggagtctagggcattctgtacagcgtggcaacaatacgattagagctgctgcgactataagaattcaaccagacaggttctgtcatggtacgctaaccatcaataatgaactgccacaaaatgctgattattctcgacaggttccagaaaagagactaaacctagttcagatcccattgtagaactgtgaccagcagttagggagaggatgaagaacatgaaagatgagccaagaaaaccaatgtcaggacctaagaatgggttgctgttgaagagccttataccgactgcatatcatgtgtataatgctaggatcactatgatcaacaatctgaagaagctgtt

SEQ ID NO: 266109 - DNA, 420 bp, Glycine max
atttcaaaaccaaagcttctgctttgtgatggaactagagagctgagaggcctaaacctgtgtttggggtctctccttttttggtgcagatcttgaacttgagctgcattgtcatagaaaatctgcaccaagaaatgaaacataccatgttacctgccattggatctgttgtccctcgtggtgcctttgcagcagtcttgctcctgttactgttttctttctccactttctcttctacagaagcctatgatccgcttgatccaaccggaaatataacaatcaaatgggatgtcattagctggaccccagatggctatgttgctgttgtgacaatggacaactttcaacaatatcgtcacattcaggcccccggatggtcattaaggtggacatgggctaaaaaggaagtgatttggagca

SEQ ID NO: 266110 - DNA, 356 bp, Glycine max
  unsure (1)..(356): unsure at all n locations
ggctgcctcactacaagctgcagctaccttcatgcaacccaccaaggttggcatagcctcgcgcaagctcaaatctacacaatgcatttctaaggcttttggcttggaacctgctgcagctaaactcacttgctcccttcagcctgatctcaaagaatttgctcaaaaatgtgtcgacgctaccaaaattgcaggattcgcccttgccacctctgctctcgttgtttctggagcaagtgcagaaggtgttccaaaaaggctaaccttcgacgaaatccagagcaagacatacttggaagtgaagggaactggaactgctaaccagtgcccaaccatttgatngtgagtggactcat

SEQ ID NO: 266111 - DNA, 471 bp, Glycine max
cccacgcgtccgcgaaaccctcttcatcttgttctatctgtgacgagcatcatggcctcgggagcagtgttattgttggctatgtgtgtgcttccggcgatggttgtggccattcgcccagcaaagaaccctttttgcgtgaagggtcgtgtctactgtgacccttgccgtgctggttttgagacctcagctaccacctacattgctggtgctgagattatgttgcaatgcaagagcagggttagcaacgaggttgtgtacacgaagaaggggtacaccgactcaaccggagcatacacaatgtacgtggatgaggatcacgcagatcagatctgcagtgccaagcttgtaagcagccctcaccctcaatgcaaggaagtcaccccaggccgcgacgaagccgtcgtgattctcacccgctacaacggcattgcctccgacgataggttcgccaatgccatgggcttcatg

SEQ ID NO: 266112 - DNA, 358 bp, Glycine max
cccacgcgtccgagcagtttcagacacagagagaggggtttgggattggagggattgacgctgcgtctcttcctcttctctttcgatccatccctcattcctaatcctccaatccaaccacctcagcctcacactcacatatacacatatctgaacgcgtatcgtccctcctatggcttcaaagcgcatcctcaaggagctcaaggacttgcataaagacccaccaacttcttgcagcgctggtccagtagctgaagacatgttccattggcaagcaacaataatgggtcctgctgatagtccttatgctggaggtgtattcctagtcactattcactttccttcggattatcctttc

SEQ ID NO: 266113 - DNA, 293 bp, Glycine max
  unsure (1)..(293): unsure at all n locations
gtagttgagaactaagaaggagaagcaaatggcttcctcaatgatctcttccccagctggtgccactgtcaaccgtgccggtgccggcatggttgctccattcactggcctcaagtccatggctggcttccccaccagaaagaccaacaatgacattaccttcattgctagcaacggtggaagagtgcaatgcatgcaggtgtggccaccagttggcaagaagaagtttgagactctttcctacctgccagaccttgatgatgcacaattggcanaggaagtagaataccttc

SEQ ID NO: 266114 - DNA, 465 bp, Glycine max
cttatcttatatcttctcctcctccatctttgagattctcaaagaaacttctgaagatgggtggcatagcattcggaagcttcaatgattctgtcagttttgcctccatcaaggcctacattgctgagttcatctcaacccttctctttgtttttgccggtgttggttcagccatagcctatgctaagttgacatcagatgcagctcttgatccaactgggttggtagccgttgctatttgccatggttttgctctcttcgttgctgcttctgttggagccaacatttctggtggccatgtgaaccctgctgtgacctttgggttggctcttgggggccacatcaccatcctcactggtctcttctactggattgcacagcttctcggctccatagtggcatccttactcctcaagtttgtcactggctatgatacttctatccacagtgttgcttgcggaattg

SEQ ID NO: 266115 - DNA, 453 bp, Glycine max
cactatagcaatagaaacatttgcttttgaaaaacccctcactcttcatcactacactagctagccacatacaatgtcgaccaaatttaaggtgtttcgtgaattcacaagcgatgactcattcctaaaccaagttatccctgaaaacatcaccgaattccaagtgactctgtccctcgctagagactacgatggcaacaactcaaccaacggaaagttcattccttactgggacactgaaaaggtcactcccgaagtgataaaaaaattcatgaaaaaatacgaacccaccgcactgagggttaacgttcttgtcagcattggaaacaaaaacaaacaatttcctttcaccattggctcggactcgaacagcgaatcatgggtctccgaggtcactgcttcgctgaagagcatcattaatacctacaaccttgatggcatcgatgtcagcta

SEQ ID NO: 266116 - DNA, 456 bp, Glycine max
ctcacgcgtactcccaccctttcgtttggatgaacgggacactctaaatcactacgctaggtgcccacatacattgtatagccaatcccacgagtgccgcgacttcacattggatgacctattcctaattcaaggtatacatggaaacatcaccgacttgcacttgacgtatctgcgtcgctatgatacatacgtggcgacaacatgagcactcggacagatcattccttactgggacactgaaaatgtcactctcgaagtgatgtcaaaattcatgataaaatacgaacccagcgcactgagggttaaggttcttgtcagcattggaaacaactactaacaattgcctttcatcattggctcgcactcgaacagcgaagcatgggtctgcgaggtcactgctgacctgaatagcatcatgaagacctacaacctctatggcatcgatgtcagcta

SEQ ID NO: 266117 - DNA, 422 bp, Glycine max
atggctgacgcgggcttactacaaggtaatggctcccttaatgatctcctccccagctgctaccaccgggaaccgggcccttgcctacgtgggtgctccattcaccgacctcaaatacatggctggcttacgcacgaggaataccaacactgacattacctccattgctagcaacggtggaagagtacaatgcatgcaagcgtggccaccaattggcaagaagaagttcgagactctttcctacttgccagacctggatgatgcccaattgaccaaggaagtcgcataccttctaaggaacggatggataccttgcttggcattcgagttgtagcacgggttccttgtaccgtgagcacatcacgtcacctggatactatgatagacgctactggacatgtcgaagctgtctatgtttggct

SEQ ID NO: 266118 - DNA, 303 bp, Glycine max
gcgcccacgcgttcgctcaaccaaaaggggttcaattctagctagttctattacatcgtccgcgaccatgaacatggcgatcgtgcttctgttcatggttttcgcagtttcatcagctttagacatgtcaataatatcacatgacaacgctcatgcggatagggccacgaggcgcaccgacgacgaggtgatgtcaatgttcgaggagtggctggtgaaacacgacaaggtgtacaacgcgctcggtgagaaggagaagaggtttcaaatcttcaagaacaatctgcgctttatcgatgaacg

SEQ ID NO: 266119 - DNA, 355 bp, Glycine max
gcgcagaaacactccaaactgaaaaattccatctttctctttcaacgttcctcaaatcaatagcgcattgtaagcttcgcgagcaataatgtcgattgctttcccaacatgaccgcttacaacaagaaaaaccacaaagagaaaccaattcgccgcaaggaagaaaaaccggaagaaccggaagtgccgaaatacagagatcgagctaaagagcgtagagaggatcagaatcctgattatgaacaaactgagcttggatttcatgcagttgctccacctggtactgtggatattcggtcatctgatgcgcacaagttatctattgagaagagcaaataccttgggaggtgatgtg

SEQ ID NO: 266120 - DNA, 466 bp, Glycine max
ctcagcaagaataaatgagatatatgaggttggagagttgtttgatttaagcatgcaactgatatacttgatattgctattgggtttgctagggagtgggactttctttgtgattcgccaagttcttgtccgcagagaactcgacctatctgccaaagagttgcaggagcaagtaagaagtggtgaatgctggtgcaactgagctttttgaacttggtgcagtgatgctgcgcaggaaattttaccctgctgctaccaagttcttgcttcaagcaattgagaaatgggatggggataatccggatcttgcccaggtttacaacgctcttggtgtgagctatgtccgcgatgggaaagttgacaaaggaattgctcaatttgagacagctgtcaagcttcaaccaggctatgtcacagcttggaacaatctcggtgatgcctttgagagtaaaaaagactacaagtc

SEQ ID NO: 266121 - DNA, 313 bp, Glycine max
atgcactgcacttggcgaacgttgtcaaatccaatgatacggatgaagccattggggtatgcatcagcttcatcggctacaagcccccatgcttctaagtcattgaaaaatttgcaaagcatctgtaaccaccccactttgtttgctgtacttaaactacattcccatttgcttttgctttatgagatttcatcatcctgtatttttggttcctgttttcggacttcaatggaaattaatggatgagaactaatgaataagctattgtgttgcgttgctttgatttcaaataacttcaagaacccattgccct

SEQ ID NO: 266122 - DNA, 466 bp, Glycine max
ctcagcaagaataaatgagatatatgaggttggagagttgtttgatttaagcatgcaacggatatacttgatattgctattgggtttgctagggagtgggactttctttgtgattcgccaagttcttgtccgcagagaactcgacctatctgccaaagagttgcaggagcaagtaagaagtggtgatgctggtgcaactgagctttttgaacttggtgcagtgatgctgcgcaggaaattttaccctgctgctaccaagttcttgcttcaagcaattgagaaatgggatggggataatccggatcttgcccaggtttacaacgctcttggtgtgagctatgtccgcgatgggaaagttgacaaaaggaattgctcaatttgagacagctgtcaaacttcaaccaggctatgtcacagcttggaacaatctcggtgatgccttttagaagtaaaaagacttccagtc

SEQ ID NO: 266123 - DNA, 302 bp, Glycine max
aacgcggcagagcgaagagaaggggcaaaagagaaagaagcgcttatcgaactcggacgggagcactgagttgactcggagggagtggaaagtgttgttgcgtaatgtctggtggtatcgctcgtggacgcctcaccgaggagcgcaagtcgtggcggaagaaccatccccatggttttgttgcgaagccggagacgctgtccgatggaaccgtgaatttgatggtgtggcattgcactattcccgggaagactgggactgattgggagggtggctactttccacttacgctgcactttagt

SEQ ID NO: 266124 - DNA, 471 bp, Glycine max
cccacgcgtccgcccacgcgtccgcccacgcgtccggagtgcttgtgacgcggttgtccggttgccacgcttaagatcacccaagagagaacctaagacacacaacacaacacacagagagagtttgaggaagaaatcatcatggcttcagcagcatctgggtttgtgctgtctcttaatgttgcagcttccaccacaaactcaagggtggtcttgttcaacacaaagaaccacgcttctaggcttcttgtgagggcttcagacgagcctgcagcggcggcacccgcaaccaccacccctccagctgaagctgaagcaaagccaaaaccaccacctattggccccaagagaggtgctaaggtgaagattcttaggaaggaatcctactggtacaaaggcactggttcagtggttgctgttgatcaggaccccaacactcgctacccttgtgtggttcgattcaacaaagtc

SEQ ID NO: 266125 - DNA, 355 bp, Glycine max
cccacgcgtccgggcagctgcttctcctatggcaagccaactcaagtccaccttcactaagactctggtagctcccaagggcctctctgcctcttcaccactccaccttctgccttctaagaggcaatttagcttcactgttagggccatccaatcagaaaagccaacctatcaagtgattcaaccaatcaacggtgatcccttcattggaagccttgaaaccccagttacatccagccccttgattgcatggtacttatcgaaccttcccgcatacaggaccgcagtgagcccactactaagagggatcgaggtgggcctggcccatggctaccttctggtgggcccattcgtg

SEQ ID NO: 266126 - DNA, 361 bp, Glycine max
cccacgcgttcggatagctagaatggcatttcgatgctcagtcatctcttctaccattgggttctgggtcgctcttacaggagacagccatgttcatgcatcgctacctgaggaagattattgggaagctgtttggccaaacactcccattcccactgcactgcgagagcttctaaagcctctccctgcaggtgttgaaatcgatgaacttcctaagcacattgatgatacacactacccaaaaacattcttctataaataagaccttcatgcaagcaaaacattgatagtacaattcaccaagcgtccctatgcacaaccttatgatgtatatacattgttaaccgatattaaagacacc

SEQ ID NO: 266127 - DNA, 437 bp, Glycine max
tttctctcttccgtacacagcttgaacccaccgcgtttcggagagagagacgtcgcaatggggaggaggcctgcaaggtgttaccggcagataaaaaacaagccataccccaaatcacgtttctgccgtggtgttcctgatcctaagatcagaatttatgatgttggtatgaagaagaaaggtgttgatgagtttcccttctgcgttcatctggttagctgggaaaaagaaaatgtttcaagtgaagcattggaagctgctagaattgcatgcaacaaatatatggcgaaatttgctggaaaggatgctttccacttgagagtcagagtacatccattccatggttctaggatcaacaaaatgctttcatgtgctggagctgataggctttagactggaatgaaaggtgcaattggaaagccacaaggaacatgtgc

SEQ ID NO: 266128 - DNA, 451 bp, Glycine max
cggacgcgtgggtggttccacaatagaatgcaccctcgcgtgtgcttcttcctgtctaccgttatatataaagccacgcacgcacgacactttcatcaattaaccgctcattcatccaaatttctcaaactcaagctagcctttgggggatatgatagagaagaagacacagtgtgagaaaaaggaaaaaatggaaggtgaagaaactgagatgaaacaacaatccaggttcaaaaggatttgtgtgttctgtggcagcagccctgggaacaagagtagctataaggacgctgctattgagcttgggaaagagttggtgtcaagaaatattgatctggtttatggaggaggaagcattggtttgatggggttggtttcccaggctgtttatgaaggaggtcgccatgtaattggagttattcccaagacactgatgccaagagagattact

SEQ ID NO: 266129 - DNA, 274 bp, Glycine max
agagggagtagcggcattaaaaatgcagatcttcgtgaaaactctgacagggaagactaggaccctcgaggtcgagagcagcgacaccatcgacaatgtcaaggccaagattcaagacaaggaaggcattcctccggatcagcagcgtttgattttcgccggaaagcagcttgaagatggaaggaccctggccgattacaacatccagaaggaatcaacccttcatctcgtcctcaggcttcgaggtggcatcattgagccttccctcatggct

SEQ ID NO: 266130 - DNA, 393 bp, Glycine max
cccacgcgtacgttctttgtagcataaatcagtgcggcgtgttgtagcagcgattataaggaaggaggacagatgaacacagacatcactgcatcgacgaagccagagtacccagtcattgatcgcaaccctactttcaccaaagacgtcggaaacttcaacaccctctactatctgctattcgccacaaccaccggcgtttccgtcaccgacggctacctatccgggatcaagcctggaattatgggtcctttgatggtgacagatggttagatcgtagtagatctagggttcatgtatgcttaccagaactccgctgggagactcatgggttgctaccacaacgatgatgacgtagctcgctacaacatacaataattccttggtctgagc

SEQ ID NO: 266131 - DNA, 456 bp, Glycine max
cccacgcgtccgcgctgagaagcgtagatttttggatcttgttcgtgtcgtgtttgtgtggggttgggacgggtttggcagtgatgaacaatatgggtcaaatcgggttggcgctcggatacccagatatctcgctctttctgtctttgacaagtattttcgggtttttcggacggataatctcgggtaccgtttcggagttcaccatcaaagctgcaacacctaggcctctttggaatgcagcatctcagcttctaatggcggtaggttacatactcctggccatggctatgccaggttccctatacattgggtctattttagttggcatgtgttatggagtgaggcttgccattacagtcccaacagcctcagagttatttggactcaaatattatggtctcatctataacattctcatccttaaccttcctctcggttcttttcttttctctg

SEQ ID NO: 266132 - DNA, 359 bp, Glycine max
gcgcacatacacaacacacctacctaataccttgtttatgagagctataagtcaccacctttcgctgctgaattggagaatctcggcctcacgatctcttttttctctgagaaatactcgtaccaataccatgtctcaatctgataattcctctccttttaccacacccagattggttctcaagaacgttttggccaaatctcaacatgaaagggatggagctgttgtcagaagaggcattgtaaggagcgagttgaagaacttgcatcccttgctaatgttggatcacttctcagtatctcccccagcaggatttaccgatcatccacaccgatgcttttaaaccgtcacctacatgc

SEQ ID NO: 266133 - DNA, 389 bp, Glycine max
cccacgcgtccgcttcacaccctcttcaacatcctcagcaagtacaagaacaagaagaagcaatgtgttgctccaatctcacaatgttggtgtcctcaaaaccttccctttccgatccctccaatctctccttccgctctgtcctcaacccttttcagctcccttcacaaaacccaacttcatgcactccttcacgctcctcaaccacccaaattcagtgtggtctgagagaactcagaacccgcattgattccgtgaagaacactcagaaaatcaccgaggctatgaagcttgtggctgcagccaaagtgagaagagctcaagaagctgttgtcaacggaagacccttctcagagaccctcgttgaggtcctctacaacatcaacgag

SEQ ID NO: 266134 - DNA, 255 bp, Glycine max
cccacgcgtccgatgatagtgtttgcatgatagtagcacagatgcttcctttgggacaggaggtacaaaaaatacaggggactatggtggttatacataataatgtgttagatatcaacagcatcaccagcgttaaactgatcgttgaccaacgcttacgcttcatacgactatcagtcgatgcacttactttcgcagccaccaaaatcttcattcagctgattagtgctaccaaggctgatcttggtaaatgaa

SEQ ID NO: 266135 - DNA, 467 bp, Glycine max
cgtacatcgaaagggaatcttcttccatggcctccaagcggattctgaaggagcttaaggggctccagaaagaccgtgcaacctcttgcagcgccggtcctgtagcggaagatatgtttcattggcaagcgactataatgggtccccctgatagcccttatgctgggggtgtttttctagttactattcattttcctccggattatccattcaagccacccaaggttgcatttaggactaaagttttccacccaaatatcaacagcaatggtagtatttgtcttgatatcttaaaggagcagtggagccccgccttgacaatatctaaggttttgctctccatttgctccctattgacggatccaaacccagatgatcccttggtgcctgaaattgctcatatgtacaagacagacaggtccaagtatgagacaactgctaagagctggactcagaagtatgcaatg

SEQ ID NO: 266136 - DNA, 398 bp, Glycine max
cacaatcttaaatcatacaaagaaaagaattatggtgacattaccaaggaaaagttacgtctacgttataagaatgacgaggaggtaaaggaaatgaatcaggaatttgaccaaacgtgttactggatcaagaaaagattgatagataaagatgcaagtgtgcaaatttcaaaccggcttatctcttcaccttgagtcctggtgtctggaaactttagttggtctgcatacatggaaaggctgatgaatgcacaatctatgggtgatgcattcatattggaattcatgaggagcagaaaggtgtctgagatcaatctttaccattctactatcatgaacttagatgatgcatttcatacagatcccgatgatcaagatgccctatgagctaatgatct

SEQ ID NO: 266137 - DNA, 469 bp, Glycine max
caaaatcttaaatcatacaaggaaaagaattttggtgacattagcaaggaagacttgggggtaggtgataagaatgaggaagaggaaaaggaaatgaagcaggaatttggccaaacgtgtgactggatcaagaaaagattgggagataaagttgcaagtgtgcaaatttcaaaccggcttagctcttcaccttgtgtcctggtgtctggaaaatttggttggtctgcaaacatggaaaggctgatgaaggcacaatctatgggtgatgcatccagtttggaattcatgaggagcagaagggtgtttgagatcaaccctgaccattctattatcaggaacttggatgatgcatttaaaacaaatcccgatgatgaagatgccctaagagctattgatcttttgtatgatgctgctttggtttccagtggttctacgcctgataatccagcacaacttggagggaagatat

SEQ ID NO: 266138 - DNA, 366 bp, Glycine max
gaaatacgtacgtacttcctatgacatatacatattgcgacccttttggctggtagcagggaaagcacacctgcatacgtgaagtcaagccattatgctgcacccttcaatacgagtgttattgcttctgggtttctatttggaataggctatgcagcttacctgatataatgagcatcagatattaatcgcagaggaccaagtatatgggacacctatactaaacaggcaccatagatgatttacgatcataatgatggaagtatatgagtcgaatcttatgaccagtacaagatcgacataaacatggtgaaagaagttgagttggattcatacagattgtccatgtgatggtacacaatattg

SEQ ID NO: 266139 - DNA, 390 bp, Glycine max
gaaatacgtgcgaactaactatgagaggtatatggcttgatcattgatctcgttaccaggggacaccactgtgaatcctgccggtgcagacatgatagttccatttacagacctcaagttcatggctggcttactcaccagggagaccaataatgacattacctgcattgctagcaaaggtgatatgagtgcaatgcatgccaagtgtgaccacacatcatatactaaacaagcacgatactacttacctacctgcacaaaccttggtgatgcacgattggcatatgatgatcgagtaccttatcaagatcggaatgatgcctgacttggaattcgattcgtaccactgtttcatgtaccgtgagcacatcatgtcaccagcatactacg

SEQ ID NO: 266140 - DNA, 316 bp, Glycine max
cccacgcgtccgcttattagaatcagtagcaaaggctcttcgacccggaggagtgttctgggctacggcagacagcctgtggcataagaactttgtggttgcagacaccatagcaaattgcaagaagatattcaaaggctccgttaactatgcttggaccacggttcctacatatgcaagtggggtgattggattcatgctttgctctacggagggtccaccagtgaacttcaaacatccaataaataaattgaatccagagaaaaatggggtggcaaagggacctactaagttttataacccagagatccatgct

SEQ ID NO: 266141 - DNA, 431 bp, Glycine max
cccacgcgtccgacaaggcagaaagcaagctcatcctagagttttaaaaatggcagcagccgcctcgatggctctctcttccccatccttggctggcaaggccgtgaagctgggcccatcagcccccgaagtcgggagggtcagcatgaggaagaccgtcaccaagcaggcctcctccggaagcccatggtacggcccagaccgcgtcaagtacttggggcccattctctggcgagcccccgtcctacctcactggcgagttcccaggtgactacggctgggacactgctgggctttcggccgacccagaaaccttcgccagaaaccgtgagctcgaagtgatccactccaggtgggccatgctcggggccttgggctgcgtcttccccgaactattgtcccgcaacggggtcaagtttggagaagctgtg

SEQ ID NO: 266142 - DNA, 333 bp, Glycine max
ggcttctgcagaagtagagttccgatgctttgctggtgggcttgcttgagccaccgaccgcgatgctctcgagaaagccttctctcaatttggcgaaatcgtcgaatcgaaggtcatcaacgatccgtaaactggaacatccagagggtttggatctgtgaccttcgccacagagcatgcgatgagagacgcacttgaaggaatgaacggacataacctcgacagtcgtgatataaccgtgaacgaggctcaatcccgtggaaaaggtggctgcggccgcagttgcagctactgaagacgtggtggtggttactgtggcgacggaggttacag

SEQ ID NO: 266143 - DNA, 442 bp, Glycine max
gtgacaagagaatccctgacatgaccataataaacaggcagcttggatggaagcccaagacttcactttgggacgtgcttgagtccactctgacatatcagcacaggacatatgctgaagccgttaagaaagtcattgcaaaacccgttgcaagttaagctttttacagtgatggtgatgtgctacctttgagaagggtgttcttgtcttgcccaagtgttctgccatattatactggttgattttatataaaatcgtaaattttcctcctattgggttcgttagcctgtaggcaatatagcccccacatggagaagtaagaatttatacaagggcaatctgtgctctatgtaattttaatgtacagaccatgcgctgctaaacatgttgagacactttatatattacctaaggaagacttttttctgggtttttaaggatc

SEQ ID NO: 266144 - DNA, 469 bp, Glycine max
cggtgacaagagaatccctgacatgaccatattaaacaggcagcttggatggagtcccaatgcttcactttgaaacgtgcttgagtccactctgacatatcagcacaggacatatgctgaagccgttaagaaagtcattgcaaaacccgttgcaagttaagctttttacagtgatggtgatgtgctacctttgataatggtgttcttgtcttgcccaagtgttctgccatattatactgcttgattttatataaaatcgtaaattttcctcctattggtttcgttagcctgtatgcaatatagcccccacatggataagtaagaatttatacaatggcaatctgtgctctatgtaattttaatgtacagaccatgcgctgctaaacatgttgagacactttatatattacctacggaagacttctttctgggtttttaagcatctttcgattcattgcttggtaacttt

SEQ ID NO: 266145 - DNA, 334 bp, Glycine max
gacacgcgtaaccttcgttactggtctactcttcatactaccagcaacctcatcttccgggtatttggggaacaaccttctgactcatcgcaagatattcctaaaaaaagacaacattattacctcgtacgctgtcatctttgacggcggtagcacaggaacccgtgtgcatgtcttccattttgaccagaatttgcgatctccttcccattggtgatagtcatgagcttaataaaaagatcacacccggtttaagtgcttacaaggatgatcccgatcaagctgcagaatctctgattccacttttggaagaagcagaaagtgtagttactga

SEQ ID NO: 266146 - DNA, 320 bp, Glycine max
gaaaaacttagctactaaggaaggatcaaagagaatggctcaagcaatggcatcaatgggtggcttgcgtggttcctctcaggctgtgttggaaggtagccttcaggtgagtggctccacacgcttgaatgtggggagtggaagcagggtggcctcagtcacacgtgcagggttcacagttagagcacaacaacaacaagtgagtggtgaggtacaaagcagccgtagggcagtgctttcacttgttgctgctggtttggccactggctcttttgttcaagctgtgcttgctgatgccaaatctatcaaagttggaccac

SEQ ID NO: 266147 - DNA, 301 bp, Glycine max
gaaaaacttacctactaaggaaggatcaaatagaatggctcaagcaatggcatgaatggcgggcttgcgtagatcctctcaggctgtgttggaaggtatccttcaggtgagtggctccacacgcttgaatgtggcgagtggaagcagagtggcctcagtcacacgtgcatggttcacagttagagcacaacaacaacaagtgagtcgtgaggtacaaagcagtcgtaaggcagcgctttcacttgatgctgctggtttggccactggctcttttgatcaagctgtgcttgctgatgccaaa

SEQ ID NO: 266148 - DNA, 395 bp, Glycine max
  unsure (1)..(395): unsure at all n locations
gaacatcatcacattacattagattggtggtaatggcagcgtcactacaagcagcagctggtttcatgcaacccaccaagttgagcaggagcaacactttgcagcaaaagtctactcagtccatttccaaggcttttggtttggaacctgttggagctaaaaaggtcacatgctcccttcaggctgatcttaaggacttggctcacaagtgtgttgatgctaccaaaattgcaggattcgcccttgccacctctgccctcgttgtctctggggcaagtgctgaaggtgttccaaagaggctaaccttcgacgaaatccagagcaagacctactttgaagtgaaggggacaggaacagcaaaccagtgcccaacaatngatggtggattggactca

SEQ ID NO: 266149 - DNA, 326 bp, Glycine max
cccacgcgtccgaccacgcgtccgtcaggaaagaccttgtgctttggcctgatgacctgggaactttctatgaggacactcaactagacaaacatcggcaagctctggacagagttccagaggttcaaccatacttacctgcttcccttaacatccgaacggtttcctttcctacagccataagggtcgcaatctgaccgaaaatggccgaatggaacacattgaggagatcatcaaggaccatttttgcaccatatttcagagcaagtgttggagatctggttagaacattgcgcttgtgccaagccacaatttagagacgcaga

SEQ ID NO: 266150 - DNA, 354 bp, Glycine max
agcgtgcatcatagtatccaggtgacctgttgtgctgcactgatgcttctcaggtgttgggggagcggcaagaggctaagactgcataccccaatggcttcatccgtatcattggatttgacaacgttcgccaagtgcagtgcatcagcttcatcgactacaagcccccaggcttctaagtcattgaaaaatttgcaaagcatatgtagccaccccactttgtttgttgtacttaaactacattcccatttgttattgctttatgagatttcatcatcctgtatttttggtttctgttttcggacttcaatggaaattaatggatgagaactaatgaataagctattgtgtttg

SEQ ID NO: 266151 - DNA, 308 bp, Glycine max
  unsure (1)..(308): unsure at all n locations
cttactgcaagagctaaactgctaggaaccttaaaatgcatgagctgatttggtgggtggggaggatgtgatagaacagataaaagcaggattcatggagtttgataaactaattgcttctccagatatgatgcctaaggttgctagcctagggaagattctgggaccaagaggactgatgccaaacccaaaagctggcactgtaacacccaatattccccaggctatagcagaattcaagcatggaaaagttgaatacagggcagacataactggaatcgtgcacttaccttntggaaaagctgact

SEQ ID NO: 266152 - DNA, 413 bp, Glycine max
gcgtaatatcttatctgcaatgagtcgtcttcctgatgaagcaatagcattggctggtgcatggcacatcgagagggaactgcagattactccttggaacttgagttgcaattttgttgcctgtacaagccagggtaaggaaaatattgaacgaatggaaattactggtgttggtgatccttctggtcgtggcatgggttttagctatgctcgggcacctccaaaggcaccagtgtctagtgcaatggtgaaaaagaaagcagctgctaaccgtggaggttctactgttaccggtacagatgctgatctacgtagattaagcatggatgctgcactagaagttcttcttaagttcaatggtcctgaggaagtcattggaaaacaaactatgtggcatcgcattgctatgatac

SEQ ID NO: 266153 - DNA, 380 bp, Glycine max
ttctcatttctcacattattattcacatctccatctagatctctctctctcggtctcccgagaaattcatcaacagacttgtgattaatttgcaattgttcaagtgatctatcaagaaattgataattcaatgggaaagtacgaaaaagagcttaatctcgaggctacagagttgagattggggttgcctggaagcgatgagcctgggaaacgttctattgttagaagcaataagagatcttcaacagaagcaagcgaggaagagtgcataagcaagggcaacatgaattctaatggttctgatatcacaagtgatgaccaagacaaccttgtgccacctgcaaaagcacaagtagtgggatggcccacccggtcgatca

SEQ ID NO: 266154 - DNA, 469 bp, Glycine max
  unsure (1)..(469): unsure at all n locations
gcattgcatccctcttgatttgtagtttgttttttgctttagataaaagttctgccaaaggaagaggggttttaagatcatagtgtgtgttttgcaacaatggctaagttctttgctgctatgatcttggcactctttgccatttccatacttcaaacagtggtaatggctgctaatgaacaaggaggccacttgtatgacaacaagagcaaatatggaagtggaagtgtcaagagttaccaatgcccatcacaatgctcgaggagatgtagccagacccaataccacaagccctgcatgtttttctgtcagaagtgctgcaagaaatgcctgtgtgtgcccncggngtattatggtaataaagctgtgtgcccttgctacaacaactggaagaccaaggaaggaggacccaagtgcccttgagcttcaacttgttcaacttcaattgtcgctttcctacatttttatt

SEQ ID NO: 266155 - DNA, 333 bp, Glycine max
gggggtctggctttgcaaccacgtgattcgctgacgaagctgaatcggctgctaagcggttcaatggctatgaacttgatggaagatcattgagagtgaatactggaccacctcctgctcggaatgagagtgctcctcggtttagacgtggctcttctttcaggtccagaggtggtggctcttcagatagagaaaaccgtgttcatgtaggtaatcttgcttggagtgttgacgatgtagcacttgagtctttgatacgcgaacataggaagaacgtcttggaagctcgggtaatctatgacagggaaagtggacgatctagatgctgttgat

SEQ ID NO: 266156 - DNA, 401 bp, Glycine max
cggaatctaccttctcaatctcttgattggctttctctcccctttggttgatccagagcgccgatgagttcaaacccttcattcgccgcctccctgagttcaagttctggtattctttcactaacgctctctgcatagcgtttgagatgacctttttttccatgtttgatggtcctgtcttttggcctatattactctgttactgagttgttctctttgtccttacaatgaggcgtcaagttgcacacatgatgaaatacaaatatatccccttcaacttggggaagcagaagtatagtgctaagaaatcttctgcacgtagcagtggctctcgtgcaaactgaaacttggctcttatgatttgaacatctactaagttaggttttgtgaacattcacgct

SEQ ID NO: 266157 - DNA, 297 bp, Glycine max
cccacgcgtccgcacacacaccttgttttcctttctatacagacacacagagagagcgggaaacaccctttaaagcctaccactaccactaaaggttacattgattactattctatgtacggacatgttgagaagctagctgaagagattaaaaaaggagctgcttctgatgaaggagtcgaatcaaatatatgacacgtacctgaaacactgcctcaagaggttcttgtgaaaatgggagcacctcccatgagtgatgtaccaattattacacccaatgagctacctgaggctgat

SEQ ID NO: 266158 - DNA, 292 bp, Glycine max
gccacgcttaacactgaatcttctgagtggttccacttcatctttcagctcttgcatcacggtaccaccacgtcgtattcagggccattagcttcaagtcattgatatacaatcacacctgttatgcttaatcaagttgtcaacaaccacagctactaacatcaagacactgtaagttactaatgatctcatatcattaagatcatctacttatatcatctctgatttataaaatttacagtcttatgattatgtatgctaagcactaaaattacgattattaagaggtgca

SEQ ID NO: 266159 - DNA, 196 bp, Glycine max
gttacgattaacactggatcttctgagtgggaccattcatcggcgcatctcttgcaacacgctaccaccaggtcgtaatcagggccattcccttcaagtccaagtgattcaatcaaacatttcatgcttaatcaatttgggaacaacatcaacaccaaaaatcaagccaatgcttgtggctattggtttcatttca

SEQ ID NO: 266160 - DNA, 421 bp, Glycine max
  unsure (1)..(421): unsure at all n locations
cccacgcgtccgctaaaaccaactattttctgtgctgttccccgtgtgcttgatagagggtactgaggtttgacgcagaagatttcttctgggggcttcttgaagaagacattattcaactttgcttattcatataagcttaataacatgaagaaagggcttagacatggagaagcatctccacttcttgataaaattgtgtttgacaaggtaaagcaaggtttaaggggtagagtacgtcttattttgtctggagcagcacctttatctgcacatgtggaaggttacttacgggtggtgacttgtgctcatgtcctacnaggatatggtctgactgaaacctgtgcgggaacctttgtctcattaccaaatgaaatagaaatgcttggaacagggggcccttctgtaccaaatgtggatg

SEQ ID NO: 266161 - DNA, 332 bp, Glycine max
ttcgacgcacgacccacgcgtacgattgagcttgctgtagtgaggtgttcgaatctgaaattaacttaaccaaattcatggcgggacatatacgtcctcgcttgttcacttactctaattgcaggaaccatgtatcactccatgatgatataatttacaaggcttctaatggaagatacggccaaacctttatgctttgccatgcaatgaatattgtcacagggccaaaataagacagacatctgttgactggcctgcacactaatactgatgatcattgcggggattgccgtgaacagttgcgaagtgagtctgaaagatcttacgaagca

SEQ ID NO: 266162 - DNA, 321 bp, Glycine max
gcgggcttggattcgtgaccatgtctttcgaggaggaagctgaagcggctgctaagcgggacaggggctatgaacttgatggaagatcattgagagtgaattctggaccaccttctgctcacgaatgagagtgctcctcggtttagaggtggttcttctttcagatccagaggtggtggtacttcaaatagtgaaaaccgagttcatgtacgtaatcttgctcggcgtgatgacgatgtatcacttgaatctctggtccgtgaacaatgcaagaatgtcttggaagctagggtaatctatgacaggtgaagtggacgatct

SEQ ID NO: 266163 - DNA, 447 bp, Glycine max
caacactgtgttcctgtttttgttcttcgatggcggcaacctcaacatcactggcttcggaactctacattggcctgcgccgcccctgcctcaagctcgattctttcaattctcaatctttctctctcttcgaccctaatcttcgcctatccctctctccacccaaaccctcacgcgccgtcatcgccatggccggcaccgggaagttctttgttggtggcaactggaagtgtaacggaacaaaagactcaatcagcaagcttgttgctgacttgaacaatgcaaaattggagcctgatgttgatgttgtcgttgcacctcccttcctctacatcgatcaagtgaaaaactcactcactgagcggattgaaatatctgcccagaattcttgggttggaaaaggtggtgcttttactggagaaatcagcgcggaacaactaaaagatc

SEQ ID NO: 266164 - DNA, 393 bp, Glycine max
acgcgacccgtcctctaaaaccaactattttctgggctgatccccatgtgcttgatagagggtactggggtatgacgcagaggatttcttctggaggcttcttgaagaagacattattcaactttgcttattcatataagcttaataacatgaagaaagggcttagacatggagaagcatctccacttattgataaaattgtgtttgacaaggtaaagcaaggtttagggggtagagtacgtcttattttgtctggagcaccacctttatctgcacatgtggaagaggacttactggtcgagacttgtgctgatgtacgacatagatattgtgtgactgatacttgtgctagaaccgatgactcattaccaaatgaaataaaaatgcttggaa

SEQ ID NO: 266165 - DNA, 433 bp, Glycine max
  unsure (1)..(433): unsure at all n locations
gagcaacgaaactaagaagattttgagcacaatggcatccacacaatgcttcgtgcaccgccatgccctcaccactccaaccagagcttcatcacagcgcttacttgtgagcaccaaaccaaaccacattgtttgcaaggcacaaaagcaggttgtccaagagggtgaggacactactaacattgtctctcgcaggttggccctcactgttctcattggtgctgctgctggtggctctaaggttgcacctgctgatgctgcctatggagaagctgccaatgtgtttggaaagccaaagacaaacactgacttgcttgcatacaatggggatggattcaaactctcaattccctcanagtggaacccaagcaaagacgttgagtacccacgtcaggttcttagatatgaggacaattgtgactcaaccagcaat

SEQ ID NO: 266166 - DNA, 396 bp, Glycine max
cccacgcgtccggttgagaactaagaaggagaagcaaatggcttcctcaatgatctctgcgccagctgttaccactgtcaaccgtgccggtgccggcatggttgctacattcactggcctcaagtccatggctggcttacccaccaggaagaccaacaatgacattacctccattgctagcaacggtggaagagtgcaatgcatgcaagtgtggccaccacttgacaagaagaagcttgagactctttcctacctgccagaccttgatgatgcacaattggcaaaggaagtataataccttcttacgaagggattgattcctagcttggaattcgacttggagcacggcatcgtgtaccgtgagcacaacaggtcaccatgatactacgatggacg

SEQ ID NO: 266167 - DNA, 233 bp, Glycine max
cccacgcgtcctgcaagagagagggagattctatgcttgctaccttctctctgaaaaatgggtacgttcaagtttcaccagtaccatttcgtttgcagggctcttcccactgaagcagatcatcaccccaagatctacctaatgaagctctgggccaccaaccaggttctcgccaagtccaagttctggtattttctgaggaaacttaaaaaggtgaagaatagccatgtcca

SEQ ID NO: 266168 - DNA, 390 bp, Glycine max
cttacgcgtacacctactaataaggattttaagccagcaaactgatattctcgaaccgggtactgcgtcaagtatgccaagttctcttatattgtggaacgaaccaaatgcttaaagaagtctatttcaaacatttccttcagattacttgacacagctgaacacagattgtctcgtcctgcacaatcatggatatgccatattcccacgcaagcttcaatataataccaaggtatctgacttttttgagattctggcaacatctgaggatagagatggaaagactttcgtttccacagcacgtggtatgaaatatcacgtgactgtctacctatggcaacctagaaaaaatgcttttgaatgtgctacatccttgaaaacccctcacac

SEQ ID NO: 266169 - DNA, 325 bp, Glycine max
gggctgctaccctccggctcgtgtcggatgcgtgccaagaatggggttttttacacgtggcgaaccatgtagtgagccatgagttgatgaaaacgccaaggctggtgtggagggacttctttcaccagccactggatgtgaactaagtgtatgctaatacaccgctgacttatgaagggtatggaagcacgttgagagtgaaaaactggaccattttcatattggagtgaatacttctttctgcattacatgcctaggtccgtaagggaccaatccacatggactgcccttccaacatgctttaggagcatcagctatgaatatg

SEQ ID NO: 266170 - DNA, 441 bp, Glycine max
gctgcatttggtactactggacgtattgtcatttcaatagtattgtacgtggaattatatgcttgttgcattgaatatataattttggagggtgacaatttgtcttctttatttccaagtgcacacttgaatttgggtggaattgaactgaattcacgtactttgtttgctgtgattactaccttggctgatcttactactgtttggctccgggacctaagcattctcagttacatatccggtaagagcttatttttggtgcacgtagtgatcagttatacattaaagcttggtcccatttgcctttggacttaaggacatattgctgaaataaggttttattatacttcatgggatatccttttctgtattgggataagctttgatggtgttgttaaaggaaactataataacgtatcatgttaccaactatatataaca

SEQ ID NO: 266171 - DNA, 370 bp, Glycine max
  unsure (1)..(370): unsure at all n locations
atctttctctcttctctctccacccaaaccctaactaccgaccctgttcccctctcgtgtccgtcatgaaaggaggaacgtccaagaccgaatctaagagagccgatcccaaacttgctgtgaataagaagggagccgccaccaaggctaggaaacccgccggcaaggggaaggcagcgaaagaccctaacaagccaaagaggcctccaagtgctttcttcgttttcatggaggagttcangaatgtattcaacaaagaacatcctgaaaacanagcagtgtctgctgtgggcaaagctgctggagcacaatggaagaccatgtctgatgctgaaaaaacaccttatgtggcacagtctgagaaaaggaa

SEQ ID NO: 266172 - DNA, 396 bp, Glycine max
cccacgcgtccgtttcaactttcaagtctaaaggacaaagattttcaagtgtcgaactggtgagagaacaaaatctcttgatgccatttctgaaatagatcatttatctatatttacaaacggtgaagctggtcattcctctgaagttgctggatttagagtacgggaactctcacttcctaatggagaatcatattctgggtcccttcttggtaacattccagagggtcaaggtaagtatgtatggccagatggttgtgtatacgatggtgagtggagacgagggatgagaaatggatatgggaaaatacaatggccttgtggagtaatgtatgatggtgagttctcacgtggctatatacatggtacaggaacatatatcggccctgataatct

SEQ ID NO: 266173 - DNA, 438 bp, Glycine max
  unsure (1)..(438): unsure at all n locations
gagatggcagctgcaacatctagtgctgtgttaaacgggtttggatctcacttcttgtgtggaggaaagaggagccatgcccttcttgctgctagcattggagggaaagttggtgcttctgttagtcctaaaagagttattgtggcagttgctgctgcaccaaagaagtcatggatccccgctgtaaaaggtggtgggagtttcatagacccagaatggcttgatggctcgctaccaggtgactatggttttgacccactaggactaggaaaggacccggcattcctgaaatggtatagagaagctgaactcattcatgggaggtgggcaatggctgcagttgtaggcatcttcattgngcatgcatggagtggagttccatggtttgaggctggagcagatcctaatgcaattgctcctttctatttggctctctct

SEQ ID NO: 266174 - DNA, 297 bp, Glycine max
gttgggatgaacactggatcttctgggtggtaccattcatgggtgcagctcttgcaccagtgtaccaccaggtcgtaatcagggccattcactttaagttcaagtgattcaatcaaacgtttcatgcttaatcaagttgggaacaacaacatctacatagatcaagccaatgtttgtacggttttggattcatttcattaagatgatctgcttatatctattcttctgcttaaaatttaaagtctttgtatgtcgtatgtaaagatgtagaattatgattattaggtggtgcatgtg

SEQ ID NO: 266175 - DNA, 383 bp, Glycine max
actagctgttaaactcactgggtttaaaaatacagtgcccggtgtgtttacattgaagggagttggcgccgatgaaattatcggctacaacatcttgatctgtcctcttgataataacccatgtgggtatgttgcggttcatttcgaccaattccgaaacaggcgtttggtggtgtctgaggttcacgacgatgggttatgggttatgtttcagaaactttcatatgcatcaggattaactctttcatctgcatgaagcacccgttgccctcaaaagtcatatatgtactttcacgtagtgagagacatgagtgagactaaataaatgcttcatgctgcattcaattatggcaagtctacataaaataatcgaagtttatgtc

SEQ ID NO: 266176 - DNA, 420 bp, Glycine max
  unsure (1)..(420): unsure at all n locations
ctctctctctctctgtctctctctctctagacttagattttgtgaatggctgaagtggaagagggacaggtcatcggcgtccacaccgttgatgagtggaagctgcaactccagaatgcaaaagactccaaaaaactgattgtggtggattttactgcttcctggtgtggtccatgccgttttatggccccagttcttgcagagattgcaaagaaaactcctgaattgatcttcctcaaagtggatgtggatgaagtgaggcctgttgctgangaatattccattgaggccatgccaaccttcctcttcttgaaagatggcgagatcgtggacaaagtggttggtgctagtaaggatgaccttcaagccaccatagccaagcatgcatctgctgntgctgctgcttctttctcttgaagt

SEQ ID NO: 266177 - DNA, 367 bp, Glycine max
accagagctgattttggcggctgttaccactcatcggagattatatgcaaaatggttggccgatgacgataaaaactggtaaagtcagtaacgttaccttgggagcatctgaacaagacattaaggagttcttttcattttatggtgatattgaatatgtggaactacagagccatgatgaacgagctcaaattgcttttattaccttcaaggattcacagggagctgagactgcagtactgctttcgggagcaacaatagtcgctatgccagttacaatatctctggatccagattaccagcttccacctgctgacttagcatcacctgtaagagacactcgaactactggtggcggtgctgactc

SEQ ID NO: 266178 - DNA, 255 bp, Glycine max
taaaaatactaataataatataaaaaaaagattaataaaaaaattatatactacatcaatatagaataacaactaaagacttaaatacacaatatacttttacaaatcatcaaattctcctaaaattaacaaaatcactacacttactgaatcttattacatacataaaatatatactaatattcacctatctacaatttattttattaacttaaaatattctcagatatctaatactttcatacttctaatact

SEQ ID NO: 266179 - DNA, 280 bp, Glycine max
taaaaatacaataaatatactaacaaaaaaaataattaaaaaaaataaataaacaaaaatatagaacaacaaataaagacctaaatacacaaaatacttttaaaaatattcaaacatctaacagacttaacaaaattacttttcaaacataatcttatttcatatagaaaatatattctaatattcactataatacaatctatatcactcatatctattataataagctatctaaaaatttctttttactataactatgctctatctgatcttaacattt

SEQ ID NO: 266180 - DNA, 321 bp, Glycine max
  unsure (1)..(321): unsure at all n locations
ctcctcagtatttttatgtcattaaagggagcaatggaaatcttaagacttccttttgcggtgatcaatcaaggtcttctcaggcaaatgatgttcgcaagcaaatcgttggcagcgctgttccagtacttaaagatgaaaagttttccttgcggatactggtggaccattctattgttgaaagctttgctcaaggtggaaggacggttgtgacatctcgggtttatccaacaaaggcaatctatggagctgctaggttgttcttgttcaacaatgctactgatgccactgtgacagcctnactcaatgtttggcaaatga

SEQ ID NO: 266181 - DNA, 282 bp, Glycine max
  unsure (1)..(282): unsure at all n locations
cccacgcgtccggtatcttgaatacgatgatcctaaaacggtatttcgaggagaggcttgggatgatcttggaggaactttgtgtgaaaccgagtatcaaaaaggtgtctactagagaaatgtgaaaaccctttttattgccatgactactgcgttttcaatgtcaaccagtaataattgtaatgttgaatgtacataggtataaagctatggatctcagtttatattgaatttcagtatcgctataaaactntacaataattatacactaaatttcataaa

SEQ ID NO: 266182 - DNA, 316 bp, Glycine max
gagacattggttataacttcagtaaagatagagctgggtctggcattcaaggggaaccggaggatggtggttgaagcacttgacgcaatggctgagaaagaagctttggatatgaaagctgctctggagtcaaaaggggaggtggagcttcaagtgtgtacacttgggaaaaatgtgactattaagaagagtatgctgaccattcaaaaggagataaagaaagagcaccagcgagtttttacaccatctgtgattgaaccatcatttggaattggacgtataatctattgcctctttgagcacacattctacacga

SEQ ID NO: 266183 - DNA, 384 bp, Glycine max
ctaagattgctgcttcttccgccactcatcacttcgctccctctgtgcttcaccaacggtggccgaaatcgaagctaccgttccagatccctctcaaatcgacgtcaaacttttcaaccgctggagcttcgacgacgttgaggttactgatatgtctctggctgattacattggagtgtccccgtcaaagcatgctacatatgttcctcacactgctggtaggtactcagtgaagaggttcaagaaggcgcagtgccccattgttgagagactcaccaactctctcatgatgcacggaaggaacaatggaaagaagctcatggctgtcaggattatcaagcatgcaatggaaattattcacttgctcactgacctgaacccaat

SEQ ID NO: 266184 - DNA, 296 bp, Glycine max
gtgccgcctcttccgtaagcagcagcaatggcctcaaatcccaaaactttgacctttggggaggtagctaagcacaacaacaaaaaggattgctggattattatcaatggaaaggtgtatgatatcacaccatttttggatgagcatccacgaggtgatgaagttttgctgacgtcaacaggggaaagatgccaccattgattttgaagatgtgggccacagtgattctgctatagaaatgatggaaaaatacttcattgggaaggttgacacttgcacttttccacccaaagtta

SEQ ID NO: 266185 - DNA, 393 bp, Glycine max
cccacgcgtccgaaagattctaaagaaatataactaatattctttagaataatcaaagggaatattaaattcaaataaattttagatagaaaaaagacttaaaaaggaggatttgaaatgcgagatctaaaaacatatctttccgtggcaccagtagtaagtactctatggttcggggctttggcgggtctcttgatagagatcaatcgtttttttccagatgcattgatattcccttttttttcattctagttattgacacggaaaggggtgaagaagattatagatccaattaagtattaaatatatgtaattaatatgtaattaatctcctcttctttatttcgactgttatttcttcttttttttacaattgtaatagaataagttagg

SEQ ID NO: 266186 - DNA, 400 bp, Glycine max
aaaaatattattaagatgatcaacattattggagcacttgttctactctttgcgtttctcttcctcagttgtgtgtatgcacaagacacaacaacccttgtgcctgcaatcataacttttggtgattctgctgtggatgtagggaacaatgactatcttcccacccttttcaaggctgattaccctccttatgggagggactttgttaaccaccaacctactgggaggttttgcaatggcaaattagctactgatttcactgctgacacattgggtttcaagacctatgctccagcatatcttagcccacatgcatcacggaaaaacctccttattggagcaaactttgcttcagctgcatctggttatgatgaaaatgctgctacttttgatcacgcga

SEQ ID NO: 266187 - DNA, 297 bp, Glycine max
gagataactagaaacagggtgatgaaaatgaaggtccttgttttattcgttgcgacaaggttggtagcatggcaatgccatgcgtacgatatgttccctgtgcgaatgaacactggctatggtgcccgtactccggaggtgaaatgcgcaagctggaggcttgctgtggaagcacacaacatctttggctatgagaccattcctgaagagtgcgttgaagcaacaaaggaatacattgatggcgaacaatatagatcagactgcaaaacagtgaaccaacaagcttactgttatgcc

SEQ ID NO: 266188 - DNA, 303 bp, Glycine max
gagaatggttccaaaggggttaacctttttggctgtcttaatatgctcttcgggactgtcactgaatcctgctgatgcggggcaagcgcaacataatggcctcgatatgaacttgtacaaggaatcatgccttcaggctgaagacatcatcacagaacacgtgcagcttgtctacaagcgccacaagaacactggtttctactggctgacgaacatcatgcatgactgggctgtacagagtggtgatgctttactgttgctggactccacaagaaggaacttgtctgataaggaaacagatac

SEQ ID NO: 266189 - DNA, 291 bp, Glycine max
accacgcgtccgcccacgcgttcgtgttgatcgagataactagaaacagtgtgatgaaaaggaatgtccttgatttcttcggtgctacaattgtggtagcatggcaatgccatgcgtacgatatgttccctatccgaatgaacactggctatggtgcccgtactccggaggtgaaatgcgcaagttggaggcttgctgtggaagcacacaacatctttggctttgagaccattcctgaagagtgcgttgtagcaacaaaggaatacattcatggcgaacaatatacatcag

SEQ ID NO: 266190 - DNA, 245 bp, Glycine max
cccacgcgtccgcccacgcgtccgtgttgatcgagataactagaaacagtgtgatgaaagggaacgtccttggtttcttcggtgctacaattttggtagcatggcaatgccatgcgtacgatatgttccctatccgaatgaacactggctatggtgcccgtactccggaagtgaaaatgcgcaagttggaagcttgctgtggaagcccacaacatctttggctttgagaccattcctgaagagtg

SEQ ID NO: 266191 - DNA, 284 bp, Glycine max
gccacacgtgctctacaatgactaggtttatccatataacggtgaatagtatgcacgcggggtatttggatgtaatgacttaccttaccctcgcagaagaagaaccggaatatgaaaaactatataacatcccaacagtgagaagcccagtgattgtgtttaccttacgagagatgtaacattaagacacttgaagtgatcagattttctagcttatggaataaaatctgtggaccaagatcactatcctgggttgactgatgcattggatggaaatctattga

SEQ ID NO: 266192 - DNA, 309 bp, Glycine max
ctaaaagatggctatatgtttgagtgtacaacaggcttctcagttctcccacatgtccggtacttgatgctttaaggaagaaactgtactttgagatagcagatggcttaaatggacgtgtttgggtcgatgcatcatctgcacacacaactattgttgtagctaatgcgattatgaactctgagacattgagtggtgctcagcagagaataatggttgaaaagctgctgcagacgatccagtgatccttgcatttttgattggccatgcatataagcccttgtgatttcaatttcatagcaaaaatac

SEQ ID NO: 266193 - DNA, 405 bp, Glycine max
  unsure (1)..(405): unsure at all n locations
ctttgctcattcagctggtggtcgaatgattgggaaaaaggttgctgaaaagttactggacaacaaggcgttggagttctacaaatgggatgatgacctttcacgattggtgcagaatgtgagagacaagttgaataaagttgctgaaccttggagtcgggaagaaaaggaccactgtctggaaaaaacagaaaaatcattcaagctctctggagagattctgcgtttgattttatcatgataatagatgccctgctatctgaggaattatgggtattaaagtgcatggcggaagccaacaacattaccatatgtgaattattttatttccaatacgcacaggaataatagaactgatgttgattaacttgcttgtctcaggcanngatgatactgggcctcgca

SEQ ID NO: 266194 - DNA, 420 bp, Glycine max
aaaagaaaaaagagaaacaaatggcagcactgggtggctttaccgacatcagcggagcacagaacagcatcgatatcgaaaatctcgctcgctttgctgttgatgaacacaacaaaaaagagaatgcagttctggagtttgtgagggtgattagtgcaaagaaacaagtggtttctggcaccttgtactatatcactttggaggcaaatgatggtgtgacgaaaaaggtttatgaaactaaggtgttggagaaaccacggttgaacatcaaggaggttcacgaattcaagcccatcactgttgctgttaatcctctttcggtgacggtctagcacatagctaggttatggaagtgactagcttggccgcaagagtaataatatgtatgaactgaataaatgtacctattaactctacaaa

SEQ ID NO: 266195 - DNA, 380 bp, Glycine max
  unsure (1)..(380): unsure at all n locations
gcaacagaaacaaatgtggtagtattaggtggcatgaccgaaatgacaggagcggccagcagcgttgagatcaacaatctcgctagctttgctgtanaggaacaaaacaaaagatagaattcagctctggactttgtgatggtgattagcgcacagcatcaaatggcttctggtgtgaattactacataacattggaagcaaaagatggtgggatgaaaaatgactattatgcgaaagggtgggacagggaataccaatagttgatagaattcatgcctacatttggcacatgaagcgagatcgaccatctcgctagctaagctgggagggccctatacataagatagaatgcagatattgagtttgtggggctgaatag

SEQ ID NO: 266196 - DNA, 304 bp, Glycine max
gatacttgtgttactatatgattcttttattactcacgccaataggtacgttcatcttctggcctttcaccaaaggcgaagagcgatcggtttctattcggttctgtcgttagttttcgtgtgttttcttttgctttggatctgatgcatcgtgtttttgtgtgcaggttatcaacgaccgagagactggaatgtgcagaggattcggatttgtgaccttcgtctcagagcagtcaatgaaagatgcgatcgcatgaatgaacggtcaagaccttgaccgtcgtaacatcacttgtcacgaagc

SEQ ID NO: 266197 - DNA, 379 bp, Glycine max
ggcccttgagcttttctttctttctctgctctcttttcttttaggtttccactctcacgacactcgccctcttctctttctctgcaataatctctcttctcttcttcactctctcaactcctgccaaacccccatttccgcagttcttaaatttggagtctgatgtctccgccattgctggttaccgaagatgaaaggcagtgccatgcctcgatggtagcatctgcatcttcaccatccctgaactgtttctccctaaatgaggccggatttaaagaatgcaattacctgggattgtcagattgctcttcggtggacacttctactgtcccgaatttgtctgatgagaaaaaggagaatctgaatttgaaggctactg

SEQ ID NO: 266198 - DNA, 423 bp, Glycine max
  unsure (1)..(423): unsure at all n locations
gccatttcgaaccgctgcttcaaccattcctccttgctgaaccggactctctccgtaagccctggtggaaccgctcctccacgcgccatggccaagcccagtttctcaactgcccaagacctaatggcttctcctggcgattttgaatttgcgcagcctctgaaaattgtggagtatcccgacccgagattgatggccaggaataagcgcataggtgccttcgatgatagtctgaagaagcttgtccacgaaatgtttgatgtaatgtacaaaactgatggtattggtctctcagcaccccaattaggaattaatgttcaacttatggtgttcaatccagtangtgagcgtggtgaaagagaggaaattgttcttgtaaacccaagagttagccaatactcaaagaaactgacactatttaat

SEQ ID NO: 266199 - DNA, 308 bp, Glycine max
  unsure (1)..(308): unsure at all n locations
gttagatctggcccaaagtcttctgctgttgatcttcatcagttgcctcacgaaaaaggggtgagtggaacagttggtcggagcgtttttgaattggattataccccactttatggattcatatctatgtgtggaagaagacctgagatggaagatgcaggtgcaactgtacctcagtttctgaaaattcctattcacatgctaattggtgatcgggttattgatggaataaacaagtgttttaatcagcagatgacccatttgtttggagtctatgatggtcatggtggctctcangttgcaaacta

SEQ ID NO: 266200 - DNA, 323 bp, Glycine max
gatatgtcagcatttaaggcagcaaatccagatgctatctttgaagattttattcggtgggattcacctggggattgggaagaggatgatggccctgagggaagtaaatcatcatcatccagtgctcatgacattaagaagtcaaaagatagttggcctccacaagggcggctttctaagagaatgtctgaacatggaaatctatggagaaagctttggaataatgcacctgctcttcctgcttctgaacagaagcctcttcttgatccaaatagggaaggaggaaaagttcttcattatcttgaaactctaccaccacatga

SEQ ID NO: 266201 - DNA, 431 bp, Glycine max
gaggggcagtagccgagattacctgagttgcataaatgaacacgattgtttagacccagagcatcaacatcccagacggcgtgagcatcaaagttcatgccaaggtcatcgaacttgagggccccctctgaaaattggtgctagacttcaagcatttgaatctagattttcagctcattactgacgaaaacggtttaagaaagctgaaaatcgacacgtggtttggttctcggaaaacatgcgacggcattcgcaccgacttgagccacgtggagaatcttatcaccggcgtcaccaatggctaccgctacaaaatgaggatcgtttatgcccatgttcccatcaacgcaagcatcggcaacagcaacaagtctattgagatccgaaatttccttggcgagaaaaacgtgaggaaagtctacatgcttgat

SEQ ID NO: 266202 - DNA, 380 bp, Glycine max
caaacacagaggttgttcataggagttataatgtcataattcgaaaaaatgcgggtagggtcgataatgattgcagtcggactcaacactatacaagtggatgccgacatttacaagagcttgcacatcactcggcgtgttcaatacgcgtcaattctgggcgaatacctacatcgagtgttggataaaacctaaggatcagctgctcaatcaatgagatcattcttatgtggaagcattgaaatgctaatcaagctcggacctggtgattctgacggaactagtacagtctactatttatactgtgcatgaagccaacatgacgagatacatgttgagttcttaggcaacagttcaagacagtcatacactgttcacac

SEQ ID NO: 266203 - DNA, 326 bp, Glycine max
accatacttcaaccatttttactttcttaaccggactctctccaaagggcctcgtggaaccgctcctccacgcgccattgccaatcccaatttctcaactgcccaagacctaatggcttctcctggcgattttgaatttgcgcaacctctgaaaattgtggagtatcccgacccgaaattgatggccaagaataagcgcataggtgccttcgatgatagtctgaagaagcttgtccacgaaatgtttgatgtaatgtacaaaactgatggtattggtctctcagcaccccaattaggaattaatgttcaacttatggtgctcaatc

SEQ ID NO: 266204 - DNA, 336 bp, Glycine max
gccatttcgaaccgctgcttcaaccattcctccttgctgaaccggactctctgcgtaagccctcctcgaaccgctcctgcacgcgccatggccaagcccagtttctcaactgcccaagacctagtggcttctcctggcgattttgaatttgcgcagcctctgaaaattgtggagtatcccgacccgagattgagggccaggaataagcgcatagctgccttcgatgatagtctgaagaagcttgtccacgaaatgtttgatgtaatgtacaaaactgatggtattggtctctcagcaccccaaataggaattaatgttcaacttatggtgttcaat

SEQ ID NO: 266205 - DNA, 403 bp, Glycine max
ggaagtcatgccttttgagagtttgaggaaagaagcacaggatcattataaccagatgcaaggggtctctgtatataaaatggatggcaataagttggatgatctagtctgtgtgagacattccttaaaatccgaggtgtaaatggcgtctttgctttctattgttattctcttatcacaccctacagtcttctaaatggaatctgggatgaagttacttttcgaggttttcatggctcctcatctgtcattctgtctcatcacttattgcagctacagagcacaacacgaatctcaactccaaggaaactgaggaagtcaatatgcataatttcatcaatccagatgattcatattttaaggcgattcatggtaaggggtctagaaatcttaatacaggaat

SEQ ID NO: 266206 - DNA, 359 bp, Glycine max
  unsure (1)..(359): unsure at all n locations
acgaacaaagttcatttcttgtgctttgctttattcctcaaaaccaaacatgtcggacagatgcggcaactgtgactgcgctgacaagactaactgcaccaagggaaacagctatggtgttatagtagagactgagaagagctacatcgagactgttgacatggatgttccagcagctgagcatgatgggaagtgcaagtgtggcactaactgcacttgcacggactgcacttgtggccattaaggaatatgtatgaaaatgtaattgccatgtgtttggcaatacaaatctccaaataatgtaatcttcgtatgaataaatgtgtgctgttatcctacttcaaannananaaatttta

SEQ ID NO: 266207 - DNA, 350 bp, Glycine max
cacattcatacaaattcaagatttatcattccacataacaaattaaagttagggagacgtacccttattatggccaaagaaggtcttggacttgaaatcactgagctaaggttgggtctacctgatgcggagcatcaagtaagtgtggtcaataagaaaaatgagaagaagagggcattctcggaaattgatgatggtgttggagatgaaaatagctcctacggcggaggcgaccggaaaatggagacgaataagagtcaagtggtggagtggcctccggtgtgctcttaccggaagaagaacagcatgaacgaatgtgcttcaaagatgtacgtgaaggttagcatgga

SEQ ID NO: 266208 - DNA, 373 bp, Glycine max
cccacgcgtccgaatgcctccacagaaagagaggatccttcagagttcatcacgcagggagctaaagattttctctctagcataaaggatatagagcataggttcattcgagcttctgaatctggtacggaggtcttgaggttgttagaggctaacaaaatcaaggtgggatattctgaggcaaaagggaagtcgtctaccactgctttgttgtctgctgtccagcctgtttgttgcggtagaaaggcttcacctgttttccaggaacctgcccaaaaaattattagttggaaaaggacagcatcttctcgatcatcctcgtccaggaatgctttggctacaaaaacaaaggaagatattgatgatcgtggaa

SEQ ID NO: 266209 - DNA, 356 bp, Glycine max
cccacgcgtacgcattcaccgccggactggccctctcctccattgtactctaggccggtctccgcggcggcgccgacatctcgacgctcaccccatgcaaggagtcgaagcagttaccgaatcgtgagaagcagtcaataaagaatctggagtcgccgctgaaactctacgaggcgggcagcgccctcgcactggccattaacgcaagcgttgagaacacaaataggaggttcgacaactacgcaaagcaagggttgctgtgcggcggctatgggttgccgcacctgatcgtgagcggagaccagaagcactgtggtgagttcaacacactccggatactatacctggacatctcg

SEQ ID NO: 266210 - DNA, 326 bp, Glycine max
gcacaacggacgaaaatgtcacctttggtgattgatatttgctagaagcacaagacggcttacaggagtttgacatttgtttaacccaatctttggactataaagaccatcaggactgttgctctttaggccagaaatctaactgaccctgcttttcagaatttgttgtgggatgatattaacactcatggatgattttagggaaaagattgaggatcatgaatctagtttgtctctgttttttcccacactattgacaagctgttaatctacatgttagttgataatttgttacatgtgacattgcttaattgggcatggaagat

SEQ ID NO: 266211 - DNA, 383 bp, Glycine max
  unsure (1)..(383): unsure at all n locations
cccacgcgtccgcccacgcgtcctctcaaccgaaacagattccatctctctcacgcggtgacaacaatatcaaattgctcccttctcttactcttcctcttcctctccaccctgcacataacttccaccctctcaacccccaccaacttcatcaagtcctcctgcagcaccacccattacccagccctctgcatccagtccctctccgactacgcctccaccatccatcaagacccccacgagctcgtgcagacagtcctgtccctctccctcaaccacaccgaggccaccaaaaccttcgtcgcaaaatgcaacatattcagaggcctcaaaccgagagaatacgctaccttgaangactgcgctgaataaatgagtgacag

SEQ ID NO: 266212 - DNA, 401 bp, Glycine max
cccacgcgtccgcactatcttaatagtttagctctaaaccactgccaagtatgggaggttcttcatgctctttgagctggatttcaccttgcttatcccataagctaaacttgccacatacaaattgtttgcctcgcaacattgcaacttcatcttccaacactgtcttttgtgaattggacacaacccccatcggagaaagtcattgccggagaagaccgctactgctaggcattggagcattaactgaaaatttacaaccaacaaatttggtctttgctcaagaaaaaccacacagataccgagcttttgtggactatgaagatgggtattcttacgtatatcccattgattggaacgaatttgactacagggctcatgattctgcattcaaagacaga

SEQ ID NO: 266213 - DNA, 393 bp, Glycine max
  unsure (1)..(393): unsure at all n locations
attttgggcaggaaataacctcttctgcatacccttncacccagcgaaaagaggcgggaggctgtattgtacagtagaagttaccttgaaaatcagatggctgttgccctgggtggaagggttgccgaagaggttatttttggccaggaaaatgtcaccaccggagcatcaaacgacttcatgcaagtttcacgagtggcaaggcacatggttgagagatttggattcagcaaaaaaattggacaagttgccattggtggacctggtggaaatccattcttgggtcaacagatgtcatcgcaaaaggattactccatggcaactgcggatgtagtggatgcggaagtgagggaactggtagagagagcatattctaaggcaacacatattatc

SEQ ID NO: 266214 - DNA, 419 bp, Glycine max
accacgcgtccgaaaaataaaaaatttttatttttaaaaaaaaaaaaaaaaaaaaacagaaggtataaattaaaaagaaggaaattatattaaaaaaaaaataaatattataaataaaaaaaaaaaaaaaaataatataaaattataatatttttatatcctaatatctataaaaaaaattaatctcacactaatttaatgatttgcatctcttcccctttttagatttatatatatttgcaaagatttataatcattcatttttttaaaagctcactttttttaaaatcttaagtttgatcatatatgaattttaacattaaattcacttctttattatttttatcacatttttaattttatttcttattgcccttttactatataatctaataattctccctcctttttttttttat

SEQ ID NO: 266215 - DNA, 416 bp, Glycine max
  unsure (1)..(416): unsure at all n locations
cccacccgtccgaatagttggaattattactgccttcaagtatcacaaagaaagtgggatggccaatctctacagcttgcattcatggcttggaattggggttattgtcctttatggcattcagtggatatatgggtttgtgatctttttcttccctggtgggactcccgacattaggcgcgcctcacttccatggcatgcgctattacggctgtttgtatttgtcttggctgtgggcactgctgctcttgggtttctggagaagctcactttccttgagaactcangattggacaaatatggttctgaggctttgcttgtcaacttcactgctattatcacagtcttattcggtgcctttgttgtgttatctgctctagctgatgctcccccagcccctgccgcagatgactatg

SEQ ID NO: 266216 - DNA, 425 bp, Glycine max
cccacgcgtccgcccacgcgtccggccatttacaaaaatggtaaccattaaagcatggtacacagtccttccaaatgaaccaactccggagggccttttatggctatctgatattgatcaagtggcacgtctacgccacacacccaccatctacattttccatgcaaaacacaaccatgatacattaattgagaggatgagaaactctcttagcaagattttggttcactactatccaatagccggtcgattgagaaggatagaaggtagtggtcgattggaattggattgcaatgcaaaaggggtggtgttgcttgaagctgaatccacaaaaacattggatgattatggagactttttacgtgagtccatcaaggacttggttccaacggttgattacacaagccctatagaggaacttccct

SEQ ID NO: 266217 - DNA, 416 bp, Glycine max
cccacgcgtccgcccacgcgtccgatttttatttctatgaacagagtgatgagggtggaggtacttgttttctgggttgctacaattttggtagcatggcaatgccatgcgtacgatatgttccctctccgaatgaacactggctatggtgcccgtactccggacgtgaaatgcgcaagttggaggcttgctgtggaagcacacaacatctttggctttgagaccattcctgaagagtgcgttgaagcaacaaacgaatacatccatggcgaacaatatagatcagactccaaaacagttaaccaacaagcttacttttatgccagagacctcgaagtccatcccaaggacacatttgtgttcagtatagatggcaccgtactctctaatattccatactacaaaaaacatggata

SEQ ID NO: 266218 - DNA, 422 bp, Glycine max
cccacgcgtccgggagaaatttaactcgaccttgtatgatgaatgggttaacaaggggaatgcaccggcactgcccgagactcttaagaattacaacaagctggtgtctcttggcttcaagattatattcttgtcacgaagaacactggacaaacaggccgtaacagaagcaaacttaaagaaggctggctaccacacatgggaaaaattaattctcaaggatccacaagatccttccactccaaatgcagcttcatacaaaacagcatcgagagagaaactgataaggcagggatacaacattgttgggatcattggagaccaatggagcgatctcctctgaggccacagaggcgaaagcaggacctttaagcttcctaatcccctgtactacattcagtagttccttcacctctcaacaa

SEQ ID NO: 266219 - DNA, 421 bp, Glycine max
caaccacttgccatggcagcagcagctttaatgtgtatgagcttcaacctggcggcagcattcaacggtctctctttttcttcttcctcatcgctcttcgctggaagtggtagttattctcttcgcgcgggtcccacctcggtggtgtcgctgacccggcgctgcccgctgaccatagagaacgcccacatgaagggggcgggcagcaccaagaacggccgcgactcgcagggcaagcgtctcggagtcaagatatacggcgaccaggtcgccaagccccgctccatcatcgtccgccagcgcggaaccaattttcatgcacgaaagaatgtggggcttggcaaagattataccattttctccttgattgatggagttgtaaactttgagatatatggacctgacacgaaaaatgtgagtg

SEQ ID NO: 266220 - DNA, 405 bp, Glycine max
acccttccggtcaagcctcgttttttccaccctcaccattgcctttttcttccaacccataacccggcgttccaaactctcctctttccgactccccacccgccgccaccccaagccactcagattctcctcctccaccatcaccgccaccatctccgtcggcgacaagctcccggaggccaccttctcctacctggactcgtccggcgaggtgcagacgacgacggtgtcggaactgacgaaggggaagaaggcggtgctgttcgcggtccccggcgctttcacccccacgtgctcgcagaagcacgtgccgggcttcgtggagaaatcgggggagctgagggcgatagggatcgacacaatcgcatgcatttcggtcaacgacgccttcgtcatgaaggcatg

SEQ ID NO: 266221 - DNA, 302 bp, Glycine max
gagacccttcctatataattgtaccacttactttttcaatgtactaggcactctcaggacggatgttttcaaaccggggcggcttacatatactattctctatcaactaactaccgccaattcatacaacaacgtaatacactcgactttaacatatatggtaagcacgaacataaccttgactgtggtagtagctacaagaacttcatcaccgcgcacttcgatcacacgaaacagggcgaaccaactccttacagttttatgcatgctctacatatctgcggctacagaaccaatgaaca

SEQ ID NO: 266222 - DNA, 403 bp, Glycine max
caaacaatgaagccattgttttagacatgatgatggaaatattgatggctggtgctgaagcattgtccaaaatgagcaaccttacgttgctcatattccgtgatgtgaagtttatgggaatacttaattcagttaattgtctctccaataaactacaatttcttgagtggtataactatcctttctcctatttgccatcaagttttcagccgaacctgctggttgaattgatcttgcaacatagcaacatcaaacaattatggaaaggcataaagcatctgccaaatttaagagctttggatctcacttactccaagaatcttattgaggctccagactttggaggggtccttaatcttgagtggataattcttgaaggatgcacaaatcttgcacggatcca

SEQ ID NO: 266223 - DNA, 420 bp, Glycine max
cccacgcgtccggtgagtttgttgatcgagataactagaaacagtgtgatgaagatgaaggtccttgttttcttcgttgctacaattttggtagcatggcaatgccatgcgtacgatatgttccctctccgaatgaacactggctatggtgcccgtactccggaggtgaaatgcgcaagttggaggcttgctgtggaagcacacaacatctttggctttgagaccattcctgaagagtgcgttgaagcaacaaaggaatacatccatggcgaacaatatagatcagactccaaaacagttaaccaacaagcttacttttatgccagagacctcgaagtccatcccaaggacacatttgtgttcagtatagatggcaccgtactctctaatattccatactacaaaaaacatggatatggg

SEQ ID NO: 266224 - DNA, 322 bp, Glycine max
ccagcgtacgtgcacacgtctgattacagtcactggttattcagacgcacaggcggatgtaatagaaagcgatggtgtgtctacataagacggttatcaaaaacatcttgcttacttgaacagcaacggagatgctggagcagatatgatcgtcactcatttattctatgatacggatatattcctgaactatgcgaacgactgtccccaaattcgcaataaccagccctatcgtacctggtaacatgcccatttattactacaaaggctttatccgcatgactgctttttgcataacaaatataccagctgacattattgc

SEQ ID NO: 266225 - DNA, 396 bp, Glycine max
ggaaaagaagatgaagaatgacccttcatttacatatgaggagacggttcagactgggatttctgccctgcaatcagttcttcaggaggattttaaggccactgagattgaggttggagtggtgcggaaggataatccagaattcagagttttaaccaccgacgaaattgatgagcacttgactgcaataagtgagcgtgactgagttcttgataaggatgtagttgttcaaactttctgatggtagagattatattatgtacttgtttctggaatcatcgaattgatttccttgtgatatttgagtggtgagttactcaagaatgatgttgaagatggtatttgatttcctattacaagcttacttgtgtaaaaaaaactgtaactggtacatat

SEQ ID NO: 266226 - DNA, 409 bp, Glycine max
  unsure (1)..(409): unsure at all n locations
ccggttttccaaaatctcttctttcctaacccaacaaaaatcatttggggagcgtggntcgtggagttaggcagtggtggtggtcaaagttccttgggttatctctttggcagtggagaggcccctgccgcataaccggcaacaaacaatgccccagcccaacctgaagtgcaggctgtaaataatgcgcctccttcaaaagcatctcctcctactaaaacaatagaccctaacaaggctgctggtataaacagtcattctactgatggccagaacaccggcaacttcatcacggaccgaccctcaaccaaggtccatgctgcccctggtggtggttcttctctgagttatctctttggtggacctggagaggggaaatgataccttgcttgcaaagcttttgctcgat

SEQ ID NO: 266227 - DNA, 371 bp, Glycine max
  unsure (1)..(371): unsure at all n locations
nncggtgncattctcattcttttctatctctctctaccatagccatggatccctacaagcggcggccatccagcgccttcagttctcccttctggactacaaattctggtgctcctatttggaacaacaactcctctttaaccgttggagctagaggtacaattctgctggaggattatcatcttgcggagaagcttgcacattttgatagggaacgtatcccagaacgtgttgtccatgccacgggcgctagtgcataaggtttctttgaagtcacccatgacatttctcacctgacatgtgcagatttccttcaagcccctggagttcagacgcctgtaattgttcgtttctcaactgtcattcatgag

SEQ ID NO: 266228 - DNA, 421 bp, Glycine max
  unsure (1)..(421): unsure at all n locations
gagncgtggctggggagtggaaccacacctctggtcaatggaatggagacgctaaggacaaaggtattcaaaccagcgaggattacagattctatgctatttcagctgagtaccctgaattcagcaacaagggtaagacactagtctttcaattttgtgttaagcacgaacagaagcttgactgtggtggtggctacatgaagttgctcagtggggatgttgatcaaaagaaatttggcggggatactccttacagtattatgtttggcccagatatctgcggttacagtaccaagaaaggtcacgctattcttacctacgataacacaaaccacttgataaagaaggatgttccttgtgagactgaccaacttactcatgtttacacatttatgctacgtccggatgcaacctacagcat

SEQ ID NO: 266229 - DNA, 418 bp, Glycine max
cccacgcgtccgcccacgcgtccgattacagtcgctggttatccagaggcacatgcggatgttatagaaagtgatgggttggctacatcagagggttatcaaaatgatcttgcttacttgaagagcaaggttgatgctggagcagatctgattgtcactcagttattttatgatacggatatattcctcaaatttgtgaacgactgtcgccaaattggaataacgtgccctattgtacctggaattatgcccattaataattacaagggctttatccgcatgactgggttttgcaaaacaaagataccagctgacattatggctgctttagagcctatcaaggacaacgaagaagctgtcaaggcttatggaattcacctgggaactgaaatgtgcaaaaagattttagctcatggaa

SEQ ID NO: 266230 - DNA, 394 bp, Glycine max
cccacgcgtccggtttcatgctctgagagatcaaagagaaggttttctttctcggacgtggtggatttggtcatggagaaaagcaagtcattccctgaatactcctgctcttacactgaatttgggttcagtgaaagatccaactcatacaatttcaatgggccaaaccagaagggaaatgggttttctgcatcaagtgatccagaactcaagagaaagaagagaatcaaggcctataatgtgttgacagtggagggaaagcttaaaacaagtgtcagaaacagcttcaagtggatcaagaacaagttcagtgacattcgctatggtgtgtgaactatatgaccaaacataagagttgcttgccatggggctagcatgtgttcagtaatatcaa

SEQ ID NO: 266231 - DNA, 289 bp, Glycine max
tgtgctcatcgaccctccaatcacacatcaatggattcttacttcacaaaacctatctatcccatactccttacctcactttctccaggaggaaaatttcaaccacagtgaacgctacatctcgagtcgacaagttttcaaaaagcgatatcattgtctctccgtccattctttctgcaaacttttcaaaattgggagagcaggtgaaagcagtataataggctgcatgtgattggattcacgcagatgtaatggatggtcgctttgatccaaatattacaattggacc

SEQ ID NO: 266232 - DNA, 297 bp, Glycine max
  unsure (1)..(297): unsure at all n locations
catatagaattgactattattatcgncatcttttttatcttacatctgcaatcaaagatggtgcaaatgtaaaaggatattttgtctggtcgttgttggacaattttgaatgggctaatggttatacagtacgctttggaatgaactttgtggactacaaaaatggcttaaagagataccagaaactatcagcaaaatggttcaagaattttctcaagaaatattagaatttaggtaacttatgattccatgaataatgtaatggaatgtatttgccatgtttaactntaaataact

SEQ ID NO: 266233 - DNA, 280 bp, Glycine max
ttccaaggttaaggcctgcaaggatgggtcattttaattctaagcccctcattcattccttatctgctatttatgaaaccgctaagaggaggaagagagtggtgttctcttcttcttcttcagaacttaaccctgtgatgtcgccagaggtatcatattgtgttgcgacttgcctcattccacatccaaaaaaggttaacacacgtggggaagatgctttctttgtgagcaactataatgggggagttattgctgttgccgatggcgtctatggttaggc

SEQ ID NO: 266234 - DNA, 419 bp, Glycine max
gctagccccacattcacctgaggcttttaaagcaatggctttccttgcagcatgcagtgctgctgcttcccttggcgtgtcagaaatgcttggaaaccccatcaacttcagtggtgccacaaggccagctccatctgcttctagtcctgcctccttcaagactgaggctcttttctccaaaaagaaggctacaccaacacctccaaaaaaagctgctgctgctgctcctgccaatgatgagcttgccaagtggtatggtcctgacagaaggatcttcttgcctgacggtctcttggaccgatccgaaatcccagagtacttgaccggagaagtccctggagactatggatatgacccatttggtcttagcaagaagccagacgactttgccagatatcaagcatttgagttgattcatg

SEQ ID NO: 266235 - DNA, 421 bp, Glycine max
cccacgcgtccggagtgatggctgtttttctgtgggaaaccctgaaggaagccgggggggcctacactggcttgtctgcttccaccttcttcacggtgctggcgcttctttttgccgtttactacgtcgtcacgggtctctttggctcctccgacgatcaccatcaccgccaccgccacgtcgaggaggacgaggaggaggagatgccgcctctgcgccctccggttcagctcggcgagatcacagcggaggagctcaaggcctacgacggcaccgatcccgagaagcccttgctcatggccatcaaggcccagatctatgatgtctcccagagcaggatgctatatggacctggtggaccttatgccctatttgctggcaaggatgctagcagagccttagcaaagatgtctttttgaga

SEQ ID NO: 266236 - DNA, 341 bp, Glycine max
ctctgtcgatccatccctcattcctaatcctccaatccaaccacctgagcctcacactcacatatacacatatctgaacgcgtatcgcccctcctatggcttcaaagcgcatcctcaaggagctcaaggacttgcagaaagacccaccaacttcttgcagcgctagtccagtagctgaggacatgttccattggcaagcaacaataatgggtcctgctgatagtccttatgctcgaggtgtattcctagtcactattcacttccctccggattatcctttcaagcctcctaaagttgcctttatgactaacgtgattcacccgaacatcaatagcaatggt

SEQ ID NO: 266237 - DNA, 288 bp, Glycine max
gaaagagttcaggaggggcactcagagcgtgcagatcagcagagagcccaacaatctctacaacctcaacactttcaagtactccggtttggcgaacaagaaaactgtcactgttcaacctgcgggtaaagaccagtctgtgttgctggcaacaaccaagacaaagaagcaaaacaagcctgctgctttgcttcacaaatctgtcatgaaaaaggagttccggaggatggcaaaagcagtgcaaaatcacgtagcagataactactacaggcctgatctcaaaaaggc

SEQ ID NO: 266238 - DNA, 421 bp, Glycine max
cccacgcgtccggaggaatagcagcagtagcaagctatggcggaagaacagagaggggcaccaccttccaatcctacgttgtcgtttgatcctagtcgaacggttggtattatcaagaggaaggccttgatcaaagacttagctgcggtataccatgccgaatgccttgcatactgtcaagagcttttggaacttcaaactaaatgggaagaggttttcaggtggttgatgcataactcatttagagagcaaaatatgcaccgtcagaggataccttttgcttgctgctggtgtagctgatagtatcagagcacacatttaatgtagtattgatgtacttttcaaatgctactgagacgtcatgtttgagatttcatccatcggcctgcagttgtggaaacatttccccctactcgataaa

SEQ ID NO: 266239 - DNA, 406 bp, Glycine max
  unsure (1)..(406): unsure at all n locations
acgaaccgaacatggcgcaaacgctggtaatgcccgtggcaccttcgctcgctggcgggttcaattctcgcctctgcaagacactctccgttcccgttctcaacaacccaaagtttcaagggttaagcatcaagtgcgttcgagttggaggtgtggagattccgaacaacatgcgaatcgagtactcgctgcagtacattcatggagttggcaggaccagagcaaaacagattctgtgtgatatccaaacggataacaaaatcacgaaggaactcactgaggaggagctcatcactctcagggacgaagtctccaaatatatgattgaaggcgacctgagacagttcaatgcggntaatataaagagactgaaggacattcagtgctacataggaataaagcacat

SEQ ID NO: 266240 - DNA, 353 bp, Glycine max
cccacacatacagagagacttccttttcttgaccccaatcgaaatgtcttagggggggggagcagacttgacatggagagctaaactcgctttactgttgaaaaacacaacaaaaaacagaatgcccttttatagtttgaaaaggtagtacatgcaaaacagcaagagacttatggtaccttgtacaccatcactttataagcaaactatggcaggcaaaagaaagtttatgaatccaaagtttgcgaaaaggcatgtttaaacttgaaagacgtcctagagttcaagcttgttggaaaagcacctaaataatctaatgcttaattaagttgcacaaaaataaatagtgagac

SEQ ID NO: 266241 - DNA, 374 bp, Glycine max
  unsure (1)..(374): unsure at all n locations
gcggatccanatcaagaaaatcgacatcatctgttccaggcacgtgactttctccaagagggggaaagggcttttgaagaaggctcacgaattgtcaaccctttgcgatgcagacataactctcattgttttttctgcaactagcacgctctttgagtatgccatttcaagtatgcatcaagtaattgaaaggcgcgatagccattcatcaatgaatagactgcatcgcccctcaattgagctgcagattgagaatgactccaatgaaatcctgcgcaagagagtagaatataagacccgtgagctgaggcacattaatggggaagatctgcaaggattgacattacaagaactgcatagactataggaacacc

SEQ ID NO: 266242 - DNA, 418 bp, Glycine max
cccacgcgtccgcccacgcgtccgcagtttttgatgcgcatgctcaccggcgacgcggccgccgacaactccttccgagtcgttccgcagtccatcgccgccttcggctccaccgtcatcgtcgagggctgcgactccgcccgcaacattgcctgggtccacgcctggaccgtcactgatgggatgatcactcaaatcagagagtacttcaacactcgcctcaccgtcactcgcatccacgattccggcgagattgttccggccagatccggcgccggccgtttgccctgcgtctgggagagcagcgtctccggtcgggtcgggaaatccggacccggtttggttctcgcaatataaaatatataaatcagtaattagggaaggacgaggtcacgtgttgccggtgctataataatta

SEQ ID NO: 266243 - DNA, 281 bp, Glycine max
accaaaaccatagctcgcgttctgctttcgtcttttacatcaggatggagtctcaggtgagagcacgcacttgttgtcaaaggtatgggtcgtactggatccagaggacaagtaacccacgttagagtgaaatctctggatgatcagaaccgtcacatcatgaggaatgtgaaaggacctgtgcgagaaggagacattctcaccctactcgagtctgaaagggaagcacgaagattgcgctagatggtttcttttggctagcctgcaaattcgaacaaaac

SEQ ID NO: 266244 - DNA, 141 bp, Glycine max
tgaattcgttctcagaaccagactttgaagattgcgatacatgatatatagaaggatgcaatggatgacttatggactatgcctttgagttcattatcaacaatggccgcattgatatgcgagaggattacccttaccgtg

SEQ ID NO: 266245 - DNA, 302 bp, Glycine max
tcggttacacgtgctcaaaatcggacccaagcctcttggttcatagatatttacaaggtaccaggagctcaaggagcgatatggcatgaatatttcagctggtggtttgagcgataatgacactactttacatcttgcagtttatactttaccatttggtggaggtggtgaaagcgcaatcggtgcataccattggaaattcttatttgaagctttcagccactaaagaactagtctctatcgccaatttaatggtgatgctccagttaggtacctaccattcacaattgctgacgtttata

SEQ ID NO: 266246 - DNA, 320 bp, Glycine max
gtgaatcgtaaacccatgggaggttcatggcctaaggtaacgatattcgagtcattgttagtatggaatggaccgattgagataaaaagagtgttaatgaggattcaacgggtattactagatgtataactaagcagaatcgacagaatactcctagtcgattggaaatgagaaaatactgaccctcgcgttagcaaacatacaattgacgcagaaagccagaaatggatcaaattgaacgcttgcgtgataccctatgaaccaaagaacttcacatgattcacgatctatcttacttatctatatagatcgatctatct

SEQ ID NO: 266247 - DNA, 319 bp, Glycine max
aatggtcggagggttgagctttctcacaactctagaggtggaggtggtggtcgtggtggtggctctggtggttctgagttgaaatgttacgagtgaggtgaacctggtcattttgctcgtgaatgtcgcatgcgctgtggttcaagaagactccgtatccgtagtccagccagattccgctggagcccaagttatggtcgaacgagttacagtcctcacgggcgggcccctaggcgccgtagtttgtcacctcgtggacgtagctacaggatgtcacctacttatcgagggcgtgaggaggtaccatatgctaatggaa

SEQ ID NO: 266248 - DNA, 288 bp, Glycine max
cccacgcgtccggagcatcatggcctcaagagcagtgttattgatggctatgtgtgtgcttccggcgatggttgtggccattcgcccagcaaagaaccctttttgcgtgaagggtcgtgtctactgtgacccttgccgtgctggttttgagacctcagctaccacctacattgctggtgctgagattatgttgcaatgcaagagcagggttagcaacgaggttgcgtacacgaagaaggcgtacaccgactcaaccggagcatacacgatgtacgtggatgaggatca

SEQ ID NO: 266249 - DNA, 298 bp, Glycine max
gcaatattcacaaccctcggaacctgcgacgccgcattcgctgttcaacaaatagccgacatagcagaaggcgacaaccgcggactggcactgttgctgcccataatcccagcaatagggtgggttctgctcaacattctgcagccggcgctgaaccagctgaaccgaatgcgcagcaccaaaggcgtgatcattggcttggggcttggcggcttggctgggttggcagctgcgccgcatgcctgggcggcggcttctgaagctgccgctgctgccagcgacaacaggggacagcttc

SEQ ID NO: 266250 - DNA, 240 bp, Glycine max
cccacgcgtccgcccacgcgtccgctcacgcgtccgatatgaaagaaagagacatctttgatccaatatcgaaggatttgaaccaagatttccaggtggataggatagggtattcgtatatctgacctaagatttaaatatatcagcttatcttcgaaaaagggaaaaatggaatgaattgatcgcaaattattataagattttacgaattcgaattcccttaacgaagatattacaaat

SEQ ID NO: 266251 - DNA, 423 bp, Glycine max
gcaatattcacaaccctcggaacctgcgacgccgcattcgctgttcaacaaatagccgagatagcagaaggcgacaaccgcggactggcactgttgctgcccataatcccagcaatagggtgggttctgttcaacattctgcagccggcgctgaaccagctgaaccgaatgcgcagcaccaaaggcgtgatcattggcttggggcttggcggcttggctgggttggcggctgcaccgcatgcgtgggcggcggcttctgaagctgcggctgctgcgagcgacaacaggggacagcttctgctgtttgtggttacgccggctattgcttgggtgctttacaacatcttgcagcctgctcttaaccagctcaacaggatgagatcacagtgatttgagctttgtgaaattaaaatatggaggggc

SEQ ID NO: 266252 - DNA, 265 bp, Glycine max
cccacgcgtacgaccacgcgttcgtgcacgcgtgcgaaatgaaagaaagagacatctttgatccaatatcgaaggatcgggaccaagatttccagggggataggatagggtattcgtatatctgactcatgactcaaatatatcagcttatcttccaaaaagggaaaaatggaatgaatcgatcgcatattattataagattttacgatttcgaattcccttaatgaagatatacacaattgcgggggaaatagaatctgcacga

SEQ ID NO: 266253 - DNA, 288 bp, Glycine max
ttttctcttcttcgttcgtttcgttgaaaagcgactttttctctctgcaactctgccttttcttccttcgtagatcgaaagggaatcttcttccatggccttcaagcggattctgaaggagcttaaggacctacagaaagaccctccaacctcttgcagcgccggtcctgtagcggaagatatgtttcattggcaagcgactattatgggtccccctgatagcccttatgctgggggtgtttttctagttactattcattttactccggattatccattcaagccacc

SEQ ID NO: 266254 - DNA, 376 bp, Glycine max
cggacgcgtgggcggacgcgtggggaaaaaaggcaaggtgcatggatgaatgaagtctgggctcgtagtcgtgtattatcgcgtgatggcacctcagcaagattgcctgttgctcacatggtgtgcaatcaaactcctccagtaggaaacaagccaagtctaatgacattccgtgaggttgagactgttttccatgaatttggtcatgctcttcaacatatgcttactaagcaagatgagggtctggttgctggtattagagggatagagtgggatgctgttgagttaccttctcagttcatggaaaactggtgttaccatagagaaacctttatgggcattgcacagcattttgaaaccggtgagagtctccctg

SEQ ID NO: 266255 - DNA, 264 bp, Glycine max
  unsure (1)..(264): unsure at all n locations
cccacgcgtncgggcctggagattctggcatttccatgtaatcaatttggtgagcaagagccagaaagcaatgattaaattgtggattttgtctgcagtcgcttcaaatctgaattccccatctttgataaagtagttcaacatataactgatcttggaaagtttacctgaactaccatttttaagcactccgacttgtcaaaattgtgatatgatactactaaaaaaaaagtcagatttttgtattttccggtttgctattct

SEQ ID NO: 266256 - DNA, 382 bp, Glycine max
cgagataactagaaacagtgtgatgaaaatgaaggtccttgttttcttcgttgctacaatcttggtagcatggcaatgccatgcgtacgatatgttccctctccgaatgaacactggctattgtgcccgtactccggaggtgaaatgcgcaagttggaggcttgctgtggaagcacacaacatatttggctttaagaccattcctgaagagtgcgttgaagcaacaaaggaatacatccatggcgaacaatatatatcagactccaaaacagtttaccaacaagcttacttttatgccagagacctaggagtccatcccaaggacacatttgtgttcagtatacatgggaccgtactctctaaattttccatactacaaaaa

SEQ ID NO: 266257 - DNA, 450 bp, Glycine max
ctcacgcgttcgaactcgcatcagttcctaatcatgggtagctcttcaggtttcacatgggacatggttttaagactagtgagggcactagcaattagcggtttcaactgcaaaggcgcagatgcagcacatgccttctttgtgattggcgatactggtatcgacaatggcaacaacaactacttatccaccacagctagagcatacgcttcaccatatggcattgattatccaactcgcatacccactgtgcgcttctctgatggactcaatattcctgactgtatcagtcatgaacttgcgtcagagtccacgtcgtcatacttaagtcctgagctcaacggggaaagattgctcgtgggtaccaactttgcttctgctgtcattggaatcctcaatgacactggagatcaacttgtaaacatcattagaatcacgcgacagctggaa

SEQ ID NO: 266258 - DNA, 270 bp, Glycine max
atcgagataactagaaacagtgtgatgaaaatgaaggtccttgttttcttcgttgctacggttttggtagcatggcaatgccatgcgtacgatatgttccctctccgaatgaacactggctatggtgcccgtactccggaggtgaaatgcgcaagttggaggcttgctgtggaagcacacaacatctttggctctgagaccattcctgaagagtgcgttgaagcaacaaaggaatacattcatggcgaaccatatagatcagactccaaa

SEQ ID NO: 266259 - DNA, 456 bp, Glycine max
  unsure (1)..(456): unsure at all n locations
gaggataaaacatggctatggccacagctgtcgtgtgtcctcagaacatcaccggagccgtcgttagctcacctagcaagaccaagaagagagtggtacacgtgagaagcataaattcatttgggggactgaaagctagcaatggtgttgtctctttggggattcctatgagcactgagaagtgctttgctaaggttgtgagctcagtgaaagcagctacatcaaatgggaaaagaaaggatgggctcttttttccacgtgcaaacgctgctggtgagatattcacgatcgctgctatcatcaatggactnngtcttgtcggagttgctgttggcattgtgctcttgcgagttgaagcatgggtcgaggagtccgaggcatagtgaaaatccaatcagattagcaagcaattaattaaatatccagaatatgtgtatgttcctatattgatgatgt

SEQ ID NO: 266260 - DNA, 374 bp, Glycine max
cccacgcgtccgtttcttacaacttattcaccactcgttcccgttactccccagcaaccataattattttttttgacaagcagctcaagaaaaatctgcaaagaataaaacaagaggaggaaatgcaacttacttgttgatataaacttcagacagagcgagttgttgtaaagctagccttgttgcagccatggccacccacgcggctctagcttctacaaggatccccactaacaccaagttcccatccaaggcttcacactctttcccaacccaatgcgcctcaaagagacttgaggtgacagaattctctgggctaagatccacttcatgtgtgacatatgctaacgatgcttgaaaatctttcctttttg

SEQ ID NO: 266261 - DNA, 334 bp, Glycine max
cccacgcgtccgaccacgcgttcgatgattttgaaacgtggtcttagtggttcctcaggggacaagttccgcacatggatgggtattacagtggctgatactgacaactgcgctgtcaccactgaagctaataacctctacttcattaaggtgaatgggatcaaaggccgcttgaaccaccttccgtctatctgcgatggcgacatggtgatggtcaccgcgaataaagcaaaacccgatctgaggaagaaagtcttagcaagtgtcatccttcgccaaagcaagccattgcgccgaaaggacagcgtctacatgtactgtcaagataatgctg

SEQ ID NO: 266262 - DNA, 218 bp, Glycine max
gccacgcgttcgctcgtgcctctagggttatcatatcttcatttccattttctggctctgggtttccaagaatcttaagctatgggaaagtcttacccaaccgggagcgctgattaccacaagggcggtgagaacgccatgaagaagctcagaggctttatcggtgctaagagatgcgcttctctaatgctccgtttggcatgggactctgctggaac

SEQ ID NO: 266263 - DNA, 405 bp, Glycine max
ccggttccaattcgaggacgcctacgcgtacggactcaaaaatggaatggatcattttataatgatagcattggtatgcctaatccgcaaaggaccaaaattcggtaaccacttttaggaagaatgaaggaatatccctataagggataatattgccttcgaagatatgctataaacacttgacccacttggataacatctagacaaataaaaccggtacggcgggcaatgtcacgaaatgttcgccgaggtggacaaatatgggtacgcatatttccagacaaaccggtacagtaagacctactgaaacacgtaatggtttcaggaaaaaggttctcccgaatattgggtagctgtcgttaaacctgggaaaatactttatgaaatgggtggggtaccagaaaa

SEQ ID NO: 266264 - DNA, 333 bp, Glycine max
aaacaaccatggtgcacgtctccttttacaggaactatgggaagacattcaagaagccgggtcgtccgtacgagaaggagcgtctcgacgcggagttgaagctggttggtgagtacgggcttcggtgcaagagagagctgtggagggtgcagtacgcgctcagccgcatccgcaacaacgcgcggaaccttctcaccctcgacgagaagaacccgcgccggatcttcgagggagaggcgctgctccgaaggatgttccgttacggtctcctcgatgagacacagaacaagcttgattacgtcctcgccctcaccgtcgagaactttctcgagc

SEQ ID NO: 266265 - DNA, 438 bp, Glycine max
cattcgttcacctcctcaacctctgcagcgccttcgatccagaaaacatgactaagagaacaaagaaggctggcattgttggaaaatacggtacccgttatggtgccagtctgcgtaagcagattaagaagatggaagttagtcaacacagcaagtttttctgtgaattttgtggaaagtatgctgtgaagaggaaagctgtgggaatatggggatgcaaggactgtggtaaagtgaaagctggcggtgcttacactttgaataccgcaagtgccgtgactgtacggagcaccatcaggaggttgagggagcaaactgagagttaagcttttttgttgatgctatcaattactattagacttttgatgaagtgcctagtttgtattcactgaactgcattggttgtattcaaagtaaactccttaagtttaattttga

SEQ ID NO: 266266 - DNA, 149 bp, Glycine max
gtttgttgggagctataagctagtttatcgtgaggagaatatgaagttgtttgttttctttagtgctgcaaaaagtttggtagcatggccatgccatggcgcaggctaccaaaggtttcctcttcgaatgaaaactggctatggtgagc

SEQ ID NO: 266267 - DNA, 211 bp, Glycine max
tcacgcgtacgcctttacacatccttcgacacgtctgagcttccttatcgtaccctcttacatgcgttggctctgctgattcccacgatgaccatatttttctaccgagtcaactccatgacgatgactcaatgagttgcactgataccgacccaaaccttaactacaagccggtgatcggaatcctgacccaccccggcgacggtgcctc

SEQ ID NO: 266268 - DNA, 427 bp, Glycine max
gccacgcgttcgctttaatggtatttggcattggcactcttattctcgattgccgggaagatttcttgccattggttgagaatctttactgttgggacctttaagctctatgtcttacccgcctaccgatgtcttcgttagcaaaaacttcttacaccggggatggcaacaactttgattgattattatatcaacgtcgagctttgagcggctggattgctacaaggaatcaaacttaatcagctcaattctgcggattgttctgcttgtctgccttggaagcatcactacatctgcctatattgctgtgcactttctgaagctgtcatatcaagaatctttacaggatcctatgtattatgctctattgcggaatccacatgggaacgggacagcacctcaaagaaagcattcatctatcgtgact

SEQ ID NO: 266269 - DNA, 259 bp, Glycine max
ggctaacactggataccccaacggcttcattcgtatcatcggattcgacaacggtcgccgagtgcagtgcatcagcttcatcggctacaagcccccaggcttctaagtgtgaaaaatttgccaagcatttgtagccgtcaccccactttgtttgtttgtacttaaactaccttcccatttgcttttgctttttgagatttcatcatcctgtatttttggtttatggtttcggacttcaatggaaactaatggatgagaa

SEQ ID NO: 266270 - DNA, 365 bp, Glycine max
ggaaaacctagactaactttacctgcaatgtcgagttcgaattctgaagttgggacattggagagaattttacccaaccaccacccccgaccaaaggattaatctcggtcatatacaaaaacaaaaagaaaatgacttgtgcatcaattgtacgtgtgtcatattaatattttgtaagaattgcaggtggcactatagtggcagctgtgagcctcttaaaggaacgtggaggtggcaacaagcagattaaagtgatatctgctgtctctgcccctccagctctttaaaagctgatcgaacagttccctgggcttcatgtgtatactggaataattgaccccgaagttaatgaaaaaaggttcata

SEQ ID NO: 266271 - DNA, 391 bp, Glycine max
cccaagctgaggaagaaagaacctttcttcgctatagtcagtgataccgagccgtcacctgcattgattcatgccttcatggggaacactggcatggaatgctctttaatttatgactcgctcttagaacgttgctgctgattcttgattgctttctatctcaactttacgtctgaagtgtcttctgagcaaggtgatgggtctggaaaagaatcctcgtgtgtttttcgatgtctcaatcgacggagaccctgtggaaagaattgttattcagctctttgccagtatagctcctacgacagcggagaattttcgggcactttgtacaggtgagaagggcattggagaatcaacggtgaaacctttgcattataaagggacaagccttcat

SEQ ID NO: 266272 - DNA, 306 bp, Glycine max
gccacgcgtacgaaattaggtcattctctttgcacagttgcatacctctcctttcaagatgcagagctttgtcaagaccctggccggacagaccatcacccttgatgtggaaagctctgacaccatcgacaacgtcaaggccaacatccaggacaaggaaggaattccaccggatcagcaacgtctcatcttcgccggaaagcacctcgaggactgccgtaccctcgacgactacatcatccagacggagtcaacccttcaccttgtacttcgtatccgtggtggcatgcagatcttcgtcaagac

SEQ ID NO: 266273 - DNA, 260 bp, Glycine max
cccacgcgtccgaaagaaccaaacttcatctcccaaaccttcatcgggcacaagctggttggctcatgctcaacagggcctagcagctttggctatctccttggcactcaactttagcccagttttgtttaatggcaatgcattggcatctgagtttgatgtgcttaatgagggtccacccaaagattcttatgcgtttgatgatgcaagagtgcttagtaaggtgaccaggtctgatttaaagcaatttgtgtctgatt

SEQ ID NO: 266274 - DNA, 284 bp, Glycine max
  unsure (1)..(284): unsure at all n locations
cttattcagccactccgcacctcgcagcctctgtgccctcaacaaccatggctganatcgaaactaccgttccagatgccacccaaatcgacgtctaactcttcaatcgctggagcttcgaggatgttgaggttaatgatatgtctctggctgattacattggagtgtccccatcaaagcatgctacatatgttccttacaatgctggtaggtactcaatgaagaggttcaggaaagcgcagtgccccattgttgagaggctcaccaactctctgatgatgcac

SEQ ID NO: 266275 - DNA, 264 bp, Glycine max
gccaaacgcacggactcagatcagctgtatcatagaatgaaacttcatataacgcaagatgcgaagagctaaacatgcatagataccgctttttctatcgataacagatctaatggatatatgcagcatcataaggatccattaacgcggttttgaaccgatacaataaaaactgcttacttatctcatgatagctaagtcacgaatccactaatgcaataacgtagagccatcgatcatttgagcagagctgtagtatcaaat

SEQ ID NO: 266276 - DNA, 377 bp, Glycine max
gtactactacaagggaagaaaaacttagctactaaggaaggatcaaagagaatggctcaagcaatggcatcaatggctggcttgcgtggttcctctcaggctgtgttggaaggtagccttcaggtgagtggctccacacgcttgaatgtggggagtggaagcagggtggcctcagtcacacgtgcagggttcacagttagagcacaacaacaacaagtgagtggtgaggtacaaagcaaccgtagggcagtgctttcacttgttgctgctggtttggccactggctcttttgttcaagctgtgcttgctgatgccaaatctaataaagttggaccaccttccccaccttctggtggattgcctggaacgttgaactc

SEQ ID NO: 266277 - DNA, 220 bp, Glycine max
gttgcgtgctggaaggcttgatcgtaagattgagttgcctttgcctgatagacgtcaaaagaggctcgtatttcaggtttgcacagtcaagattaacttgagtgatgaggtagacctggaggattatgtttctcgtaccgacaaaatcagtgctgctgaaatatcagctatttgtcaagaagcttgaatgcatgctgttcgcaagaatagatatgtcata

SEQ ID NO: 266278 - DNA, 308 bp, Glycine max
gtggtttcagtgagtgatcggtgttcacttgatccttcataagtcgtcatcatgatcatgatcatcaccgttgattgaagaaaatgccgatcagaaacatcgccatcggaaggcctgaagaggctactcaccccgacacgttgaaggcggggttggctgagttcatctccaccttgatcttcgtgttcgccggttcaggttccggcatcgcctacaacaagctcaccgacaacggcgccggcactcccggcggcctcatcttcgcttccatcgcccatgctttcgccctcttcgtcgccgtctccgtc

SEQ ID NO: 266279 - DNA, 295 bp, Glycine max
actacaaaaaacatggatatggggtggagaaatttaactcgaccttgtatgatgaatggggtaacaagggcaatgcaccggcactgcccgagactcttaataattacaacaagctggtgtctcttggcttcaagattatattcttgtcaggaagaacactggacaaacaggccgtaacagaagcaaacttaaagaaggctggctaccacacatgggaaaaattaattctcaaggatccacaagatcctttcactccaaatgcagtttcatacaaaacagcagcgagagagaaact

SEQ ID NO: 266280 - DNA, 321 bp, Glycine max
ttttagaatttcctaaaaataacataaattttaggggaaactaatttagatataaggtattctaaacatatacttgtaaagaaggaacgatgtaacgttctagtgaaatattttatactctaaagaaatagctatatataatactttgaatttaattagaatataaatgacattcaacatgattgatagataactgagcttttaaaatatcttgtagaagtatgcttccttttttcggttaagggaatatccttcgaaaaaaaaaaatatgaatttaattgtatgattattgattttttaaaatattttttttctaaacca

SEQ ID NO: 266281 - DNA, 369 bp, Glycine max
  unsure (1)..(369): unsure at all n locations
cgtacgcccacgcgtccgctcgtgcatgtggatggttcatacggcatgaatgtttttgatttggtcgagtgnaataggcaggacatcagcgatgtgtaccacaaatggcaaaagatgaatcatgatagacaactatggaagttaggaacactgccgcctggtcttataacattctggaaacgcactttccaactgcaccgatcttggcatgtgttgggtcttggctataaccccaatatcaaccaaaaagaaattgaacgggctgctgttatacactacaatggaaacatgaaaccgtggctggagataagtattcccaagttccgaggttattggacaaagtatgttgactacaatcttgtgtattta

SEQ ID NO: 266282 - DNA, 331 bp, Glycine max
  unsure (1)..(331): unsure at all n locations
taccggcggctacncaaaactaggtgctcaatttccgaggagctggttgcttctcttgaccaggcttttcttctacttgacttgcatacttgatggcgtcaaacttgcagaagttgcagtccgcagcatgtcaagcatctcaatttgtatccagtcgtggaactaactactacaggcaattgctggaacagaacaagcaacacattcaggagcctcctacagtagagaaatgcaacctgctggcaaagcaattgttttacacccgccttgctagtattccgggtcgtaatgagtccttttggaaggaacttgattatgtcaagaatttatg

SEQ ID NO: 266283 - DNA, 385 bp, Glycine max
  unsure (1)..(385): unsure at all n locations
ggtcatatacacctttcaaacactttggctcgaagatgcttgcctggaaattcgtaaaagggggcaacattgacgtgggtactattaacccancaatcgtgataggacctctcttgcaaccagtccttaacacaagtgctgcttcaattttaaacataattaatggttcataaacatttccaaatgcatcttatggttgggtcaatgtcaaagatgttgcaaatgcccatattctagcatatgagaatgcttcagctaatggaaggtattgtctggttgacagagtggcacactactcaaaaattgtgaaggttttacctgatttttacccgacattacaacttccaaaaaagtgttcaaaatataaaccatatgtgccaatata

SEQ ID NO: 266284 - DNA, 355 bp, Glycine max
  unsure (1)..(355): unsure at all n locations
ccacccctccgctanattcaaccggagttggaaaaaaagaaaaaacttcttctaaatggggcgtactaaggagggcgggtcgtaagtccacangaggaaaggcacctangaagcagctcgcaaccaaggctgcacgtaagtctgcaccaactactggtggtgtgaataagccacatcgttatcgtcctggtaccgttgctcttcgtgagattaggaaataccagaagagtaccgagcttttcatcaggaagctccccttccagaggctggttcgtgaaattgctcaggacttcaagactgatctgcgtttccagagccatgctgtgcttgcattgcaagaagctgctgaggcata

SEQ ID NO: 266285 - DNA, 355 bp, Glycine max
  unsure (1)..(355): unsure at all n locations
cttacactgttntactgtttgaggttatttanaaagcccatcctnatntnttcagcatgattcttcagagcgtggaagatgtaaaactaacanacantaangncanaacantgtatttcaagaacacacttcttataattacatcaaatgttggaagcatttttatttagaaaggaggccacaaaattggatttcatctggattacgatgagaaggatagcacttataacataatcaagagcctggtaactgaggagctaaaacaatacttcaagccagaatttttgaatacattggattaaattattttcttcattcatctcacaaaacttgaagttaaggaaatttcttacat

SEQ ID NO: 266286 - DNA, 446 bp, Glycine max
  unsure (1)..(446): unsure at all n locations
gttttcatcgaggaataaaggcaagctctatttttagccaagtgaaacatctatcttcctggcgtaanttctttgggtgaaagtctgaatgtgtcatctctatgctacaatgtttatgattcacatcaggttgattctatttgtttgatggccatcttgcacgtccttatcttattgtgttcaagtgacggacaaatccaaacaggaaagagagattgaaatgtaaatgccaagtaaatgtgaaaagtacagtccatttttagtcatctctttaatttatttgttcatagattaatatggtcgtgtatgattgcttttctatttattgtggcatttttgtgttgtaccctgttgttgtgtttgcaataattattagtaataaagcagcaaaatcaatttttgttcatgcatccnnnaacaaaaaaatttangaccatattatttta

SEQ ID NO: 266287 - DNA, 256 bp, Glycine max
ccacacttccgcccacacctccgcccactctttctctgacgcttatacttaaaatcacggggtctttcataggatggattggactatcattttttaatacaaatctaacgtgttaacttcttttctgtcaattattgtgccccaaaggcttgcccttatcctctttttctcaatcttcctgcaaaaatatctttcaagtcacacacatttctaaataacatttaacatgcaccaatagctccaatattttcttaat

SEQ ID NO: 266288 - DNA, 361 bp, Glycine max
  unsure (1)..(361): unsure at all n locations
catcattccttttccctctttctttcggcttangccggtggcagcatantaccaagcgcggagcacaatcaaagagcagatctccactccaagcaaaccaaagcgaatcggagattcaaactcagttcttcaactctctcatctccacttccacttcagcttcttctccatggctaacgacgattgctgcaccacgcaactcatcgactgccactgcgagttcaacgtctccggcctcgacagcttcatcaggaccgtcaatctcgcctcctgcggcctctcctacgccgtcgtcgcaatcatgggacctcagagtagctggaagagcacgttaatgaatcatctcttccacacaagtttc

SEQ ID NO: 266289 - DNA, 402 bp, Glycine max
  unsure (1)..(402): unsure at all n locations
ggttgtgagctataagctagtttatggtgaggagaatatgaagttgtttcttttcttgggtgctgcattagtggggggggcatgcccatgccatggcgcangctaccaaaggttccctctccgaatgaaaactggctatggtgagcggtcttcggaggtaaaattctcaagttttaggcttgctgtggaagcacacaacatccgagcctttaaaaccattcctgaagagtgcgttgaaccaacaaaggactacattaatggcgaacaatttacatcagactctaaaacagttaaccaacaagctttcttttatgctagtgaacgcgaagtccatcacaacgacatatttatattcggcataaataacaccgtactctctaatatcccatactatgaaaaaca

SEQ ID NO: 266290 - DNA, 295 bp, Glycine max
  unsure (1)..(295): unsure at all n locations
ccaaaaaaaaaaaaaaaaaaagggttctcgattcgcgcttctctattaaaantgaagaccataattacgggcgggggagaatagctatttacaagtgagagaacatggggttgtcgttcaccaagctgtccatcagcttgtttgcgaagaaggaaatgaggtttctcatcgtaggtctcgatgctgctggtaagacaaccatcttgtacaagctcaagcttggagaaatcgtcaccactatccccaccatccgatttaatgttgaaactttttagtacaagaacatcagcttcac

SEQ ID NO: 266291 - DNA, 356 bp, Glycine max
  unsure (1)..(356): unsure at all n locations
tcacatcagcgtttttttctaaaccaanaattcctcataaaggggaccatcaacaaggagttctgaaaacacacatcaccaatctcattgaatatatgctcttgcacaccataacctaccaaatatctcgtactgactactacacattttttacatagaaccaatgcactctgcctgataacatacatccctttaccacaattttctttccaacacctattcttatttatgtgagcacgatatacttgacaactactttcctaagcttcacaatatccatgccaatcatgattgccacaacatcctttcagaaaatcactcatccttaggcaaaatattcaacaacactagcttca

SEQ ID NO: 266292 - DNA, 248 bp, Glycine max
attaacaataacctcactctcatcaacgtttttctctacactaataattcctctctatcgggtccatattaaaggtactcttgaaaacatatatcaaaaatctttatacatatattattctctagaccatttcccaataaatatcttcaacttactctaaaacctttttttaatgatccaaagccatcatactgatatcactcaaccctttactacacttatttttccaacacctcttatattctata

SEQ ID NO: 266293 - DNA, 383 bp, Glycine max
  unsure (1)..(383): unsure at all n locations
aaatnaacntgctttttttcttcggtgctacaattttcntagcggggcaattccatgggtgcgagatgttccctctcccaatgaacactggctatggtgcccgtactccggaggtgaaatgcgcaagttggaggcttgctgtggaagcacataacatctttggctttgagaccattcctgaagagtgcgttgaagcaacaaaggaatacatccatggcgaacaatatacatcagactccaaaacagttaaccaacaagcttacttttatgccagagacctcgaagtccatcccaaggacacatttgtgttcagtatagatggcaccgtactctctaatattccatactacaaaaaacatggatatggggtggagaaatttaac

SEQ ID NO: 266294 - DNA, 430 bp, Glycine max
  unsure (1)..(430): unsure at all n locations
ccggggcgcggacgcgtccgcccacccctccngaaacagtgtgagggaaatgaanggcctggttttcttcnttnctgcggtttcttaacagggggaggccatncntacnatatgttccctctccnaatgaacactggctatggtgcccgtactccggaggtgaaatgcgcaagttggaggctttctgtggaagcacacaacatctttggctttgagaccattcctgaagagtgcgttgaagcaacaaaggaatacatccatggcgaacaatatacatcagactccaaaacagttaaccaacaagcttacttttatgccagagacctcgaagtccatcccaaggacacatttgtgttcagtatagatggcaccgtactctctaatattccatactacaaaaaacattgatatggggtgggagaaatttaac

SEQ ID NO: 266295 - DNA, 401 bp, Glycine max
  unsure (1)..(401): unsure at all n locations
gcgtccgcccacgcgtccggcttcaacttgctcgctcataagcgaagaagaagccacananaaccaggcgcctactctctgtggccacaggaaaaatggcatctcacatcgttggatacccccgcatgggtcccaagagagagctcaagttcgctctcgagtctttctgggatggcaagagcagcgccgaggatttgcagaaggtggctgctgatctcaggtcatccatctggaagcagatggctggtgctggcatcaagtacatccccagcaacactttctcgttctatgaccagctgctcgacgccaccgccacccttcgtgccgtcccccccaggtacggctggaccggcggcgagattggattcgacacctacttctccatggccaaaggtaatgct

SEQ ID NO: 266296 - DNA, 368 bp, Glycine max
  unsure (1)..(368): unsure at all n locations
cccacccctccaatatgcttcaatcaaggtcatagaaaccgggtctantactnatcatcggcggtgtctgactgattgggttctctattcattcatcacactcttcnagctcacatttgccaaagttcttgaagtgcttgccatatggccctatgccaagttgatacttacttgctggttggttctaccaaactttaatggggcagcacatgtttataggcactatgttagaccattctatatgaatccacaaatgcctcaaatgcctcaaatgcctcaaatcccangaacttctcaaatgtggtatgttcctagaaagaacatctttagtaagcaggatgatgtccttactgctgcttaaagataca

SEQ ID NO: 266297 - DNA, 451 bp, Glycine max
cgtccgctaacaagaagctcgatttggtcaatggtgtgctcttcactggtgggtgggctgtttgtggtccatatttggagactctgggaaacatttttaagaaagctttagagaaaaatgatgctggagaccatttcccagtaattgccttcaacttaggtggaaacctcgtaataaggatcgtaagcgagcaaactgatattcttgaaccatttactgcgtcgagtttgccaagttctcttatattgtggaaggaagcaaatgctaaaggaagtctatttcaaagatttccttcagatttgttgacacagctgaagacagattgtctcgtcctgcacaatcatcgttatgccatatccccacgcaagcttcaatataataccaagttatctgacttttttgagattcttgcaacatctgaagatagaaatggaaaaactttccttttcac

SEQ ID NO: 266298 - DNA, 450 bp, Glycine max
  unsure (1)..(450): unsure at all n locations
gtccgcccacgcgtccgctttgttcactcttgttttcttgcggctagggttttagcgcancttggggtacatttaagggggatgggtgaggaaaaggttcacatcagtattgtggtcattggccatgtcgactctgggaaatccactaccactggtcacctgatttacaagcttggaggcattgacaagcgtcttattgagaggtttgagaaggaagctgctgagatgaacaagaggtctttcaagtatgcctgggtgctggacaaacttaaggctgagcgtgaaagaggaatcaccattgatattgctttgtggaagcttgaaacaacaaagtattattgcacagttattgatgcgcctggacatagggatttcattaagaatatgattactgggacatcccaagctgactgtgctgttcttatcattgattcgaccactggtggtttt

SEQ ID NO: 266299 - DNA, 308 bp, Glycine max
  unsure (1)..(308): unsure at all n locations
ccncccactcttccggattttctcnctttaacaacagaaagaaatccagggttttcttttcggtgggcgaaccaatcaaacatctcacaantccaccttcngcaatgctcctcttaatcatctcgccacaaaagccgctagaaagtcctctctttttaccttccgagtaaaaaagcctcacccttttacgcccggcaccgtttcccttaatgacatcctaaattaccataatagcacggaacttctcatccggaagctccctttccatcggctctttctctacatcgcacattatttcaaaacctatt

SEQ ID NO: 266300 - DNA, 366 bp, Glycine max
  unsure (1)..(366): unsure at all n locations
gtattcaaattacattgcaaaaatggggttattcaccatgacagcttctatctttggggggccatctgtcgggggggcgggcggcattggctgctcanaggagattactcgtagtgagtgctgccaaagctgaaggggaaaaggtcagttatgacaacaatgatatctttggaaggaggaacttgatgttcgctgtggctgctgctgctgttttctctgttgctgggatggcagtggcagatgagcctaaaccaggaacctcagaagccaagaaaaagtatgccccggtttgtgtcaccaatcctacagctagcatttgtcgcaattgaggatctcctgtttcattttacctctgatgatcggaaa

SEQ ID NO: 266301 - DNA, 399 bp, Glycine max
  unsure (1)..(399): unsure at all n locations
aagaaaatgcgatcagtcttgtagtgttttgaattgtaagcccaggaagaagcgtatgaggaggtttaagaggaggcgccgaaagatgatacatacatccaagtagtgcgttaaacctagtttgtttctgttgcttttacaattgcttatgttgtcgaatgggacacccagttgttagtggcactggtttctcctttttgatgtttgatacattttgttggattcaagtagtttatgttcgtcttatgttattagctcaaaacaatgttgttactgcttttgctaatcaacatgatctcctatttgcaaaanaaaaaaaaaaaaaaataaaaaaaaaattataaaatataantntattttaatttattatttttaatttttttttttttaatattattt

SEQ ID NO: 266302 - DNA, 386 bp, Glycine max
cccacgcgtccgcccacgcgtccgcccgaaactaaaaaccgcaccctcatctttctctcggctcccttaaccaaggcgcaagacaatggccacccaaagaagccatcattcccctatcttattttcgtccctcatcttaacccttttcgttctctacttcccaagatgccaccacgccattcccaacaaccccatcaaaaccgtcgtcgttttggtaatggaaaatcgctccttcgaccacatgctgggctggatgaagagactaaacccggccatcgatggcgtgaccgggtcggagtccaatccgctgtccgtgtccgacccagactcgaagcggttcttcttcagggaccgggcccatttcgtggacccggaccctggtcact

SEQ ID NO: 266303 - DNA, 339 bp, Glycine max
  unsure (1)..(339): unsure at all n locations
caaacactcttcttcatattcttcttgttgtttttcttgttctatctgatacnaacatggtggccttaagagcggggctattgttgactatgtgtgtacttcctgccatggttgtggccattcgcccagcaaagaaccctttttgcgtgaagggtcgcgtctactgttacccttgccgtgctggttttgagacctcagcaaccacctacattgccggtgctgagattatgttgcaatgcaagagcacggttagcaacgacgttgtgtacaccaagaaagggtacactgactcaactggagcatacacaatgtacgtgtactaagatcactcacatcaaa

SEQ ID NO: 266304 - DNA, 433 bp, Glycine max
  unsure (1)..(433): unsure at all n locations
gataactagaaacagtgtgatgaagatgaatgtccttggtttcttcgttgctacaaggggggtagcatggcggggccatgcgtacgatatgttccctctccgaatgaacactggctatggtgcccgtactccggaggtgaaatgcgcaagttggaggcttgctgttgaagcacacaacatctttggctttgagaccattcctgaagagtgcgttgaagcaacaaaggaatacatccatggcgaacaatatacatcagactccaaaacagttaaccaacaagcttacttttatgccagagacctcgaagtccatcccaaggacacatttgtgttcagtatagatggcaccgtactctctaatattccatactacannaaacatggatatggggtggagaaatttaactcgaccttgtatgatgaatgggttaac

SEQ ID NO: 266305 - DNA, 392 bp, Glycine max
  unsure (1)..(392): unsure at all n locations
cctttcttgttaaggcagctgctacgccccctgtcaagcaaggatcanacagaccttggtggtttgcatcagagcgggaggctttcctacttggatggcagccttccgggtgactatggatttgaccctctgggactttcggaccctgaaggaacaggagggttcattgagccgaaatggctagcatatggtgagataatcaatggtcgttatgcaatgttgggtgcagttggtgcaatagcacctgaaattctaggcaaggctggtctgatccctcaggagacagcactcccatggttcagaaccggtgtgttcccacctgcaggaacctacaactactgggcagactcctacacactggtcgtgtttgagatggcactgatgggatttgc

SEQ ID NO: 266306 - DNA, 429 bp, Glycine max
gtccgcccacgcgtccgcccacgcgtccggtgtgttgttgtaactcgttcttcttctttggtggggtgtgtttgggggtggttgttctctcacctgaaaatgtcttgctgcggtggtaactgtggttgcggaagctcctgcaagtgcggcaacggctgcggaggctgcaagatgtacccagacttgagctacactgagtcaaccaccaccgagaccttggtcatgggagtggcacctgttaaggctcaatttgagggtgctgaaatgggtgtgcccgctgagaacgatggctgcaaatgtggaccaaactgctcctgcaacccctgcacttgcaagtgaggtgttgggagagcaagcttcaagcagagatagcccttaattaggaataatgataaactattaatgtgtagctaaaaacttatgtattat

SEQ ID NO: 266307 - DNA, 438 bp, Glycine max
cgtccgcccacgcgtccgcccacgcgtccgaagcaaatggcttcctgaatgatctcttccccagcgtggaccactgtcagccgtgccggtgccggcatggttgctccattcactggcctcaagtccatggctggcttccccaccaggaagaccaacaatgacattacctccattgctagcaacggtggaagagtgcaatgcatgcaggtgtggccaccagttggcaagaagaagtttgagactctttcctacctgccagaccttgatgatgcacaattggcaaaggaagtagaataccttcttaggaagggatggattccttgcttggaattcgagttggagcacggtttcgtgtaccgtgagcacaacaggtcaccaggatactacgatggacgctactggaccatgtggaagctgcctatgtttggttgcactgat

SEQ ID NO: 266308 - DNA, 236 bp, Glycine max
  unsure (1)..(236): unsure at all n locations
cccattcctacaatcacacttccatactcattcatttctttaaccatccttttctctgtggctctcacaggagagagccacgtccatccatcnctacctccattaacattatctcagaagctttttctcctaacactcccatacccactgcactgacataacttctaattcctctacctgcagatagatacatcgcataactccctaaccacattgatgatacacaatacccaaaa

SEQ ID NO: 266309 - DNA, 390 bp, Glycine max
  unsure (1)..(390): unsure at all n locations
taactanaaacattntcaggaatatgaatgtccttgttttcttcattcctacggggtttttaacagggggatgccgtgcttaccatatcttccctctccnaatgaacactggctatcgtgcccgtactctctacgtgaaatgcgcaacttggaggctttttttgtaagcacacaacatctataactttgagaccattcctgaaaagtgcgtttaatcaacaaatgaatacatccatgtctaacaatatacatcatactccaaaacatttaaccaacaagcttacttttattccaaaaacctctaaaatccatcccaaaaacacatttttctttaatataaatggcaccctactttctaatatttccatactacaaaaaacatttattttt

SEQ ID NO: 266310 - DNA, 343 bp, Glycine max
  unsure (1)..(343): unsure at all n locations
gctgactctttattctttgaactttggtggttctcacacatgtttacctacctcccttggcgtntaaccatttggggcttgcttcttcttcttcatnccacttatatcattnntccaacaattgtttcaaaatcaataacttctaattctcagagccaccgttttatatttccatgtttgagtgacaccaactgtggctctctttgccgaaccaaacgtttcacttgaggacactttcttatcttacataccagatgcttcttcaccaaacatttttaattttaaaaaattaattaacagtgcttttatagaaaattatagatctatcatctttctactcctg

SEQ ID NO: 266311 - DNA, 421 bp, Glycine max
cccacgcgtccgctagctcccaaggaggaagcaatatagtgctgtttaattgttgctgggggtctattgtgggaggggcgatttggaaagttcattatgaatataggggtagtggcaatggttctgggtttatggattcgggttggattgtgcacaacaagtaccttgctactttatttttggagactctttggtggataatgggaacaacaaccagcttaactcactggctaaggctaattatctcccttatgggattgacttcgctggtggcccaactggaacgttttccaatggaaaaaccactgttgatgtattcgctgagcttttgggattcaacggttacattcgtccatatgcaagggctataggccgagatatacttagtggagtcaattatgcttctgcaacttccggaatt

SEQ ID NO: 266312 - DNA, 244 bp, Glycine max
  unsure (1)..(244): unsure at all n locations
acggagaaagtttgttgcggacggagtgtgctttgccgaactgaacgaggttctgacacgtgggttgncttangacggttactccggcntcnaanttagggttacgccgatgcgcaccgagatcatcatcagagccaccagaacccaagccgttctaggtgagaagggaaggagaattanggaacttacctcagtggtgcagaaaaggttcaaattccccgaaaacaacgtcgagctttattct

SEQ ID NO: 266313 - DNA, 333 bp, Glycine max
cgcccagggtaccctgggggtcctctgcgaaatcctcttggcgctagctaaagatattaatagcggtcatgactggaggcttggagagattaagaatgggcgactctcaatggtggcaatgcttggcatctttgtacaagcttcagtgactcatgttggaccaattgattatcttgtggagcatctttccaatccatggcataaaacaattattcagacccttgccaattctagctcttaattctagaaaatactgtatgaatatgtggcttgggctttagcttattcataaaatgaaattactttttatttttccacctccatcatactgtg

SEQ ID NO: 266314 - DNA, 203 bp, Glycine max
  unsure (1)..(203): unsure at all n locations
tataactggttttttttttatgaaaatgaacntccttctgtggttcttttatacagtgttggtagcatcacaatcccatccctactatatgttccctctcctaatgaacactggctatatttcccttactccttatgttaaattctttttttatatgcttgcttaaaaaacacacaacatctttttcttttataccattccta

SEQ ID NO: 266315 - DNA, 307 bp, Glycine max
  unsure (1)..(307): unsure at all n locations
gcgtccgcccacgcgtccgctttgttcactcgtcttctcttgcggctaggcttttagcgcagctgcgtctatatttaggggggaggggtaatgaaaacgttcacatcantattgtggtcattggccatgtcgactctgggaaatccactaccactggtcacctgatttacaatcttggaggcattgacaagcgtgttattgagaggtttgagaacgaagctgctgatatgaacaagaggtctttcacgtatgcctgggtgctggacaaacttaaagctgagcgtgaaagaagaatcaccattcatat

SEQ ID NO: 266316 - DNA, 329 bp, Glycine max
aaaaaacaataaacaaaaaaacaaagttgttctcacacatatataaaatacaaaccatgggggtcaactcaaaaaaggggaggcttctacttaatataacacaaaaaaataataaaatcacaaacaataataacaaaatcacccaacttataaatctaaaaaccaccaaattctattttccatatataaaataacaccaactttggctctctttttctaaacccaaccttttactttactacacttctcccgcctttcctcttatattctccttcaccaaacatttttaatcccttaaatataattaatatttctttgataaaacatta

SEQ ID NO: 266317 - DNA, 361 bp, Glycine max
  unsure (1)..(361): unsure at all n locations
cgtccggtttgttgtgagctataagctactttagcgtgaggagaatatgaagttgtttgttttctgtgtggctgcaggagtggtgggagcatggccatgccatggcgcangctaccaaaggttccctctccgaatgaaaactggctatggtgagcgttcttcggaggtaaaatgcgcaagttttaggcttgctgtggaagcacacaacatccgagcctttaaaaccattcctgaagagtgcgttgaaccaacaaaggactacattaatggcgaacaatttacatcagactctaaaacagttaaccaacaagctttcttttatgctagtgaacgcgaagtccatcacaacgacatatttata

SEQ ID NO: 266318 - DNA, 405 bp, Glycine max
agtttcttttccctgaccaatggcagttactggaaaaggtgttacctcaaaagaggggcaatcatgtgtgagacatggagctttattattgtgaggagaccactttgcatgatgtcaactttaaggaggagatgagacgaaagcagcaacagcaatatcgctaggcatatgatgaagatgatgatgagccatctggtcaacgagtgcaatgtgctcaacagtagtgcaatttatggtaataaaagttctataatttctgcatggcttttatcttttgtttgcataattcacttataacttcgtgataaaattaccctttaagtttttgcttgtaaccgtatttagtcttggcaaatttctaaagtctgctttttggttgaatatatgaaaatttaaatttttttt

SEQ ID NO: 266319 - DNA, 405 bp, Glycine max
gattgtttgttgttgtaactcgttcttgttgttttgttgttctgtgtttgtgtttgttttgtgtctcacctgagagtgtcttgctgcggtggtaactgtggttgcggaagctcctgcaagtgcggcaacggctgcggaggctgcaagatgtacccagacttgagctacactgagtcaaccaccaccgagaccttggtcatgggagtggcacctgttaaggctcaatttgagggtgctgaaatgggtgtgcccgctgagaacgatggctgcaaatgtggaccaaactgctcctgcaacccctgcacttgcaagtgaggtgttgggagagcaagcttcaagcagagatagcccttaattaggaataatgataaactattaatgtgtagctaaaaacttatgtattat

SEQ ID NO: 266320 - DNA, 387 bp, Glycine max
  unsure (1)..(387): unsure at all n locations
ccggggggcggacgcgaccgatagaatggaatttcnatgctcantcggctgttttaccattctcttctctcttgctctggcaggaganagccggggggatgcatcnctacctgangaagattattgggaagctgtttggccaaacactcccattcccactgcactgcgagagcttctaaagcctctccctgcaggtgttgaaatcgatgaactccctaagcaaattgatgatacacagtacccaaaaacattcttctataaagaagaccttcatccaggcaaaacaatgaaagtacaattcaccaagcgtccctatgcacaaccttatggtgtatatacatggttaacggatattaaagacacctctaaagaaggatatagttttga

SEQ ID NO: 266321 - DNA, 390 bp, Glycine max
  unsure (1)..(390): unsure at all n locations
gggcggacgcgtccgcttcgttcactcttcttctcttgcggggagggttttagcgcagcttcttctacatttagggaggattggtaaggaggggggtcacatcantattgtggttattggccatgttgactctgggaagtccactaccactggccacctcatctacaagcttggaggcattgacaagcgtgttattgagagatttgagaaggaagctgctgagatgaacaagaggtctttcaagtatgcctgggtgcttgataagcttaaggcttagcgtgaaagaggaatcacaattgatattgccttgtggaagtttgaaaccaccaagtactattgcacactcattgatgcccctggacacagggatttcatcaagaacatgatcac

SEQ ID NO: 266322 - DNA, 372 bp, Glycine max
  unsure (1)..(372): unsure at all n locations
ttgtattttccgggacatcattatggattggattantccttctcgggggggttcttaatgggtcgtgaggtcttgaaactctatttattctacatcaaaaaccaaatgacccctcccccataattctttcggattgtcgggcacattaaaaaatgaatggataacttcctaaaaataaagaaaactataacacattataaggaggggtcaaatattaattaagataaaagatatagaatatctatctgtatatatatatatatagatataatttattaataattagaactttcttttttcttaaaaaaaaaaaaaagtaaaataaaagatttgatagaaaccgaatttcaaattcattattttgattcatag

SEQ ID NO: 266323 - DNA, 284 bp, Glycine max
ccaaacattctaacaaattttcaattttaaaacagcatttcttctctagcaacctttacttctcttcggccatctactatcaatggcctttctctaaattccctctcttaaactaaactctctttcaagccctctcgccacactttcaaatccaataacttcattagtaactccttcttaacaaattattgtcacaacactgtgtacttttatttttatcatcttggcaacactacatatccttcttacttatatacctcatatgcaccttcaccctacaaccc

SEQ ID NO: 266324 - DNA, 346 bp, Glycine max
cgcacgcgtccggtgagtgaatagggatcatggatgtggaggctgaagatagcagagggaggaaatgatccatacatattcagcacaaacaatttcgttgggaggcagacatgggagtttgatcctgaagcaggcagtccagaggaacgggcccaggttgaagcagctcgtcagcatttctaccacaaccgcttcaaggtcaagccctgcgctgacctcctttggcgttttcaggttctcagagaaaataacttcaaacaaacaattcctcgtgtgactatagaagatggagaggaaatcacataccaaaaagtcacaagcgccgtcagaaagggcgcacaccaac

SEQ ID NO: 266325 - DNA, 352 bp, Glycine max
agccatggcaatggcaacccaagcctttctcttaaccccacccctctccggtctcagagcgcagcgaccgcgcctccgtgccatggaagcaaaactccagcctctccttctccagcccgaagcccctcaagttctccagaacaatcagagcagcagccgccgacgagaccacagaggcaccagcaaaagtagaggctgcaccggtcgggttcaccccaccagaacttgacccaaacaccccttccccgatcttcgggggcagcaccggcgggctcctgcgcaaggcacatgtggaggagttttatgtcattacgtgggactcacccaaagaacagatctttgaaatgcccac

SEQ ID NO: 266326 - DNA, 345 bp, Glycine max
atctcccctcacttgtgcctagccttatgtcatagtattatcattcattctcagcggtctctcttctctctccacccaaaccctaactcccgaccctgttcccctctcgtatccgtcatgaaaggaggaaagtccaagaccgaatctaagagagccgatcccaaacttgctgtgaataagaagggagccgccaccaaggctaggaaacccgccggcaaggggaaggcagcgaaagaccctaacaagccaaagaggcctccaagtgctttcttcgttttcatggaagagttcaagaaggtattcaacaaagaacatcctgaaaaccaagccatgtctgctgtgggc

SEQ ID NO: 266327 - DNA, 361 bp, Glycine max
gcgatcccttccaatccacagatcaacatttttttttttggtgggtagcagtgaggataaaaaatggctatggccacagctgtcgtgtgtcctcagaacatcaccggagccatcgtgagctcacctagcaagaccaagaagagagtggtacacgtgagaggcataaattcatttgggggactgaaggctagcaatggtgttgtctctttggggattcctatgagcactgagaagtgctttgctaaagttgtgagctcaatgaaagcagctacatcaaatgggaaaagaaaaagaagggctctttctttcacgtgcaacgcttctggtgagatattcacgaatgctgctatcatcaatggac

SEQ ID NO: 266328 - DNA, 355 bp, Glycine max
gccaagtacgaggaagccgtgaggcgcatgcaagaccttccacctgatgatcctcggagtttcatgcaacaggccaatgtccaccgtgcctactgcgatggtcgcggctataatcaaaagggcttcgctgactacaagcttgacgttcacggctcctggatattctttccttggcaccgctggtatctctatttctatgagaaaatcttggggaagatgatcgatgaccccactttcgctcttccgttttggaactgggacaatcccgccggcatgagaatccctcccattttcacagacaaaagttcacctctctacgacgaacacaggaatagccgatcatgtaaatgctttc

SEQ ID NO: 266329 - DNA, 431 bp, Glycine max
agggtatctccttatccgtgtttttttcaaaatttgagctcgtttgttgtcgtgtggcggataacgttggtgtttgtaaactcgtgtgcgctccgattcaaattccaactccgaatcaaaccctagtacaacaaaccaacgaaaccctcttcttcccaattctccgaccccatcatcctcaatggccaaccctgattcctctcttcctctctccatcaagaaggagaacatcactcccattacctctaaaatcgaagaacttaatgaatcgacatcggagcttctgggcagagttcaaagtttgaaacaagatttgcaaagttggaagtctaagttggatacacaagtcaaagtctatcgcgatgaactggcagaacttaagaaaacacttaatgttgaaatggaccaacttagaacagaatttcaagatc

SEQ ID NO: 266330 - DNA, 290 bp, Glycine max
gttacatgaaaaatccttaggctagtaactgggatggcatgacaagtatcaaaattacaaataaattggactcattccacttccacgatctcatccaaagcatagttgtttgttgatacattggcatagttgactttgttgaatcggaccacaacagggtagcgagtgttggggtcctgatcaacagcaaccactgaaccagtgcgcaatgaacaccttgatagcctgccaatgatctaaagcataacacccttccatttacctagacttgtacaatggtattcccacat

SEQ ID NO: 266331 - DNA, 321 bp, Glycine max
cgcacgcgtccgcccacgcgtccggtttcttaaacttgggtgcgattccttcactcagaagaacaacacatcactatggctcttctgagtcgagcctcttcacgcttccctcagctggtttcccctcaaagggtactttcactccacacaacgctcccatctctgaacgcatccccatccacagccacgcctacaccatatgccccgccaccgcctccgtccgcttcctctcccgccggcgtttcgaaggcggcggaattcgtgatctcgaaagtggacgatctgatgaactgggccccgccgggctccatctggcccatg

SEQ ID NO: 266332 - DNA, 435 bp, Glycine max
cccacgcgtccggaggaaccctagctagggtttggaagaagctgatccgagaggagggtgcagcgtctcacctaccgcaaacgccacagctatgctaccaaatccaaccagcacagagtcgtcaagactcccggtggcaagcttgtttatcagaccacgaagaagagggccagcggacccaagtgccctgtcactggaaagaggattcaagggattccacatttaaggccagcagagtataatagatcaaggttacacagaaaccgaaggactgtgaaccgtgcatatggtggtgtgatgtctggcagtgctgttagagaaagaatcattcgagctttcttggttgaagagcaaaagattgtgaaaaaggtcttgaagatccaaaagacataggaaaaacaagctttgaagggctgagttttgagaaagagtgat

SEQ ID NO: 266333 - DNA, 145 bp, Glycine max
aaaaaaaaaaaaaaaaaaaaaatttataacaaaaaaacaaaaaaaaaaaaaacagaaggaaacataaaaaatgacaataagtacaacataaaatacaaaaaaacttaaaaaattgaaaatgcttcctttaacgatgacaataact

SEQ ID NO: 266334 - DNA, 394 bp, Glycine max
gcaaatttcagttctcaactacgcactgaacgaagaaagtgcgtattatcaccgttgcctagcaatggcggagacgaaccatcatatggacatcgacagcgacgaccacacttacaccgcgaggcccgacaaagctaaaagtgtcgtcgtcgccagcaaccctcccgccgccggcaaggccattccgtgggtcgaaaaatatcgccctctgtccctcgacgacgtcgccgctcatcgtgacattgtcgataccattgatcggctgaccactgagaacagattgccccatcttctgttgtatggccctcctggcacgggcaaaacatcaacgattcttgcttgggcacgcaaactatatggttcacaagtccaaaatatggatttggagcttaat

SEQ ID NO: 266335 - DNA, 351 bp, Glycine max
gctgtctgtttggatggaacggtgcctggataccatttggatcgtggatttggatgtggtgcagatagttggcttattcatttggagggaggaggatggtgtaataccatcagaaactgtgtctatagaaaaaatactcgtcgtggatcctcaaaatacatggaaaatcaaataccattcacgggaatattgagcaacaaacctgaagaaaaccctgatttctttaactggaatagagttaaattacggtactgtgatggagcatctttcagtggagatagtgaagatgagtctgcacagctccagtttcgaggacaaaaaatatggctagcttcaatggaagaattaatg

SEQ ID NO: 266336 - DNA, 430 bp, Glycine max
cggacgcgtgggcggacgcgtgggtttatatttaggttacgaggaaattatggtgggtccaattatttctgctgcttctgttattgctgctgggttggccgtagggcttgcttctattggacctggggttggtcaaggcactgctgcagggcaagctgtagaagggattgcacgacaaccggaggcagagggaaaaatacgaggtactttattgcttagtttggcttttatggaagctttaacaatttatggactggttgtagcattagcacttttatttgctaatccttttgtttaatcctaaaaaaatagaaatacatatccttttttccggggacttgctttacccgtcttgctttttcgaattctatttatattaatatttcactcctataattccttatccgttcggacaagaacacaagggaag

SEQ ID NO: 266337 - DNA, 344 bp, Glycine max
gtgcaccatccctcccattaatgttccttccgttgttcttccaccaatagtgaagccgccaggtattctccctccaattccaattattaacccaccaaccacaccagggaagggagggaacactccatgcccaccaccaaagtctcctgcgcaggctacgtgccccattgacacgctcaaacttggtgcctgtgtggatcttcttggagggttggttcacattggtttgggtgaccctgttgcgaaccagtgctgccccgtgcttcaagggcttgttgaagttgaagctgccgtgtgtctttgcaccactcttaaactgaagcttctcaacctcaacatttatg

SEQ ID NO: 266338 - DNA, 289 bp, Glycine max
gaaaattggtcgtatagaggatgttactcccattccttcggatagcacacgtagaaagaggggtagaaggggtagaagactttaaacttcctattctggagttgctatattttacttttaatgccaaagagaattgtggccttttgatgttttttaagttaatatcagaacttctattgcatttcttgaggtgttgaacagaattttagttgagtacacatttaatcattgttgtcagagattttttaaagttgagcatgttgcttcctaaaaaaaaataatattttaa

SEQ ID NO: 266339 - DNA, 313 bp, Glycine max
gcgcccacgcgtccgcttccctattgtaatttctgccagcctcaaaaaatacttgggctggctctgccactttctgagtacaatacaacactgccatggctgcctcagtctccactattggagctgtcaacagagctccactgagcttgaacagctctgaagctggagattcggttcccagttcagccttctttggcacaagcttgaagaaggttactgcctcaagggtccctaacgtcaagatttcttctggaagtttcaaaatccgtgcggcggagaaagagattgatgagcaacaacagacaaacaaaga

SEQ ID NO: 266340 - DNA, 417 bp, Glycine max
agagagaagggctacacaaacacattctttaatggcactcaggatgtgggcttcgtcgactgccaatgcactcaagctctcttctgtctccagacctcatctcttgcctcctttttctttctccagatgcttatcttccgtcttggatggacttaagtacgctgattcacatgaatgggtcaagcacgaaggctcagtcgccaccattggtatcactgaccatgcccaggaccatcttggagaggttgtgtatgtggagctgccagaaccaggtggcacagtttccaagaagtctggcttctgagccgttgaaagtgttaaagcaacaagtgatataaactcttcaatcttcggggacatccttgaagttaacaaaaagctcacagaaacccctggcctggtcaacttaaacccata

SEQ ID NO: 266341 - DNA, 354 bp, Glycine max
ctccccaaaaaaaccggggttcatttaacccccccaacaaccgccacatctcaccttctaacaccaccttcattaacttcaccgcggcccagatccctccccaccacttcttctcccactaccccctccccaccgatacctcttacatccccgtctcccctgccaccaacaacacccacaacaactactttatcccccttaatccaattaacctcctcaccaacaacacaccacccgcctcctcacccaccctttaaccctccaacaatcctcacacctcctcccccaacctcctcccccccccactcaatccctccgccccccacactacactccccctcactacatctcccc

SEQ ID NO: 266342 - DNA, 419 bp, Glycine max
gacctttgggctgattgatgtgcttggcctgcgttttggttagaatgatcctatccacctgaatagagagcgagcagcctccgtttgcgttaatttctgagacgagcgttagtatcggcacaaggatacgaagcccagtaacatcgcgaaggacgaagagggccctttcagccccgtttcggccaataaggtcatcggctaggtcactaagtaccttaccggaaagagttacttagcctgatccgccttacataacttagaccccgccgacgagctaacttcgcggctggagagtaaggatataggcgagggtcccaggcgtactaggacggcgaataatacatgtccgggtcccgacgtatcgtacggagacaaggattacggcggtgcgtgcgacggaatcatcgctgcatctcggg

SEQ ID NO: 266343 - DNA, 313 bp, Glycine max
aggaggtgtagacaaacacaatctcttttggcactcaggatgtgggcttcttccacgtccgatgcactcaaagtctggtctacctccagacctcatctcttgcatcctttttctttctccagatgcttgtcttccgtcttggatggacttaagtatgcagattcacacgaatgggtcaagcacgaaggctcagtcgccaccattggtatcactgaccatgcccaggaccatcttggagaggttgtgtatgtggagctgccagaatcaggtggcacagttacccagaagtctggcttcggagcccgtgaaagtg

SEQ ID NO: 266344 - DNA, 411 bp, Glycine max
cccacgcgtccgaaaaggttttagatcgtataaactaatcactacgaaaacaagagagatggaagatggctctgcccaaagctaaggagatcgtgtcgtccaattccgtcgtcgttttcagcaaaacctattgccctttctgcgtcgatgtgaagaagctcttcggtgacctcggtgccaattacaaggccatcgaactcgacactgaatccgatggaaaagagctccaagcagcattagttgagtggacggaccagcgaaccgtgcctaatgtgtttattggtggaaaccacattggtggctgtgactcaacaactgccctgcacactcaagggaagctgggtcctctgctgatatctgctggagctgttgccaaatcaactgcttaaaggatcttccatttctagggta

SEQ ID NO: 266345 - DNA, 321 bp, Glycine max
ggttcgtttacgcggcggtggtttacccaatgccgaagatctcgggggtggggaagctcgacttgtcgaagggggaggagcggagggactgcacggtggggtgcaggatgtacggcgagggttgctacggcggagaaccgttcttcgtggcgagggaagaagggggcgaggaagatgatgggtacttggtgagttacgtgcacgatgagaggaagggggagtcgaggtttttggtgatggacgcgaagtcgcctgagctagatgttgtggcggcggtgaagcttccgcggctggtgccgtacgggttccatgggcttgttg

SEQ ID NO: 266346 - DNA, 433 bp, Glycine max
cccacgcgtccggtgatgtcgcgaatgcagcgaaggtgttgttttggcaagcaggagagggcctctcatttgtgttaacctttgaatcagagagagaccgaaattcagccattatggttgccaggaaatatgctcttgattgcaatgtcgtgcttgccgggccagatgatctagtgtaggagcaaaaattaactgactgagcttttccaacaaacgtgagatttatcagattcttggtgtgagtatacgtgtgtgcttgttttgttaaagaaagatatgatttcatttgtgattgggtttttcactaattgagttgcattgttttaagcatggtttttttatttgcctaatcatgttgtaccaaacttaactttttttttataattattagttcatttggtcattggggctaatttgcatgtgctagttggtt

SEQ ID NO: 266347 - DNA, 412 bp, Glycine max
cgcacgcgtccggtccgttactgctgttagtgttcactaagattgggagtcaccatgccatggaagactttgccgtcagaggcaaagagcccaaagacgaggttcagatttacacctggaaggacgctactctccgagaactcaccgatcttgtcaaagaagttgctccggctgcaaggagaagaaacgccaaactctccttcgcctttgtattccccgacaaaaacggccgtttcaaagttcaagaggtgggcaagacattatcttatggaaatggaagattagatgatggcaaggctttagccgaacttggttttgaaatcggtgactacttggatgtggctattctggaagttattatggatacttgcatgtggctggttatgtttgaaagccttgaaacacttatttt

SEQ ID NO: 266348 - DNA, 361 bp, Glycine max
cccacgcgtccgaaaccatttaggctttcttaaaacaaaggtccctcaaaccacttgcccgacactctttagtgtgtgatttttttttgctctttccccacaaagaggtcttggacccttcttctgtgtagtgcaatggccatggctaaggttttctgtgttctgcttctggcactccttggcatttccatgatcacaactcaggttatggcaacagattctgcttatcacttggatggaaggaattatggacctgggaatctcaagagctcacagtgcccttctgaatgcacaagaagattgtaccagacacagtaccacaagccctgcatggtcttctgcaaacaatgctgcaaaaagt

SEQ ID NO: 266349 - DNA, 351 bp, Glycine max
cccacgcgtccgtgcagttgctgcgtctcaaggtaccggcggcgacggagaggtatgttctcaatttccgatcactgcattggttctgttgacgagggttttgttctacttgacttgcatacttgatggcgtcaaagttgcagaagttgcagtccgcagcatgtcaagcatctcaatttgtatccagtcgtggaactaactactacaggcaattgctggaacagaacaagcaacacattcaggagcctcctacagtagagaaatgcaacctgctggcaaagcaattgttttacacccgccttgctagtattccgggtcgtaatgagtccttttggaaagaacttgattatg

SEQ ID NO: 266350 - DNA, 245 bp, Glycine max
cgcacgcgtccgctctttttctcaacttaaaggggttcaattctagctagttctatggcggcgtccgcgaccatgaacatggcgatcgcgcttctgttcatggttttcgcagtttcatcagctttagacatgtcaataatatcacacgacaacgctcatgcggatagggccacgaggcgcaccgacgaggaggtgatgtcaatgttcgaggagtggctggtgaaacacgacaaggtgtacaacgc

SEQ ID NO: 266351 - DNA, 467 bp, Glycine max
gctctggaactttgggctgattgtagtgcttgactgagacaatcagaaatagcgcgacgccacacgaagcttccgcccctcctgccgtcagaaccccggcagtacggtaacgttacgtgcatgacacgcctttctcttgaacgaatatcggtcacggcgtttgcatcttggaggcgaaacgtgtaagccggaggtccgtcgcggaagtatataatactcccggtcccgagattaccttcgaagagcgtgccgaagtaataaaggaacatacttacggtgaataacacatactagatcttaaaatagccaattaataagtccatccccacgttagagattctgaagcttactttaaggatatacccgcgcctagcacagacggtattgcatctctcaacaccttacatcataaaaaatacggacacggggcggagaaacccaatctgattccgcacgacgaacgggcc

SEQ ID NO: 266352 - DNA, 269 bp, Glycine max
ttctgttcatggttttcgcagtttcatcagctttagacatgtcaataatatcacacgacaacgctcatgcggatagggccacgaggcgcaccgacgaggaggtgatgtcaatgttcgaggagtggctggtgaaacacgacaaggtgtacaacgcgctcggtgagaaggagaagaggtttcaaatcttcaagcacaatctgcgcattatcgatgaacgaaactctcttgaacccgaacctacagttgggactcaacgtgttcgctgatct

SEQ ID NO: 266353 - DNA, 318 bp, Glycine max
agcccttccatcgtactttccacatttttcctaccgaaaagtcaaaactacccactgaccgcattattcacaggcagggagggacgtaagatcctgcgaccatcattccccggaagccgtcatatcgccgtggaaattcgcggtgtcgcagcagtaccagcacatgctggacaaaacgacgccgcacgttctccggcggtgcatcgcgtgcctggtggttgccgccgtgtacgtgctccgcgtgtacttggtccaaggcttctacatcttctcctacgccctttgcatttacatcctcaaccttctcatcagctttct

SEQ ID NO: 266354 - DNA, 253 bp, Glycine max
ttttgcaaccttgctatcacatgtcatcatcaacttggtttcaaaaaaacttgttcctttacagtagtttatctttgcaaagtcttacgtgtttgttttaccacttatatttttaagtgtccgccgatttcatgtatccgtaaccttcaaaactgggttcttgatctgccgtaacattttccttgctgcttgctcttgatgagtactgttttttttgtttttatcgttaaaagtcttaaattttcaaattcac

SEQ ID NO: 266355 - DNA, 342 bp, Glycine max
agaagaacaagtagttgagaactaatatggagaagcaaatggcttcctcaatgatcgcttccccagctgttaccactgtcaaccgtgccggtgccggcatggttgctccattcactggcctcaagtccatggctggcttccccaccagaaagaccaacaatgacattacctccattgctagcaacggtggaagagtgcaatgcatgcatgtgtggccaccagttggcaagaagaagtttgagactctttcctacctgccagaccttgatgatgcacaattggcaaaagaagtagaataccctcttaggaaaggattgattccttgcttggaaatcgaattgg

SEQ ID NO: 266356 - DNA, 402 bp, Glycine max
ataactagaaacagtgtgatgaaaatgaaggtccttgttttcttcgttgctagaatgttggtagcatggcaatgccatgcgtacgatatgttccctctccgaatgaacactggctatggtgcccgtactccggaggtgaaatgcgcaagttggaggcttgctgtggaagcacacaacatctttggctttgagaccattcctgaagagtgcgttgaagcaacaaaggaatacatccatggcgaacaatatagatcagactccaaaacagttaaccaacaagcttacttttatgccagagacctcgaagtccatcccaaggacacatttgtggtcagtatagatggcaccgtactttctaatattccatactacaaaaaacattgatatggggtggagaaattt

SEQ ID NO: 266357 - DNA, 404 bp, Glycine max
atgcaagttctataatcactgttggatttattatgagtgttgataagaaagaccccagcggggccaatgtcacaaaggctgccgccaacaataagtgattgcattttgtcaacactgctctcacatcccatcctcaccatgtgaaatgcgcaagttggaggcttgctgtggaagcacacaacatctttggctttgagaccattcctgaagagtgcgttgaagcaacaaaggaatacatccatggcgaacaatatacatcagactccaaaacagttaaccaacaagcttacttttatgccagagacctctaagtccatcccaaggacacatttgtgttcagtatagatggcaccgtactctctaatattccatactacaaaaaacatggatattgggttgaaaaa

SEQ ID NO: 266358 - DNA, 435 bp, Glycine max
gggtccacggcggacattcaggtatttccccatgaggaagggtgcagcaagtgatgaaagctccccccaagccgaaaacaagtgcatacttggggacctttgacacaggctaattccctgaatcgtcgtcgaacttatggctaggtaagagataattcggcgaatcgaaatactccagcagttagaggaaaagaaagtaaaagtgacctttgcagcagtggtgagtgaaacgggagtagttcaaattgcgaaaatggggccgcgggagagtcacataagcgctgcgtcgtcaggtgaagtagtagagaacgtcgtatttcagacggtcagagcttagcagttgaaagtactatcagtccatgtctcgatttcagcagtacggggtatgcggaactttgcgcgaactagtaaggattattccgtaaagtcaaacat

SEQ ID NO: 266359 - DNA, 357 bp, Glycine max
gggatgagaaaaagacaggtggcaactcagagtcaccaggaaagactgctactgaggctcatagcaaacctgcagtagagcctggcaaaactcagactaaaaaatggttttgctgcatgcaaaacccttctgccgaatcatagcatagcaatggttgctcctgtgaaaagcctgaacagaagaacaatgtttatgtgtaactagcgtcacagtattttctcaaagataagagctgtagagccataagcgaattctacggaatttatattttgtgatgtaaaagtgagctgcaatgggggaaagaaaagaagacagactattatttatgtgtgtgtatcaatgttggggtttattatt

SEQ ID NO: 266360 - DNA, 345 bp, Glycine max
gtggtggcttagacacatcagtcattgttccatggctcagagaaaattatgggtgtgaagttgtttgcttcactgctgatgttggccaaggtataaaggaattggaaggtttagaacagaaagccaaagccagtggggcctgtcaattagtggtaaaagatttgaaggaggaatttgttaaagattatatatttccttgcctgcgtgctggtgcaatttatgagaggaagtatttgcttgggacctcaatggcccgccctgtaattgcgaaggccatggttgatgttgccaaagaagttggaactgatgcttgttcccatgggtgtacagggaaagggaatgatc

SEQ ID NO: 266361 - DNA, 371 bp, Glycine max
attatttttttttttttttttttttttttttttttttttttttttaatttttttatttttttttatttttttaaatttttttttttttaattttatttttttattttttattttttttttttattttttttttttattttattatttttttttttattttttttttttttttttttttttttatatttatattttttttttttaattttttatttttttttttattttttttattatttttttttttattttatattttttttatttttattttttatttttattattttttttttattttttattttttttttttttttttttttattttatatttttatttttttatttttattttattattttttttt

SEQ ID NO: 266362 - DNA, 386 bp, Glycine max
cttttgtcaattgcagggcatacaaaagatccttctgaaagtatccaagtgaaagtgtttgatcttcaaatggctacatggtcaactccaaagatttttgggaaagctccggtatcacgtggaggccaatcagtgaaccttgttgggaaaaccttagtaatttttggtgggcaagatgcaaaaaggactctcttgaatgatcttcatattcttgacttggaaaccatgacatgggacgaaattgatgctgttggggtgccgccttctccaaggtctgatcatactgctgctgtacatgtggagcgatacttacttatctttggtgggggttcgcatgcatcatgctacaatgatttacatgttcttgatttgcaactatggaatgg

SEQ ID NO: 266363 - DNA, 257 bp, Glycine max
actctccttgttacaatggtgaggtttagtttgtctaatgatgctcttaatatcatgatcagctcctataaactgtggaagcgccaattcatgattaggccttcctagaatgtcataataaaattcctcttggttatgcaaaatcatgggtacattgatgaattcgagtattttgatgaccacagggctggtaaaatcttggatgaattgaatgtcattcttaataattgatgttatataatccctttctttaatgt

SEQ ID NO: 266364 - DNA, 410 bp, Glycine max
cccacgcgtccgctcacattctccctttcctcctcctcaccctcctcgccgccaccgcgtgcgcccacaatatcagcgacattctcgccgccaaccccgactacagcgacttcaacggcttcctctcccaaaccggcctcgccggcgaaatcaacacccgccagaccatcaccgtcctcgtcctcaacaacgccgccctctccgccgtggccgcaaaacaccccctctccgtcgtcaaaaacctcctcagcctccacatcctcctcgactacttcgacaacacaaagctccaccagatccccaacggcaccacgctctccaccactctctaccaaaccaccggcaatgccaacggcaacgtctgctccgtcaacatcaccgacctcaaaggccgtaaggttggcttcggc

SEQ ID NO: 266365 - DNA, 433 bp, Glycine max
cccacgcgtccgagataacactaggcagctcatgagaatggcgctgctgtgtggtggaacgtccgtgactccattccgttcgcacaagaacgttggtttcacaacctcagcaaaatcttcctttgttggctttcaattgccgcttccaaagctcacattatcttcttccgttcgaacccttctgccggcaacattccgtgtccgttgccagcaagagtctactactgttacccctgtcgcagaagaagacccgcgctttgcgtgcgtcgaacccgaaccccgattcaaaggcccggacatttggaacatgagcttgtatccaaaagctgcagatcatgtgaatacagataaaacattggatgttgttgatgctacagacaaagttcttggaagactatcattgaccattgctattcacattctatggaaaaac

SEQ ID NO: 266366 - DNA, 413 bp, Glycine max
acgaaggaatataatctgaaacaaataagtttcccaacatagcttcacactcattgaacaagggatggtactggatgcacgtgttgaacgcaatttcaaggagatggataagttctaccaagaagccattgatgaacacatgaattctaagaaaaaaactccagaggaagaggatttagttgatgtcttacttcaactgaaagagaacaacacgttttccatagatctcaccaatgataacatcaaagcagtgctcttgaacttacttgtatgagctacaggtacaactgaagtcacaacaatctgggccatgactgaactaataaaaaatccaagcattatgaagaaagtgcaagaagaaattataggcttaagtggtaagaaagatttcttggatgaagatgatattcaaa

SEQ ID NO: 266367 - DNA, 447 bp, Glycine max
gacagagccacgggtgtggggttcacacgtgcgaggatgggagtcggtatgttggggagggtaagtggggggttaagcatggccatgggcattaccatttcagaaatggagatacatatgcgggtgaatactttgcagacaagatgcatggttttggcatatatcgttttgcgaattgccatcgttatgaaggagcctggcatgaaggcagaaggcaaggacttggaatgtatacatttagaaatggtgaaacccaatctggtcactggcaaaatggagtccttgacattctaagcacacagaacaccacttctccagtttctccagttggtgtctatcattccaaagtactcaatgcagtgcatgaagcaagacaagccgcagagaaagcctatgatatggccaaagtagatgaaggggtgaacagagctgtagcagcttctaata

SEQ ID NO: 266368 - DNA, 424 bp, Glycine max
acgcccacacgtacgcaatattaagctttatgtccgccgtgtctttatcatggacaactgtgaggagttgattcctgagggtttgggctttgtcaagggtattgtggattccgaagatctaccactcaacattccaagagaaatgttgcaacagaacaagatcttgaaggtcatcagaaagaacttggttaagaagtgccttgagctcttctttgaaattgcagagaacaaggaggattacaacaagttctatgacgctttctccaagaacttgaagctaggtatccatgaggattcacagaacaagggaaagattgctgaattgctcaggtaccactccaccaagagtggtgatgaaatgacaagcctcaaggattatgtgaccaggatgaacgatagtcatagtgacatctactacatcaca

SEQ ID NO: 266369 - DNA, 416 bp, Glycine max
cgacccagcgtctctcaaacaataagttatagtcgacttggtcttatcatccaacctttattcccgggcaaagtctatataagtccggagctttttaaactttttactaattacatacactttgcaattaattttcacatataatttcctttcatttatatatatctattaaatttatttaataactttacttcccttatattcttcattataaatatactattattatcttacatattatcatacttacattaattataatatacatctttcaattaagtttctttctcttatgttcctattttcttataatatttcctaccgtctttttttttatttacttttattatttatttttttcatttaattttttcaaattttttatttattttttttcaatttaaatatcatctttt

SEQ ID NO: 266370 - DNA, 353 bp, Glycine max
ctctatcaacactgttaccagatttctatattctctaatgctagctagagagtgatgaagtcaaaattgatgttcggaaggaaaaaaaaaaaaaaataaaaaaaaaaaaaaaaaaaaaaaaaaaaataaaaaaaaaaaaaaaaaaaaaaaaaaaaaaaaaaataaatataaaaataaaaaaaattatttataaataaatatatataaaattaataaaaaaaattatcattatattataaattatataatcaatttattatattctaaaattaaaattatttaaaataaattatatatatatttatttcttgtttattttataaaattaattatattataaatgttaattttat

SEQ ID NO: 266371 - DNA, 421 bp, Glycine max
acaaaatataccactcttcaattcacattaaaacacacaaacctcttcagttcacaaacgacacaacctcttctaatgttcgttttctgatctacgcaaggttaaggttaatttgcttctatctacatggacattaacgagatcgatgttccttcattctttctctgccccatttcgttagaaatcatgaaggatccagtgacggtctcaacaggcatcacctacgaccgtgaaagcatcgaaacatggctgttctcgaagaaaaacacgacatgccccatgaccaaacagcccttgatagattacaccgatctcacaccaaaccacacccttcggagactcatccaagcgtggtgtaccatgaacacttctcacggcatcgaaaggatcccaacccccaaaccccccattaacaaaaatc

SEQ ID NO: 266372 - DNA, 395 bp, Glycine max
gatgaggataagccttttcctgagtttccctccttcatccccttccatggcagcacctgcactctcctccgctctcaacggctctctcctccccctccctctctctctccttctccacctcctcccgccgcttctctctcctccctccaccctcacaccaaccctccaaacccctcttcctcaccctcaaatccaaaccctccgacgacattgacacatcgttcttcgacaacatcaacccgcaagacgacatcacattcaatcccccggagcccccggaagggttcgtggcgcctccctcctttgacgacggccctctggagaccgaggacgaaatcgccgctgcctacgaggagctctacggccccggctacagcggtgtctcggtcctcggc

SEQ ID NO: 266373 - DNA, 357 bp, Glycine max
tttagtttttacacgtatcatattagttcatgcttggattaaagtttacagacgggaggttgcaaaagcaagccaggcctggccttttcataacatattttccaggctaaactctattgttcaaacgttctttttaaggctgaattgttagacccagctttgaatgggactctcaatgttcttaaatcgtgtgtaaactttccgactcttgaacgcgtttttttaacctcttctgttgcttcagttgcgtacaacggaaagcctctaactcccgatgtattatttgatgagacttggttttctgacccttgtttctgtatggaatcacatattttgtatacacttttcaaaaacttt

SEQ ID NO: 266374 - DNA, 394 bp, Glycine max
acgcccacgcgtacgcccacgcgtccgttgagcaaagaaactaagaagattttgagcacaatcgcatccacacaatgcttggtgcgaccaccatgccctcaccactccaaccagagcttcatcacagcgcttagttgtgagcaccaaaccaaaccacattgtttgcaaggcacaaaagcaggttgtccaagagggtgaggacactactaacattgtctctcgcaggttggccctcactgttctcattggtgctgctgctgttggctctaaggttgcacctgctgatgctgcctatggagaagctgccaatgtgtttggaaagccaaagacaaacactgacttccttccatacaatggggatggattcaaactctcaattccctcaaagtggaac

SEQ ID NO: 266375 - DNA, 407 bp, Glycine max
tcccactcgtccgcccacgcgtccggaaagtgttgtttttctttttttcatttgcattggaaaggaaaaaccttgcagattgcaatggcttccaacaaggttattgccaccatcttggttctttctctccttgcctactcaacatcattcaccaatgcatgtggcacatgccacccaaaacctactccttctccccctcctccatcagggaagtgccccaaggacacattgaagctaggggtgtgtgctgatgttctaggacttgttaatgttgttgttggttcccctgtctctagcaagtgttgtgcattgcttgaaggtttggctgattcggaggctgcacttttcctttgcactgctattaaggccaatgttcttggaatcaacttgaatgtgcctatcacact

SEQ ID NO: 266376 - DNA, 398 bp, Glycine max
atggtcttgaactccctgtgtctgttgatgtttttagggagcgcgttgattttcttcagagtagtgggcttacgatggaagacggcaacaactatccgcttgttcttggctgcagtgtcaagaagaacatgattcctgtgcttgattaccttggaaaattgggagtgaggaaatcctcgatcactcaattcttgcagagatacccacaagtgctccatgctagtgtggttgtggatcttatgccggtggtcaattatcttaaggggatggatatcaagttcgatgattgtcctcgtgttcttgagaggtacccttaaattctcggattcaaacttgatggaactatgatcacatccgttgcttatttgatttgaattggagtatgaagaagaaaaatt

SEQ ID NO: 266377 - DNA, 315 bp, Glycine max
acaaactatctggctgcctttaattaaaaggctggatggacactttaaatattgttaaagtaaccatgactaccacacattcctacactggaaaccatatgcttttggattctttacacctttacttgataagatccatttcttctgcactgaacattgttccaaccatcactgtatcttccaatgctgtttctctagtcgttccacatcttaaggtcaagcttaatttaatatctctccttgtgcctacacccaatgtttcattttattacctttttttgaatcttgataataaagatcttactgcttaagatt

SEQ ID NO: 266378 - DNA, 346 bp, Glycine max
gaataacggggcggacgcacgcatccggtgagtgatatcaaattattgtatttgtttcagttcgagttttgaatttaaccgtggcgtgaatactactaggatggctgcaaaaaaaaaaaaaaaaaaaaaaaaaaaaaaaaaaaaaaaaaaaaaaatataataaaaaaaaaaaaaaaaaaaaaaaaaaaatatataaaaacaaaaataataaaaaaaatttactctataatattttaaaataattataaaacatattttcattttaaaaaaaaatctaatttttaaaaaattatatctaaaataattcttaattttttttttctctatatttttaaagatataaata

SEQ ID NO: 266379 - DNA, 423 bp, Glycine max
accaacgggacggacgcgtcctcccactcgtcctaaagggtagaggctcgaatttgaccggcgcgaatgcgaagacgaggggcgcgagcttcgcaatcgattgcgggacgcccctggaggatcagattatggacattgcttctctgtataagttccttcatgagaggattaacgtccgcggcaaggccggtgcactcggcgattccattaccgtcaccagtgacaagagcaagatcaccgtcaccttcgacagcaacttctctaaactgtatctgaaatatttgaccaataagtacttgaaaaagcacaatgtgagggattggcttaccgtgattgcatccaacaaggagcggaatgtctatgagttgagatacttcaacattgctgataacaatggtgaagaggaagactgaacatctaatt

SEQ ID NO: 266380 - DNA, 442 bp, Glycine max
taataaggttgtatatggtttggtgggatttgtctagagtctttagaaaagatatgcatgggtgagtccgacaacgagtcaggaggtcacacggggaacgcgagcgggagcaacgagttgtccggttgcagggagcaagacaggttcctcccaatagcaaacgtgagcaggatcatgaagaaggcgttgccggcgaacgcgaagatatcgaaggaggcgaaggagacggtgcaggagtgcgtgtcggagttcatcagcttcataacaggagaggctttcgataagtgccagaaggagaagaggaagacgatcaacggcgacgatcttctctgggccatgactaccctgggcttcgaggactacgtggatcctctcaagatttacctgcacaagtatagggagatggagggggagaaaaccgctatgatgggaaggccacatg

SEQ ID NO: 266381 - DNA, 399 bp, Glycine max
ggggatagatagagtgatactcgtcacattttcataataataaagagatggcagcggcggcggcagtgacggtgctactcccacctaggattccgaccaccaccaacgttacccgctgctctgctttgccttctctccctcctcgcgtctccaacaccaaaaccactttgttctcaccttccctcaacaacttttcagtgtcccgaaaatcttctctgcttcagaccagagcttcttcagaggaatcatcctcagtagatgccaatgaggtgttcacagatttgaaggaaaagtgggatgctcttgaaaacaagtccacagtacttctttatggtggaagggctatagttgctatttggctatcgtcaattcttgtgagcgccatcaactcagttccct

SEQ ID NO: 266382 - DNA, 449 bp, Glycine max
acgcccacgcgtccgcccacgcgtccgtctattcattcaagattcagcaagtgcgttttggaggcagagaccgaaatacttggagatggcccgtacaaagcaaactgctcgtaagtcaactggaggaaaagctcccaggaagcagcttgcaaccaaggctgcacgtaagtctgcaccaacaactggtggtgtgaagaagcctcatcgttatcgccctggaactgttgctcttcgtgagattaggaaataccagaagagcactgagctcctaatcaggaagcttcctttccagaggttggttcgtgaaattgcccaggatttcaagactgatctgcgtttccagagccatgctgtgcttgcattgcaagaggctgctgaggcataccttgttgggctctttgaggacactaacttgtgtgccattcacgccaagcgtgtgactattatgc

SEQ ID NO: 266383 - DNA, 432 bp, Glycine max
ttcttcttcactctacaaccactaaactaagtggttggttttggtttagtttcattttggggaagctcttaaacttaaggcttaagccatggcatcctcatcctctctgcatctatctcaggcccttctggcacgtgctgtgtaccttcatggctcttcttcttctgaccgtgtctcactctccttcccatcattctctggcctcaagtcacattctacatgctccaatatgctctccttcaccttgctggctatgacactgttcaggaacaagaccttaaggaattccgacaatggggaagcagaactcctggacatcctgagaactttgagacccttggagttgaagtgaccacacgtcctcttggtcagggcattgccaatgctgttggattagcactagctgagaagcacttggctgcacgatttaac

SEQ ID NO: 266384 - DNA, 416 bp, Glycine max
tcgacccagcgtccgctcatcactgggctctccctcttcttgttgaggtttgcgttcttcaacttccaaagggagaacggtgcaaagcaagtgcgtgagcagaactgactcacacactttgaggctggtgacacacgtgccaaggagtatgtcagcctcctcaaatccaatgaccctgtttgattcaacattgttgatgtcttggcttggggcttcattggccatgttgttgcttactatatcttggccaccactagcaatggctatgaccctgcattctttggctgattttcatcatgttccattgtctttctttgcttgctttttactatgttataatgtaatcaatgtcatcatttataagatctcttttacatccaacaagttcagcatattctaatttggtcactcttttc

SEQ ID NO: 266385 - DNA, 428 bp, Glycine max
gataactagaaacagtgtgatgaaaatttaggtccttgttttcttcgttgctacgaattgtggtagcatggcaatgccatgcgtactatatgttccctctccgaatgaacactggctatggtgcccgtactccggaggtgaaatgcgcaagttggaggcttgctgtggaagcacacaacatctttggctttgagaccattcctgaagagtgcgttgaagcaacaaaggaatacatccatggcgaacaatatagatcagactccaaaacagttaaccaacaagcttacttttatgccatagacctcgaagtccatcccaaggacacatttgtgttcagtatagatggcaccgtactctctaatattccatactacaaaaaacatggatatggggtggagaaatttaactcgaccttgtatgatgaatgg

SEQ ID NO: 266386 - DNA, 386 bp, Glycine max
attagttcattctctttgcgcagttccttacctctcctttcaagatgcacatcttcgtgaagaccctcaccggaaagacggatcacccttgaggtggaaagctctgacaccatcgacaacgtcaaggccaagatccaggacaaggaaggaattcccccggatcagcaacgtctcatcttcgccggaaagcagctcgaggacggccgtaccctctccgactacaacatccagaaggagtcaacccttcaccttgtccttcgtctccgtggtggcatgcacatcttcgtcaagactctcactggcaaaaccataaccctagaggtcgaaagctctgacaccattgacaacgtcaaggccaagatccaggacaaggagggaatcccccc

SEQ ID NO: 266387 - DNA, 415 bp, Glycine max
tggaaatgaataaggtctccaaccacggattaatcttcagggatatcttctatttaaccggataggtgcaataaatgagggggatgatcaaatcccatttgctcatgttatgggacttatttcttattaactatatacttcacttcatataaattgtaaaggatagtttgaaaatttatattccagaattgagttgtgtattattagatctaatcactattattagttccttttttgtaataatatctttctttattttgtaagtgtcatatttaaatcttcattccttcttttttatcattgttatctttattttgagtatttttatttgtattaataatttttaattttcttttccatatttacttttttttttatgtatttatcattcttatcataatattttttttttttt

SEQ ID NO: 266388 - DNA, 420 bp, Glycine max
cccacgcgtccgcttctaatttgtgttactttggtgggtaagggggaaaagctgcaggggacctcattctctctttctgctgctccatatttcatttcatctctgattgcgctactgctaggctgtcttcaatatttaattgcttgatcaaaatagctaggcatgtatattattattcttttctcttggctcaattaaagatgcaattttcattgtgaacacagcataattattattcttattatttttgtatagcctgtatgcaagaatgacttgtccatccaatacaaccgtgattgtttaatataaaattttattattttattattttaattaataattttttataattatttttttaatattataattttaatatttatattttttttttttattttttatttgtttttgttatta

SEQ ID NO: 266389 - DNA, 204 bp, Glycine max
tttcaagctcatcctagattttttaaaatggcatcagcctcctgggtgggtctctcttccacagtctaggggggcaaggccgttaagctggtcccatcatcccccttagacaggagggtcaacattaggattaccgttacctaacaagccttcttcttaagctccatactctgcccataccgcgacaataacttgctcccattc

SEQ ID NO: 266390 - DNA, 389 bp, Glycine max
gcgcacgcgtacgcagaccccaccccaaaccctcgattccgattaggcgccgcaaaccacccacgccacccaagcccctttcctcctgcacctgggcttcaatcaggactccgggtgcttcgccgccgccaccgaccgcggcttccgcatctacaactgcgaccccttccgcgagatcttccgccgcgacttcggccccggcggcggcgtcggcctcgtccacatgctctttcgctgcaacatcctcgccttcgtcggcggcggctccttccccgacccccgctaccctcccaacaaggtcatgatctgggacgaccacctgtcccgctgcatcggcgagctctccttccgctcggaggtcaagggcgttcgcctacgccgcgaccgaa

SEQ ID NO: 266391 - DNA, 358 bp, Glycine max
cccacgcgtccgatttttcttcctataggaaaaattacagaccctcaccacagagacttagttggatgaacggttggccaccttccattatccttgaaggagattgttcaaggatacagactacctttgaggttgaaattgcggctgcatataatttgaattccagcattttctgcctctgaatatctctggaactttgtaagtcaacaaacatggctttacagaacattggtgctgcaaacagtgatgatgccttttacaggtataagatgcctaagatgattaccaaaattgagggcagaggtaatggcatcaaaactaatgttgtcaatatggttgacattgcaaaagcattggc

SEQ ID NO: 266392 - DNA, 433 bp, Glycine max
gagctacattagctgctggaaggctggtggcagagaatgaaattcttaagtggacactaccggccaacggatgacactctagacagtttcttatcatatctcaaggaaaatggcgtcaagcttgatgaagttgagttgcacaaggcaaatgaggactctgatatatatgaggagagcaatgttattgaaaaacagcaacctctgaagtgtcaagcattggtaaaatgtggtcttcagagtccgagagctgtggtgcctaagactgcaatattgcaaagaatcaattccaagaaggcttcgaagtcctatcagttaggacaccaactttcgcttaaatggtcaacaggagctggacctagaattgggtgtgtggcagattaccctatagaactttagacacaagcctaccccttcttcatacatgcgaatgggc

SEQ ID NO: 266393 - DNA, 269 bp, Glycine max
ataattcttttttatttgaaataatgtccgggatcatccacaagattgaggagaccctccatgtgggagggcacaagaaagaggagcacaaaggagaacaccatggtgagcacaaaggtgaacacaaaggagaacaccatggtgagcacaaaggtgaacacaaaggagaacaacaccatggggagcacaaggagggacttgtggataagatcaaggacaagatccatggtgatggccatgacaagggtgagaaaaagaagaagaaggac

SEQ ID NO: 266394 - DNA, 259 bp, Glycine max
cccacgcgtccgcccacgcgtccgaaaaaaaaaaaaaaaaaaaaaaaaaaaaaaaaaaaaaaaaaaaaaaaaaaaaaaaaaaaaaaaaaaaaaaaaaaaaaaaaaaaaaaaaaacaaaaagaaaaaaaaaaaaaaaaaggcaattatgggggaaggatttgaacgtaccataattacgttggcggggggggaaaactaaaaagattcgtaataaagaaaaaaaattgagatactctggttttcctttttaaaggaataa

SEQ ID NO: 266395 - DNA, 359 bp, Glycine max
agccactctaaagaaaatggcggtgcctctactctcgaagaagatcgtgaagaagagggtgaagaagttcaagaggcctcagagtgacaggaaaatttctgtcaagacaaactggcgcataccaaagggtatcgattcccgtgttaggagaaagttcaagggatgcactttgatgccaaacattggttatggttcagacaagaagacccgccactatctccctaatggttttaagaaatttgttgttcacaatgtgaaggacttggaactgctcatgatgcacaacaggacttactgtgctgagattgcccacaatatatccacaagaaagaggaaagatatagttgagagagccgcgc

SEQ ID NO: 266396 - DNA, 349 bp, Glycine max
gagcagtgacgctttccagcttctagggatggctgagaggggaatgttgcctgagttcttcagcaagaggtctcgctacggaacacctctcataggaatactcttctcagcctccggcgtgattttattgtcatggctgagctttcaagaaattgtagctgcagaaaatttcttgtactgctttggaatgattttggagttcattgcgttcattctgttgcggatcaaacaccccgacgcatcccgaccttacaagataccggggggaactgctggagcaattatcatgtgtatccctccgacaatattgattggtgtggtgttgtttttctccacccttaaagtaatg

SEQ ID NO: 266397 - DNA, 409 bp, Glycine max
gcaagagtgaaaatggcataaagcttcattacaaaggaacaccatttcatcggataatatctggttttgtgattcagggtggagacattgttcatcatgatggtaaagggtctgaatctatttatggtggcacctttcctgatgataatttcaagattaaacattctcacgctggtgttgtttctatggcaaattcaggacctgattccaatggctcacagtttttctttaccacagtgaaggccagatggttggatggagagcatgttgtctttggcagggttgttcaaggcatggatattgtgtatgtaattgaagggggagccggaacctacagtggaaaacccagaaagaaggtagtgatagcagactctggggagataccaaagaaccactgggatgaggaaaa

SEQ ID NO: 266398 - DNA, 431 bp, Glycine max
accatgcccaggaccatcttggagaggttgtgtatgtggagctgccagaatcaggtggcacaggtacccagaagtctggcttcggagccgttgaaagtgttaaagcaacaagtgacataaactctccaatctcgggggagattgttgaggttaacaaaaagctcacagagacacctggcctggtcaactcaagcccatacgaagatggatggatgatcaaagtaaagccaagtgatccatctgaattagattccttgatgggtccaaaagagtacacaaaattttgtgaagaagaagatgctagtcattaaagtttgaattgaattggttcctgcagttatatgtgggactgactgttctttacatgtttatgattttattatcttctgaacaagtttttaatatgcaatataactggttctttccgtttt

SEQ ID NO: 266399 - DNA, 411 bp, Glycine max
ggctggtggtgtctgcattgccgatgaagttcaaactggttttggccgaacaggaagccattattggggatttgagacacagggtgtcattcctgatatagttaccatggcaaagggtattggcaatggtctgccattgggagctgtagttacaactccagaaattgcaagtgtgatggcccaaaagattcaatttaatacctttggtgggaaccctgtctgctctgctggtggacttgcagtgcttagggttcttgataaggagaagcgtcaagctcactgtgctgatgtcggatcttatttgcttgaacgtttgagatttctcatggaaagacatgacatcataggaaatgtcaggggaaggggactaatggtaggcttagagttggttactgaccgaaccaacaagac

SEQ ID NO: 266400 - DNA, 411 bp, Glycine max
aaacaaaagagtagtggcctttaggtggtgaagaacaagagctcaaatcaaatcgaatcgaaaaaagaaagaaagatcatattcatggcgatggcaagcctggctcgacggaagggttacgccgtcgttttgtcgtcgaggtcgtcgttttgtctgacaagctggaggggattcgcgtccggatctgacgaaaacgacgtcgtcgtcatcggcggcggtcccggcggctacgtggccgccatcaaagccgcgcagctcggtctgaaaaccacttgcatcgaaaagcgtggcactctcggcggtacctgcctcaacgtcggatgcatcccttccaaggcacttctgcattcttcccacatgtatcatgaggctaaacatgcatttgccaaccatggggtcaagttttcatct

SEQ ID NO: 266401 - DNA, 127 bp, Glycine max
gcagagggaagttctacacttttttgtttggattgatcgagtgtactttttcttttcgagattggcttggtgtgcagtggaaagagggtggaaaagagtggtaagggggagggcggcgccccttgct

SEQ ID NO: 266402 - DNA, 437 bp, Glycine max
catggcttctgtttgtggaggttgcttagcattgcaagatgctggggttcctattaagggttctattgctggaattgcaatgggtatggtactggacaccaaggaatttggtggagatggaactccgcttattctgtctgacataactggatctgaagatgcatctggagatatggatttcaaggttgctggaaatgaagatggcataactgcatttcaaatggacattaaggtgggtggaattactttgcccatcatgagaaaggcacttctacaagcaagagatggcaggaagcatatacttggagcaatgatgaattcctcacctcctccagcaaaaagactttcgaagtatgctcctctgattcatgttatgaaggtacgaccagatagaataaatcttataattggttctggtggaaaaaagtgaagagcat

SEQ ID NO: 266403 - DNA, 435 bp, Glycine max
gctggttctcatagtctctgaaagcagaggagttaccgaccaatggccaccattgcttcttcctcatccactgtgctcttctctgcatcctcttccaacctcctcccattttcacacccttctacttcgcgcctttctttctcttcttcccttcactcctcatccttctctctatcaatttctccttcctttttgtcatactattcttcaagttctacacactttgccactcatgctgccttcagcatcagtgccagtgccgccgagaagaagaaggtgctcatcgtgaataccaacagcggcgggcatgccatcattggcttttactttgccaaagagcttcttggtgctggccactcagtcaccatactcactgttggtgaagaaggctccgacaagatgaagatacctcctttcaacagattctcagaaatt

SEQ ID NO: 266404 - DNA, 328 bp, Glycine max
ggaaatttcagactgagatagaggctggacaggttggcatcaatgtccccattccagttcctttgcccttcttctcatttaccggcaacaaggcatcgtttgccggtgatctcaacttctatggcaaggcaggggttaacttctatacacagattaagacaataacacaacaatggaaggattcaactggtggtagcaagattaacttggcaatgccaacctctcaaaaataatgttgatagccagagcgtgtaataaggctgtttctgaagtctttgttctcttgaaaaaaatgtcaaaggtcacctgctatgctttgttttgaaaa

SEQ ID NO: 266405 - DNA, 448 bp, Glycine max
ttctgctctagaaaattcagtgctgaaacatggcttcggctactctctctgtagccaaaccagcgccttcaggcaaatgggaaaggcttctctgaattctctggcctccgaagctcatcaggcttccttcccttttctagaaaatcttcagaggatttccattctgtcattgccttccagacctatgcagttggaagcagtggaggatacaagaagggtgtgacagaagcaaaactgaaggttgccataaacgggtttggaaggattggaaggaacttcttgaggtgctggcacggtcgcaaagactcccctcttgatgtcattgccatcaacgacaccggcggcgtgaaacaagcctctcaccttctcaaatacgattccatcctcggaaccttcgatgctgatgtcaagcctgttggcagcaatgtcatctccgtggatggaaagg

SEQ ID NO: 266406 - DNA, 379 bp, Glycine max
ctcaaaccactttccccacactctttagtgtgtcatttttttttttgctctttccccacaaagaggtcttggacccttcttctgtgtagtgcaatggccatggctaaggttttctgtgttctgcttctggcactccttggcatttccatgatcacaactcaggttatggcaacagattctgcttatcacttggatggaaggaattatggacctgggagtctcaagagctcacagtgcccttctgaatgcacaagaagatgtagccagacacagtaccacaagccctgcatggtcttctgcaaacaatgctgcaaaaagtgcctttgtgttcctcctggctactatgggaacaagtctgtgtgcccctgctacaataact

SEQ ID NO: 266407 - DNA, 389 bp, Glycine max
  unsure (1)..(389): unsure at all n locations
cccacgcgtccgcccacgcgtccgcccacgcgtccgagatcttatatgttaagcaggtgtacggtacgatggtagtgaggagccagaatccctcttcctgctttatgatataataaaaataaaatagcgattccggaaatcatgtctgtagctgctctttttatttatgtgataaatgtaaaacgctttggtttggcttggccgttgtgcattaggttgaaaaaataaatgttataattactcnnaaaaaaaaaaaaaaaannaaaaaaaaaaaaaaaaaaaaaaaataaaaaaaaaaaaaaaataatttatttataaatataatttaatattttattttaataatttttataatttatttttttggggggggccgttttaaaggatca

SEQ ID NO: 266408 - DNA, 423 bp, Glycine max
  unsure (1)..(423): unsure at all n locations
gctgaatgcaaaatttccgagcacacatctacaatgattccaacgttgatccctcttaccgaaagttcctgcagagcaagtgccccagaagtggaaatgataaaacactcgaaccccttgaccaccaaactccaatccattttgataatctatactttcagaatttggtgagtaagaaggcccttctccattccgatcaggagctgttcaatggcagttctactgacaatctggtaagaaaatatgctaccaatgctgctgcattctttgaagactttgccaagggcatgctcaaaatgagcaacatcaagcctcttacaggaagccagggccagatcagaatcaattgtgggaaagtcaattaaacgttagcaagtgatgatgtataatatgtttttaatataaattttatttccctcctnc

SEQ ID NO: 266409 - DNA, 425 bp, Glycine max
gtcaccatcaccgcctctgaacgcacatctacaccgattccaacaatcatccctactgccgaaacttactgcacagcaagtgccccaaaagtggaaatgataaaacactctaaccccttgaccaccaaactccaatccattttgataatctatactttcagaatttggtgagtaagaaggcccttctccattccgatcatgaactgttcaatggcagttctactgacaatctggtaagaaaatatgctaccaatgctgctgcattctttgaagactttgccaatggcatgctcaaaatgagcaacatcaagccttttacatgtaaccagggccatatcaaaatcaattgtgggaaaatcaattaaacgtttagcaagtgatgatgtataataatgtttttaatataaattttatttccctccttc

SEQ ID NO: 266410 - DNA, 423 bp, Glycine max
cccacgcgtccggagggtgacccggtgactgatttgctttttatcattagaggtagactggatggttctactacaaatggcggccgtagtggtttcttcaactcaatcatattgagacctggagatttttgtggggaggaacttctttcttgggctttactccccaaatccaccattaatttgccttcttcaactaggacagttaaagccctaagtgaggttgaagcttttgctcttcgggccgaagacctcaagtttgttgctaatcaatttaggcgccttcacagtaagaagctgcagcacacttttcgattttattcccaccattggaggacttgtgcagcttgctttatacaggctgcttggcgccgatattagaaggatgactatgaaagacctcattttgagggaaaccattccttt

SEQ ID NO: 266411 - DNA, 398 bp, Glycine max
ctagcttgctaaattcccttataattattccttcttgtgttgagttgattcaaacataaacacggcaccctgggttcattaattgatttcattttgcagtaataacaagaacaaaaaataagcatgagttgcaacgggtgccgcgttcttcgaaagggatgcagcgagtcctgtattttgcgaccttgtttgcagtggatcgaaaccgccgaagcccaaggccacgccactgtcttcgtcgccaaattctttggccgcgccggcctcatgtccttcatttccaacgttccagaaaatcaaagacctgctctgtttcagtcgctgctcttcgaagcgtgtggcagaacggtgaaccctgtgaacggtgccgtggggcttctctggactgggaactggca

SEQ ID NO: 266412 - DNA, 404 bp, Glycine max
aatctctctctctccaatggccaaagacctcgaaacggagattcaaagtgggttgcctcacaaggactaccacgacccaccccccgccccattctacgaccccgccgagctccgaaagtggtccttcttccgagccctcatcgccgagttcgtcgccaccctcctcttcctctacgtcaccatcctcaccgtcatcggctacaaccaccagacagccaccgccgccgagccctgcagcggcgtcggcgtcctcggcatcgcttgggcctttggaggcatgatttttgtcctcgtctattgcaccgccggcatatcatggggacacataaacccggcggtgacgttcgggttgtttttggcgaggaaggtgtcgctgacaagagctgttgggtacatggtggctc

SEQ ID NO: 266413 - DNA, 364 bp, Glycine max
gttattgtcaatcccaagggagaaatgaaaggttctgctatcactggtcccattggaaaagagtgtgctgatttgtggcctaggattgcaagtgcagctaacgccatcgtttgagtggaatttcttgttatgtttaagcttgtaggatttaagtgtgtctcagattttgtttaagcttgaaattggaatacaagtgatacagatttttaatcattcgtaacttataatcagcttgctttttgaagagacgatattaattattaattaagaattttgttttttgttaaaaaaaaaaaaaaaaaaaaaaaaaaaaaaaaaaaaaaaaaaaaaaaataataaaaattttataataaataataataat

SEQ ID NO: 266414 - DNA, 341 bp, Glycine max
gtcttacaaaccagaggagttgatgaaattggtgaaggaatttgaaggggaggtttcgggaaaatctttatatgtttattatattatataattttattggtcatttctttttttataattaattcttttttattatctttaactttaatttttttataattattttatttttatttattttaattatattttttttatttttttattataatataattattattttttttatttatccttatttttttcttttattttaattttttatattatattgtttttaattttttttttcatcttatttttttatatttttattataaattttttatttttttttt

SEQ ID NO: 266415 - DNA, 437 bp, Glycine max
acttctgccacctatgaagtttctttaatttgtgcatattccatcactctctctctctgcttctctgccagtttatgtacactaactcaatacacaacactcattaacatttcttttcctcatggaacttgagatacgtgcttgtctcttgttgtttctctttagtctcttctcatgctctcaagcctacactttctatgttggtgggaaagatgggtgggttttgtacccttctgagaattacaatcattgggctgaaaggatgaggttccaagtcagtgatactcttgtttttaagtacaagaagggctcggatactgtgttggtggtgaacaaggatgattatgagaaatgtaacaagaagaacccgatcaagaagtttgaggatagtgaatcggagtttcagtttgatcgatcgggtccattttacttcatta

SEQ ID NO: 266416 - DNA, 425 bp, Glycine max
ctagtgtggtctgcaactatgagcaaggattatctaatcatactttctctccttttttccacggtgcttgcaactgcaagttcttcttcttcttcttcctccctctatcttgggaagggcttctcccatcgcaaattgtctcccagttatcacattcacaaaaccattgacgaatcctatgcagttatcttcgatgctggtagcacgggaagccgtgtacatgtctatcgttttaaccaacaattagatctccttcgcattggccaagaccttgagttgtttgtcaagactatgccaggtttaagtgcttacgctgagaatccacaagatgctgcagaatctcttattccacttttggaggaagcagaagctgctgttcctcaagagtttcaccccaggacgccagttaaacttggagcaactgc

SEQ ID NO: 266417 - DNA, 311 bp, Glycine max
  unsure (1)..(311): unsure at all n locations
gttattgtcaatcccaagggagaaatgaaaggttctgctatcactggtcccattggaaaagagtgtgctgatttgtggcctaggattgcaagtgcagctaacgccatcgtttgagtggaatttcttgttatgtttaagcttgtaggatttaagtgtgtctcagattttgtttaagcttgaaattggaatacaagtgatacagatttttaatcattcgtaacttataatcagcttgctttttgaagagacgatattaattattaattaagaattttgttttttgttaaaaaaaaaaaaaaaaaaanaaatta

SEQ ID NO: 266418 - DNA, 180 bp, Glycine max
cccacgcgtccgctttatttataatttgtttctatttagtgtatttcatggttgtgttcttattaccaaattttaaaggtttggcgcattgctttctgtacatttaaatttaatttgtttgggttgctgagtaaaaactaaaatgaaagtagatacaaattgttttttttttctttgaac

SEQ ID NO: 266419 - DNA, 418 bp, Glycine max
aaacaatgatggctggtgttagtggcagtagcactactcccttattgtgctctttgttctttagttcttccttactttttgcttcctgcacccatgcctcctcccaggcacctcctccaattgtggatggactttcatgggatttctataggacgagctgtcccatgcttgaagggatagtgagcaagcatctccagaaggtgttcaagaaggacaatggtcaagctcctgccttactcatgatcttcttccatgactgctttgttcagggttgcgatgggtcgatattgttggatggaagtccaaatgaaaaggatcaaccggcaaacatagggataaggccagaggctttgcagaccattgaaaatcttcgatctcttgttcacaagcagtgtggaagggtcgtctcttgcgctta

SEQ ID NO: 266420 - DNA, 377 bp, Glycine max
  unsure (1)..(377): unsure at all n locations
ntccgccacgcgtncggcaagaagaagtttgagactctttcctacctgccagatcctgatgatgcacggttggcaaaggaagtagaataccttcttaggaagggctggattgcttgcttgcatattgatgtgcagcacgcgtttgaatacacatgagcgcaacaagtcaccaggatactacgatggacgctactggaccatgtggaagctgcctatgtttggttgcactgatgcttctcacgtgtcgaaagaacttcaagatgataatactgaatgacacaacccattgatacggctgatccgactagagcaagttcgccaagtgcagtgcatcatctttatcgcctacaagcccgcatgcttctaagtgtgaaaaa

SEQ ID NO: 266421 - DNA, 319 bp, Glycine max
ctcatgtccaagtacaagatcaagtaccagttctacagggtcttccctaatggggaggttcagtatttgcaccctaaggatggtgtttaccctgagaaggtcaacgccggacgccaaggggtgggtcaaaacttcaggtctattggtaagaatgttagtcctattgaggtcaagttcactggcaagcagccctatgatttgtgagcacacaactctatcttcatcatcatcatcccccgtgcttcctttatatgctatatattctcatgtgatatcatgtacctattgtcaattttattatgccacaaatattgcttaa

SEQ ID NO: 266422 - DNA, 414 bp, Glycine max
ggaagacgaaaagagagttgagagagagtgagagggagtgagagggagcagagggagcgaagagaagaaacaaagatggagactcctcctccccaacaaggcgtcgtgaagaagaaggagacaaggggccgaaaacccaaaccaaaggacgaacacgggaagggtttgaaggaaggtaggaaaacacaacaacaacaacaacatcatcatcagcagcagcaacagcaacaagatcaaccttcggtggacgagaaatacacgcagtggaagtcccttgttcctgtcctctacgactggctcgccaaccacaacctcgtctggccctctctctcttgcaggtggggcccccagcttgaacaagccacttacaagaatcgccagagactctacctttctgagcagactgatggtagt

SEQ ID NO: 266423 - DNA, 422 bp, Glycine max
cacaagccaagtgaaagtgagaaaaaataaaaatcaaagagcataatgtcagggatcattcacaagattggggagacccttcatgtgggagggcacaagaaggaggaggagcataagggtgagcaccatgctggagaatacaaaggggagcaccatggtgaacacagtagtgagtacaaaggagagcatcatggtgaacacaaagctggagagtaccatggtgagcacaagccagagcacaaagaggggttcctagacaaagtcaaggacaagatccatggtgagggcggcgccgccgagggcgagaagaagaagaaggagaagaagaagaaggagcatggccatgagcatggccatgacagcagcagcagcagtgacagtgattaaactgctgcatcacctatatatttaaaaggtttatg

SEQ ID NO: 266424 - DNA, 416 bp, Glycine max
aggaaaaccaaccaaagttccaaattttttggtttggggatagatagagtgatacgcgtcacattttcataataataaaaaaatggcagcggcggctgcagtgacggtgctactcccacctaggattccgaccaccaccaacgttacccgctgctctgctttgccttctctccctcctcgcgtctccaacaccaaaaccactttgttctcaccttccctcaacaacttttcagtgtcccgaaaatcttctctgcttcagaccagagcttcttcagaggaatcatcctcagtagatgccaatgaggtgttcacagatttgaaggaaaagtgggatgctcttgaaaacaagtccacagtacttctttatggtggaggggctatagttgctatttggctatcgtcaattcttgtgagcg

SEQ ID NO: 266425 - DNA, 432 bp, Glycine max
atcgagataactagaaacagtgtgatgaaaatgaaggtccttgttttcttcgttgctacaattggggtagcatggcaatgccatgcgtacgatatgttccctctccgaatgaacactggctatggtgcccgtactccggaggtgaaatgcgcaagttggaggcttgctgtggaagcacacaacatctttggctttgagaccattcctgaagagtgcgttgaagcaacaaaggaatacatccatggcgaacaatatagatcagactccaaaacagttaaccaacaagcttacttttatgccagagacctcgaagtccatcccaaggacacatttgtgttcagtatagatggcaccgtactctctaatattccatactacaaaaaacatggatatggggtggagaaatttaactcgaccttgtatgatgaatgg

SEQ ID NO: 266426 - DNA, 411 bp, Glycine max
  unsure (1)..(411): unsure at all n locations
cccacgcgttcgcccacgcgttcgcccacgcgtncgcttgcaattccaattcctggggagttggttccattttccgacgaaccatctcaaatccaccgccacataatgtaactgtatgcgaatgcgaatgtgaacgcggtttcgatttagatccagattcatggggatttgctttagcattgaagaccaaaaccacctttccatctccgattccaacgcgaagcctaaacctgcaggtcatgaatctggcgctccattggcttccatgaacatcaaagatctccgcgaaggtgctggatacagcaatgtggatatttttacctacgaggagcttatgctcgcgacgaagcactttcggcccgatttcatcttgggagaaggaggcttcggagttgtatataaaggcgtcat

SEQ ID NO: 266427 - DNA, 413 bp, Glycine max
  unsure (1)..(413): unsure at all n locations
cccacgcgtncggttcttagatatgaggacaattttgactcaaccagcaatgttgctgtcatggtcactgcaactgacaagaagtccatcactgactatggttcacctgaggagttcctatctcaggtggattacttgcttggaaaacaagccttctttggccaaactgatgctgagggtggttttgattccaatgctgtggcaactgcaaacatcttggagagttcaacgcctgtcattgatgggaaacagtactacagtttgactgtgttgacaaggacagctgatggagatgaaggtggcaagcaccagctgattgcagcaactgtgaaagatggcaaactatacatttgcaaggctcaagctggagacaagagatggtttaagggagcaagaagatttgtggagagcac

SEQ ID NO: 266428 - DNA, 431 bp, Glycine max
cccacgcgtccgctgaaacttcataagcggcttgccgctagcgttctcaagtgtggtagaggcaaagcttggcttgaccctaatgaggtcaatgaaatctccatggctaattctcgacaaaacataaggaaattggttaaggatggtttcattatcaggaagccaactaagattcattcccgttcccgtgctcgcagaatgaaggaggccaagaggaagggacgtcactctggttatggtaagcgtaagggtacaagagaggctaagctccccaccaaaatcctttggatgaggaggatgcgtgtcctcaaacgattgctccgcaagtacagggaagcaaagaagattgacaagcatatgtaccatgatatgtacatgaaggttaaaggtaatgtcttcaagaacaagagagtcttgatggagagcataca

SEQ ID NO: 266429 - DNA, 443 bp, Glycine max
cccacgcgtccgctcatcgttcttctcttcgccttcaccatcttcgccttcgttgtcaccaacaagggcgctggcgaagttgtgtctaatagagggtataaggagtataggcttggggattactcgaactggttgcagaagagggttaacaacactaagacgtggaacaggatcaggagttgcttgcaatctgggaaagtctgcactgagtttcaatccaagtttctaaacgacaccgttactgagttttactccgaaaacctgtccgcgcttcagtctggatgctgtaaacctgcagaagaatgccagtttagctatgtgaatccaacgacatggacgaagcccacaaatgtgactaatcagagcaacccagattgtgatgcttggaataacgatccaacagttctgtgcttcaattgccaatcatgcaaggctggcttact

SEQ ID NO: 266430 - DNA, 421 bp, Glycine max
attttgattcctaatcatcattttcccttctttttattctctgcacaacaattcgagattccaaccatcgatctcaattttcaaccttaacctctaagaatgtcttacgcttatctcttcaaatacatcatcatcggtgacaccggagttggaaagtcttgtcttctacttcaattcacggacaagcgctttcagcccgtccatgacttaaccatcggtgttgaatttggtgccaggatgatcacaattgataacaagccaatcaagttgcaaatatgggatacggctggtcaagaatcattcagatctattacaaggtcttattacagaggggctgcaggtgcattgcttgtttatgatataaccaggagggagacatttaatcatttggctagctggttggaagatgcaagacagcatg

SEQ ID NO: 266431 - DNA, 404 bp, Glycine max
caacaaacatatctcttcctcttctgtccctcaatggaaggatcaggatccggtgtggttacagtctacggcaacggcgccatcaccgagaccaagaagtcccccttctccgtcaaagtcggcctagcccagatgctccgcggcggcgtcatcatggacgtcgtcgacgccgagcaggcccgcatcgcggaggaggccggtgcctgcgcggtgatggccctggagcgtgtccccgccgacatccgggcccatggcggcgtggcccgcatgagcgatccgcagctcatcaaggatatcaagcgggccgtcacgatccccgtgatggccaaggcccgcatcggccacttcgtcgaagcccagatcctcgaagccatcggcatcgactacgtcgacgagagcgaggt

SEQ ID NO: 266432 - DNA, 429 bp, Glycine max
cccacgcgtccgcggacgcgtgggctgagaatctgattcaggctggggttgatgggttgagggttggaatggggtctgggtccatttgtactactcaggaggtttgtgctgtggggcgtggtcaggcaactgctgtttacaaggtctcgtccattgcttataaaagtggtgttcctgtgattgctgatggtggcatctcaaactctggtcatattgttaaggctttgtcattgggagcgtcaactgttatgatgggaagcttcttagctggtagtcttgaggctcctggggcttatgtgtatcagaatggtcaacgtgtgaaaaagtacagaggaatgggttccctagaagccatgactaaagggagcgatgcatggtacttgggtgatacagcatagctaaaaattgctcaaggggttgttggagctg

SEQ ID NO: 266433 - DNA, 404 bp, Glycine max
aatagataagccttcctctctgcagagtgcagagctttctctccccgttgcttcattcattctcaacaacaaaccaatctttcttagaaaatgagggggggcttgtggcaacttgggcaatcgatcactcgccgtcttgcccatggagataagaaggctgttgctcgtcgatgttttgcctcagaagctgagctgaaaaagacagtgtttcatgacttccatgttgctcatggtgggaagatggttccatttgctgggtggagcatgccaatccaatacaaggactcaatcatggactctaccatcaactgtagggagaatggtagcctctttgatgtttcccatatgtgtgggctggagcctaaagggaatgacgctgccccattccttgaaagctggtcatt

SEQ ID NO: 266434 - DNA, 388 bp, Glycine max
ccccgaagtcgggagggtcagcatgaggaagaccgtcaccaagcaggcctcctccggaagcccatggtacggcccagaccgcgtcaagtacttgggcccattctctggcgagcccccgtcctacctcactggcgagttcccaggtgactactgctgggacactgctgggctttcggccgacccagaaaccttcgccagaaaccgtgagctcgaagtgatccactccaggtgggccatgctcggggccttgggctgcgtcttccccgaactattgtcccgcaacggggtcaagtttggagaagctgtgtggttcaaggccgggtcccagatcttcagcgagggtgggctggactacttgggcaacccaagccttgtccacgcccagagc

SEQ ID NO: 266435 - DNA, 437 bp, Glycine max
  unsure (1)..(437): unsure at all n locations
aaaaagccttgtctctcgtgccgattctgcaggacaattgccttgacccaacctaattgcaatgattgttgaagatgagtacgttggatgcaacaagggctgaacttgggcttattgttttatatttgggcaaggctgaagcaagggacaaaatatgcagggcaatacaatatggttgcaaatttttgagtaacggggaacctggtactgctgataatgtcgacaaaacaaccagcttggcacgaaaagtgttgcgtctttttaagtttgtcaatgacctacatgctttgataagtacaacaccacatggcacttccctccccctaattgtgttgggaaagtccaagaatgcactactctccactntcttgtttcttgatcaatttgtgtggcttggcagaacatgcatctaccagtataaagagcgcactgaacta

SEQ ID NO: 266436 - DNA, 437 bp, Glycine max
ctagaaacagtgtgatgaaaatgaaggtccttgttttcttcgttgctacaattttggtagcatggcaatgccatgcgtacgatatgttccctctccgaatgaacactggctatggtgcccgtactccggaggtgaaatgcgcaagttggaggcttgctgtggaagcacacaacatctttggctttgagaccattcctgaagagtgcgttgaagcaacaaaggaatacatccatggcgaacaatatagatcagactccaaaacagttaaccaacaagcttacttttatgccagagacctcgaagtccatcccaaggacacatttgtgttcagtatagatggcaccgtactctctaatattccatactacaaaaaacatggatatggggtggagaaatttaactcgaccttgtatgatgaatggggtaacaagggcaat

SEQ ID NO: 266437 - DNA, 385 bp, Glycine max
tgactgtaacactcgattatgggaaaatttgtcaacaagggagagagcaattaggaaatgtttaagatataaatacagaagtaaatcaggaaggcttatagtattttgttggtacaaatggcatttttgtaacgactccttcattgggttttccccgaataataatctttactttggtggctgccttgtgcaatccagatttcacatatcccatggctatgttcttctggaggcaaggactgaatccaccactggtgatttccccaatgttgttgcctccttcatcttgaatctcactgtggcttctgggaggtggaccagaagaaaagaaaccaacacgcctgattttaggaccttcttcaagctgtttcaggataacatcagc

SEQ ID NO: 266438 - DNA, 445 bp, Glycine max
gagaatgatgatgcagtctggtatgtgtgcagtggtacgttgtagcactccttcttctggcggaggtggggcccatggctgaggctgtgacatgcaccccaacagagttgagtccgtgtcttccagcaatcacttccggtgctaaaccttccaatgcttgttgcacgaagctgaagcagcaaaaaccatgcttatgtggctacctcaaaaacgctagcttgaagcagtatgttaactctcctaatgcccgaaaaaccgatgcttcttgtgggattccctttccaacttgttaattaattaagccttcttataattaaagcgtgggatatatatatatatatatatatatatatatatatataaacagtttaatttatacacactttgatcctacaaagcatcttgacacaagcattcaataggatttcaccactttatcgcaaca

SEQ ID NO: 266439 - DNA, 408 bp, Glycine max
gcacctgcacagaagaagaagaagaagaagaagaagaagaagaacgatagtaatggaaatcaagcccggtttgtcagcactcgttaccggtggtgcctctggaatcggcaaaggtcttgcactagctcttgcagagaagggtgtatttatcacgatcgtggatttctctgaagaaaagggaagacaagctgcaatcctcgtcgagaaaattaactccaattttcattctaagttaggatttccgtctgccatatttgtgaaatgtgatgtgagtaatgcaagggatctagctgctgcatttgaaaagcattttttgacatatggaggactagacatttgtattaacagtgcggggattagtagttctgtaccattccgtgatgatcaaacggatggcacccgaacatg

SEQ ID NO: 266440 - DNA, 370 bp, Glycine max
cccacgcgtccggaagaacttagctacaagctaaggaaggatcaaagagaatggctcaagcaatggcatcaatgactagcttacgtggttcctctcaggctgtgttggaaggtagccttggctccacacgcttgaatgtggggagtggaagcagggtggcctcagtcacacgtgcagggttcacagttagagcacagcaacaacaagtgaatggtggtgaggtacaaagtagccgtagggcagtgctttcacttgttgctgctggtttgaccactggctcttttgttcaagctgtgcttgctgatgccaaacctatcaaagttggaccacctcccccaccttctggcggattacctggaacattgaactc

SEQ ID NO: 266441 - DNA, 289 bp, Glycine max
agggtttatacaattttcgatggcttcttcagatgttgagtaccgttgcgttgtcggtgggctcgcttgggccactgacgaccaagctctcgagagagccttctctcagtacggcgaaatcgttgaaacgaagattatcaacgatcgtgagactggaagatccaggggttttggatttgtgaccttcgcctcggagcagtccatgaaagacgccatcgaagggatgaacggccaaaaccttgacggccgtaacatcactgttaacgaatctcactcccctggtggccgt

SEQ ID NO: 266442 - DNA, 353 bp, Glycine max
gaacgttgtgcttgttcgcaaaaccatcaatggcgtcagcattatcttctctctcttccacgtcggcttcactgctgcagcacagtttcaccggtaactcgaaggctcctattactcaattccccaacaaaagtgcgcgcttttcgggcttcgctcaaaagaaggcaaagaaacttcggaagatacttttgaaggaagatgtgactgatgtaggaaagcaagggcaacttcttgatgtgagggctggctttttcagaacatacctgcttcccatgggaaaggcacaacttgttactccccagctactcaaggaaatgaagatagaagaggaaagaattgacgctgagaaaaga

SEQ ID NO: 266443 - DNA, 270 bp, Glycine max
aagagttctttcaaaatgcaaacagccttaaccttcgctgcccccaacgttgtgccattggcacccacaaagagagtctcccatattaccatctttcccaccaaattgaaagccccgcgctcctcacctcgttactctccgattagggttgcaaccgtggagcccgacacttcaactgtcgactacaactctgcgttctcagtgtttcctgcagaagcatgcgaaactgtaggaggggaagcctgcatggcggagatgtaccctgaaacg

SEQ ID NO: 266444 - DNA, 391 bp, Glycine max
agccaattcatcattttctctcttctctgcttcttcttgttcaaatcttaggagctgaggagaatcaatcgagagaaatatgtctggtatcgctcgtggacgccttgctgaggaacgaaagtcatggcgcaaaaaccatccacacggtttcgttgccaagcccgagactctacctgatggcaccgtaaatttgatggtctggcattgcactattcctggcaagaccgggactgattgggagggtggatatttcccactgacaatgcacttcagtgaagattaccctagcaagcctcccaagtgcaaattccctcaaggtttctttcaccctaatgtgtatccatctggaactgtttgcttgtctatacttaatgaagatagtgggtggaga

SEQ ID NO: 266445 - DNA, 413 bp, Glycine max
gactagaccttcttcgacggtatcttcttcttttgttgtttgtgtgggtgttttgtctctcacctgaaaatgtcttgctgcggtggtaactgtggttgcggaagcgcctgcaagtgcggcaacggctgcggaggctgcaagatgtacccagacttgagctacaccgagtcaaccaccaccgagaccttggtcatgggagtggcaccagttaaggctcaattcgagagtgctgaaatgggtgttcccgctgagaacgatggctgcaaatgtggagctaactgcacctgcaacccctgcacttgcaagtgaggtgttggagagctaaagcttcaagcagagatggcccttagaaataatgataaaaactatatgtagtttcaaaacttcaaaatatgtagtatgtattatgttgc

SEQ ID NO: 266446 - DNA, 401 bp, Glycine max
agaagattaggttgagagctgaagatgtgcaagggaagaatgttctgacaaatttctggggaatggatttcacaacagacaagctgaggtcattggtacgaaaatggcaaactcttattgaagcccatgtggatgtgaagacaactgataattacacattgaggatgttttgcattggatttaccaagagaagagctaaccaggtgaagagaacctgttatgcacaatcaagccagattagacagattcgtaggaagatgagggagatcatgaccaaccaggcaacagcatgtgatttgaaggagttggtccggaagtttattcctgagattattggaaaagagatcgagaaggcaacatttagtatttaccctctgcaaaatgtgtttgttcgtaaagtc

SEQ ID NO: 266447 - DNA, 422 bp, Glycine max
cccacgcgtccgcccacgcgtccgcccacgcgtccgaaagaatgactcacttgcaatcaatgaagcccgaaaggatggtattcgaattagataccatgatggccatctcaaatccctgcttcatgcgatcaaagatagagttaatgtgaagggctactatatatggtcattttcagatagctttgaatgggatgctggttacacagctcgatttggcatcatatatgtggattacaagaacaatttgagtagataccctaagtcctctgcgttttggctgaaaaaattccttctcaagtgatctaaatctattgttcctttggcatgcatgcccagtttttcttcttgtttgtttcctggatatcacagacatgcagtgtgtatcacttgctcttcgattcggatcaaatgtatcaagtcat

SEQ ID NO: 266448 - DNA, 408 bp, Glycine max
  unsure (1)..(408): unsure at all n locations
cccacgcgtccgctttgttccaaccacaatctcaattatccttgctggccgattcagtgatgaaccacatcctatagagaaattcaagaggataatgaggtcaatccaaggtgctcttattgttgcttcgactcttcaaatagtactgggcttcagtggtctctggcgtaatgttgcaaggttcttaagtccactttcgtcagttcctttggtatctcttgttggttttgggctgtatgagttagggttccctggggtagctaaatgtgtagagatcggattgcctcagcttatattgctagtatttgtttcacagtatgtgccccatgtgctacattcgggaaaacatatcttcgaccgttttgctgtgttatttacaaatgaatngtgtggatatatgctcatcta

SEQ ID NO: 266449 - DNA, 422 bp, Glycine max
acaatcttgacacttcaagggagtattatccaaacatcatcacaacaaggacttatgatgagcgtcttcaaacccttgagtttgttcgtgatgcagggatcaatgtttgttctggaggaattatagggcttggagaagcagaggaggatcgtgtaggtttgttacatacattgtcaacacttcccacccatccagagagtgttcctattaatgcacttgttgctgtaaagggaacccctcttgaggatcagaagcctgttgaaatatgggagatgattcgcatgatagcaactgcacgtatcgtaatgccaaaagcaatggtcaggttatcagctggcagagttcgattctccatgcctgagcaggcattgtgctttcttgctggtgcaaattctatattcactggtgaaaagcttctcact

SEQ ID NO: 266450 - DNA, 430 bp, Glycine max
  unsure (1)..(430): unsure at all n locations
tgaaaacccaaagtgcttctctcctctgtctttttctctctcttgctatccttttggctagtggcactgctgcaagtgcaactccaagaagcgcagtgccaagccaccatgtttcaacattcaacagaagcctttttccttccacttttctctttggaattggttcttctgcttaccaggcagaaggagcagcaagtgtagatgggagaggaccaagcatatgggacacctacactagacagcatactgaaaagatttgggatcatagcaccggtgacatgggagctgatttttatcatcgatacaagggtgacataaaaatagcgaaagacattgggctggactctttcagattctctatctcatggtcaagaatattcccaaagggcaagggagcagttaacccncttggggttaattctacaacaat

SEQ ID NO: 266451 - DNA, 432 bp, Glycine max
cccacgcgtccgtattgatattgcaaaagatagttaaatttcattccgaaacaatgatcaacaaagtagcagttctattagttgttttgcttttcatcattgctgctttggcttctgatcctgatccagtaatggacttttgcatagccaaatcaccagacaatagcttcagttgcaagaactcatctacagcaacagtggaagatttcacctattctggcataaagtctcctgggaacttcaagcaaactggattctcttctatggcagtgaattcgaatgtctttccgggtttgaacactcttggtgtgtcatttgtgcgagcagattttggtgttggcggcgtcaatgtgccacacttccatccaagagcaacagaggttgcttttgtgctggaaggaaaaatttattcaggatttgtggacaccaaca

SEQ ID NO: 266452 - DNA, 430 bp, Glycine max
cccacgcgtccggtgaaaaccttctcttacccttctctcaagtttcaagagatttcatcatggctccaaagaaggacaaggctccaccaccttcctccaagcccgccaaatctggcggtggcaagcagaagaagaagaagtggagcaagggaaagcaaaaggagaaggtgaacaatatggtgctgtttgatcagggcacctatgacaagctcctttctgaagctcccaaatacaagctcatcactccttccattctctctgatcgtttgaggattaatggatcacttgcaaggaaggctataagagaattgatggcaagaggttctatcaggatggtgtctgcccatgcaagtcagcaaatttataccagggcaacaaacacctaggtggtgaactgatcttagttacggagtatgggtaggaatagtga

SEQ ID NO: 266453 - DNA, 361 bp, Glycine max
tgatccgaaagagcctaaagcgtcagggcaaggaaatgtggagccagatgaagttctgcaagctcgttgcaaatctgggaagaagactgcattctgggtggatgaagcaccacaatctaaaaacaagcctttagaaagtgcacctgttgcctcagaaaacaagccttcataagctgcaactgttgcctcagctgagcctgaaaacaagccttcagaagctgcaattgttgattcagctgagcctgaaaacaagccttcagatactgttgttgaaactgttgcataaggcatatgtggatctattattctatgcggaagtaggtgctgttcatatagtatttcatgtgctttgtgcatgtca

SEQ ID NO: 266454 - DNA, 431 bp, Glycine max
agaaaaagaaaaaagcgatcatagtttcacttcggccttatccagtttagggtttcggggctctaccctatctttcacgtatcgaaaccttaaatttacgatcaggtctgagcaatctggttggtagaacctttggtcttagtgagtcaagttttatgtctgaattagacgatcaaattcctactgccttcgatccttttgctgatgcaaatgctgatgactcgggtgctgggtcaaaggagtatgtgcatattcgtgtacagcagcgaaatggtaggaaaagcctgacaaccgttcatggattgaaaaaggaattcagctataacaagatacttaaagacgtcaagaaagagttctgttgcaatggaacagttgttcaggacccagaactaggacaggttattcaacttaaaggtgatcagaggaagatg

SEQ ID NO: 266455 - DNA, 379 bp, Glycine max
cgcgcatcaccggccttctggaaggcgaggacgtcatcaatacgggcaaggccatgcaggccatgggcgccaggatccgtaaggaaggcgacacctggatcatcgatggcgtcggcaatggcggcctcctggcgcctgaggcgccgctcgatttcggcaatgccgccacgggctgccgcctgaccatgggcctcgtcggggtctacgatttcgacagcaccttcatcggcgacgcctcgctcacaaagcgcccgatgggccgcgtgttgaacccgctgcgcgaaatgggcgtgcaggtgaaatcggaagacggtgaccgtcttcccgttaccttgcgcgggccgaagacgccgacgccgatcacctaccgcgtgccgat

SEQ ID NO: 266456 - DNA, 389 bp, Glycine max
caatataaaaaaaaaacatgactacataatgatgaaaaaactatattttaatatatacaaaataaagacattgactggtgtgtaaatatgattttacaggtgtatcacttccagtcagattgttcctcagtctctatgagctgaccccaacacatcttaacattaataacaaattcagtgtgaagaactttttaaatcttgcgttggttgatgaagaggacaggcgatatttcaagcatcaggaaatcacaatgtataggctgcaggaagaaacttcatgattacttatcattcggcgagtgagtattattaagtgtgctcacatataaaagaaacattgcgatcgacattgaagacctcttaaatcaaggaatagtctcgtgaatcat

SEQ ID NO: 266457 - DNA, 428 bp, Glycine max
attgtttgttgttgtaactcgttcttcttcttttgttgttctgtgtttgtgtttgttttttctctcacctgaaaatgtcttgctgcggtggtaactgtggttgcggaagctcctgcaagtgcggcaacggctgcggaggctgcaagatgtacccagacttgagctacactgagtcaaccaccaccgagaccttggtcatgggagtggcacctgttaaggctcaatttgagggtgctgaaatgggtgtgcccgctgagaacgatggctgcaaatgtggaccaaactgctcctgcaacccctgcacttgcaagtgaggtgttgggagagcaagcttcaagcagagatagcccttaattaggaataatgataaactattaatgtgtagctaaaaacttatgtattatgtctgtgatggttttcgtgcactc

SEQ ID NO: 266458 - DNA, 419 bp, Glycine max
  unsure (1)..(419): unsure at all n locations
cccacgcgtccgatgatgataggttggacaccggacatacttgaacttaaagactataaggccaaatatggcattgatgggtcagcttttcctgaataaaaccatagagtggtcagagtttcaggatgcagtggttgaaggtcaccaaaatagacaaggcgaaccaaggctgaggaagccaaaacaatcaatatatacatatccagctcctgattgcatgtgccaagcttagtgactagtagtatacttaaattattattgctcacgatgtagcctgtgtattttatagttcggtgtcttattatttaacattatatatatctagtgaaaataaaaagctacggngtttgttatgatgctcttgataagagtgcttgagagagttgggtattgtgtgggagatgtatttatcagatgat

SEQ ID NO: 266459 - DNA, 413 bp, Glycine max
attgatttcgttcctggtagaagagattcaaaagtatctcctaatgaagggcggcttcctgatgctaaaaaaggtgttccacatctccgtgatatcttttatcgaatgggcttgactgaccgagatattgttgcactatctggaggacatacactggggagagcacatccagagagatcagggtttgatggcccttggacggaggaccctctgaagtttgataactcatactttgtggaacttttgaaagaagattctgctgggctgcttaaacttccaacagacaaggctttattggaggatgctgaatttcgctgttatgttgagctatatgcaaaggatgaggatgcattttttcgagattatgctgaatcacataagaaactttcagagctaggctttgtgccaagttc

SEQ ID NO: 266460 - DNA, 423 bp, Glycine max
  unsure (1)..(423): unsure at all n locations
cccacgcgtccgcccacgcgtccggagcaaggtcccttctcaaggatggcgatgactgtgcacgtccttgctgggttggcttttatgttttcagctagcattttgcttcagattctggcatgtgcaatatataacaattggtggccaatgttatcagctctgatgtatgtgctggttcctatgccttgcttattctttggaggtggatccactcaatttctaatgagccgtgatggtggtggttggatagatgctgcaaaatttttgactggagcatcagctgttgggagcatagccattcctataatcctcaagcacgctcatatgattgagacaggcgcgatgctcattgaacttgtatcgntcttcatttntatatgtactgttttatgtttccaccaagcccgcccttgatgatgattg

SEQ ID NO: 266461 - DNA, 430 bp, Glycine max
ctccaattagggtttttgtgatctgcagctacgatgggtaagggaacggggagtttcggtaagaggaggaacaagacccacaccctctgtgtgaggtgtggccgccgcagcttccacctccagaagagtcgttgctctgcgtgcgcttaccccgctgcgcgcaccaggaaatataactggagcgtgaaggccattaggagaaagaccaccggaactggaaggatgaggtacttgcgtaacgtgcctcgcagattcaagagcggcttcagagagggtaccgaagctgcacccaggaagagaggagctgctgcctctgcctaagctttgaatgaatgacagcaatttttgctgggtcagtgaattataggagttaatgtttctgtgttggtgccaaactctttggaacacattttctttctgtcgttttaat

SEQ ID NO: 266462 - DNA, 414 bp, Glycine max
  unsure (1)..(414): unsure at all n locations
ggcgtcttcataaacgccgcccaaaacttctcatacccttttattcattccattcgtttctagggttttcttttctttgccgagaaaatgagagagtgcatttcgatccacattggccaggccggtatccaggttggaaacgcctgctgggaactctattgccttgaacacggcattcagcccgatggacagatgccgagtgacaagaccgttggcggaggagacgacgccttcaacacatttttcagcgagaccggcgccggaaagcacgtgccccgcgccgtcttcgtggatcttgaacccaccgtgatcgacgaagtccgaaccggtgcgtaccggcagctcttccacccggagcagctgatcagcggcatggaagacgccgncaacaacttcgcgcgtggccactacacc

SEQ ID NO: 266463 - DNA, 382 bp, Glycine max
cttcgtcaaaagcatcatgagccgctacgacagccgctccggcgacccagcttcctatcgtgatcggaggagtgattctgggctaggtgcacctacagggtttggtggttctgtacaacactcttcatcaaacaggagggattatgatgatggtgggtcaccaaagaggaacctcagtttggatggtttacctcattttgagaaaaacttctacattgagtcaccagctgtaagggcaatgacagatgctgaagttaatgagtatcggcagcagagggaaataactgttgaagggcgagatatcccgaaacctgtcaagacctttcacgatgcttgttttccagaatacgtactgcaagaaattacaaaagctggctttact

SEQ ID NO: 266464 - DNA, 383 bp, Glycine max
ggaaaaatggaaggtgttgagtcatttgacattgttctgaaggagcagaaggtgacagtgaaaggaaatgtggagccagatgaagttctgcaagccgtttccaaatctgggaagaagactgcattctgggtggatgaagcaccacaatctaaaaacaagcctttagaaagtgcacctgttgcctcagaaaacaagccttcagaagctgcatctgttgcctcagctgagcctgaaaacaagccttcagaagctgcaattgttgattcagctgagcctgtgaacaagccttcagatactgttgttgaaactgttgcttaaggcatttgtggttctatttttctatgtggaaataggtctgtttcatatagcattttatgtgcttt

SEQ ID NO: 266465 - DNA, 136 bp, Glycine max
aaaaaaaaaaaaaaaaaaaaaaaaaaaataaaaaaaaaaaaaaaaaaaaataaaaaaaagggaaaaataaaaaaaaaaaagggcgtacgatttggggggtcctgggttgcgttcccgtccttgccccgttttactt

SEQ ID NO: 266466 - DNA, 377 bp, Glycine max
cggacgcgtgggcggacgcgtgggaaaaactcaatatcaaattctttgtcccacaaaagatggggttcactcccacaagtactgcaacatgctttctcataatagcacctctggttgtgctatggtgttggaagctactaaagtgggtgtggctgaggccaaagagattggagagagcattaagggcacagggccttcaggggaatccctacagcctcttgattggggacactaaggaaatgtacacagtgctcatgcaagctgccagatctcaacaatctacaagttcttttctctctaaggataaggatgcagcaccacatatcacaacctttaaccatcacattgtcaacaaattcggcaagaattcatttttt

SEQ ID NO: 266467 - DNA, 431 bp, Glycine max
cccacgcgtccgcccacgcgtccgaaaagaaaatcctcaattttctgagcagccaaacactctctctctgtctctcgaaaattctcagtttgcagagaaaatctgaatcatgtcgtggcaagcgtatgtcgacgatcaccttctgtgtgacatcgaaggtaaccacctcactcacgctgctatcatcggccaagacggcagcgtttgggctcagagtaccgacttccctcagttcaaacctgaggagataactgccatcatgaatgactttaatgagcctggatcacttgctccaactggattgtatctcggtggcaccaaatatatggtcatccagggtggaacccgtgctgtcattcgagggaagaagggtcctggtggtgttactgtgaagaagaccggtgcggccttgatcattggcatttatgatg

SEQ ID NO: 266468 - DNA, 81 bp, Glycine max
aaaaaaaaaaaaaaaaaaaaaaaaaaaaaaaaaaaaaaaaaaaaaaaaaataaaggaaaagggaaaaaaaaataaaaaaaa

SEQ ID NO: 266469 - DNA, 274 bp, Glycine max
cgatttggcacatctagtagcaagcaagtggccaggggcacctaaagcggggagtggagacccattggaggatttctgcgagacaaaccctgctgatgaggaatgcaaagtttatgaatagaggagagctccttttctaacgtatcatgtgaaaaagaaggaaattgttcagacagtctatctgaggagagattttcaaagtttatattatttgcagccaataataagttttggcgtgactgaatgaatatcacccatatattgattgatattg

SEQ ID NO: 266470 - DNA, 377 bp, Glycine max
cactcccccaccagccccactcagctctcctccccctgcctcccctcctccttcatctccaccacccgcatctcctcctcctgcttctcctcctcccttttcaccaccaccagcaactcctccaccagcaacgcctccacccgcattgacccctacacccctttcctctccaccagccacttctccagctccagctcctgccaaggtggttgctcctgcactctctccttccttggctaccggccccagcctctccaccatctctccctctggcgatgatagtggggctgaaaagttgtggtcctttcagaagatgattgggagcttagtattcggatgtgctttgctgtccttgctgttctagacatcatcgatct

SEQ ID NO: 266471 - DNA, 287 bp, Glycine max
aatttactttgcaattatgctactcttcaaaagtggtcaaacatctgcgcgtcttttcggtgctgctatcatcttaaacaaggaccttggttgggatgaacactgaatcttatgggtaggggccgttcattgtagaagatctaagcttactttcacatgcatgcgacaatcatggtcttttattgtgagacctaaatataaaataatgcccgtcatgctaaatcaagttgactgcaacaaccccggcgtaactcaagttaatggccgtggggtacattctcatttca

SEQ ID NO: 266472 - DNA, 323 bp, Glycine max
  unsure (1)..(323): unsure at all n locations
gcttcacttggcaaccatgcttatcaccggaactagtatcataccctgctcgtagtcttggtgctgctatcatcttcaacaaggaccttggttgggatgaacactggatcttttgggtgggaccattcatcggtgcagctcttgcagcactctaccaccaggtcgtaatcagggccattcccttcaagtccaagtgattcaatcaaacggttcatgcttaatcaagttgggaacaacaacaacaacaaaaatcaagccaatgtttgtggggtttggtttcatttcattaagatgatctgnntatctcttttcttctttttaaa

SEQ ID NO: 266473 - DNA, 423 bp, Glycine max
attttgataattatttttctagttgataagccatggctactcgaggaaagcttgaggttgacgttgatctcaagtctaacgcagacaagtactggcaaacccttaggaactccactgaaatattccccaaggccttccccaatgattacaaaagcattgaggttcttgagggtgatggcaaatcacctggttctatccgccacataagttatggtgaaggttcaccacttgtgaagtcatcctttgagaagattgaggctgttgatgaagaaaagaaggtagtgtcgtacactatcattgatggagaactcctccagcactacaaaacattcaagggagacatttctgtgactccagttggcgatggatgcgaggtgaagtggagtgctgtgtacgaaaaagttagccatgatgtttctgatc

SEQ ID NO: 266474 - DNA, 417 bp, Glycine max
caaactcacgccaaaacatgtctacatctgatgtaaaaactatcttttcatatatgccaataaatacatggactggtgtgtaatatgattttacaggtgaatcaattccaatcagattgttccttaatccctatgagctgaccccaacacatcgtaacattaataacaaattcagagtgaagtactttataaatcttgtgtaggttgatgaagaggacaggcgatatttcaagcagcaggaaatcacactgtataggctgcaggaagaaacttcatgattacttatcattcggggagtgagtattattatgtttggtaacaaataacaaaaagattgtgatggacattgaagacctcttaaatcagggaatattctcgtgaatcatgttctctaaagtgtaaaatggcttggtatag

SEQ ID NO: 266475 - DNA, 417 bp, Glycine max
cacggtcactgatttgtgcaaatgatgtctttgcagaggaccaagtggtttccttttttcattgtccttgattccttcacatgtagtctctcccttgctatgtccagtaaccagttggagcagtttgcttcggaggaagaagtgtttcaactattccaagcgtggcagaaggagcataagcgtgaatatggcaaccaagaggagaaggcacagaggttccagatattccaaagtaatttgaggtacatcaaccagatgaatgcgaagaggaagtcacctacgacgcaacatcgtttgggtctgaacaagtttgctgatatgagtcctgaggagtgtatgaaaacctacttgaaagaaatagagatgccctactccaacttggagagtaggaagaagctgcacaagggtgatgatgct

SEQ ID NO: 266476 - DNA, 282 bp, Glycine max
cccacgcgtccgttttaagtcaaaaaaagcacactgcatattcatcaaagcatgatcaaagcacactgcctatcagactaacgttgttgtttaattagtccatgcatctgcatcttgggcaccataagattgtatataaaataaattatggcgtgttgtgtatgttgtgcaagacctggaacttcacctttctacgtacgtgtgctgttaggatgcagtgtgctttgatgatgctttgatgaatatgcagtgtgcttttttacgtctaaaaaggactcttta

SEQ ID NO: 266477 - DNA, 381 bp, Glycine max
aataggcgtttgaaaagacacttgtgctgtctccttgctctccatcgtaagatgtaagaaggatgaagacatgtctcgtggttattcaattacagagattactaaccatcaataaaataaatgtgaatctcacattaaacatcaccgaagtgataacgctgattccggtcactaagaccaaaccgtgggggcgattcgcggcggagattcgagatccgtggaagaagcagcgcgtttggctggggaccttcgattccgccgaggatgccgcgcgggcctacgacaaggcatcaaggaggctcaccctacccaaggccaaaaccaatttcccccccttccccggcccggcagaggcggaccaccactcgcagattccgttct

SEQ ID NO: 266478 - DNA, 284 bp, Glycine max
acagcatctctatccggaaccatggtgagcaccgttttcatgaggaggcaaactatgggcaccgctagcataaagacattggacaacgttggtgaagctctctttggtctgaaaagtggaccaggtgatcgtgtcacttgcatggcctcgtacaagagaagctcataaccccacaatgagaagtggagtttgaatgcccagatgatgtttttatcgttgacaaggcgggagacgcacgcattgaactttcctactcgtgcagggccggttcttgcgttttctgt

SEQ ID NO: 266479 - DNA, 409 bp, Glycine max
ggagcaaggaacagttacttccctacttgaagagaagggtgttattaaaggtgtgcactacaaaacgaaggatagtcaagaattatcagcttgtgcaccccttaccattgtttgtgatggctgtttctcaaacttgcgccgttctctttgtaatcctaaggtagatgttccctatcatttcgttggcttaatattggagaattgtgaacttccttgtgcaaatcatggccatgtcatattgggagatccttcgccagttctgttctatcggataagtagttcagaaatccgttgtctggttgatgtccctggtcagaaggtcccatctatttccaatggtgaaatgacaaattatttgaagacagtggtagctccatagattcctcccgagcttcatgacgcattcata

SEQ ID NO: 266480 - DNA, 387 bp, Glycine max
cccacgcgtccgcaaggcaagcgcttctcctctttgtgttctggctatgcttcttggcaagagttagatcggacgaggattgcgtgtacacggtgtacgttcggacgggttcgatcatcaagggaggcaccgattcagtaattggtctgaagctatacgacaagtccggctacggcatatacatcaccaacctcgaggcatggggcgggttaatggatccgggtcacaactactacgagcggggcaacctcgacatattcagtggtagaggcccttgcttggaagcacccgtttgcgaggccaacctaacttctgacgggtcggggccccatcacggctggtacgttaattacgtcgaggtcaccaccactggggtccacgcgcctt

SEQ ID NO: 266481 - DNA, 416 bp, Glycine max
cccacgcgtccgaacaaagtctacaacatcacattctcagttggagatgccaaaaatgggtgccatggatcaatgatggttgaagcatttgccgccaaagataccttcaaagctcccttcaaatctgaagggaagggaacattcaagactgtaagcttcaagttcaaagcaattgcaccaagaactagactcactttctacagctccttctaccataccagaattgatgactatggttctctttgtggccctgttgttgatcaagttatagtgttccctgtggcctaaatatgagttccattccatctttactataatatgtagtaattgagatttttgcaaatcacttgagcttgtcttttttataattgcaagaagatgaaagatattctcaactattactgaatcttggtata

SEQ ID NO: 266482 - DNA, 400 bp, Glycine max
ggtttgatgtgtgagtgatgagagggtgagttgggaagatggagggtgcacaggaggagctagaaagaagaagcaagtttctcaaaagcttgatacaaaagaagaaaaccatagagcaacaagagcagcatgatcacctacaacacaataacgttcgtgtcagagcttgtgacatgcctctccctcttcagaaccgtgcctttcgttgtgcacgtgatctcctggattctatgccatcaaagaagcttgatagtaaacgcctggctctcacacttaagaaggaatttgatacttcgtatggtccagcttggcactgcattgtgggtactagttttggttcctatgttactcattcctttggtggtttcgtgtatttttccattgacaaggtttatgtcct

SEQ ID NO: 266483 - DNA, 156 bp, Glycine max
gagaagcaaggacctaggttctttcgttgctccaagtttggtagcatggcaaggccgtgcgcaccatatatttcctgttcggatgaacactgtctatcgtgcacgtactcccgacgaggaatgcgcacgacggaagcttgctgtggaagaacacaa

SEQ ID NO: 266484 - DNA, 417 bp, Glycine max
cccacgcgttcggtttgttgttgtaactcgttcttcttcttttgttgttctgtgtttgtgtttgttttttctctcacctgaaaatgtcttgctacggtggtaactgtggttgcggaagctcctgcaagtgcggcaacggctgcggaggctgcaagatgtacccagacttgagctacactgagtcaaccaccaccgagaccttggtcatgggagtggcacctgttaaggctcaatttgagggtgctgaaatgggtgtgcccgctgagaacgatggctgcaaatgtggaccaaactgctcctgcaacccctgcacttgcaagtgaggtgttgggagagcaagcttcaagcagagatagcccttaattaggaataatgataaactattaatgtgtagctaaaaacttatgtattatgtct

SEQ ID NO: 266485 - DNA, 421 bp, Glycine max
cccacgcgtccgcccacgcgtccgcccacgcgtccgagaaaagaaggcattaggttaagagtgaaggcagtgagcgaaagagagcatagtaatacttactgagtgcttacagttgctgcgtcgcaaggtaccggcggcgacggagaactatcttctcaattttcgatcactgcattggttctgttgtcaagggttttgttcttcctgacttgcatacttgatggcttcaaagttgcagaagttgcaggccacagcatctcaagcgtctcaatttgtatgcagtcgtggaactaactactacaagcaattgctggaacagaacaagcaacacattcaggagcctcctacagtagagaaatgcaacctgttggcaaagcaattgttttacactcgccttgctagtattccgagtcgtaatgag

SEQ ID NO: 266486 - DNA, 338 bp, Glycine max
cccacgcgtccggcccatctcatgtgctagatttccaaccaggagaggcctttgtggtcagaaatgttgccaacattgtcccaccatatgaccagtcaaaatacgctggaactggggctgcagttgagtatgctgttttgcatcttaaggtgtcggagattgtggtcattggacacagtgcttgtggtggtattaaggggcttctgtctttcccatatgatggaacctactctactgattttattgaggagtgggtcaaaattggcttgcctgcaaaggcaaaggtgaagacacagcatggggatgccccttttgctgagttgtgctcacactgtgag

SEQ ID NO: 266487 - DNA, 354 bp, Glycine max
cccacgcgtccggcaacccaagcctctctcttaaccccacccctctccggtctcaaagccagcgaccgcgcctccgtgccatggaagcaaaactccagcctctccttctccagcccgaagcccctcaagttctccagaacaatcagagcagcagccgccgacgagaccacagaggcaccagcaaaagtagaggctgcaccggtcgggttcaccccaccagaacttgacccaaacaccccttccccgatcttcgggggcagcaccggcgggctcctgcgcaaggcacaggtggaggagttttatgtcattacgtgggactcacccaaagaacagatctttgaaatgcccactggc

SEQ ID NO: 266488 - DNA, 387 bp, Glycine max
cggacgcgtgggtgggacagccacattagcccaaagaattcaaaatggcttcaggagaaccttacagacatggatgccaaagtaaaagcaatgatcaagcttattgaagaggatgcagactcatttgcaagaagggcagagatgtactataagaagcggccagaactcatgaaattagttgaggaattctaccgagcatatcgtgcattagcagagagggacgatcatgcgacaggggagctccgcccagcccataaaaccatggcagaagcatttcccaacttgctgactgatgattcaccatgtaattcttcagacactggagctgagccaccgcacacaccagaaatgccacatggcccacatccaattcgtgcattattggac

SEQ ID NO: 266489 - DNA, 395 bp, Glycine max
gtttaacggttgaaacgaagcgaaacttccaacttcatcttcaaccctgcgctgcttttgaactgatttgtgctagtttgcaagggaagctcattgattgtaaactgttaacaggcatggcaagctctttgacaacattagccattacctattctcctgtcaacaatggttccaggggtttcagaaagtctgttaatgcttctaaaggaagatgttgcataaaagcaatgaggatagagaaatccttggaggaattgtacaatgtgaaggtggaaagaaaagttcctcctgagagactagccgagcttggagtttcaaaatggtcggtgtggaagactgggaaaagcaggttgccttgggactggcaggtaaaccaactggtgtacataagaaga

SEQ ID NO: 266490 - DNA, 372 bp, Glycine max
tgaaaacctacttgaaagaaatagagatgccctactccaacttggagagtaggaagaagctgcagaagggtgatgatgctgactgtgataatcttcctcattctgtacataggagggacaagggagctgtcactgaagttagagaccaaggaaaatgccaaagccattgggctttcagtgtcacgggggccatagaaggaataaacaaaatagttactgggaatcttgtttccctatctgtacaacaagtcgtggattgtgaccctgctagccatgcgtgtgctggaggcttttacttcaatgcgcttggttacgttatagaaaatggtggcattgacacagaagctcattatccttacacagcccaaaacg

SEQ ID NO: 266491 - DNA, 336 bp, Glycine max
gatcgagataactagaaacagcgtgatgaaaatgaaggtccttgctttcttcgttgctacaattgtggtagcatagcaatgccatgcgtacgatatgttacctatacgaaagaacactggctatcgtgcccgtactcccgaggggaaatgcgcaagttggaggcttgctgtggaagcacacaacatctttggctttgagaccattcctgaagagtgcgttgaagcaacaaaagaatacatccatggcgaacaatatagatcagactccaaaacaggtaaccaacaagcttacttttatgccagagacctcgaagtccatcccaaagacacatttgt

SEQ ID NO: 266492 - DNA, 423 bp, Glycine max
cttgtggacttggatgctgctgtgtgcctctgcacaaccattagggctaagattcttaacatcaatatcatcatccccattgctcttcagcttctcattgactgtggcaagaccccaccagatggattcaagtgtgcagatagttagttaatatataattaattattatggaattgcataactcatgcatgaataaaaacaagttgagaagatcgatgtagtgaaggaatggtctttcgtttctctttcatcaagttgttgtataccaaaggccaaggacaacataattgtactatgactctatgaggggccaatattggtatacttgttcaaactacataattttctgatctgccttgtataccaagtcatgcaatattggcatagcatccttttaattaatttctctcgttttctttggct

SEQ ID NO: 266493 - DNA, 290 bp, Glycine max
actaagatggcttcctttgtatccttcctagtgctgcttcttgcagcccttatcctcatgcctcaagggcttgctacttactacaaaccaattaagaagccaccagtgtacaagcctccagtgtacaagccaccagtgtacaaaccaccggtttataagccaaaaccaccggtttacaagccgaaaccaccggtttacaagccaccatataagaagccaccatacaagaaaccaccttatggaaagtaccctccagtagaggacaacacccatgcctaaagcaagcaatg

SEQ ID NO: 266494 - DNA, 400 bp, Glycine max
cccacgcgtccgagccactctaaagaaaatggcggtgcctctactctcgaagaagatcgtgaagaagagggtgaagaagttcaagaggcctcagagtgacaggaaaatttctgtcaagacaaactggcgcagaccaaagggtatcgattcccgtgttaggagaaagttcaagggatgcactttgatgccaaacattggttatggttcagacaagaagacccgccactatctccctaatggttttaagaaatttgttgttcacaatgtgaaggacttggaactgctcatgatgcacaacaggacttactgtgctgagattgcccacaatatatccacaagaaagaggaaagatatcgttgagagagccgcgcagcttgatgttcgtgtgacaaacaaaaca

SEQ ID NO: 266495 - DNA, 377 bp, Glycine max
  unsure (1)..(377): unsure at all n locations
aggaggtgcaggcagctgagctggagcgcactttcattgccattaagcctgatggagtgcagagaggcctgatttctgagattatatctcgttttgagcggaaagggtacaagcttgtgggaattaaagtagtgattcctaaaaaggaatttgcccaaaggcactatcacgacctgaaagaaagacccttcttcgatgggctgtgtgattttctaagctctggccctgttattgcaatggtgtgggaaggacagggagttatttcctatggccgaaagctaattggagccacagatccacagaaatcagaacctggaaccattaggggtgatcttgctgtntgttgtggaagaaacatcatncatgggagtgatggt

SEQ ID NO: 266496 - DNA, 317 bp, Glycine max
  unsure (1)..(317): unsure at all n locations
ggatatgggaaccacctgaatctaacggggtatttctgtcaaatcaccgacatgagcaagaactgcaagtggtgtcaggggattgtgctcctaaaaagcctgtgcaggataatgatgtaatgaataaagtgtacaaaacccatggagccattcaatctctagacaagcaagtttccatgcttcagatggagctggcagcagcaaggagtactcgagaacacaagatttcggatggttcagctaacaccttggcctcggnggtctccactgaaggccctcccaggaagaaagtgtttgtagtgattggcataaacact

SEQ ID NO: 266497 - DNA, 250 bp, Glycine max
gtgaatgagacacgctggctaacaaccctgcaacggaccatgggcagactcttagctgtatgagggacaggcatactgagctctacagacatggaagtctctgacaggaacagataaccatagtggtacacgtgacacacagaacgcggtgactactggtctgctgaagcctgcccattagagacagcctagaagcatcgttcgaagtctgctgagcatgcctagattgtcatactcagcaacactgatg

SEQ ID NO: 266498 - DNA, 432 bp, Glycine max
  unsure (1)..(432): unsure at all n locations
cccacgcgtccgcccacgcgtccggaaactctaacgaaagagcgagaaagcgaagacagccatggcgtcgtttcttcaatcgtttctggatccgaagaagaactggttcgccgctcagcacatgaaatccctctccaaacgcctccgcaaatatgggctccgatacgacgatttgtacgatccttactacgatctggatgtgaaggaggcgctgaatcggcttccgaaagaggtggtggacgctcgccacgcgcgtcttaaacgcgccatcgatctttccatgaagcacgagtacctncctgacaatctgcagtcaatgcaaacaccattcaggggctaccttcaggatatgctgactcttgtgaagagagagagagcagaacgtgaagcattgggaggtttggccctatatcaacgatccattccttgagt

SEQ ID NO: 266499 - DNA, 181 bp, Glycine max
cccacgcgtccgaccaactttgtatccgttgttaaatggcttgacaatttcaattttgtttgttgtttgcatctgaaaaaaaaaaaaaaaaaaaaaaaaaaaaaaaaaaaaaaaaaaaaaaaaaaaaaaaaaaaaaaaaaaaaataaaaaaaaaaaaaaaaaaaagaaataaaaaatgaaa

SEQ ID NO: 266500 - DNA, 462 bp, Glycine max
  unsure (1)..(462): unsure at all n locations
gttttgttctttcctagcaattcggcgcaatcgtcttctgcttcaaggaaggagagcttgatatgctctatcaacaaggaaaatgtcaggtgaagaggttgttgttgcagctgagccagctgctgccatcccaggcgagcctatggatatcatgactgccttgcaacttgtgctcagaaaatctctggcttatggtggtcttgcacgaggccttcacgaaggggcaaaagtgattgagaagcatgctgcacaactctgtgttctagcataagactgtgaccagcctgactatgttaaactggttaaggccctntgtgcagagcacaatgttagcctgctgacagttccgagtgcaaagacccttggagaatggtctgccttgtgcaagattgattccgaaggaanagctcaggacgttactggttgctcctgtgtggttgtgaaagatcttggtgaggagca

SEQ ID NO: 266501 - DNA, 393 bp, Glycine max
aggggttcaattctagctagttctattacatcgtccgcgaccatgaacatggcgatcgtgcgtctgttcatggttttcgcagtttcatcagctttagacatgtcaataatatcacatgacaacgctcatgcggatagggccacgaggcgcaccgacgacgaggtgatgtcaatgttcgaggagtggctggtgaaacacgacaaggtgtacaacgcgctcggtgagaaggagaagaggtttcaaatcttcaagaacaatctgcgctttatcgatgaacgaaactctctgaaccgaacctacaagttgggactcaacgtgttcgctgatctcaccaatgcggagtacagagccatgtacctgcgaacctgggacgacggtccgaggttggacttg

SEQ ID NO: 266502 - DNA, 383 bp, Glycine max
cccacgcgtccgctttgttgttgttgctctgtgccaatgtctttgtagccaatgtggttgcggggaatgtggcaactgtgggaaatgatgaagaaaagaatgtagggtttgtcggatgagcaggaggcgggtttggtgcacgaggtggatttggcggtggtggaattggacaccactagagcgttgcgaacgttgcatgcatgacaaagttatattttaacgtcctttgtattatccatgataattggtttattgaaaaatattgcgcttgtaagacagatagaattaattattaatgttggcttaataatattaacgtactccgtttcttgtaataattaacgttgaatgaaataaccagagatatatgtactctttttgga

SEQ ID NO: 266503 - DNA, 380 bp, Glycine max
tcgcggcgagacgagccgtttctaattaatgataggtgtcaagtggaagtgcagtgatgtatgcggctgaggcatcctaacagaccggtagacttgagcaaacttgaaatggctgcattgtggagatattggcgacattttaatctagtggatgcggtcccaaacccatcaaaagagcagctagtagatgttgttcagaggcatttcatgtcgcagcaaatggacgaattgcaggtgattgtgggattcgtccaagctgcaaagaggcttaagactgtgtgcaaatgagaagaaatgatattttgataaatgaaattgtctatgctaacaaagatagtgtatgtaatatccactttccttagtattatggtaatatttat

SEQ ID NO: 266504 - DNA, 375 bp, Glycine max
cccacgcgtccgggcacattttggcaatgcaatggaaaagctatcggttcagggtcagaaggtgccgacaggtctctgcaagaacaatacaacaaggacctaactcttcaagaagctgagactattgctttatccattttgaagcaagttatggaagagaaggtcactcccaacaatgtcgacattgccaaggtggctccaacatatcatctttataccccctctgaggtggaagctgtgataagtcgtctatgattttcttttcgtgactttctctattcaacatttgtgtttcctatcattcctgcctgacgtctaattattgagtattatgcggaaaccttttttgtgggtgatgtttacatgtgctacact

SEQ ID NO: 266505 - DNA, 406 bp, Glycine max
aatataactaatattctttagaataatcaaaaagaatattaaattcaaataaattttagatagaagaaagacttaaaaaggaggatttgaaatgcgagatctaaaaacatatctttccgtggcaccagtagtaagtactctatggttcggggctttggcgggtctcttgatagagatcaatcgtttttttccagatgcattgatattcccttttttttcattctagttattgacacggaaaggggtgaagaagattatagatccaattaagtattaaatatatgtaattaatatgtaattaatctcctcttctttaatttcggcttttatttcctcctttttttacaattggtattagaataagttagggaaaaaaaaaataaaaggccgccggcccttttttttt

SEQ ID NO: 266506 - DNA, 406 bp, Glycine max
  unsure (1)..(406): unsure at all n locations
aactaaacacaaaccccaaaaaccaaaatcacaactcccaaagcaaaaacccaaatcccaaatgagagtagtaacatgagatgacagacgaccgcgtgcatccaatcccaaacctagctatgtctccggccaccgcccactggacctctgacgccatccacggcggacccctccgtcgtgtcgacctcgactccggcaccaacggctgggccttccctcccggtgacctcttcctcctccgctcccccaattatttcaccaaacgccagaaatcacccgccggcgactacctnctctccccctccggtatggactggctcaaatcccaatccaaactcgacaacgtcctctcccggcccgacaaccgcatggcccaggcccttcgncaggcccaggcccaaggcaa

SEQ ID NO: 266507 - DNA, 428 bp, Glycine max
  unsure (1)..(428): unsure at all n locations
cccacgcgtccgcttttcttgtttccttttccattcttctttttctctctgtactcaaactcacgtccccacttatttatacaatgtcggcttacaaagaccaggatacccgtcttcatggcatcaaaactaagattcgtgtcgtccccaatttccccaaatccggtattatgttccaagacattactactctattgcttgatcccaaagcatttaaggacacaatagatttgttcgttgagcggtacaagggcaaaaacatttctgttgttgcaggaattgaagctcgaggttttatttttggtcctcccattgcgctggctataggagcaaagtttgtaccattgaggaaaccaaagaagttgcctggaaaagttatttctcaagaatatattctggaatatggaagggactgtnctgagatgcat

SEQ ID NO: 266508 - DNA, 432 bp, Glycine max
gcctttcatagtgagatagccctagaaatgtttcgtgaatctttgtttgctctctttctacgttctgccttctcctcctcactcctacctttaaccactgctcaagattacgttctcgacacggacggtcacgcggttgaaaatcacggtacatactatttgttgccagcgaaatcaggaagcggcggtggtggaatagaggtagccgcaactggcaaagaaagttgcgctctcactgtagtgcaatctctgaacgaggactccatggggctaccattgaagctttcaagcccatccatcactacgtctcacttcaccgaatacacttcgttgagcatcgagttcacttcggcgccggcgccgtgttcgtccgcttcggagtggaccgttgtcaagggattacccgaaggacgcgccgtttaacttaacgat

SEQ ID NO: 266509 - DNA, 301 bp, Glycine max
tctcccacgcgtccggtttgttgtgagctataatctagtttatcgtgaggagaatatgaagttcggctggttctatatcgctgcactagcactcttaacatatccatgcctatgctcattcataccaatggctacctttcatcaaaaaatactgctaccgtatcccttgatcaaatttttaaatctcaacgagaacacatatctacatttattttaaaacctgtacatggtgaagcctattctatatatgctccaaatcactatctgaaatctagcatagatatcctgtcccaatataatg

SEQ ID NO: 266510 - DNA, 331 bp, Glycine max
cccacgcgtccgcaaacctagtgcatagcatattccagtgtttttcatttcatcgtgcattcggtggccaccacagcagctctatccggaaccatggtgagcacctccttcatgaggaggcaacctatgaccaccacaagcctaaagacattccccaacgttggtgaagctctttttggtctgaaaagtggacgaggtggtcgtgtcacttgcatggcctcgtacaaggtgaagctcataaccccagaaggagaagtggagtttgaatgcccagatgatgttttcattgttgacaaggcagaggacgaaggcattgaacttccctactcgt

SEQ ID NO: 266511 - DNA, 232 bp, Glycine max
gtttgttgttgtaactcgttcttcttcttttgttgttctgtgtttgtgtttgttttttctctcagctgaaagtgtcttgctgcggtggtaactgtggttgctgaagctcctgcaagtgcttcatcggttgctgaggctgcttgatgtacccagacttgtgctacactgatttaaccattaccgagacctttgtcatgtgagtatcacctgtcaaggctcattttgagggttc

SEQ ID NO: 266512 - DNA, 424 bp, Glycine max
cagaggctttctcactacctttccagagattttcattaatataggaattcttcttggtgatgtgtgcaaactattcattttcaggcttttcaccacacataaactggaggataatgcttgctgtggggattttgccctcagtcttcattggatttgctcttttcatcattcctgagtcaccaaggtggttggtaatgcagaaccgaatcgaagaagcaagatcagtgcttttgaaaacaaatgaaagtgatagggaagtggaggagaggctagctgaaatacaacaggctgctggtgtggccaattgtgaaaattatgaggagaaacctgtgtggtatgaacttttgtttcctttcgcctcgcttcgtcgaatgatgatcacaggaatagggattcagtggtttcaacagaattctggaattga

SEQ ID NO: 266513 - DNA, 370 bp, Glycine max
ttgagcttaaaccctagccgctcttctcttcattcttcactttggaaacaatcataatggcgttgtgtaataaggttggaaatgtcttgaggcagggtgctgctcgcagcacacatgcccctgttgcgtccatgcttaattacatccgctgcatgtcttcaagcaagcttttcattggaggcctttcatatggagttgatgaccagtctcttaaggatgcattttctggctttggagatgtggttgatgcaaaagttataactgatagagacagtggaagatcaagggaatttggatttgtcaacttctccaatgatgagtctgcaagttcggcactctctgcaatggacgggaaggatctaaatgggcg

SEQ ID NO: 266514 - DNA, 331 bp, Glycine max
agcagaaggagcaaaagcaatggcgccgaagaagccgagaaccacgacaaggaaccctgatttggttagggggattggcaagtattcgaggtcgcagatgtaccacaagaggggcatctgggccatcaaggccaaaaacggtggcgttttgccccgccacgatcccaagcccaagcccgaggccccggcccagaagccgcccaagttctaccccgcggacgatgttaagaagcccctcgtcaacaagcacaagcccaaacccgcgaaactcatggctagcattactccagggactgtgttgatcctgcttgctgggaggttcaagggaaag

SEQ ID NO: 266515 - DNA, 381 bp, Glycine max
tcgtccacgcgttcggtgtgctaactcaggcaattatatccatcaaatcaattataaaattagaaccatccagttatgagaaggttataattcagttagtctgtagcttggataaaatcaaggttccagctgcccgtgcaatgattatttggatattgggggagtattgttctttgggtgacataattccaaggatgttgagtacagtacttaagtatcttgcccggtgttttacttcagaagcattagaagctaagcttcagtttcttaataccactgcaaaggtcttactgtgcattaaaggagaagatattttgaccgtgagaaaagtttggagttatgtaattgaattggccgagcgtgaccttaactatgatattc

SEQ ID NO: 266516 - DNA, 392 bp, Glycine max
  unsure (1)..(392): unsure at all n locations
gttccttcgattcattccatttcttccaaaatggccaaagacccagttcgcgttctcgtcactggagccgcagggcaaattggatatgctcttgtccctatgattgctaggggagtgatgctgggtcctgaccagcccgtgatcctccacatgcttgacattcctccagcagcagagtcgttgaatggggttaaaatggaattggtggatgctgcattccctcttcttaaaggtgttgttgctacaaccgatgtggttgaggcatgcactggggtcaatattgcagtgatggttggtggattccctagaaaagaaggtatggagaggaaggatgtgatgactaagaacgtctncatttacaagtcccaggcttcttgcccttgaaagcatgc

SEQ ID NO: 266517 - DNA, 364 bp, Glycine max
cccacgcgtccgctttgctattacctctttttccaaactctaaaaatttttagttccacaaaacgaaaccaaaatggcagcagcctcggcctcatccaccatgatatcaacaccagccttatctccaagcacaagcatccaaaagcaccatcatttgaagccatccaacgtgtgctttcaaggccttagacccctcacaaggttcacaaccaaagtgagcagcaccaccaaaagggttattccaaagggtggtgtcggtgttagagctgaactcaactcagcacttgtcataagcctcagcactgggctctccctcttcttggggaggtttgtgttcttcaacttccaaagggagaaccgtgca

SEQ ID NO: 266518 - DNA, 360 bp, Glycine max
caggatgatttcttgccaagaactgctactccattggaagatatattcaaatcaatatggtgcgggccctgcttattgttcttggtttgcctgagagacaccttcatacctgagggtagaaagcttagagatccaaggaggctttatgcacctggaagaatgtaccatattgtggagagaaaattttgcagatgtgggagatttcctcctgaagtgaggactgctattcccgttgatggaagatttgagcatatagtcttgtcctgtaatgcaacatcagatcatggaattatttggattgaagggaacctgataaagctttacaattaatgaaagctcagagctctgaaactgtgacag

SEQ ID NO: 266519 - DNA, 424 bp, Glycine max
cggactcgtgggcacaagccaagtgaaagtgagaaaaaataaaaatcaaagagcataatgtgagggatcattcacaagattggggagacccttcatgtgggagggcacaagaaggaggaggagcataagggtgagcaccatgctggagaatacaaaggggagcaccatggtgaacacagtagtgagtacaaaggagagcatcatggtgaacacaaagctggagagtaccatggtgagcacaagccagagcacaaagaggggttcctagacaaagtcaaggacaagatccatggtgagggctgcgccgccgaaggcgagaagaagaagaaggagaagaagaagaaggagcatggccatgagcatggccatgacaagagcagcagcaatgacagtgattaaactgctgcatacctatatatttaaa

SEQ ID NO: 266520 - DNA, 344 bp, Glycine max
tcggagaatatcatagttgaaatttaagtgttcctttggtacttgattcgaacagttgttattcggaagctaagatttgatttaaaaaaaaaaaaaaaaaaaaaaaaaaaaaaaaaaaaaaaaaaaaaaaaaaaaaaaaaaaaaaaaaaaaaaaaaaaaaaaaaaaaaaaaaaaaaaaaaaaaaaaaaaaaaaaaaaaaaaaaaaaaaaaaaaaaaaaaaaaaaggggggcccttttaaaagaaccaaagtttaataaccgggaattgaaaattaaaaccttttaaaaaggggaccaaaaataaaataaaggggccgctttttaaaaaattgagaatgggaaaa

SEQ ID NO: 266521 - DNA, 403 bp, Glycine max
tcgtccacgcgtccggggaaaagtagtagaagagaagatgtcgaccgtaccaggacagctcatcggggagatcgtgaagaagaacaactcctttttggtgaaagagttcggaaggggcactcagagcgtgcagttcagcagagagcccaacaatctctacaacctcaacactttcaagtactccggtttggcgaaccagaaaactgtcactgttcaacctgctggtaaagaccagtccgtgttgctcgcaacatccaagacaaagaagcaaaacaagcctgctgctttgcttcacaaatctgtcatgaaaaaggagttccgtaggatggcaaaggctgtgcaaaatcaggtagcagataactactacaggcctgatctcaaaagggcagctctggcaagattg

SEQ ID NO: 266522 - DNA, 349 bp, Glycine max
gaactactttcttacatgaatgtgctttatgaaatttgtccatacttcaagtttggttacatgtcggcaaatggagcaattgctgaagctctgagggaggaaagtgaagtccacatagttgactttcagattggccagggaacccagtgggtgagcctgattcaagctcttgctcgccgccctgtaggccccccgaagatccgaatatcaggtgttgatgactcctattcggcctatgccaggagaggagggcttgatattgttgggaaaaggttatccgcacttgcacagtcatgtcatgtaccctttgagttcaatgctgtaagagtacctgttactgaggtgcaac

SEQ ID NO: 266523 - DNA, 329 bp, Glycine max
cggacgcgtgggcggacgcgtggggtgagctataagctagtttatcgtgaggagaatatgaagtggtttgtgttctttgttgctgcagtagttttggtagcatggccatgccatggcgcaggctaccaaaggttccctctccgaatgaaaactggctatggtgagcgttcttcggaggtaaaatgcgcaagttttaggcttgctgtggaagcacacaacatccgagcctttaaaaccattcctgaagagtgcgttgaaccaacaaaggactacattaatggcgaacaatttagatcagactctaaaacagttaaccaacaagctttctt

SEQ ID NO: 266524 - DNA, 265 bp, Glycine max
aattgaaattttaaaaatgactgggataaacttaagaattcaattattgaaattgaataagtaaacaattgaattggattggtcgaatggtatcaaaaaaatggagtactaactcccatttcttatttattattgaattaaccgatcaacttgctttgttatcgaacatttctttttgatttcaaaaattttccggaaaaaatttgaatctatttttatatgcgaatcaatcctactacttctggtcctgaggtttctgcgcttg

SEQ ID NO: 266525 - DNA, 359 bp, Glycine max
tcgcccacgcgttcgcccacgcgtccgacacaatcgaagccaagtgtacggtccacagcttcaagagctacacgaagctcgatgctgtcggaaacgacgatttcttctgtcgttttgagtacaattcctccaccggcgccttcaatcctgatagagttgctgtgtattgtaaatgtgagatgccttacaaccctgatgacctaatggtccaatgtgagggctgcactgactggttccatcctgcatgtatagacatgactgtggaagaagccaaaagacttgaccacttcttttgtgaaaattgctctgctgaaggtcaaaaaaagttgcaaaactctcattctgcttctagacactca

SEQ ID NO: 266526 - DNA, 371 bp, Glycine max
atcttcctctttttctcaaccaaaaggggttcaattctagctagttctattacatcgtccgcgaccatgaacatggcgatcgtgcttctgttcatggttttcgcagtttcatcagctttagacatgtcaataatatcacatgacaacgctcatgcggatagggccacgaggcgcaccgacgacgaggtgatgtcaatgttcgaggagtggctggtgaaacacgacaaggtgtacaacgcgctcggtgagaaggagaagaggtttcaaatcttcaagaacaatctgcgctttatcgatgaacgaaactctctgaaccgaacctacaagttgggactcaacgtgttcgctgatctcaccaatgcggagtacag

SEQ ID NO: 266527 - DNA, 318 bp, Glycine max
gcgaattcaagcactttgtaattgttaagttcaaggaaggtgtggccgttgacgagctcacaaatgggatggaaaagttggtcacggagattggtgctgtcaagtcctttgaatgggtacaagacattgaaagcctagatgtgttgagacaaggtttcactcatgcattcttgatgacattcatcatgaaagaagactttgtcgcatttcagagccacccaaatcatgtcaagttctcgacatagtattcggcagctattgagaatattgtgctactggattacccatctactcttgtgaaggctccatcatgatcct

SEQ ID NO: 266528 - DNA, 339 bp, Glycine max
gacaggttcttcttagtgtgcaaggggcaggagcggttccgcgtgaacgacgtcgtgcggacgaagccgtgcctggtggggcgggtgacgtggctggaagacaggccgtccgagattaatgtcggaggcgatgacgtggaggggctggcgcgtgaggtggaagggtacatgaaggacgtgataaggttgtcgaataggttgggagggaagaagggggagaataaggagattgggaacttgcgacggaatctttttccgacgccgttttcgttctttgtcggaagcacgttcgagggtgctccgagggagcaacaagcgcttttggagttggaggacact

SEQ ID NO: 266529 - DNA, 383 bp, Glycine max
cccacgcgtccgcccacgcgtccgcccacgcgtccgagaaaagcaaaatcgaattatcatagaaggaagtgaattgaatttcattgacagagtcagagtgaagtgttgcgcaaatctgaggtgcgcattgcattgtggttgatttgtaagaatggcgccagtgtcggctctcgcaaagtacaagctggtgttcttgggtgatcagtccgttgggaaaaccagcatcatcactcgcttcatgtacgacaaattcgacaacacttatcatgctacaatcggtatcgattttctgtcaaatactatgtatcttgaagatcgaactgttcgactgcagttgtgggatacagctggacagggatggatttagaaatcttattccaagc

SEQ ID NO: 266530 - DNA, 409 bp, Glycine max
gaaacttgggtgcgattccttcactcacaacttcaacacatcactatggctcttctgagtcgagcctcttcacgcttccctcagctggtttcccctcaaagggtagtttcactccacacaacgctcccatctctgaacgcatccccatccacagccacgcctacaccatatgccccgccaccgcctccgtccgctttctctcccgccggcgtttcgaaagcggcggagttcgtgatctcgaaggtggacgatctgatgaactgggcccgccgcggctccatctggcccatgaccttcggcctcgcctgctgcgccgtcgaaatgatgcacaccggcgccgtccgctacgatctcgaccgcttcggcatcattttcaggcccagccctctgcagtctgattgcatgatcg

SEQ ID NO: 266531 - DNA, 358 bp, Glycine max
atggctacagcgtgaatggctacagtggtggaaattttgcaccaggtagatgttctaactacgttggaaaatgccctgctggtgattcttccaccgagccctacattgttaaccaccacttaatacttgctcatggagcagcagtcaattgctacaagaacaaataccaggctcatcagaaaggacaaattggagtcaccatagtgactttcttctttgaaccaaaatctaatagtgatgctgatcgcaaggcagcaaggcgagctctggactttatgtttggctggtttgctaatcccattacatttggtgactatcctgagagtatgagatctttagttggttctagactccccac

SEQ ID NO: 266532 - DNA, 362 bp, Glycine max
tcgtcaccacaataattaagaaaaaataatagtaataattgaagaaaaaacaagaaaaatgatccaaggtaggtatttgaattatttgtttttctttgtttcttgtaaaaacaaaaacaagggcatgtggtgtgaggataattaaggcttgggtacgtacgtaggtgattattcattgtcaaggtgatattccttttttagcctttgctggaagccgtaataaccgaggtaccacttgacgaactttctgagaccggtggcgagatcggtggtgggattgtaagagaaatccctgtaggccaagctgacattggcgtgtgtgaagggaacgtcgccgtttgatggcatcttaatgacgtgct

SEQ ID NO: 266533 - DNA, 335 bp, Glycine max
gtttcttctctctctttcgctttcaccgcaacacaacccttgatgttccgtgttcaggtgaaacgacaccggtttacccttactcttctcgggacagcatctagcacgttgtagaaaatatggccaagcatcatcctgatttgattatgtgccggaagcagccagggattgccattggacgactgtgcgagaaatgtgactgcaagtgtgtgatctgtgactcttatgtgcgtccttgtacgcttgtgcgagtttgtgatgaatgcaactatggatcatcttacggtcgatgtgtcatatgcggaggagttggagtatctgatgcctactactgc

SEQ ID NO: 266534 - DNA, 336 bp, Glycine max
gggtagggcagagagagagagagagagagagagagagagagagaatgggagggtgggctatcgcggtgcatggtggcgctggtgtcgaccctaatctcccactcgagcgccaagaagaagcgaaacaacttctcacgcgctgtctcaatcttggaatctctgctctaaattctaatcttcccgccatagatgtcgtcgaacttgtggtgagggaattggaaacggatccgctgttcaattcgggccgtggatctgccctgacagaaaaaggaacggtggagatggaggctagcatcatggatggtccaaaacgacgatgcggcgcccgtttcggtc

SEQ ID NO: 266535 - DNA, 381 bp, Glycine max
  unsure (1)..(381): unsure at all n locations
attcaatttcctccctttcctcttcctcaacatcttcatccaaacaatttcagcccaagtagcacgggcaccagcgggacccaccaacatcacccaagtgcttgagaaagcaggacaattcacaaccttcatcaaactcctcaaagcctcacaaatagctgatagaatcaattcacagctaaacaactcaaaccaaggcctaaccgtgtttgcacccactgataatgcattctcaagcctcaaagcaggaacattaaactccataaactcacaagaccaaatgcagctgatacaattccacattcttcccactctctacaccatctcacagttccaaacagcaagtaaccccttgcacacgcaagctgganacagtgatga

SEQ ID NO: 266536 - DNA, 384 bp, Glycine max
cacaaacgctggcaatgcccgtggcaccttcgctagctatcatctccaattctcgcctctccaagcgcactctccgttcccgttctgaacaaaccaaaggttcaagggtcaagcatcaagtgcgttcgtgttggcggtgtggagattccgaacaacaagcgaatcgagtactcgctgcagtacattcatggagttggaaggaccagagcgaaacagattctctgtgatatccaaatggataataaaatcacgaaggaactcactgaggaggagctaatcacactcagggacgaggtctccaaatacatgattgaaggcgacctgagacgggtcaatgcggttaatataaagagactgaaggatattcagtgctacagaggaata

SEQ ID NO: 266537 - DNA, 377 bp, Glycine max
  unsure (1)..(377): unsure at all n locations
tagaggatcactcttcttccatcctttcctctctctctctccctctgcatttcccaagttatttggattttttgcggatagggctggatttgtcaatgctcagagcagatattagaagatggcagacgctgaggatattcaaccccttgtttgcgacaatggaactggaatggtgaaggcaggatttgcaggagacgatgccccacgtgcagtgtttcctagcattgttggtcgtcctcgtcacactggtgtgatggttggtatgggcccagaaagatgcatatgttggtgatgaggcacaatctaaacgtggtattctgactctcaagtttcccattgagcatggtatngtaggcaactgggatgatatggaaaag

SEQ ID NO: 266538 - DNA, 376 bp, Glycine max
gcgggtgaggtagaacccttccacggtggtgactgcgcgatgggtgcctacaagtatgtttgagagctatggcgcaagaagcagtctgatgtcatgcgcttcttgcagcgggtgaggtgctgggagtataggcagcaaccttccattgttcgcttgacaaggtcgacccgccctgacaaggctcgtcgcttgggcttcaaggctaagcagggctatgtgatataccgtgttcgtgttaggaggggtggccgaaagaggccagttcccaaaggtattgcttatgggaagcccacaaaccatggtgttacccaactgaaatttcagcgtagcaagaggtcagttgctgatgagcgagctggacggaagctgggtggac

SEQ ID NO: 266539 - DNA, 265 bp, Glycine max
gacagaaagatagccttgtaggttcgcagagaacaggttgagttcttagttccaattatagaacagagagcgagagcattttaaaaccctgtgtcatatcacaccgtcacaacgttttcctacctagacacactttttgacctcaaagttgaagggaagaaatcagcaccctctgatgcataattggtgtctttatgctcagagtttcttaacggtggcacagacacaacagcaacatcggttgattggggcataccacagctca

SEQ ID NO: 266540 - DNA, 362 bp, Glycine max
  unsure (1)..(362): unsure at all n locations
caaaatgtcttctttgatgcctttgaggcttcaatgattaagatgggtaacattggtgtgctcactgggagcaaaggagaaatcagaaaacattgtaactttgttaacaagaaatctgttgaacttgatattgctactgtggcctccgaagaatcatcatcagaggagggtatggttagctcaatctaattggattaggatgaatagtttacactttaaaaatggtgcgattagagaccaataaagaagctttaggcatattcatgccatgtgcccgcgccactacttngtgtgtactgtgtttgtgttacacttttcttattggaatttgaatcatgtaatggtcatatgcaatttccttt

SEQ ID NO: 266541 - DNA, 329 bp, Glycine max
gtctactcgtttggggtggtgctcttggaggtattgtctgggaggcagcccttgatccgcactggggagaagcaaaagatgtcactggttgattgggcaaagcatcgctacgcaaagggatctctgggtgagattgtggatcctgcactgaagggccagatagcaactgagtgtatacacaaatttggtgaggttgcgctgagttgtttgcttgaggatgggactcaaaggccctccatgaaggacgtcgttgggatgctggagtttgttctgcagcttcatgacagtgctgttaatggagtggtgctcagtggaggggattatgaaga

SEQ ID NO: 266542 - DNA, 412 bp, Glycine max
  unsure (1)..(412): unsure at all n locations
cccacgcgtccgagcttattgaaacctttatgaactaccaggagaatattagacgctgtgtttgcgataatatatgatccatcaaggtctgatcaaggtgttctagctctgaaggccttgaagctttctgactcattcatggaactctatcgcagcaataattttactggagagaaattgagggagaagaacttatcatgggtggatatctttgaggaaataccgatcaaagtttcaaattctgcacttatcagtgcctttatgacagagctagaacctgatactccagtcacccagtgtgattatgatcgcttgcaattgtcaaccagttcattaatggagagngatacagaatttttgattgaatgcatggatgacttgtcactaggacaacaaaagttccaattctact

SEQ ID NO: 266543 - DNA, 313 bp, Glycine max
  unsure (1)..(313): unsure at all n locations
agaaggtctccgtcgtcgtcgacaacgaggagctcaccgtcgaggagaggaacctcctctgcgtcgcgtacaagaacgtgatcggagcgcgccgcgcctcgtggcgcatcatctcctcgatcgagcagaaggaggagagccgcggcaacgaggaccacgtcttcgtcattcgcgactaccgatccaagatcgagtccgagctcttcaacatctgcgacggtattctcaagctcctcgactctcgcctcattcccttcgctttctccggcgattccaaggtcttctacctcaagatgaanggagattaccacag

SEQ ID NO: 266544 - DNA, 186 bp, Glycine max
gtgcacaagaagtttagtcagcaatataaggctaccattggagctgattttgtcaccagagagcttcagattgacgacagacttgtcactctacaaatatgggacactgctgggcaagagcgattccagagtctcggggttgcattttatagaggcgcggattgctgtgttcttgtgtatgatgtg

SEQ ID NO: 266545 - DNA, 188 bp, Glycine max
gtggtgttagatctgtacctgcctagccattgatttggaaaagtccaagcttcaaagatgagtaagcttcagagtgatgctcttagagaagctatctcaggaatcatgactgattccaaggaaaagaacaggaaatttgtggagaccattgaactccaaattgggctgaaaaactatgatccccagaa

SEQ ID NO: 266546 - DNA, 187 bp, Glycine max
tcgccacgcgtccgtatacatacaagttctttaggcttacaggaaaagatggttggactaatcttggaagagtatttctgtgtgttacaagaactgatgctatgtttgcagaccttgggtactacagacaaacacctgttagggttgcatttttttgtatcatttacccatgtctagttctttcaaa

SEQ ID NO: 266547 - DNA, 284 bp, Glycine max
tctcccactcattctgttcacttgatccttcttaagtcttcatcatcatcatcatcatcaccgcggattgaataatattcctatcataaacatctccatcgcaaggcctgaatagtctactcaccccgactctttctatgcttacttggcttagttcatatacacctttatcttccttttcgcctagtcaggttcaagcatcttctactacatactcacctactactgctccacaaatccctcctgcctcatctactcttctatcgcccattctttagccctct

SEQ ID NO: 266548 - DNA, 301 bp, Glycine max
tcggatcgagataactagaaacagtgtgatgaaaatgaaggtccttgttttcttcgttgctacaattttggtagcatggcaatgccatgcgtacgatatgttccctctccgaatgaacactggctatggtgcccgtactccggaggtgaaatgcgcaagttggaggcttgctgtggaagcacacaacatctttggctttgagaccattcctgaagagtgcgttgaagcaacaaaggaatacatccatggcgaacaatatagatcagactccaaaacagttaaccaacaagcttacttttat

SEQ ID NO: 266549 - DNA, 190 bp, Glycine max
gaacaagtagttgagaactaagaaggagaagcaaatggcttcctcaatgatctcttccgcagctgttaccactgtcaaccgtgccggtgccggcatggttgctccattcactggcctcaagtccatggctggcttccccaccaggaataccaacaatgacattacctgcattgctagcaacggtggaaga

SEQ ID NO: 266550 - DNA, 180 bp, Glycine max
gccacgcgtgcggaatgggtcacgcacgtaggctcagtcgccaccattggtgtcactgaccatgcccaggaccatcttggagaggttgcgtatgtggagctgccagaaccaggtgtcacagtttccaagaagtctggcttcggagccgttgaaagtgttaaagcaacaagtgatataaac

SEQ ID NO: 266551 - DNA, 190 bp, Glycine max
ctccaacaatggtgctcgaggcgactatgatctgtatagacaattcggaatggatgcgtaacggggattactctccttctcgatttcaagcccaagcagacgccgccaatctcatttgcggtgctaaaacccagtctaatccagaaaatacggtgggagttctcacgatggcggggaagggcgttcgtgt

SEQ ID NO: 266552 - DNA, 183 bp, Glycine max
gtcctgccaggattttggatggacattgtacaaccgagggattatattgctggcctgaggctttacctggactcattgaggaagaagtcatcttctaagttggccagtggctctcaaattgtagggaatgtcattgtggatgagacagccaaaattggcgagggatgcctcattggacctgat

SEQ ID NO: 266553 - DNA, 372 bp, Glycine max
cccactcgttcgaattactgttcccaaggattttgccatttcaaagctgggaaagaacagtggaagtactttcaagttcctttgtcaataagcaagatcaatacactgtggaaggagtgcagaatcttggagacaaagcagtgatgtgtcatgggctaaatttcagaactgcattattttactgccataaagtccgtgaaacaacagctttcatggttccattggtggctggtgatggaaccaaaactcatgcacttgctgtttgccactcagatacttctggaatgaatcatcacatgcttcatgaactcatgggagttgatcctggaactaaccctgtttgccatttccttggaagcatggcacatttat

SEQ ID NO: 266554 - DNA, 458 bp, Glycine max
gaaaaaagagctcaaaaagtctaaggttatcaaaatagactctcaaaaatcatgggatcagcacatctctcatgccaccaataaaaagtacccagttgtggttcatttctctgctttctggtgtgtgccttctatagttatgaatcctttctttcaagaattagcctccacctatgaagatgttttgtttctgacgttggatgtggatgaggttaaggaaattgcctccaagatggaaatcaaagccatgcccacctttctgttactgagtggagggactcccatggacaaaattgtgggtgcaaatcctgatgaaataaggaaaaggattgatcattttgttaactcaactcattcctacaaatctgtgtaaaccatgcacatgatgaacaaggagttggccaaatcctagaactgttgttcattgtactatgaaccatttcatatatgttttatat

SEQ ID NO: 266555 - DNA, 185 bp, Glycine max
caaagagaagagatctgcctccttttttttatcaaatctatctcttcttcaagaatagttgaaaatggggctgtctttcaccaagttgttcagccgactgtttgccaagaaagagatgcgtatactgatggtgggtctcgatgctgcgggtaagaccaccattctgtacaagctcaagcttggag

SEQ ID NO: 266556 - DNA, 385 bp, Glycine max
  unsure (1)..(385): unsure at all n locations
tcgtccacgcgttcgctttcgctttcaccgtaacacaaccctcgttgttccgtgttctggcgaagcgacaccgttttacacttcctcttctcggcacagagaacaggattgtgagctatggaggttgctgaccttttgtcactgtagagctttcattccatcacagccattttccaattcggagaatctagcaggttgttgaaaatatggccaagcatcatcctgatttgattatgtgccggaagcagccagggattgccattggacgactgtgcgagaaatgtgatggcaagtgtgtgatatgtgactcttatgtgcgtncttgtacacttgtccgagtttgtgatgaatgcaactacggatcatttcaaggtcgatgtgtcat

SEQ ID NO: 266557 - DNA, 406 bp, Glycine max
tagccagttcggtccctcacttaagccactgtgtggaactaacaacaacacaaggccatcatcatggcagctgcttctcctatggcaagccaactcaagtccaccttcactaaaactcttgtagctcccaagggcctatctgcctcttcaccactccacctactgccttctaagaggcaatttatcttcactgttagggccatccaatcagaaaagccaacctatcaagtgattcaaccaatcaacggtgatcccttcattggaagccttgaaaccccagttacatccagccccttgattgcatagtacttatcgaaccttcccgcatacatgaccgcagtgagcccactactaagagggatcgaggtgggcctggcccatggctaccttctggtgggcccattcg

SEQ ID NO: 266558 - DNA, 180 bp, Glycine max
gggaactgggaagtacaccatgggcaatgatttgtggtatggaccagacagagtgaaatacttgggacccttctcagctcagaccccttcatacttgaaaggagaattccctggggattatggatgggacactgctggcttatctgctgacccagaagcatttgccaagaacagggctct

SEQ ID NO: 266559 - DNA, 424 bp, Glycine max
  unsure (1)..(424): unsure at all n locations
aaaaggccatataatttttttttatttgaaataatgtccgggatcatccacaagattgaggagaccctccatgtgggagggcacaagaaagaggagcacataggagaacaccatggtgagcacaaaggtgaacacaaaggagaacaccatggtgagcacaaaggtgaacacataggagaacaacaccatggggagcacaaggagggacttgtggataagatcaaggacaagatccatggtgatggccatgacaagggtgagaaaaagaagaagaaggacaagaagaagaaggagcatggacatgaccatcatggtcatagcagcagcagtgacagtgattagatcttatatgttaagcatgtgtacggtacgatggtagtgaggagccagaatccctcttncttgcttatgatataataaaaat

SEQ ID NO: 266560 - DNA, 181 bp, Glycine max
gacctactgcaagcgcgggcgcggcctcatcaagatcaacggctgccccatcgagctcgtcgagccggagatcctacgctataaggccttcgagcccatccttctgttgtgaaagagccgctttggcggcttcaacatgcgcatccgcgttaagggcggctgacacacctggcagatctac

SEQ ID NO: 266561 - DNA, 332 bp, Glycine max
attccctcggcgagccgactcctacggctacaccttcaaatggtacattagtgttttttatgcacgcagcgtaacttctaacttcgtgggatactgccctgctgcagattctgtctccgagccctacattgttaactcaccacttaatacttgctcatggtgcatcagccaattgctccctgaacagatacgaagctcatcacaaaggacaaattgtatttaccatagctactttcctcgttgaaccaaaatctaatattgatgctaatcgcaatgcatcaacgctagctcttgactgtattgttggcttgattgcttatcccattacattt

SEQ ID NO: 266562 - DNA, 437 bp, Glycine max
tcggaaaattgtctctttggtgtgacccttctatggatccacatcaagaaaaggaaagtgagggatggatgatatctggagggagatctttgttggtccagggactgaagagagagcttgtaattgctcaaatatctagaaaggcagcatctgcgtcattaaggacggctcttcaaaaagctgcgcatctacggctaacagaaaaggagaagaacaaaagtccttgctatgctatgcgcatatctttgcaaattaacagaattgcttggagtatgcttgttgatggtaaatcctttgctgaagctgagattaatgacatgatatatgactttgaccgggattacaaggatgtcggcatcgctcgggttacaacaaaatattttgctgtcagaaactgcctgcctaatgtcaaatcagatatgcgtttgtcagcatgg

SEQ ID NO: 266563 - DNA, 421 bp, Glycine max
gttgcagcattcagatggatgagaagatgctagtgtatgagtacatggaaaatagaaggctggatgccattttgtttgacaaaacaaaaagatcctcactggattggcaaaggcgattcaacattatatgtggaattgctagagggctcctttatttgcaccaagattccagatttaggatcatccatagggatctcaaggcaagcaacattctacttgacaaagagatgaacccaaagatatcagactttgggatggctagaatttttggcaccgatcagacagaatcaaataccatgagagttgttggaacatatggttacatgtcccctgaatacgctatggatgggatcttctcagtaaaatctgatgtttttagttctggggttcttgtgctggagatcatacgtggaaaaaagaa

SEQ ID NO: 266564 - DNA, 183 bp, Glycine max
gacagattgtctcgtccagcacaatcatctttacgccatatgaccacgcaagcttcagtatgctaccaagttatctgacctttttgagattctggcaacatctgaggatagagatggaaagactttcagatgcacagcacgtggtccgaaatctcccgtgactgggaacctatggcaaccaga

SEQ ID NO: 266565 - DNA, 183 bp, Glycine max
gacagattgtctcgttctgaacactgatctatatgccagatatacaatcacgctgcaaggtaagaccgcgttatctgactcttctgagattctggcaacatgtgatgatagagatggaaacactgtcgcatccacaacacgctgtacgaaatacagcatgactgtcaacttatgagctctaga

SEQ ID NO: 266566 - DNA, 185 bp, Glycine max
gtttgttgtgagctataagctcgtttatcgtgaggagaatatgaagttgatgcgtttactttgttgctgcagtacttgtggtagcatggccatgccatggcgcatgctaccaaaggttccctctccgaatgaaaactggctatggtgagcgttcttcggaggtaaaatgcgcaagttttaggctt

SEQ ID NO: 266567 - DNA, 431 bp, Glycine max
ctagaaacagtgtgatgaaaatgaaggtccttgttttcttcgttgctacaattttggtggcatggcaatgccatgcgtacgatatgttccctctccgaatgaacactgtctatggtgcccgtactccggaggtgaaatgcgcaagttggaggcttgctgtggaagcacacaacatctttggctttgagaccattcctgaagagtgcgttgaagcaacaaaggaatacatccatggcgaacaatatagatcagactccaaaacagttaaccaacaagcttacttttatgccagagacctcgaagtccatcccaaggacacatttgtgttcaatatagatggcaccgtactctctaatattccatactacaaaaaacatggatatggggtggagaaatttaactcgaacttgatgatgaatgggtttacaagg

SEQ ID NO: 266568 - DNA, 423 bp, Glycine max
cccacgcgtccgcccactcgtccggaaactagaatggccactttagacgaacgcccttgtgcgaaaaggtggcttcctcttgaagctaaccctgaagtcatgaaccagttcctttggggtcttggccttccactggacgaggcagagtgctgtgatgtgtttggcttagatgaagagcttctggaaatggttccgaagcccgtcctcgccgtgctttttctttatccaattaccgcaaagtccgaagaagaaaggttgcaacaggaaaacgaaaaaaaggattatagcagcaaagtgtattttatgaagcaaaccgtgggtaatgcttgtggtacaataaggttgcttcatgcacttgggaacataaccttcgaagtcaaactttgtgaggggtcattccttgataaggtttttaaatctact

SEQ ID NO: 266569 - DNA, 410 bp, Glycine max
aaagaaaagaacgtgggtaatgaataccctttattaacaacttattcataggcgaccttacaattacagtacaagaatacagacttcttctggactctcctaacaaaccaataaccttaccaactgtataaacttttttcaccttgaacccaatattcggcaagtgaaaaaagaaaaaatgcccctaaaaattgaagggtcatgcttccagcagcacaagttctatgacgcaaggcaaagagactttgatgctgctaggaacacaaacaatatcaggagtcgtctgttattgatgttagaaagaacaaaatccatcacttatgtaccttgccaaaataacaaatcacagaaccaaacattcatcgcatatcacttacttcttatgagatggtgcatagaaatatggcaac

SEQ ID NO: 266570 - DNA, 186 bp, Glycine max
agcaagctcatcctagagttttaaaaatggcagcagcctcctccatggctctctcttcgccatccttggctggcaaggccgtgaagctgggcccatcagcccccgaagtcgggagggtcagcatgaggaagaccgtcaccaagcaggcctcctccggaagcccatggtacggcccagaccgcgtca

SEQ ID NO: 266571 - DNA, 183 bp, Glycine max
ccaatggcggagaacggtgaaggcggcgaggagtacctgttcaagatagtgctgattggggactccgcggtggggaagtccaacctcctctcgcggttcgcgcggaacgagttcgatagcaactccaaggccaccattggggtcgagttccagacgcagctcgtcgagatcgacggcaaagag

SEQ ID NO: 266572 - DNA, 183 bp, Glycine max
agcaagcgtaccgtgttgcctctctgcaatctacagctaaaatgcatataaagacgtacgtagagatcggaagggttgtccaaattaactacatgctggaatatagggggctcgccttgatcgtcgacgtcattgaccagaacagagctcttgacgatgcccctgatatggctaggtcccaag

SEQ ID NO: 266573 - DNA, 428 bp, Glycine max
ataaattcatagtctttcggtccttccttccttcctccgctctagtgtatgccactctggttaattatcatacccccttctaggcatagttcttctccctctgttctctattctacactgtgaaaccaagatgaaggtagcatttgtagctgttctacttatttgccttgtcctaagctcctccttgttcgaggtgtcaatggccggttctgctttctgctcctccaagtgcgcgaagaggtgttctagggctgggatgaaggacaggtgcacgaggttctgcgggatttgctgcagcaagtgtacgtgtgtgccatctgggacttatgggaacaagcacgagtgcccttgctacagagacatgaagaactccaagggcaagcccaaatgcccttgattggtatttcaccatgcatcaacttcaatct

SEQ ID NO: 266574 - DNA, 434 bp, Glycine max
agtagttgagaactaagaaggagaagcaaatggcttcctcaatgatctcttccccagctggtagcactgtcaaccgtgccggtgccggcatggttgctccattcactggcctcaagtccatggctggcttccccaccaggaagaccaacaatgacattacctccattgctagcaacggtggaagagtgcaatgcatgcaggtgtggccaccagttggcaagaagaagtttgagactctttcctacctgccagaccttgatgatgcacaattggcaaaggaagtagaataccttcttaggaagggatggattccttgcttggaattcgagttggagcacggtttcgtgtaccgtgagcacaacaggtcaccaggatactacgatggacgctactggaccatgtggaagctgcctatgtttggttgcactgatgct

SEQ ID NO: 266575 - DNA, 391 bp, Glycine max
gaaaaaggagcatgttgattatatagaaagtaaagggcaacaatcatttttgtttaccagggggtgggacaccatcgctgacataataacctatataagaaatgctgacatgaataaaaaaggaatggttcaaataccatttactaacataacagaaaacattgttaaaatacttttacgcgagggttttgttgaaaacgtcagaaaacatagagaaaacgacaaatattttttagttttaactctacggtatagaagaaatagaaaaggatcatataaaagttttttaaatttaaaacggatcagtacacccggtctacgaatatattctaattatcaacgaatccctcgaattttacggggcatggggaatgtaactctttcaacttct

SEQ ID NO: 266576 - DNA, 447 bp, Glycine max
  unsure (1)..(447): unsure at all n locations
atcggatcgatcaagcatcanggagctttgagggttgattctctggtgtagtagcaatcgagggcgaatagaaaatgttttttgacagatatggatatcatgggacatcatttgagcagatatatcgatgctacccagcttcctttattgaaaagccccaaatcgaaagtggtgacaaaattatcatgcctccatcagcccttgaccgtctagcatctctgcatattgattacccaatgttgtttgaactccgtaatgatgctgccgagcgggtttctcattgtggggttctggagttcattgctgaggaaggcatgatatacatgccatactggatgatggagaacatgcttttacaagagggggacattgtcaaagtgaaaaatgtgacacttccaaaggggacatatgttaagttacagccccacacaaaagactttttggata

SEQ ID NO: 266577 - DNA, 450 bp, Glycine max
  unsure (1)..(450): unsure at all n locations
cccacgcgtncggccacgcgtncgatcgagataactagaaacagtgtgatgaaaatgaaggtgcgtgttttcttcgttgctacaattttggtagcatggcaatgccatgcgtacgatatgttccctctccgaatgaacactggctatggtgcccgtactccggaggtgaaatgcgcaagttggaggcttgctgtggaagcacacaacatctttggctttgagaccattcctgaagagtgcgttgaagcaacaaaagaatacatccatggcgaacaatatagatcagactccaaaacagttaaccaacaagcttacttttatgccagagacctcgaagtccatcccaaggacacatttgtgttcagtatagatggcaccgcactctctaatattccatactacaaaaaacatggatatggggtggagaaatttaactcgaccttgtatgat

SEQ ID NO: 266578 - DNA, 447 bp, Glycine max
gcgattcaggctttgggttgttgggtcgtgagtggaatcagcaactatgaatatgatggggaggttgaagagcattgcttatgggaggacttccatttcttcacatcctggaggggattctaactcagaaagggccacgtttgaaccagaaactgaacggaaggccgatgagaaaacaaataccattgaaacaatctgcacagatcaggaacaacctatagacacatcaaaagaaacttccaatgtaggcacatccgatgtatctacagtagctagaactgagaagtcaggtttcgatgagcttcctaaagaatttaatgaaatgaaaattagagatgagaaaagcaaaaacaacaatgaaaacgatatagaagctactgtagtgagtggtgatggaacagaaacaggaccaataattacaactgtcattggtggtcgagatggaca

SEQ ID NO: 266579 - DNA, 430 bp, Glycine max
tcgaacaaacccactaagatggcttcctttgtatccttcctagtgctgcttcttgcaggcctgattctcatgcctcaagggcttgctacttactacaaaccaattaagaagccaccagtgtacaagcctccagtgtacaagccaccagtgtgcaaaccaccggtttataagccaaaaccaccgggttacaagccgaaaccaccggtttacaagccaccatataagaagccaccatacaagaaaccaccttatggaaagtaccctccagtagaagacaacacccatgcctaaagcaagcaatgagggctattatctacttaataaataagaggaactgctttgtgttttctagcattgtgatttacaacttcgtagcaatgcatattcttgactcttgcatgcacttcaatccttcgtagcattaatgatg

SEQ ID NO: 266580 - DNA, 371 bp, Glycine max
cccacgcgtccgcgctgactgaaactcgcaaaaattagggttttgcagtgatggggctgtgcaaccgcgtccgatcgggaatctctctcttcaccaaatccacgttcctcacttccgagcgatccactctccaacgattactcgttgcccctttcatttccttggcctccacaaattacgccaacgtgccggggcaaaaggaacaccaagttaaaggccctctggctttgcttggaggttcaagaaactatgcctttgctttgtatattgcatctgagaaaactaatgccttggcaaagggtggatctgagcctctgcaatttggtggggctgtaaagaatagtcccatattctcacaatttataaaggac

SEQ ID NO: 266581 - DNA, 348 bp, Glycine max
cccacgcgtccgaaagaaaaaagcgatcatagtttcacttcggccttatccagtttaggggttcggttctctaccctatctttcacgtatcgaaaccttaaatttacgatcaggtctgagcaatctggttggtagaacctttggtcttagtgagtcaagttttatgtctgaattagacgatcaaattcctactgccttcgatccttttgctgatgcaaatgctgatgactcgggtgctgggtcaaaggagtatgtgcatattcgtgtacagcagcgaaatggtaggaaaagcctgacaaccgttcacggattgaaaaaggaattcagctattacaagatacttaaaga

SEQ ID NO: 266582 - DNA, 410 bp, Glycine max
cccacgcgtccgcccacgcgtccgaaagttccaaattttttggtttggggatagagagagggatacgcgtcacattttcataataataaaaaaatggcagcggcggcggcagtgacggtgctactcccacctaggattccgaccaccaccaacgttacccgctgctctgctttgccttctctccctcctcgcgtctccaacaccaaaaccactttgttctcaccttccctcaacaacttttcagtgtcccgaaaatcttctctgcttcagaccagagcttcttcagaggaatcatcctcagtagatgccaatgaggtgttcacagatttgaaggaaaagtgggatgctcttgaaaacaagtccacagtacttctttatggtggaggggctatagttgctatttggctatc

SEQ ID NO: 266583 - DNA, 416 bp, Glycine max
tgttattacctctttccaaagtccaaattttctagttccaccaaaccaaaccaaaccaagatggcggagcctcagcctcatccatgatatcaacaccagccttatctccaaccatccaaaagcaccatcatttgaagccatccaacgtgtgcttccaaggtcttagacccctcgcaaggttcaccaaagcctcatcaaccaaagtgagcaccaccaccaaaagggttattccaaagggtggtgttagagctgaactcaactcagcccttgtgataagcctcagcactggcctctccctcttcttgggaaggtttgtgttcttcaacttccaaagggagaacgtggcaaagcaagtgcctgagcagaacggcctcacacactttgaggctggtgatacacgtgccaaggagtatgtc

SEQ ID NO: 266584 - DNA, 392 bp, Glycine max
cccacgcgttcgtccacactttcttacactcatacatccactcgtccgcgcctttgattgtgagcatggttggtcttgctaccaaataatgattcacatattcatgctggatccctcttacccttcataagcaatatcgttttagtttgaaagccaccggtgaaactatccatgtgtgaactaaaacaacatgggtaattgacatcaaccgagcacgttactgggggtccctgccgtggcttccgtcgcagatgcttctgcaccaaacattgttaattttaagggcttcctttctagagcttccatacaaaatgacacatccatgctacttctactctcgtctataatgaaccactatgtaattgacaatacggggtacccaaactactata

SEQ ID NO: 266585 - DNA, 448 bp, Glycine max
agaaaaaccatggcaataacactcaacaatggcttcaagatgcctatcattggattgggcgtgtggcgcatggaaggaaacgaaatcagggacctaattctcaattccatcaaaattggttatcgccattttgattgtgctgctgactacaaaaacgaagcagaagttggagatgcgcttaaggaggcttttgatagtggccttgtgaagagagaggatctcttcattaccaccaagctttggaattctgatcaaggccacgttcttgaggcgtgtaaagacagtctcaagaagcttcagttaacgtatctagatttatatcttgttcactttcctgttgccgtaaggcatactggggttggtaatacttctagtcctttgggtgatgatggggtcctggacatagataccaccatatccctggaaaccgacctgcatgcaatggaag

SEQ ID NO: 266586 - DNA, 428 bp, Glycine max
ccttgctcttgtttgttccttttattgtttctttcttgatcatgtcgcttgttggtaaaattagtactgaaattggggttcatgcaactgctgcaaagtggttcaacctctttgcaacgcagctccatcatgttcaaaaccttactgatagagtgcatgaaaccaagctgcatcatggtgatgactggcatcacaacgagtcgatcaaacactggacttgtacaatagatggtaagattacaacatgtctggagagtattgaatccgttgatgaaccgaacaaaacaatcacctacaagctcttcggaggagatattggtcataagtataaagtctttaagctcatttttcaagctattgacaccgatcatgggggtgttattatcaaatggacccgtgaatatgagaaagatgatgagaatgttgat

SEQ ID NO: 266587 - DNA, 438 bp, Glycine max
gaaaatttgatggggaaaatgtatcaaatcctccttcacccgatgaggacaacaagctagtccggctcaatagtcccaatgctgtgaacccccttgtttggggaggttactacccacttcttaccattgatgtttgggagcatgcttactaccttgattttcagaaccggcgtcctgattatatatcagtgttcatggataagcttgtttcctgggatgcagtgagctctagacttgaacaagctaaggctttaattaccagtgcatgatgctgaattaaatgcagaataagtgatttatcctgatagtgatgatgaattggatggcgtcatgcggaatagtgaattatttttatctagaaagtgtaagcaggcacatcttttgtactttaaataaggggtgtgggattaaggctaaatctcagattattatgttcta

SEQ ID NO: 266588 - DNA, 311 bp, Glycine max
cccacgcgtccgctctattgttctctccgtctccctagccttctttttggtgctacttacgcaaggcacactcgaccgataccgtttctttcaccttcaacaagttcaacccagtccaaccaaacattatgctccaaaaagatgctagtatttcatcctctggggtgttacaactcaccaaagttggtagcaacggcgtgcccacctcgggatctctcggtcgggccctttacgctggcccaatccagatttgggacagcgaaaccggcaagggagccagctgggctacattctttaaaattaacattttc

SEQ ID NO: 266589 - DNA, 295 bp, Glycine max
gcagaaagcaagctcatcctagagttttaaaaatggcagcagcctcctccatggctctcgcttccccatccttggctggcaaggccgtgaagctgggcccatcagcccccgaagtcgggagggtcagcatgaggaagaccgtcaccaagcaagcctcctccggaagcccatggtacggcccaaaccgcgtcaaggacttgggcccattctctggcgagcccccgtcctaacttactggccaggtcccaagtgactacggctgggacactgctgggctttccgccgacccaaaaac

SEQ ID NO: 266590 - DNA, 428 bp, Glycine max
  unsure (1)..(428): unsure at all n locations
ggcggngataagattaaagattcaacaatggcctctgcttctgctactcttctcaagtcgtctgctgttcttgacaagtgcgagtgggtcaaaggccagacccttcgccaacctctcgtgagatgtaacccttcctcagcatcagctctcaccatcaaagctgcttcctatgctgacgagctcgtcaaaaccgccaaaacagtggcctcaccggggcgtggtattttggcgatggatgagtcaaatgcaacctgcgggaagcgtttggcatctattgggttagagaacacagaagctaatcggcaggcataccgtaccctacttgtgacagtacctggtcttggtgaatacatctctggtgccattctctttgaggaaactctctaccaatccactgtcgatggaaggaagatcgtcgacgtacttgt

SEQ ID NO: 266591 - DNA, 431 bp, Glycine max
  unsure (1)..(431): unsure at all n locations
gtttgttgtgagctataagctagtttatcgtgaggagaatatgaagttgtttgttttcggtgtggctgcagtagttttggtagcatggccatgccatggcgcangctaccaaaggttccctctccgaatgaaaactggctatggtgagcgttcttcggaggtaaaatgcgcaagttttaggcttgctgtggaagcacacaacatccgagcctttaaaaccattcctgaagagtgcgttgaaccaacaaaggactacattaatggcgaacaatttagatcagactctaaaacagttaaccaacaagctttcttttatgctagtgaacgcgaagtccatcacaacgacatatttatattcggcatagataacaccgtactctctaatatcccatactatgaaaaacatggatatggggtggaggaatttaatg

SEQ ID NO: 266592 - DNA, 436 bp, Glycine max
cctgatcttatcccatccttactgacactggctctaaatgatgctttgacttatgataaggcagcaaaatcgggtggtccaaatggctctatacggttcagctcagaaataggtagaccagaaaatacagggctttctgctgccatgaatttattagaggaagcaaaaaaggaaatagactcatattccaaaggtggacccatttcctatgcagatctgatccactttgcagcaaagtgctgccaaggctacatttttagctgctgccattcgaaaatgtggtggaaatgaggagaaagggaaaacactgtacaatgcatacggatcgaatgggcagtggggtttgttcgataggcaatttggtagggctgatactcaagacccagatccagagggaagagttccaatatgggagaaggcaagtgtacaagaaatg

SEQ ID NO: 266593 - DNA, 435 bp, Glycine max
cccacgcgtacgcccactcgtccgcacagagagagaagagacaatgaagtttaacccaagggcgtcctcaagccgtcgaaagagccgcaaggctcacttcaccgctccgtcgagcgtgcgtcgcgtcctgatgagcgcgcctctctcgaccgatctccggtcgaagtacaacgtgcggtccattccggttcgcaaggaccactaggtgcatgtggtgaggggaacctacaagggccgcgagggcaaagtggtccaggtctatcgccgcaagtgggtcatccacatcgagcgcatcacccgcgagaaggttaacggctccaccgtcaacgttggcattcacccttccaaggttgtcgtcaccaagcttcgaatggacaaggaccgcaaatccttgctcgatcggaacgccaagggtcgcgccgccgccgacaagga

SEQ ID NO: 266594 - DNA, 453 bp, Glycine max
cccacgcgtccggtggaattggcttctaaagccattgaggagctaaataataccgaattgatgggtaaaaaaattaaatgttcaaaatctcaagccaagcaccgtctttttattggcaatgttcctagaagctggggtgttgaagatctgaagaagattgtaactgagattggacctggagttactggtgtggaactagtcaaggatatgaagaacaccaacaataaccggggctttgcttttattgactattataaccatgcatgtgctgagtattcaaggcaaaagatgatgagcccaacatttaagctaggtgagaatgctccaacagtgagctgggctgatcctaaaaatgctgagtcctctgctgcatctcaagtgaaggcagtatatgtgaagaaccttccaaagaatgtaactcaagagcagttgaagaagctttttgaacgtcat

SEQ ID NO: 266595 - DNA, 444 bp, Glycine max
  unsure (1)..(444): unsure at all n locations
cccacgcgtccgtggcttcaattttgcaaccctgagctaagcgggataatcaccaagtggttgaaaactgataagtgggtaaccaatcttgacttgttaacaggtctccgacagtttgctgacaatgaagatctgcaagcagaatggctgtctgcaaagatggctagtaagcagcgcttggcacggtatgttttgcaggtgacaggggagagcattgacccagatagtctgtttgacattcaagtcaaacgtatccacgaatacaagaggcagctacttaacattcttggtgtgatttatagatacaagaagctaaaggagatgagccctgaagaacggaaaaaaactactccgcgcacagtgatgattggaggaaaggcatntgcaacatacacaaatgctatcangatagtcaggctggtgaatgatgtncgtgccgtcgtc

SEQ ID NO: 266596 - DNA, 216 bp, Glycine max
cccacgcgtccgcccacgcgtccgcggacgcgtggggaagaagatgattctaaccgtctgcttcaatatcattttatctctcctctccctctaccacgccttcggggtggatttctgcgtagcagactacacaagccccaatggccccgcaaggtactcatgcaagagcccaacaaaggtcacgggggacgacttcgtctactccggccttggcac

SEQ ID NO: 266597 - DNA, 380 bp, Glycine max
gcttaatgaactgagcagcacggttgtgtttgagaggccacatgatgaggaatttatacgcaagtggcagttagcatgcaaggggaatatcgcacatgtggtggtgatgccaaacatcactattgagaagcttgatgattttctgaacgagcttctggagaagcgtgctacctggtttcaagatggcaaggatcaaccctactgtatatcatcagacgtaagtgaaaagaattgcctttgggctttgcacaagtaattgcagcattccatctaatggttattggtggaggtggtttttggaggggttattcaaggtaccgcactaatgtctatcaagaccttgatgccattaataaccattaaaatcctctttgctggcc

SEQ ID NO: 266598 - DNA, 370 bp, Glycine max
ggcaaactttggacaaaaaatggagtgctacacaaggccaaacaggagtgacatgcgccgctgagcagatgaagaagccaccatataggcaaagaccaaagagtactttgatggggtcgcaccacaacgccacacaaagccttaacgaagagactattcaactcaatatgtcgatgctttctacaatgcccatcactcttctttaactataccagaattaacacaattccaactcctgcagaaccatccccaagagaagaaattggtgtacaatggaagtcaagtaccggaagaatttgtggaaacagaatattaccaagatctcaacaacgtggacaaacaccaacatacgactggaacaagatttatc

SEQ ID NO: 266599 - DNA, 423 bp, Glycine max
gaaaaaagattcaatttttatgcaaaagttttgttcctttaggatttcagcatcagtgggtcggcctgcatgcttcacggtgcaagcagccggcccgcaaccgcccgcaaatcctctggcctttccggaaccgtccgcattcccggcgacaagtcgatctcccaccggtccttcatgttcggcggtctcgcgagcggtgaaacgcgcatcaccggccttctggaaggcgaggacgtcatcaatacgggcaaggccatgcaggccatgggcgccaggatccgtaaggaaggcgacacctggatcatcgatggcgtcggcaatggcggcctcctggcgcctgaggcgccgctcgatttcggcaatgccgccacgggctgccgcctgaccatgggcctcgtcggggtctacgatatcgacagcacc

SEQ ID NO: 266600 - DNA, 433 bp, Glycine max
gccgtcgtcgggatgctgcaacggagtgaagagcctcaatgccgccgccaagaccaccggcgggcgccagacggcgtgcaactgcctcaagtcggccgccagccaaatctccggcttcaacgccaacaacgccgcctcgctccccggcaaatgcggagtctccatcccctacaagatcagcacctccaccaactgcgctaccatcaaggtttgaagagaaagtcatggacgcaggaaaccggaaactactcactagtatatgagtagcattattaatattaagaataagatcgagggtgatgagggctccacttatatgcccctctcctcttgtatgagagatttgcattggatagctttaagttgtgttgcgttgttatttctctgtatgagttacacatagttatatctactttaatattgggttctccct

SEQ ID NO: 266601 - DNA, 445 bp, Glycine max
  unsure (1)..(445): unsure at all n locations
gttctgtacgtgcagccncancaagtgatcgaagcgaaaagagagaaattcatcgtcggagtgatcatgggtaaggttcatggatcacttgcacgtgctggtaaggttagagggcaaaccccgaaggtggccaagcaggataagaagaagaagccacgtggccgcgcccacaagaggatgcagtacaatcgccgattcgtcaccgccgtggtgggattcggcaagaagaggggacccaactcgtctgagaagtgaggccgaggcttgaggaatatgttgctactctatttgatttatctttgttggtttttatttatttttaatttgtatgttttgattgtgttctgtgaacggtttttgttagctttatatcaaacttgaaattttgcatacaaaatctaactatctaagttcattgctcctttcaactgggaaaggatttggt

SEQ ID NO: 266602 - DNA, 449 bp, Glycine max
cccacgcgtccggaagaaaaaaaatctcaaaataaaacaaccaaaccacacacttcacacgctggtcaacatcctcagcaagtacaagaacaagaagaaacaatgtcttgctccaatctcacaatgttggtgtcctcaaaaccttccctttccgatccctccaatctctccttccgctctgtcctcaacccttttcagctcccttcacaaaacccaacttcatgcactccttcacgctcctcaaccacccaaattcagtgtggtctgagagaactcagaacccgcattgattccgtgaagaacactcagaaaatcaccgaggctatgaagcttgtggctgcagccaaagtgagaagagctcaagaagctgttgtcaacggaagacccttctcagagaccctcgttgaagtcctctacaacatcaacgagcagctcctaactgaggacgt

SEQ ID NO: 266603 - DNA, 470 bp, Glycine max
  unsure (1)..(470): unsure at all n locations
attcccggtcgaccacgccgtccgccacgcgtccgccaagcgtccaaaattgagaaattcaaatggttcattgccaacttcgcaagttcggttgaatatgcaacgagtaatgcaaaccaatgctgctgtgttccgtacacaagaaacattagaagaaggttgtcaattaattgataaaacatgggagagcttccatgatgtccaggtgaaggaccgcagtttaatctggaactctgacttgattgagactattgaattggaaaatcttttgataaatgcatgcatcacaatgtactctgctgaagctaggaaagagagtagaggagctcatgcccgtgaagacttcaaggttagagatgatggaagctggatgaaacacactgtgggattctgggagaacgagaaagtnncgttggactacaagccagtgcatttgaatgtattggatgatgaggttgaatcattccctc

SEQ ID NO: 266604 - DNA, 450 bp, Glycine max
tgccaactcaacttcgaactcaaatcaagcaatcaatttcaaatccaaaaatggggagcgccggaaccttctgtgccttcttcctcgtgtgtacgatcttgtccgtccacgtggcgcaatcctcatcctccaccctcgacctggacacctttttcctccctctcaaatccggctgccgcggatccgtcgccgagtgcagcctcctcgccggcgacgacgacaccgagtttctgatggagtcggagagcaaccggcgcattctagcaggaaggagctacataagctacggtgcgctgagaaggaacactgtcccttgctcccgacgtggcgcctcctactacaattgccgccctggcgctcaggccaacccctacagccgtggatgcagtgctatcacccgatgcaggcgttgaaaaagttattcttctcttttaatttcattttttttta

SEQ ID NO: 266605 - DNA, 451 bp, Glycine max
tccgcatcgatgttgaacacagtggaagaaggaggggactcggcaatggcttagtcccatcccgcaggccttctctttgatgaagggggggaagacagaacaaggccatgcaaatgccaaagaaggagacagaagagggtacgctaaaaagagagagcaacacccgacccggggatacatgggcgtggagaaagaacggacagaaacccatcaagggtgccccttatcccagagggtactacaggtgtagcaagttcaagggctgtccggcacggaaacaagtggaaaggagctgcgtggaccccacaatgctagtcgtcacttactccttcgaccacaaccattcatggccaccttctagaaaccacgccaggcccaccaagaagcctgaaccggttacggacccggtccaacccgaaccggaggaaaagttcgcggacctgggcgggga

SEQ ID NO: 266606 - DNA, 448 bp, Glycine max
caattctgaatttgcgggttttggatttggacttggtcgtcaacacagtctaattaatagctgtttgctccttcgcttatgaatcttcttcttcttcttcttcttgttcctgcaacgcactgaattcgatcaatcaatccatcttcaattgctttgtttcgatcggaggaaaatggccgatcagttatcgaagggagaggaattcgagaaaaaggctgagaagaagctcagcggttggggcttgtttggctccaagtatgaagatgccgccgatctcttcgataaagccgccaattgcttcaagctcgccaaatcatgggacaaggctggagcgacatacctgaagttggcaagttgtcatttgaagttggaaagcaagcatgaagctgcacaggcccatgtcgatgctgcacattgctacaaaaagactaatataaacgagtctgta

SEQ ID NO: 266607 - DNA, 373 bp, Glycine max
  unsure (1)..(373): unsure at all n locations
cgcttctcctctttgtgttctggctatgcttcttggcaagagttagatcggacgaggagtgcgtgtacacggtgtacgttcggacggnttcgatcatcaagggaggcaccgattcagtaattggtctgaagctatacgacaagtccggctacggcatatacatcaccaacctcgaggcatggggcgggttaatggatccgggtcacaactactacgagcggggcaacctcgacatattcagtggtagaggcccttgcttggaagcacccgtttgccaggccaacctaacttatgacgggttggagcctcatcacggatgctacgttaattactttgaggaaaccattaaataaaaacaatgcgccttttttct

SEQ ID NO: 266608 - DNA, 419 bp, Glycine max
cgaaacgcacatttcactattcattctcgtttccctttcgactgtgattgtttgggaacggaacttttcgagcaaaatgtctggacgtggaaaggggggcaagggtttgggaaagggaggagcgaaacgacaccgtaaggtgttgcgcgataacattcagggaatcaccaagcctgcgattcggcgtttggctcgcaggggtggtgtgaagcgtatcagtggtctcatctacgaggagacacgtggcgtgctcaagatctttctggagaacgtgattcgtgacgccgttacctacactgagcacgctaggagaaagaccgttacggcaatggatgtggtttatgctctcaagagacaaggaagaaccctctacggatttggaaggctaagttgttttttttttttttttttaattttta

SEQ ID NO: 266609 - DNA, 420 bp, Glycine max
  unsure (1)..(420): unsure at all n locations
gccacgcgtncggaaataactaaaacagtgtgatgaaaatgaaggtccttgttttcttcggtgctacaattttggtagcatggcaatgccatgcgtacgatatgttccctctccgaatgaacactggctatggtgcccgtactccggaggtgaaatgcgcaagttggaggcttgctgtggaagcacacaacatctttggctttgagaccattcctgaagagtgcgttgaagcaacaaaagaatacatccatggcgaacaatatagatcagactccaaaacagttaaccaacaagcttacttttatgccagagacctcgaagtccatcccaaagacacatttgtgttcagtatagatggcaccgtactctctaatattccatactacaaaaaacatggatatggggtggagaaatttaact

SEQ ID NO: 266610 - DNA, 442 bp, Glycine max
cccacgcgtccgctttatccttcatttgacaagggaagaagaatgaaaatagaataaaagaggagggaatgtagaaaaaataaacagaattcttcattgtcatttggtttgatttatctatgatattggtaactgtactattcactaaagaaatgaaatgcgcaacttaaaggattgctgtgagaaacacacaaactctttgacttttagacctttcctggagagtgcgttgaagcaacaccggactgcattcatggcgaacaatattgatcacacttcctatcagtttaccaagccgcttacttttatgccatagaccttaaattccattccaaggacacatttgcgttcagtataaatggcaccgtactctctaatattccatactacaaaaaacatggatatggcgtggataaatttaactcgaccttgtatgatgaat

SEQ ID NO: 266611 - DNA, 443 bp, Glycine max
gtttatcgtgaggagaatatgaagttgtttgttttctttgttgctgcagtagttttgggagcgtggccatgccatggcgcaggctaccaaaggttccctctccgaatgaaaactggctatggtgagcgttcttcggaggtaaaatgcgcaagttttaggcttgctgtggaagcacacaacatccgagcctttaaaaccattcctgaagagtgcgttgaaccaacaaaggactacattaatggcgaacaatttagatcagactctaaaacagttaaccaacaagctttcttttatgctagtgaacgcgaagtccatcacaacgacatatttatattcggcatagataacaccgtactctctaatatcccatactatgaaaaacatggatatggggtggaggaatttaatgaaaccttatatgatgaatggggtaacaagggcga

SEQ ID NO: 266612 - DNA, 450 bp, Glycine max
  unsure (1)..(450): unsure at all n locations
caaacctgatgtcttcaagagtccaaattctgagacctatgtcatatttggtgaggcgagaatagaggacttgagctctcagttgcagacacaggctgctcaacagttcaggatgccagatatgggatctgtaacggcaaaacaagaagatgctgcagctgcagcagtgcaacctgaagaagaggaggaggttgatgaaactggtgtggagccccatgacattgatttggtgatgacgcangcaggagtgtcaagaagcaaggccgtcaaggctctcaagactcacaacggggacattgttggagccatcatgcaactcactacttaattgggggtttatgttctatttgtatgtttttttgggaatgatatttagaactagtgccgtttctatgttataaaccgaatcaacataaccgttttatgtttgggatttgggtttacccttta

SEQ ID NO: 266613 - DNA, 271 bp, Glycine max
gaagcattagcactaggagcagcaacaactagtctcagctgaaatggcctcttcagggggggcatctgtggccctcaaacctgcccctttcactgttgagaagtcctcaatgagaggccttccctctctctcaaggaactcttcttcattcaaagttgtggccagtggcaagaagatcaagactgacaaaccttattgaattaatggtggcatggctttgaaggatggaactgatgcatctggccaggaaggaaagggaaagggtgtttac

SEQ ID NO: 266614 - DNA, 419 bp, Glycine max
gaacaacgatcagttacatttcgctatattatcattgcttacatttatccacatgagcgcattcgctcaaatctgcaacatgttattatatcatggcattcatgtcactttcttgagaactgcatgcaacattctcagaatcagatcaactcttaatctcaatccaaccatgaatgttatctcactaaaatggctaaatggtataaccaacactactgaattgccacctcacttagctggaaatctcatacacgcccttgacctcactcaagatcaagtgaagtcccttttggtggaactcaaaccccactatgttttctttgactttgcacaacattggctcccaaaattagcttctgaagttggcatcaagtctgttcatttctcaggctactcttgcacttctgatgcttacatta

SEQ ID NO: 266615 - DNA, 279 bp, Glycine max
gttcagtctttcttggaactttgttactctcacacatgtctcgctccgtgcctttggtggcaaccatttttgtcttgcttctgcttctggtggccactgagatgatggggccaacaatggtggcagaagcaagaacttgtgagtctcagagccaccgtttcaaggggccatgtttgagtgacaccaactgtggctctgtttgccgaaccgaacgtttcactggaggacactggccgggcttccgtcgcaaatgcttctgcaccaaacattggtaatttt

SEQ ID NO: 266616 - DNA, 437 bp, Glycine max
cccacgcgtccgaacaaataaaagccatggccacctccaacttctctattgttctctccgtctccctagccttctttttggtgctacttaccaaggcacactcgaccgataccgtttctttcaccttcaacaagttcaacccagtccaaccaaacattatgctccaaaaagatgctagtatttcatcctctggggtgttacaactcaccaaagttggcagcaacggcgtgcccacctcgggatctctcggtcgtgccctttacgctgccccaatccagatttgggacagcgaaaccggcaaggtagccagctgggctacatcctttaaattcaacattttcgcacccaacaaatcaaactcagctgacgggcttgccttcttcttggcacccgtcgggtctcagccccaatccgacgatggatttcttggtcttttc

SEQ ID NO: 266617 - DNA, 409 bp, Glycine max
cttccatttacttttttttaccccattttaaacagaccgtggtttcccccttattccccataatgggggggatcccaacccttgctttgagaaacctctcctctttttctgtgaaaacctggtccaccacaagatcattactcaccaccttattcaccacaaccctcttaccatttactttaacaaactcatctcttcccagaactcttaaactcaacacctctttcccacattctcaccttttactaccccacaagtgttttacttgtagaaaccaggctgagccatcttctgattcagcccaagtccaagaactgagtgtgtatgagatcaatgagagagatcgtggaagccctgcttatcttagattgagcccgaaaactgtcaattcccttgatgatctaatccc

SEQ ID NO: 266618 - DNA, 318 bp, Glycine max
  unsure (1)..(318): unsure at all n locations
tgcacttccatacatttgcatggatattacgtatcagtatacgttgctcgtcgatggatttggcctggatccttggaaagagattatagtancaaatgaaattgaataccaaggtgctcttgtggaaggagcatggcctctaggcagtgccatagaagccatatcttcattgcccaaatttaataaattgatgtattttatataacacttaaagagaagtgggcttcctttaattactaaataaaatgaagctcgatgtatatcanataaaaaataaattttttattaaataatattttaaataattaattttataat

SEQ ID NO: 266619 - DNA, 415 bp, Glycine max
agaaacagtgtgatgaaaatgaaggtccttgttttctttcgtgctacaattttggtagcggggcaatgccatgcgtacgatatgttccctctccgaatgaacactggctatggtgcccgtactccggaggtgaaatgcgcaagttggaggcttgctgtggaagcacacaacatctttggctttgagaccattcctgaagagtgcgttgaagcaacaaaggaatacatccatggcgaacaatatagatcagactccaaaacagttaaccaacaagcttacttttatgccagagacctcgaagtccatcccaaggacacatttgtgttcagtatagatggcaccgtactctctaatattccatactacaaaaaacatggatatgggtggagaaattaactcgacttgtatgatgaat

SEQ ID NO: 266620 - DNA, 246 bp, Glycine max
cccacgcgtccgcgagataactagaaacagtgtgatgaaaatgaaggtccttgtgtgtctgcgttgctacaattttggtagcatggcaatgccatgcgtacgatatgttccctctccgaatgaacactggctatggtgcccggactccggaagtgaaatgcgcaaggtggaagcttgctgtggaagcacacaacatctttggctttgaaaccattcctggaaaaggccgtggaaccaccaaaggat

SEQ ID NO: 266621 - DNA, 437 bp, Glycine max
gctacttcctactccaaccgcacttctgttccgcaattatcatgggcaaggtcaagatcggaatcaacggatttggaagaattggccgtttggtagccagagtggctctgcagagagacgatgttgaactcgttgccgttaacgaccctttcatcaccaccgattacatgacatacatgtttaaatacgacagtgttcatggacactggaagcatcacgatgtcaccgttaaggacgagaagacccttctcttcggtgacaagccagtcactatttttggacacagaaaccctgaagagatcccatgggggtcaactggagctgacatcattgttgagtcccacggagtttttaccgataaggacaaggccgccgcacatttgaagggtggtgcatagaaggttattatttctgcccccagtaaggatgcccccatg

SEQ ID NO: 266622 - DNA, 428 bp, Glycine max
ccacgcgtccggttctaacatacatcaaagatattgctagatgttcaaactgttaagacacggggagtgtaactttcaatctctgtaattttcgaatttgttggacaggggatggttaggtctgagaaaacaaataattttttgatatttactgcaaaagtttataacttatgctgaaaggtcttcaaagattcagtgagattaatgatttcaggcgcgcatgcaagaaatgaaggaaaaagaactcaagtaccttgggaacggcgatgcaaattcccatgtttgtaaagtatgttttgaatctccaactgcagcaattctgcttccatgccgacatttttgtttgtgtaaatcttgttcacttgcttgttctgagtgtccaatatgccgcacaaatattacagataggatttttgcttttacataac

SEQ ID NO: 266623 - DNA, 413 bp, Glycine max
  unsure (1)..(413): unsure at all n locations
cccacgcgtccgatgatatggagcttgatgatgcagtccacacagcaatattgactctgaaggaagggtttgagggacagatctcangaaaaaacattgaaattggcataattggagctgataaaaagttcagggtattgacaccagctgaaattgacgactatttggctgaagtagaataatctgcaatgaagaactcttgtgttcctgaagttgtttgtttcacagttgggtttaattggtagcttaattattgacattgtgatggcaatagtgaatttgcgagctactcgttgtgatgaccagcaagccttcagataaacccttttccaaagtcatcaacattttcaaacaaacctagtttgtttagacggtgcggaatgacttaatgactattgctaatttattatttt

SEQ ID NO: 266624 - DNA, 385 bp, Glycine max
attttggcttctgcctttccttttccagggagctcattgacaatggctgaaacaaagtgggtgaggaaggacaaaagatggtctctccatggaatgacagctctagtcacaggaggcacccgaggcatagggcatgccattgttgaagagttagctgagtttggagcaactgttcatatatgtgcacgtaatcaagatgatattgataaatgtttagaagagtggaaaaacaagggacttaatgtgactggttcagtatgtgatttactatgttctgaccaacgtaaaagattaatggaaattgttggctccatctttcatggaaagctcaatattctagtgaacaatgctgctacaaatataacaaagaagataacagattaca

SEQ ID NO: 266625 - DNA, 310 bp, Glycine max
cccacgcgtccgtccacgcgtccgcccacgcgtccgtctaacgaaagagcgagaaagcggagacagccatggcgtcgtttcttcaatcgtttctggatccgaagaagaactggttcgccgctcagcacatgaaatccctctccaaacgcctccgcaaatatgggctccgatacgacgatttgtacgatccttactaccatctggatgtgaaggaggcgctgaatcggcttccgaaagaggtggtggacgctcgccacgcgcgtcttaaacgcgccatccatctttccatgaagcacgagtacctccctga

SEQ ID NO: 266626 - DNA, 368 bp, Glycine max
cccacgcgtccgcccacgcgtccgaaacaatgcaggaatttttggaacccctttcgtgcggtctgaagataacatcgaactacaatttgccacaaatcatatacgtcattttcttttaacaaatctgttattggatactatgaagaaaacaacacatgaaagtaagaaacaaggaagaattgttaatgtctcctcacagggtcatcaattcacctatcgggaaggaatcctttttgataaacttaatgatcaatcaagttatcaggcattccgtgcatatggacagtcaaagcttgctaacattttacatgccaatgaacttgctagacgtcttaaggaagatggggtaaatattactgctaattctc

SEQ ID NO: 266627 - DNA, 362 bp, Glycine max
gttcactgtcactttacccaatcctaacactttcttctctctgttttccttcttggtcgcgtcaatggagttggacggcgttctcctcggcatgtgcaaccctctcctcgacatctctgccgtcgtcgacgacgctttcttgcaaaaatacggtatcaagttgaacgatgcgattctcgccgaggataaacacaaacctatgtatgaagaattggctaacaatcctaatgtggagtacattgctggaggtgctactcagaattcaatcaaggttgctcagtggatgcttcaagcaccaggtgccacaagttatataggttgcataggaaaggacaaatttggagaggagatgaagaagaaat

SEQ ID NO: 266628 - DNA, 363 bp, Glycine max
cggacgcgtgggcttcgctgcccccaacgttgtgccattggcacccacaaagagtgtctgccatattaccatctttcccaccaaattgaaagccccgcgctcctcacctcgttactctccgattagggttgcaaccgtggagcccgacacttcaactgtcgactacaactctgcgttctcagtgtttcctgcagaagcatgcgaaactgtaggaggggaagcctgcatggcggagatgtaccctgaaacgaagctacagccagaggctaagactccacgagtcgttacagagaacgttgagagagagtatcttgaatacgatgatcctaaaacggtatttcgaggagaggcttgtgatgatct

SEQ ID NO: 266629 - DNA, 312 bp, Glycine max
  unsure (1)..(312): unsure at all n locations
cgcttctgattattcctcttcccattctattgttcccaaatggacgctnncggaaagacgaagaatttctctctatgaagaaaggtccacatccctaagaagaaaccgttttcaaggtccgtcaaggccggtctccaattccccgtcggaagaattggccgttatttgaagaaaggaacgtacgcccagcgtgtcagtacccgtgctcccgtttacttggccgcagttctcgagtaacctaactgctgacgtgcttgagttggcttggaatgctgcacgtgacaacaacaagaacaggattattccgagaca

SEQ ID NO: 266630 - DNA, 335 bp, Glycine max
cccacgcgtccgggcctcacaggtttgcaattctgcttccagagccgcgaggtcccttctgtcctctcgttttcactctcaaggacgtgcgcttggggctgctgcggctgtttcattgagcagcaaagtgcctcttttttacggaaagaacggttctggaaatggatccgcttcttcatcatcatcatcatcatggatttcaggagctcttgctcttcctgccgcagcttacatgttccaagatcaggaggtgcaggcagctgagctggagcgcactttcattgccattaagcctgatggaatgcagagaggcctgatttctgagattatatctc

SEQ ID NO: 266631 - DNA, 404 bp, Glycine max
gtgatttcagtgagtgatcggagttcacttgatctcatcataatcgtcagcgtcaattgaagaagatgccgatcagaaacatcgccgtcggaaggcctgaagaggcgactcaccccgacacgttgaaggcggctttggctgagttcatctcaaccttcatcttcgtgttcgccggctcaggctccggcatcgcctacaacaagctcaccgacaactgcgctgccacccctgccggcctcatctgcgcctccatcgcccatgcattcgccctcttcgtcgccgtctccgtcggcgccaacatcttcggcggccacgtgaaccccgccgtcaccttcggcgccttcgtcggcggcaacatcaccttcctgcgcggcatcgtctacgtcatcggccagctcctcggc

SEQ ID NO: 266632 - DNA, 239 bp, Glycine max
gagatttcagtgagtgatctgtgttcacttgtactcatcataatcgtcagcgtcaattgaggaagatgccgatcagaaacatcgccgtctgaaggcctgaagaggcgactcaccccgacacgttgaaggcggctttggctgagttcatctcaaccttcatcttcgagttcgccggctcaggctccggcatcgcctacaacaagctcaccgacaacggcgctgccacccctgccggcctc

SEQ ID NO: 266633 - DNA, 241 bp, Glycine max
gccaacagaagatgtttctccacattgttttcctcctttcccttctctcatccacttcccatgccactgtccaagacttctgtgtggcagaccttaagggtgcagacaccccttcaggctacccctgcaagccacctgcaaatgtaacttcagatgactttgtgtacacaggcttagctgaagctgcaaatgtcacaaacataatcaatgctgctgtgaccccagcttttggtgctcaatt

SEQ ID NO: 266634 - DNA, 280 bp, Glycine max
caaagatctgcaactctctctcatgatttttctctcggtgttgccatgacggaaccgacagagccatccacgtcatcttcattggcgagggacccaaccaccgtggttcacccaaggcgcgagccattcgagcacggcctcttgccaatcccgcgcctcatcttctccgacccgacgcaaaccctaatctcgttgaagcagaagcttctcgagttatcctctaaccagcgagtcgactcggcggcaatctccgagtcactgcagatccccattgagcacg

SEQ ID NO: 266635 - DNA, 399 bp, Glycine max
caaaggtctgcaactctctctcatgacttattactctgtgttgccatgacggaaccgacagagccgggcacgtcatcttcattggcgagggacccaaccaccgtggttcacccaaggcgcgagccattcgagcacggcctcttgccaatcccgcgcctcatcttcttcgacccgacgcataccctaatctcgttgaagcagaagcttctcgagttatcctctaaccagcgagtctactcggcggcaatctccgagtcactgcagatccccattgagcacgccaggctcgtccttgatacccttgcctcgattctgcactccgacttcgaacctctcgtcgtcggcaagctcgtaaaaatcgattccgtctgcgtctacgttcatgatctgggttttgtt

SEQ ID NO: 266636 - DNA, 269 bp, Glycine max
atcgcatcaaaaaaaaaaaaaaaaaaaaaatttaaaaataaaaaaaaaaaaaaaaaaaaaaagaaaaaaaaaaaaaaaaaaaaaaaaaaaaaaaaaaaaaaaaaaaaaaaaaaaaaaaaaaaaaaaaaaaaaaaaaaaaaaaaaaaaaaaaaaaaaaaaaaaaaaaggggaggattaaaaaaaacaaaaaagtaacaaacaaaataagaaaaaaaaaaaatataagtattgaacaaaaaagattataaaaaaaaaagcccggataaaaa

SEQ ID NO: 266637 - DNA, 437 bp, Glycine max
gaagttaaataacaagagagtgagttaagtttcagtagagagaaaatgagcgtgaaggtgaattgcgtgggtggcgacactcataacgtcttcgtgtacggtagtctgttagctgatgaagttgtccataccctattgaagcgcgtccctccaaccgcacctgccatccttcacgactatcacaggtttaagatcaaaggtcgcgtttatcccgctattctccctgtccagaataacaaagtttatggcagggtgcttcttggtatctccggagtagaactagatattttagatgaatttgaggatgttgaatatactagaactgatgttgaggtttccttgaaggaatggaaacaagttcacatgaatgatttcgtcaagatgactgatggctttaggcaagagttggagttaccaggatcaaagccaagagtgca

SEQ ID NO: 266638 - DNA, 356 bp, Glycine max
  unsure (1)..(356): unsure at all n locations
atgaacccttatcatttagtctcaatggctacaatggtggcacctttgcaccaggtagatgttctaaatacgttgccaattgtagtgctggcgattcatccactgaaccctatatcgttggacactacttattacttgctcatgaatctgctgccacattatacaagacaaaatatcaggctcgtcaaaaaggacaaattgggatcactaatccaacacactactttttgccaaaatctcaaagtgctgcagattacaaggcagcaagtagagctctggacttcttcttatggtggtattctgatccagttttctatggtgactatncggagagtatgaaatcttcagtaggttct

SEQ ID NO: 266639 - DNA, 412 bp, Glycine max
gttctttctctcgcaatcttcactacattcaccgagcatttgcattcacattgaatatggctgagactacacaatctaatgctgagttgttggagtggcctaagaaagataagcgccgcttcctgcatgttgtgtatcgtgttggtgatcttgatcgcaccattaagttttatactgaatgttttgggatgaagcttttgaggaaaagagatattccagaggagaaatatgccaatgcttttcttggatttggccctgaacaatcccattttgttgtggaattaacatacaattatggggtgacctcatatgatattggaactggatttggacattttgctatcgcaacttcagatgtttacaaattggttgaagacatccgggcttaggggtggaaatgtcaccagggaag

SEQ ID NO: 266640 - DNA, 460 bp, Glycine max
cattatagcaattcacacaacacaacacagtttaatggggaggttgtttgtggtgaatctggaagggaagatctatagctgcaaacactgccatacccatcttgcgctttacgatgacatctactccaggacattccattgcagacatgggaaagcttatctcttcaataaggttgtgaatgtttctattggcgaaatggaggacagaccgatgatgactgggttacataccgtggctgacattttctgtgtgggttgtggatcaatcgtgggttggaaatatgagactgcctatgaaaaaaaccagaagtacaaggaaggaaaatcagtgcttgaacggtacaaagtgtcaggtcctgatggaagcaattattggatcagcaatgaggcacatgttggtggaagtgatgcagatgatgcttagtcatcctaccattcccaattcaccgtatttggatga

SEQ ID NO: 266641 - DNA, 459 bp, Glycine max
cccacgcgtccggggttttttcgcttctgttatacactctgttacggcgcaacctagcaggcttcaaatccaatggcttcagagaagaaactttcgaacccaatgagggagataaaagtgcagaagctcgtccttaatatctatgttggcgagagtggagatcgtctgaccagagccgccaaggtgttggaacaacttagtggccaaaccccagtgttttccaaagcaaggtacactgttcgttcctttgggattagaagaaatgagaagattgcatgctatgtcactgtcagaggtgacaaggcaatgcaacttttggagagtggtttgaaggtgaaggaatatgaacttcttagaaggaactctagtgatactggttgctttggctctggtattcaggagcatatcgatttgggaatcaagtatgatccttcaactggtatttatggaatggatttc

SEQ ID NO: 266642 - DNA, 256 bp, Glycine max
cgtaagtttattattcttctctttgcgtctccatggacgaagaagaggtgcgcaagatcgggagcaagttcgacaagaacggcgacggcaagatctcgtgcgcggagctgaaggagatgatggcggcgctgggatccaaaacgacgtctgacgaggtgaagcgcatgatggcggagctggaccgtaacggcgacggctacattgatttgaaggagttcggcgaggtccactgcggcagctgttgctactggaggga

SEQ ID NO: 266643 - DNA, 370 bp, Glycine max
ccaacacgtgtttctgcaaccatggtgtccttcactctatcccctacaaccccttgtcaggtatgctcaggaaagagtgggattttcagaccctcacaggcacttgttgtgaagccagtgaagaggcagatgatggggaagagcaagggaatgagaattgcatgccaagccaccagcattcctgctgatagagacgctgacatgggcaaaagacagctcatgaatctgcttcttcttggtgccatttcactcccctctgctggaatgctgattgcctacacctacttttttagccctccaggttcaggtgcttcagctggtggtactggtggcaaagatgctgatggaaatgatgtaatggcagagaatt

SEQ ID NO: 266644 - DNA, 421 bp, Glycine max
taatagaataatagaggatcatgggttgctttggcttctgcaaaggagatgatagtgtcacagttgctgacagaggacctttcatgcaaagcactcctactgggaaccccagttatcatggaagacacgcagcagtaactgctcctcggactataaatgttcaacctattgctgtcccttcaattacagtagatgagttgaagcctttgacagataattttggctcaaaatgtttcattggtgagggtgcatatgggaaagtatatcaagccacatggaaaaatgggcgtgcagttgtaatcataaagttagattccagtaatcagccagagcatgaatttctttctcaggtctccatcgtatcaaggctaaagcatgaaaacgttgatgagcttgttaactattgtgttgatggtccttt

SEQ ID NO: 266645 - DNA, 399 bp, Glycine max
tcgctcctgaagtcttgaatcgacggatcgacccagcgcgtgcgtccacgcgtccggatcgagataactagaatcagtgcgatgaatatgtatgagcttgcaagaatcgtagctccagggaaagtcgcacgcaaccgcgagcgctcaatacgagaaggccgctgataaagccaagatgaagctcacaggcttcataggtgagaagagatgcgctcctgtaatgctccgaatggcatggcactctgctggaacttacgacgtgagctcagagaccggtggtcccttcggaaccataaagcacccatccgaactcgctcacggcgctaacaacggtcttgacatcgacgttaggctcttggagccactcaaagaggagttggctattttgagctacgccta

SEQ ID NO: 266646 - DNA, 383 bp, Glycine max
cccacgcgtccgctctccgcagcagccacacttcttcgccgtttcagctgaagagccatccgcaggtaagcaatggttaagcataataatgttatccccaatgggcacttccggaaacactggcaaaactatgtgaagacttggtttaatcaaccagcccgaaagaccagaagacggttggctcggcagaagaaggctgtcaagattttccccaggcctactgctggatctctcaggcctattgttcatggccagactctgaaatacaacatgaaagtcagagccgggagaggattttcactggaagaattgaaggctgcaggaattcccaagaaaactgctccaactattgggatttcttgtgatcaccgcagaaagaatcg

SEQ ID NO: 266647 - DNA, 446 bp, Glycine max
cccacgcgtccggataactagaaacagtgctatgaaattgaaggtccttgaattcttcggggctacaattcaggtagcatggcaatgccatgcgtacgatatgttccctatacgaatgaacactggctatggtgcccgaactctggaggtgaaaggcgcaagttggaggcttgctgcggaagcacacaacatcatctggctttgagaccattcatgaagagtgcgtggaagcaacaaaggaatacattcatggcgaacaatatagatcagactgcatagcaggtaaccaacaagcttactttgatgccagagacctcgaagtagatgccaaggacacattggtgttcagcatagatggcagcccactctctaatattgcatactacaaaaaacatggatatagcgtggagaaatttaactcgaccttgaatgattaatgggtttac

SEQ ID NO: 266648 - DNA, 446 bp, Glycine max
  unsure (1)..(446): unsure at all n locations
cacctttgttcactcttcttctcttgcggcttgggttttagcgcagcttcttctagatttaaggaagatgggtaaggaaaaggttcacatcagtattgtggtcattggccatgtcgactctgggaaatccactaccactggtcacctgatttacaagcttggaggcattgacaagcgtgttattgagaggtttgagaaggaagctgctgagatgaacaagaggtctttcaagtatgcctgggtgctggacaaacttaaggctgagcgtgaaagaggaatcaccattgatattgctttgtggaagtttgaaacaacaaagtattattgcacagttattgatgcgcctggacatagggatttcattaagaatatgattactgggacatcccaagctgactgtgctgntcttatcattgattcgaccactggtggttttggagctggta

SEQ ID NO: 266649 - DNA, 247 bp, Glycine max
aggcatgcgtccacgcgtccgtatcgagataatttgaatttgtgtgatgaaaatgaaggtccttgcttggttcgttgctacaattttggtagcatggcaatgccatgcgtacgatatgttccctctccgaatgaacactggctatggtgcccgtactccggaggtgaaatgcgcaagttggaagcttgctgtggaagcacacaacatctttggctttgagaccattcctgaagagtgcgttgaagca

SEQ ID NO: 266650 - DNA, 420 bp, Glycine max
gtgatatgcaaagcatgtctctctgtgcttttctctcctccacagcttcacacctcacttgccttgcctccgtctcttcttccacctctccactttcccgcaaattttctctcactttccgggaaaaaaacagaaccccaattgcaccacctcacaagctccccttcttctcagcaaggcctgcccccaccagagtagtgtaggtgaagtctcaggccacagcacctgcttcttctgaggctgtgaaggtgacaccggtgccttctgagatgaaggcatgggtgtatggagaatattggggtgtggatgttctgaagctggactccaatgttgctgtgcctgatgtgaaggaagatcaggtgttaatcaaaggtggtgctgctgctcttaaccctgttgatgccaagaggaggcagggaa

SEQ ID NO: 266651 - DNA, 377 bp, Glycine max
accacgcgttcggcagcagaaggctgttaagttcgcgacggacggcatgggcacaggtctcggcaactcgccaaccgcaaacaccggaagaatccacgcgctcctcaacttcggcaaaaagaaggcggcggcgccgccaccgaagaaaaaggaagtgaaagtgaaaccctccggcgaccggctggtgtgggttcctaatgcggagccgccggagtggctcgacggaagcatgatcggcgaccgcgggttcgacccgttcggtttcgcgaagcccgcggagtacctgcagttcgacctggactcgctggaccagaacctcgcgaaaaacgtcgccggcgatgtgaaccgaaccagggtggaaggcgccgacgttaaac

SEQ ID NO: 266652 - DNA, 451 bp, Glycine max
  unsure (1)..(451): unsure at all n locations
cccacgcgtccgcccacgcgtccggtttgctgngagctataagctagtttatcgtgaggagaatatgaagttgtttgttttctttgttgctgcagtagttttggtagcatggccatgccatggcgcaggctaccaaaggttccctctccgaatgaaaactggctatggtgagcgttcttcggaggtaaaatgcgcaagttttaggcttgctgtggaagcacacaacatccgagcctttaaaaccattcctgaagagtgcgttgaaccaacaaaggactacattaatggcgaacaatttagatcagactctaaaacagttaaccaacaagctttcttttatgctagtgaacgcgaagtccatcacaacgacatatttatattcggcatagattacaccgtactctctaatatcccatactatgaaaaacatggatattgggtggaggaattt

SEQ ID NO: 266653 - DNA, 460 bp, Glycine max
cggacgcgtgggtagggttttaggaaaagatactgtctcgcgagtgaacacaggttacagggatggctttctttggtagaattgggaatttattaagacagacagcaagcaggcaggttagttcagaattgcgatcatccccttcgttttttcaggctatacgcagtatgtcatctgctccaagcacaaagctgtttatcggaggtgtttcatattctactgacgagcaaagtttgagggaagctttttcaaaatatggtgaagttgttgatgctaggataattatggatcgtgaaactggtagatccagaggatttggctttattacatacacttcggttgaggaggcatcaagtgccattcaggccttggatggtcaggacctacatggtcgcccgattagggtgaattatgctaatgaaagacctcgtggatatggtggcggtggctttggttcata

SEQ ID NO: 266654 - DNA, 424 bp, Glycine max
ggccacctctgctattcagcaatcatcattttcaggtcaaactgctctgaagcagctcaatgagttggtccgcaagaccggtggcgccggcaaaggtcgcaccaacatgcgccgtaccgtcaagagtgctcctcagagcatttggtatggccctgatcgtcccaagtacctgggtccattctcagagcagattccgtcatacctgaccggagaattccccggtgactacggatgggacactgctggactatcagctgacccggaaaccttcgccaggaaccgggagctggaggtgattcacagcagatgggccatgcttggtgcacttggctgcacctttccagagatccttgaaaaaatggtgtgaaattcggcgaggccgtgtggttcaaggcttggtcacagatctttctcgagggaggac

SEQ ID NO: 266655 - DNA, 164 bp, Glycine max
attgaaaaaaaaaaaaaataaaaaattaaatttaaaaaaaaaaaaaaaaaaaaaaaggaaagggaaaaaaaaaaaaaaaaaaaaaaaaaaaaaaaaaaaaaagcaagaaagaaaaacgaataaaaaaaaaaaaataacaaaagtatgacaaaggaggaaacaaa

SEQ ID NO: 266656 - DNA, 460 bp, Glycine max
gtttgttgttgtaactcgttcttcttcttatgttgttctgtgtttgtgtttgttttttctggtcaccggaaaatgtcttgctgcggtggtaactgtggttgcggaagctcctgcaagtgcggcaacggctgcggaggctgcaagatgtacccagacttgagctacactgagtcaaccaccaccgagaccttggtcatgggagtggcacctgttaaggctcaatttgagggtgctgaaatgggtgtgcccgctgagaacgatggctgcaaatgtggaccaaactgctcctgcaacccctgcacttgcaagtgaggtgttcggagagcaagcttcaagcagagatagcccttaattaggaataatgataaactattaatgtgtagctaaaaacttatgtattatgtctgtgatggttttcgtgcactctggtattttggggtaaacaatcattcttagaata

SEQ ID NO: 266657 - DNA, 447 bp, Glycine max
ctgatatgctagccaaactttcttcgaccattaatggtgtacccattggcacaccgactcgtctgagctggctctttatctatccggagggaatttataagctcatgacatacataagggacaactacaataatccaccagtgtacattaccgaaaatggcgttgcggaatcaaagaatgactcacttgcaatcaatgaagcccgaaaggatggtattcgaattagataccatgatggccatctcaaatccctgcttcatgcgatcaaagatagagttaatgtgaagggctactatatatggtcattttcagatagctttgaatgggatgctggttacacagctcgatttggcatcatatatgtggattacaagaacaatttgagtagataccctaagtcctctgcgttttggctgaaaaaattccttctcaagtgatctaaatcta

SEQ ID NO: 266658 - DNA, 351 bp, Glycine max
  unsure (1)..(351): unsure at all n locations
cccaccgtccggcaatcataaagaaagctgtggctagaatcagggaattgaaggagcttggcttggaattcactgtcataagtgttggcaagaagggtaactcttatttcatcagaaggccttatattccggttgacaggtttctagaaggtggcacacttccaactgctaaggaagctcaggccattgctgatgatgttttctcactctttgtgagtgaagaggttgacaaggtggagcttctatacaccaagttcgtgtcgttggtgaaatcggatcccgtgattcataccttgcttnctctttcgccaaagggagagatttgtgatgtgaattgtgtgtgtggtgatg

SEQ ID NO: 266659 - DNA, 399 bp, Glycine max
actttttctacttaccttttctcttaatccttatacgatggcagccatggcaaccacaacgctctcttcaaaccccaaactctcattcttcaacggaaagcccgtcacatattcttcccgcgtcgcgcccaccaccaaattatcctcatccaaacaaggcacaatttccatgtccctaaccccacccccctacgacctccagtccttcaaattccagcccatcaaagaatccatcgtgtcacgggaaatgacgcgccgctacatgaccgacatgataacctacgccgacaccgacttgcgaatcgtcggagccggttcggccgggctctcctgcgcgtacgagctcagcaagaaccccggcgtgagcgttgccatagtcgagcagtcagtgagccccgg

SEQ ID NO: 266660 - DNA, 413 bp, Glycine max
gttgttgttgtagctatcagtaggtgaatttaaaaccctagccctcactctcaccaccatggtctcaagtcttgagctatgttccagggataatcgggcagggatgtacaaagaacgagagcgaggtggtgtttccgcttccgcctctaaatccgaggatcggaagcgaatcaacgactttctcgatgagcacttaggacgatcctctccttccacttaccgccccatcaacaccgcttccaagaattccaacctacaagtggaggaatctgagacggatagtgaagagtctgatgtctagtggctctgatggtgatgacacctttgggatctcgtggttctgtaatctaagagggcatgagttcttttgtgaggtggatgatgattacatacaggattactttaacctttgt

SEQ ID NO: 266661 - DNA, 210 bp, Glycine max
gattgtttgttgttgtaactcgttcttctttttttgttgttctgtgtttgtgtttgtttgggctctgacctgaaaatgtcttgctgcggtggtaactgtggttgccgaagcttctgcaagtgcggcaaccgctgctgaggcttcaagatgtacccagacttgagctacactgagtcaaccaccaccgagacctttgtcattggagtggca

SEQ ID NO: 266662 - DNA, 260 bp, Glycine max
gggaaaacaaattgtcatgtttctggactattatggttcgctgtctcctatagttgacgaggctgaccgtgctttcatgtctgattcgatgagaaaaacagtgaggaaacttgctaggtgttttcctactgctatagtgaccagcagatgcaaagacaaggtgtacaattttgttcgcttggcagagctatattaggcaggaagttatggcatggatattaaaggaccaacaagtagcttcgtatacaacatagatagca

SEQ ID NO: 266663 - DNA, 288 bp, Glycine max
attcgagcacgacgtcacgcgtacgctttcgttcacatgatcttcaacgctttcttggatgcgtgctattacagccttgggattggaaaagagagctttcctcatgatgaacttgaggcaacagcatggacagaagatggtcttataatggctgctcgtcataagaaatataagcatctacagggtgttcagtttcatccagagagcatcataaccccagaaggcaagacaattgtccgtaattttgtcaagcttatcgagaaaagggaggctggtggctcttgaaac

SEQ ID NO: 266664 - DNA, 259 bp, Glycine max
  unsure (1)..(259): unsure at all n locations
gcttcccttcactctcagttctgccacatattaacattttcggcgcacaatgaaggtcatgggcgcctacttgctcgccgttttgggaggcaacgcagccccttccgccgatgacttgagggacatccttggctccgttggagctgacgcgaacgatgacaacatcagcaacttcttgtctgaagttaagggcaaagacattgtggagcttatcgcctgcggtagggaaaagctggcctncgtgccttctggcggtggc

SEQ ID NO: 266665 - DNA, 184 bp, Glycine max
atttaactcatatcatcttcaggcctttcttggctggtagatatcacagcctcggaattgaaaaagagagctttcctcatgatgaacttgaggcaacagcatggacagaagatggtcttataatggctgctcgtcataagaaatataagcatctacagggtgttcagtttcatccagagaggat

SEQ ID NO: 266666 - DNA, 173 bp, Glycine max
cccacgcgtccgcctcactcaaacttgggattacagaaaccaacaacagttcttgcactgaggtttcacgatgttgctggaacttgcacttggtttgtttgtgttagctttgtttctgcacttgcgtcccacaccaagtgcaaaatcaaaagcacttcgccaccttccaaacc

SEQ ID NO: 266667 - DNA, 354 bp, Glycine max
gcctgttcatcattctcatatgctcaatcattcccgctcgcactcgctcttcccttcctctggtggcgacaatgtcaactcctgctaggaagaggctgatgagagacttcaagaggctgcaacaagacccggctgcagggatcagtggagccccccaggataacaacataatgctgtggaatgctgtcatatttggtcctgatgatactccatgggatggaggcacgttcaagttgacactccaatttactgaggactatccaaataaaccaccgactgtacgatatgtgtctcgcatgtttcatacaaatatttatgctgatggaagtatttgcttggatatattacaaaatc

SEQ ID NO: 266668 - DNA, 459 bp, Glycine max
  unsure (1)..(459): unsure at all n locations
cggacgcgtggggttttttgtagcagaatttatgtgcggtgtgttgtagcagcgattagaaggaaggaggaaagatgaacacagacatcactgcatcgacgaagccagagtacccagtcattgatcgcaaccctcctttcaccaaagtcgtcggcaacttcaacaccctcgactatctccgattcgtcacaatcaccggcgtttccgtcaccgtcggctacctctccgggattaagcctggaattaggggtccttcgatggtgacagggggtttgatcggagtgatgggtgggttcatgtatgcttaccagaactccgctgggagactcatgggtttcttccccaacgatgatgaggtagctcgctacaacaaaaaataattcctttttttgtgctcatcatanaacatanacaaaaaaaaaacccttctttgtgccagtgtttgaacttcaataatca

SEQ ID NO: 266669 - DNA, 347 bp, Glycine max
gagagagcgagcagtttcagacacagagagtggggtttgggattggagggattgacgctgcgtctcttcctcttctctttcgatccatccctcattcctaatcctgcaatccaaccacctcagcctcacactcacatatacacatatctgaacgcgtatcgtccctcctatggcttcaaagcgcatcctcaaggagctcaaggacttgcagaaagacccaccaacttcttgcagcgctggtccagtagctgaggacatgttccattggcaagcaacaataatgggtcctgctgatagtccttatgctggaggtgtattcctagtcactattcacttccttccgatta

SEQ ID NO: 266670 - DNA, 333 bp, Glycine max
cccacgcgtccgtccacgcgtccgtttgcattgaccattgtcttccaatttcagtgtgtgacatggaaattggaaaaactgttgagcaatttgccgtatgacgatttggacatctcagaggaagtcaaggagcaggtggatttggtgagaacacaattgagacgagccacggataaatatgggtttatgatttcaaagatgccatctcatgaattatcccagccactggctgaagaaattagtcaggttcttggcaaatctgtgagtaggttgcacaaacaacacagctgccctgaagattatcagaactagacagcattcctatcaactatg

SEQ ID NO: 266671 - DNA, 280 bp, Glycine max
cccacgcgtccgcccacgcgtccgggaactttcgctagtcgcctgtccaacctgctcggcgggcctcacatggccaccgtcgatctcgatcgcgacgaactcgccttctacgactccctggctttccagctatcagaaattgtaaaacaaggtcaattggtgtcagatgaaattattatacgtttattgacaaagagacttgcagctggtgaagcttaatgcgaactgggatttatacttgatggtgttcctggaacaattaagcaagcataaatcttgg

SEQ ID NO: 266672 - DNA, 449 bp, Glycine max
gtttgttgtgagctataagctagtttatcgttaggagaatatgaaggtgcttgttttctttgttgctgcagtagttttggtagcatggccatgccatggcgcaggctaccaaaggttccctctccgaatgaaaactggctatggtgagcgttcttcggaggtaaaatgcgcaagttttaggcttgctgtggaagcacacaacattcgagcctttaaaaccattcctgaagagtgcgttgaaccaacaaaggactacattaatggcgaacaatttatatcagactctaaaacagctaaccaacaagctttcttttatgctagtgaacgcgaagtccatcacaacgacatatgtatattcggcatagataacaccgtactctctaatatcccatactatgaaaaacatggatattgggtgcaggaatttaaagaaaccttatatgatgaat

SEQ ID NO: 266673 - DNA, 442 bp, Glycine max
tccggttcgttgtgagctattatctacggtatttttaggagtatatgaaattgcatgtgttctcaattgggggaatatttttgctccatggccaatccatagcacatgctaccaaatgttttctttttgaatgaaaacttgtttatcgaagcatcctactgccgaaaaatgcacacctattaaacttgctactgaagcacacaacattcttatcctttaaaaccattctctaatagtgcgatgaaccaacaatggactacattaattaccaacaattcatatcatactctaaaacagtatacctacaaactttcttttattcttctgaacaccaagttcattacaactacatatttatatttgacatatataacaccgtactttataatttccatacattaaaaacattttttttaattaaggaatttaatgaaaccttata

SEQ ID NO: 266674 - DNA, 463 bp, Glycine max
agaaagaatcccaggcgaggagaaagatggttgggaaggagcaggatgtgtcgttgggagcgaacaagttccccgagagacagccaattgggacggcggcgcagagccaagacgacggcaaggactaccaggagccggcgccggcgccgctggttgacccgacggagtttacgtcatggtcgttttacagagcagggatagcagagtttgtggccacttttctgtttctctacatcactgtcttaaccgttatgggagtcgccggggctaagtctaagtgtagtaccgttgggattcaaggaatcgcttgggccttcggtggcatgatcttcgccctcgtttactgcaccgctggcatctcatggggacacataaacccggcggtgacatatgggctgtttttggcgaggaagttgtcgttgccccaggcgattttctacatcgtgatgcaatgctagggtgc

SEQ ID NO: 266675 - DNA, 384 bp, Glycine max
cactcttctagctccttgcaatggctgactttgatcgctcttctagtgaaatttctacacgttctactgattcagggaggcgagggtcttccaaagttgaattttctgaagatgaggaaactcttatcatcaggatgtataaactgctaggggagaggtggtctttaattgctggaaggatttctggaagaacagcataggaaatagagaagtattggacttcaagattctcaggttctagtgaataaggtgccaagagttctactacgattggtgttcagtctacgatgagcaagaagattttgcgtgcaagattagtgtgattttgtgggacataaaaactgaattaaagttggccttattgtatacgtatgtgtatttgta

SEQ ID NO: 266676 - DNA, 387 bp, Glycine max
gttacgttacctatgggacatttgagctgctagtacatatatgtgcgggtgacaccgagaaggaaagcaggaaaaaaacaaaaaggagcagatgggtagctcaggtttatcatggaaattggcggatcatccaaagcttgcaaagggtaagactgtggctgttgtggtattggatggttggggagaggccacacccaatgagtacaactgcatccacaaggccgaaacaccctgcatggattcacttaaaaagggtgctcctgaacggtggagattggtcagggctcatggtactgctgtaggacttccaacagaagatgacatgggcaatagtgaagttggtcacaatgaccttggagctggtcgcatatttgctcaaggtgctaa

SEQ ID NO: 266677 - DNA, 382 bp, Glycine max
aacaggcgtgctggtcctatgcctgtgctctgcagttgattgagaggcttgtttatgctgagggtgctgaaaatggcttggaattcacaattgtgaggccttataattgtattggaccacgtatggatatcattcccggcattgatggcccaagtgagggtgatcctagtattctggcatgctttagcatcaatctcctacgaggagagcctctaaagcttgtggacggtggccaatcccagaggacttttgtgtatattaaggatgctattgaagctgtcttattgatgattgaaaatcccgccagggctaatggacatatttttaatgagggaaacccagacaatgaggttacagttaggcagcttgctgaaatgatgac

SEQ ID NO: 266678 - DNA, 265 bp, Glycine max
acggtcacacgaacgggactctcaacgcttacctgtaaggacatttgatgctaactggattcctcacactcgcttaagggaaaccaccgtactcagatcaagatgccagtctttcatggcaatatgcacttcttatgagaccacaaaccttgatgcatcatagctgaccagcattaagcttgcagtgaaactgactgctaggtatgaaacgacttatgtctaaaaattacatgaagacttgttattagtgcatgaaatggcattc

SEQ ID NO: 266679 - DNA, 221 bp, Glycine max
gaaggacgttcgaactaataacagggtaactgctgcatgaatgatctgctaccgggatgttaccaccgtcaaccgtgccagtgccggcatgattgctagatgaagtttcctcaggtccatggctggctttcatacgctgtaaaactgcaagtgacattaccgacattgaatgcaactgtggatgagtgcattgcaggcatgagttgactgatatcgtcaag

SEQ ID NO: 266680 - DNA, 397 bp, Glycine max
ggagtgttcggggtagacgtacgcgtacgctagaaacagtgtgatgaaaatgaaggtccttgttttcttcgttgctacgattttggtagcatggcaatgccatgcgtacgatatgttccctctccgaatgaacactggctatggtgcccgtactccggaggtgaaatgcgcaagttggaggcttgctgtggaagcacacaacatctttggctttgagaccattcctgaagagtgcgttgaagcaacaaaggaatacatccatggcgaacaatatagatcagactccaaaacagttaaccaacaagcttacttttatgccagagacctcgaagtccatcccaaggacacatttgtgttcagtatagatggcaccgtactctctaatattccatactac

SEQ ID NO: 266681 - DNA, 374 bp, Glycine max
cttccatcaagatcagaataataatgtaactaggagtgatggttgctacggttttggtagcatggcaatgccatgcgtacgatatgttccctctccgaatgaacactggctatggtgcccgtactccggaggtgaaatgcgcaagttggaggcttgctgtggaagcacacaacatctttggctttgagaccattcctgaagagtgcgttgaagcaacaaaggaatacatccatggcgaacaatatagatcagactccaaaacagttaaccaacaagcttacttttatgccagagacctctaagtccatcccaaggacacatttgtgttcagtatagatggcaccgtactctctaatattccattactacaaaaa

SEQ ID NO: 266682 - DNA, 417 bp, Glycine max
cccacgcgtccgcgcaaacaaaatcaagtagtaagagcgagaagagaggagaagaaagggagagagataatgcagtgttatggcttaaccgtaccgggaagcgtgcccaccgtatctccagtgttcttgaggcccaacaggcccattatcgcgacccgaatcgcgtttcccaaggcgaccctgaataagaaccagggcttcgtggtggagctgagcttctacgagcttctgggcatacccgaatcggtttcggtaacggagatcaagaacgcctacaagcaactcgcccgaaagtaccaccctgacgtgtcgccaccgggtcgggtcgaagagtacaccaagaggtttattcaggtgcaggaggcctacgaaaccttatctgatcctttccgaagagctatgtacgataaggacatg

SEQ ID NO: 266683 - DNA, 389 bp, Glycine max
  unsure (1)..(389): unsure at all n locations
ggaatattcgacaggtagagtttcttcaatggctcctaaagttgataagaagaatgatccaaaggcccaggccttgaagactgctaaggcagttaagtcaggtgctacctttaagaagaaggtaaagaagatccgaacttctgtcactttccacaggccgaagaccttgaagaaggacaggaaccccaagtaccctcgcattagcgccccgccgaggaacaagcttgatcattatcagatcctgaaataccccctcaccactgagtctgccatgaagaagattgaggacaacaacactttggttntcattgtcgacctgcgtgccgacaagaagaagatcaaggatgccgtgaagaaaatgtatgacattcaggccaaaaaagtgaaca

SEQ ID NO: 266684 - DNA, 387 bp, Glycine max
acgcccacgcttccggcagaaatttagctcgaccttgtatgatgaatgggttaacaagggcaatgcaccggcactgcccgagactcttaagaattacaacaagctggtgtctcttggcttcaagattatattcttgtcaggaagaacactggacaaacaggccgtaacagaagcaaacttaaagaaggctggctaccacacatgggaaaaattaattctcaaggatccacaagatccttccactccaaatgcagtttcatacataacagcagcgagagagaaactgataaggcagggatacaacattgatgggatcattggagaccaatggagcgatctcctcggaggccacagaggcgaaagcaggacctttaagctttctaatcc

SEQ ID NO: 266685 - DNA, 339 bp, Glycine max
cccacgcgtccggagaaatttatcttgaccttgtatgataaatgggttggcatgggctatgcaccgggactgcccgagactcttaagaattacaacaagctggtgtctcttggcttcaagattatattctagtcaggtagaacactgtacaaacatgccgttacagaatctaacttactgaaggctggcttactactcacgggaaaaattaattcttaaggatccacaagatcctttcacttcaaatgtcagtgcattcaattcagcaactatagatatactgatatggcaggtatacatcattgatgggatcattggataccaatggagcgatctact

SEQ ID NO: 266686 - DNA, 384 bp, Glycine max
acgcccacgcgttcggagtaatgtttctcgttcttgtatcatgaatgtattgggaagggctattcttagggtctgacttcgactctctctgcaatgcatcccgtatggactctctatggctcatgagcataatcgcgtctcgttgaactattcactatcagcccgtttcagatgcctcctttccgaaggctggctacccctcatgggagaaattgattctgaaggattcacaagatcctttcactctaaatgcatttttatacaaaacagcatcgagagataaactgattaggcagggatacaacattgttgggatcattggagaccaatggagcgatctcctcggaagccacatacgctaaagcaggacctttaagcttccta

SEQ ID NO: 266687 - DNA, 384 bp, Glycine max
cccacgcgtccgatggcaacagaaacaaaagtggcagtattaggtggcatcaccgaagtgcagggagctgccaacagcgtcgagatcaacaatctcgctcgctttgctgtagaggaacaaaacaaaagagagaattcagttctggagtttgtgagggtgattagtgcacagcagcaagtggtttctggagtgaattactacataacattggaagcaaaagatggtgagattaaaaatgagtataaagcgaaggtttgggagagggaatcccaagagttgctagaattcatgccaacattaggtgcaggaggcgagatcgaccatctcgctcgctttgctgtagaggaacaaaacataagagagaatgcaaatctggagtttgtg

SEQ ID NO: 266688 - DNA, 307 bp, Glycine max
cccacgcgtccggaaaaaaaaaacagaattacacagaaactgagtcagggtaaaaatttattatggatcataggttacgttgttttgtgacaatacccaaaattccttttctatcgctactgcctctgattctcgtcttcagatacgttcacacatccttcgacctcgctactatacccttcaacgatggctattctccgctcttcggagatagcaacgttgctcgctcagaggatggcaacggcgtacaactccggctcgatcgctacacaggttcgggtttcatttcctacagtatgtaccagta

SEQ ID NO: 266689 - DNA, 330 bp, Glycine max
cccacgcgtccggttacatattccaagcctacacatatattaagaagggcgcattatgcactattgacataggatccatagcacttctacttctccatcatttcttctgaatctctatttcctcttattattcacgacaggcgtgtcttcactgcctttgaactcattatgataccaactgtcagtgaggattttgcataggaatacgatcgagctattgcagaattacagaaattgttcagggtgaagagtgtactcaaagtcacaactgctgagatagtgtagcatataacagcatctctgggatcatcatcatatgatggcattcta

SEQ ID NO: 266690 - DNA, 332 bp, Glycine max
cccacgcgtccggcaatgtgggattgattttcaccaaaggtgacctgagggaggtcagtgaggaggttgccaagtacaaggttggagctcctgctcgtgttggtttggttgccctaattgatgctgttgttcctcctggcaacacagggctcgatccctcccagacctgtttcttccaggtgctcatcattcctaccacgattaacaagggttctgttgaaatcattacccctgtggagctcattatgaagggagtcatggttggatcttctgaagctgctttgcttgccaatctagtgatatggcccttcttgtatggtcttggggttctt

SEQ ID NO: 266691 - DNA, 301 bp, Glycine max
taccacacatagatccattcatcaattctaatggccgatcatctcaccggctaacgtatctccgaaatcaaggaagccttcagcctctttgacaaggacttgtatcgttgtattaccaccaatgaacttttgaccgtgattccgtcactttaccataacccatctgaggcatagcttcatgacattatgaatgacgctttattcttataggaatgttaccatttatttcccataattccttaatctcatgtctttcacgattaaatacactgattcagattataatcttaatgaggctttc

SEQ ID NO: 266692 - DNA, 408 bp, Glycine max
gatagagataactagaaacagtgtgatgaaaatgaaggtccttgtttggtgcggggctacaattttggtagcatggcaatgccatgcgtacgatatgttccctctccgaatgaacactggctatggtgcccgaactccggaggtgaaatgcgcatgttggaggcttgctgtggaagcacacaacatctttggctttgagaccattcctgaagagtgcgttgaagcaacaaaggaatacatccatggcgaacaatatacatcagactcctgaacaggtaaccaacatgcttacttttatgccagagacctagaagtccatcccaaggacacatttgtgttcagaatagatggcaccgtactctctaatattccatactacaaaaaacatggatatggggtggagaaatt

SEQ ID NO: 266693 - DNA, 390 bp, Glycine max
cccacgcgtccgcttttggtccaatgcagcataaacacctaatagtttagccattttttctctcgttttattcagtaacaacaatttcattcagtcaagggtgcaaagagagtcatggctggagcattaaaaaagtgcatgatgctgtgttgcacgagcatgattgtctcgaatgaagaaatggcaggagaatcatacgaggaagccatcgcgagtctgaccaagcttctcagtgaaaaagctgacctcggtggtgttgccgccgcaaagatcaaggatctgacggctgagcttgatgccgacggttcgaagccgtttaacccgtacgagaggatcagaaccggcttcatccaatttaagaatgagaaatttgagaaaaatcctgatcta

SEQ ID NO: 266694 - DNA, 383 bp, Glycine max
cacacgcgtcacatcatggcagctgcttatcctatggcaagctaactcgagtcgggcttcactaaaactcttgtagctcccaacggcctctctgtctattcactactcaacctcctgccttctaagaagcagtttagcttgactgttagggccatgcaatctgtaaggccaacctatcaagcgattcaaccaatcaacggtgatcccttcattggaagccttgaaaccccagttacattcagccccttgattgcatggtacttatcgaacctgcccgcatacaggaccgcactgagcctactactaagagggatcgaggtgagcctgtcccatggctaccttttagagggcccattcgttaagggctagtctcttaggaacac

SEQ ID NO: 266695 - DNA, 313 bp, Glycine max
accacgcgtacgcgaaccttgcattgtatctacccacttctcaaccaagaatggggatggcaacccaagcctgtctcttcaccccacccctctccggtctcaaacccaacgaccgagccaccgagccatggaaacaatcctgcagcctctacttctccacctataagcccatcaagttctcgcgaacaatcagagcagcagtcaccgaccagaccacataggcaccggttgggttcaccccaccggaactggacccaaacaccccttcctcgaatctttgatgcagcaccggcagacttctgcgcaaggccca

SEQ ID NO: 266696 - DNA, 390 bp, Glycine max
atttcgctgcgcctctgttctctgtcactgctgcgtgtgtcgtaaccatgcctgggcacatccacgagattaaggacttccttgtcactgctagaacgaaggacgcaaggtcggtgaagatcaagaggagcagagatgtggttaagttcaaggtcagatgctcgaagtacctctacacactttgtgtgtttgacccagagaaagctgataaatcgaagcaatctcttcctgcaggtttgagtgttcaagacctgtagaggtacagggcgagagaccaagacgaagcagttcattgattcttctgaacttcgtttctctgtagttgaaacttgagattcttttgaggttctcttatttgtagatcattgctaggacatggatgctttcatc

SEQ ID NO: 266697 - DNA, 391 bp, Glycine max
cccacgcgtccgcacggctaataaatacggccggcacactttcactgcgtcaagaaaggaagaaacataccgaatgagagcatcaaactcttcttcttcgatttccattgcgaagcgttactttttcttcttctttctcttcattttcttcgctcttcgatcttcgtccggggactgctccgaataccaccaccaccactcgccgatggccacgatcggaggcttacacgactcccaaggctctcaaaacagcgtcgaaaccgaagcccttgctcgattcgccgtagacgaacacaacaagaagcagaattcgcttctggagtttgctagggtggttagggcacaggaacaggttgttgctggtaccctgcatcaccttactcttgaggct

SEQ ID NO: 266698 - DNA, 368 bp, Glycine max
cacacgcgtacgtccaactcaccctatcaggctgcgcgttgctcagaagttctggcgcttttactatcacattgttaactctcctgatcggacttgcagccttgcataacaggcttttgatgaggctattgtagaattggatacattgcgagaggagtcatacatggatagcacttcgatcatgcatctgctacgagataacgcttactctctcgacctaggacctgttggatgattgtacagattatgatctagaaaccgcacccaaaggtgacggcgaacaaaatcaaacataccatgactctgagcttattagtcattgaacataccttttggaatggttcatagggagaacgtgttgaatgcta

SEQ ID NO: 266699 - DNA, 347 bp, Glycine max
cccacgcgtccggagcgagctatctcggaacagagcgttgaaaatgaaggtgcttgcattgttagcagctacaattttgagagtatgacactgctctgcgtacgatatgttccgtatcagaatgaacactggctatggtgccagtacttcggaagtgaaatgcgcaagtcggatgctagatgcagaagcactcaacatctcaggctgtgataccattcctgagtagtgcgatgaagcaccaaatgaatacattcattgcgaacaatatacatcacactacaaatcagctaaccaactagcttacttttatgccaaagaccttgaactgcattccagggacacatttg

SEQ ID NO: 266700 - DNA, 385 bp, Glycine max
aataaataaatattttccgagccgtatgaatattgagtcacaccgaaccgtgtggttcttgctagccagccagatcatctgcaaggacttgttctccttccttcccaacagccatgtcttcttttcttcccgcctcagccgagtcacttgatctggcagtggaggccaaagacccgtctgagtccatctccattctttatcaggtacttgatgatccttcttcttctccagatgctctgcgcatgaaagagcaggccatcacaaacctcactgagcatctcagggaacagaatagggcagaggatttgcacagccttcttacacagttgaggcccttcttttccttgattcctaaggcaaaaactgcaaagatagtgaggggcat

SEQ ID NO: 266701 - DNA, 381 bp, Glycine max
aatcaatctagctgttgcaaattgctactatttttcaatggcttctgcggatggggacttgcgaggctttgttggtgggcttgcttgcgtcaccggctacgatgccctagagaaagccttttcaatctacggcgacatcgatgaatctaaggttatcaacgaccgtgagactggaatgtccataggattcgagatttgtgaccttcgtctcagagcagtcaatgaaagatgctatcgcaggaatgaacggccaggaccttgacggccgtaacatgactgtcaacgaagctcagacccgcgccagcctgggcgatggtgcaagcaatggtttcggaagtggtggtggatacaaccgaggtatcgctggatatggtgttagtg

SEQ ID NO: 266702 - DNA, 391 bp, Glycine max
ctcatataatactctgtatcatttcatttcgataatcatccatagctactgaagaaaatggcaaccatctctgctgctatcacaaccccatcgatctcccgcgcaactcttgtgcaaaagcgggtctcatctcccgttcttggtttgccagcaatgggtaaggtgggaagagtgagttgctccatggaggaaaaaccttattctgtgaaggaaagcagctctagcatgttggggatgggggcatctctgatggcagctgccagcgctgcagccatgtcaggcccagccatggccttggtagatgagagactgagcactgaaggaaccggacttccctttggcctcagcaacaatcttcttggttggatccttttcggcgtctttggtctta

SEQ ID NO: 266703 - DNA, 341 bp, Glycine max
gagatacctagaaacagtgtgatgaaaatgaaggtccttgctttcttgggtgctacaattttggtagcatggcaatgccatgcgtacgatatgttccctctccgaatgaacactggctatggtgcccgtactccggaggtgaaatgcgcaagttggaggcttgctgtggaagcacacaacatctttggctttgagaccattcctgaagagtgctttgaagcaacaaaggaatacattcatggcgaacaatatagatcagactttaaaacagttaaccgacaagcttacttttatgccagagacctttaatttcattctaaggacacatttgtgttcagtat

SEQ ID NO: 266704 - DNA, 407 bp, Glycine max
atggcaaccatctctgctgctatcacaaccccatcgatctcccgctcagctctggtgcaaaagcgggtatcatcttccgttctcggattgccatcaatggctaaggtgggaagagtgagttgctccatggatgaaaaaccttattctgtgaaggaaagcatctctagcatgttgcagatggcggcatctctgatggcagctgccaacgctgcagccatgtcaggcccagccatggccttggtagatgagagactgagcactgaaggaaccggacttccctttggcctcagcaacaatcttcttggttggatccttttcggcgtctttggtcttatctggactcactattttgtctacactttcactcttgaagaggatgaagagtcatgactgtccctttaaatatc

SEQ ID NO: 266705 - DNA, 390 bp, Glycine max
cactcactcattttgcaaagagagagagagagagagagagagaaatggcactgagggcagccgtactccgccacgttcgtgtgccactccaagccgctccgaaactgcagccatggcgtgccatgtcatcacacggcgacgatcatctctccaaagaggaggtcgtcgaaagagtcctcgctgtcgtcaaagatttccccaaagtcgatccttccagggtgagtccagatgtacatttccagaaggatttgggtttggatagcttggacaatgtggaaattgtaatggcactagaagaggagttcaagctagagatcccagacaaggaagctgataaaattgactcttgtcatcttgctattgagtatatttctaaccatccaatggctg

SEQ ID NO: 266706 - DNA, 392 bp, Glycine max
aatcctaatgcatagtgtatcattacgggtcatagtttgggtggagcactcgcaatcttgtaccctacgatcatgttcttgcatgatgagaagttgctgattgagaggttggaagggatctacacgtttgggcaaccaagagttggagatgaatcatatgcacagtatatgagacatatattgagggaaaattctatcaggtattgcacgtttgtttattgcaatgacataattccgaggttgtcctatgatgataaggacttgctcttaaagcactttgggatctgccttttctttaacaggcgctatgaactcatgattctcgaagaagagccgaataagaactatttctcgccatggtgtgtgatacccatgatgttcaatgctgtttt

SEQ ID NO: 266707 - DNA, 356 bp, Glycine max
cacacgcgttcgacttcacccaatcactgggttagtacggacacaaactgagaagccatactcacatcaaacaatacaaccatgcttaagccaacaacaccttctcagatcttacaatgatatttaaatcgcgtatgatgatgactgcaactctgcatattatgagttatagcacaacgtgttgcgggagataattcactctcacaagctgataagataagcactttgacagggcagccacgagtcaaattccagcaatatgctggttacattacagtggacgacaagcataagagagccttggtttactactttgttgaagctgaagtggaaccagctttaaagctactagttct

SEQ ID NO: 266708 - DNA, 426 bp, Glycine max
atttctctttctttctcaaagctattataattgtaaaacatacgggaacagtaaattttaataaaagttggattatcaaacatatcatactatcttattaattcctacactgtctttctctttttcttttcctttatttttctttttttctgttacctttcttctttttttttttctctttttttttttctcttattttttttcttttcttttgttttttcttttttcttttttttcttttttttttcttttctttattcttcttttttctttttttttttttttttttcattttttcttttattctctttttttttttactttattttttatttttattctttttctttttattttttttctctttcttttcttttttcttttttgtttttttattttttctttttttttttttctttttttttt

SEQ ID NO: 266709 - DNA, 280 bp, Glycine max
cccacgcgtccgaattaatcttgtggacaattaacatctcaaaaaaaagaaaaagaaaaaaaaaaaaaaaaaaaaaaaaaaaaaaaaaaaaaaaaaaaaaaaaaaaaaaaagaaaaaaaaataaaagataaaaaaaatgaaaaaaaattataaagcaaaaatatattaattcaattgaccgacttaatacaaattaattactgtctaaataatagcatcacgaaagtaaaaccctttacataacataatttattggcattgtagaatattacctattaaa

SEQ ID NO: 266710 - DNA, 388 bp, Glycine max
gtcactcaagcggtaagaggcatattggcacagctggggtatgagaagtgggaggatgtgattggccggactgatttgttccaaccaagagacatatctctagcaaaaactcagcatctagatctgagttatatcctctctaatgttgggttacctaaatggagcagcacagaaattaggaatcaggagcctcataccaatggtcctgttctggatgatgttttgctagcatacccagagattgcctatgccattgaaaatgaaaaggtggctaataagaccataaaaatatacaacattgatcgagctgcatgtggacgtatagctggtgtcattgcaaataagtacggtgacactggttttgctggacagtttgaatattacattt

SEQ ID NO: 266711 - DNA, 389 bp, Glycine max
cccacgcgtccggagaattatggaaattgatgagcacatcggttgtgcagtgagtgggttgattgcagatgctcgaacacttgttgagcatgcacgggtggaaactcagaatcacaggttctcctatggtgagcctatgactgttgagtccaccacccaagctctttgtgatctagccttgcgctttggtgaaggtgatgaagagtccatgtcccgaccatttggagtatctctcctcattgctggtcatgatgagaatggacctagcttatactacactgatccatctggcacattttggcaatgcaatggcaaagctattggttcagggtcagaaggtgcagacagttctctacaagaacaattcaacaaggacctaacccttcaag

SEQ ID NO: 266712 - DNA, 396 bp, Glycine max
cccacgcgtccgctcagtaatctgagagagaaacaaaaacaatgaaggtgtccattgccaagttccactcccttcccctatgttttttccttctcttggccttcaacacaaaacccctcctagcagcagaaccagagccagtggttgataagcaagggaaccctttggagccaggagtagggtactacgtgtggccactttgggctgatgaaggaggcctcacactaggccaaacaaggaacaagacatgccctctttatgttatccgtgacccttcattcattggcaccccagtttcattcttagcaccaggccttgaccatgttccaacactcactgatctaaccattgatttccatgtggtgacagtgtgtaaccagccaacagtgtggaggc

SEQ ID NO: 266713 - DNA, 388 bp, Glycine max
cccacgcgtccgagaggcgagtgatatacatcgtgcctcctcattccgggctcccattccaccggagagagagagagagagggagagggagatggtgtctctgaaacttcagaagcggcttgccgcaagcgttctcaagtgtggtagaggcaaggtttggcttgaccctaatgaggtcaatgaaatctccatggccaattctcgactaaacataaggaagttggttaaggatgggtttattatcaggaagccaactaagattcactctcgctctcgtgctcgtcgaatgaaggaggccaagatgaagggacgccactctggatatggtaagcgtaagggtacaagagaggctaggctccccaccaaaatcctttggatgaggaggatg

SEQ ID NO: 266714 - DNA, 393 bp, Glycine max
cccacgcgtccgcaaaaagaaggctacaccaacacctccaaaaaaagctgctgctgctgctcctgccaatgatgagcttgccaagtggtatggtcctgacagaaggatcttcttgcctgagggtctcttggaccgatccgaaatcccagagtacttgaccggagaagtccctggagactatggttatgacccatttggtcttagcaagaagccagaagactttgccaaatatcaggcatttgagttgattcatgccagatgggcaatgcttggtgctgctggattcatcattcctgaggccttcaacaaatatggagcaaactgtggtccagaagctgtttggttcaagactggagctctgcttcttgatgggggtacgctgaactactttgg

SEQ ID NO: 266715 - DNA, 374 bp, Glycine max
attaattctcaaggatccacaagatccttccactccaaatgcagtttcgtacaggacagcagcgagagagaaactgataaggcagggatacaacattgttgggatcattggagaccaatggagcgatctcctcggaggccacagaggcgaaagcaggacctttaagcttcctaatcccctgtactacattcagtagttccttcacctctcaacaatctagcttgctcctatctatctatatgtaataagatgcgttcaaataggggcactagcttcactttatgttgtttcagctgtgtgtcaacaagtcatgtaagagacttcactatgttgttttctctttcgtggctttaataaattatgcgcccttattt

SEQ ID NO: 266716 - DNA, 284 bp, Glycine max
cccaattcgaccacacgtacgaataataatcaagaatccacaatatccttacaattcaaatacaaaatcgtacaagacaacaactaaaagagcaactaataaaacaaccatacaacatatgataagatcattgcataccaatgatatctatctcctatcacgccataatattcgaaagcactacctttaaacttcctaaatccatagactacaatccttaatccctttatctttcaacaatctatctttctcttatatatctatatataatatatttctttcaa

SEQ ID NO: 266717 - DNA, 282 bp, Glycine max
gcgtccacgcgtccgttcaaatcttaaaaatattcagtgaagatcaacctcaatggcatcgcgtggcgtgcgaccagttcttccccctccattaacttccatctccgacccacctcctcttttcgatggcaccaccaggttgtacatcagttattcttgcccctatgcacaacgtgtgtggatcgctaggaactacaaggggctacaagataagatcaatttggtccctattaaccttcaagacaggccagcttgtataaggagaaagtctaccctgaaaat

SEQ ID NO: 266718 - DNA, 401 bp, Glycine max
cccacccgtccggccagaaagaatctattgctctgaagtaattgggcctcgtcttgaggggagcaagaatggttctctaacattttatgcaccggatgacaagaagtttccatcggagaatctttgctatgctgcgggacgtgctggaggcaccatgacaggagttcttagtgcagcaaatgagaaagctgtagaaatgtttgttgaagaaaagattagttatctggatatattcaaggctgtggaactaacttgtcaggaacatcaaaaggaattagtagcatctccgtcactcgaagaaattattcactatgaccaatgggctcgacaatatgctgctagtctgcaaaaagcgttaagtgtttgaatcccatatttctgacatattttagaagttgggg

SEQ ID NO: 266719 - DNA, 334 bp, Glycine max
acgcgtcacgcatacatccaaatcttaaaaatattcagtggagaacaacactaaagtgggctctgttggcgcgcatatccagcatgcaggcatcacaggcaaggctgttcaaggagtacaaagaggtgcagcggcaaaaggctgtggacatcaataattaactaccctatgcacaatcaaacattattgaatggaacgatcttatcaatggaccctctgagactccttatgagggtggtgtgttccagcttgcgttttctgttccggagcagtatcctttacagccacctcaagtccggtttttgactaaaaaatttcacccaaatgtgcattt

SEQ ID NO: 266720 - DNA, 153 bp, Glycine max
cccactcgtccttccacacgtccttaaacagtgtgatgaaaatgaaggtccttggtgggttttttgctacaattttggtagcatttcaattccatgcgtactatattttctctcttttaatgaacacttgccctttaacaagaaaatctttta

SEQ ID NO: 266721 - DNA, 381 bp, Glycine max
gaaagggtcatagggtactgttgtggttagggattcgaattttgattatcgaatggcggaattctgaatcaatcaatcagtaattagagccattaacgactgcaatggtctgcgagaagtgtgagaagaaattatcgaaggtgatagtaccagacaaatggaaagaaggggccagcaatactaccgagggtggtggccgcaagatcaacgagaacaagcttctcttcaagaaaaacagatggaccccttacggaaacactaagtgcaccatttgcaagcagcaagtgcaccagaatgctaagtactgccacacctgtgcttactctaaaggagtttgtgcaatgtgtggaaagcatgttcttgataccaagttttacaaac

SEQ ID NO: 266722 - DNA, 353 bp, Glycine max
  unsure (1)..(353): unsure at all n locations
cccacgcgtccgaatgagctgtaaatttatagcatggctgcacaagctcttgtatcaggagcatctcttaccttctcagccgaggctacaagacaaattcttggaccaagatcactccaatctccattttgcttctcaagaaaagtctcctttcttgttaaggcagctgctactccccctgtcaagcaaggatcatacagacctttgtggtttgcatcaaagcaaagtctttcctacttttatagcagccttcctgttgactatggattagaccctctgggactttctgacccttaangnacatgaaccatcaatcatccttaatgtctagnntnnngtgagataaccaatgt

SEQ ID NO: 266723 - DNA, 402 bp, Glycine max
gccgtttctaattaatgataggtgtcaagtggaagtgcagtgatgtatgcagctgaggcatcctaacagaccggtagactgaacaaatgtggggttattagtccgcgttttgatgttggtgtcaaagagattgaaggttggactgctaggctgctcccctcaagacagtttgggtatattgtgttgactacctcagctggcatcatggatcatgaagaagctaggagaaagaatgttggtgggaaagtgctgcgtttcttttactagtttaattagtttcctttgaagattttgctctgatttcagttcttgaaactcaccggttgtaatgatcaatgtgttagacccgtagtttatcaagtatagcattagcaggagatgtttttctggtgggtgcttgtt

SEQ ID NO: 266724 - DNA, 367 bp, Glycine max
gcacgctgatgctatccacagaggtaggtggtcaaatcatccctactgccaggagggtgttctatgcttcccagattactgccaaacccaggcttcttgagcctgtctacctggttgaaatccaggctcctgagcaagctcttggtggaatctacagtgttcttaaccagaaacgtggacatgtgttcgaggaaatgcaaaggcctggtaccccactttacaacatcaaagcatacctccctgtcattgagtcctttggtttctcgagcacattgagggctgcaacatcaagccaggctttcccacaatgtgtctttgatcactgggacatgatgtcttctgacccattggagactggatcacaagc

SEQ ID NO: 266725 - DNA, 378 bp, Glycine max
aaaaacctcaaactcaaaactaacgacgacccaccgaacctaagcacacaaacagagagttagagacgaaatcctcatctcaccaatggcgaagctgaagacgagcattgattcatcgttctgggacttcaacgtggcgtcccctcagctgcacgaaggatgggtcaagtccgttccgggcgacccgtttccgttggacggctccgtcgccagcagagtgctccggccacgacagctctccgtcatcggaaacgggttgcctcttcccgtcatcgttccctcgctctctcccacttcgcccaaggacttgggttccttctgtctccagtccctcctcctcaaactagctaatcctcgctggtggcttaccatgactgg

SEQ ID NO: 266726 - DNA, 357 bp, Glycine max
cacaaactatcatggccacggcaacagcagctgccacctcgtcctttatggggacgcgtctcctggaggctcactccggagcggggcgagtgcacgcccgattcggcttcggcaagaaaaaggctcccgccccaaagaaagcctccaggggatcgggccgagacaccgacagacccctttggtatccgggcgccaaagcgcccgaatacctcgatgggagtcttgtcggagactacgggttcgatccgtttgggctagggaagcccgcggagtacctgcagttcgagctggactcgctggaccagaaccttgcgaagaacgtggctggggacatcattggaaccaggaccgagctcg

SEQ ID NO: 266727 - DNA, 373 bp, Glycine max
cccacgcgtccgaaggagttgtaaattaaaagcatggctgcacaagctcttgtatcaggggcatctcttaccttctcagccgaggctacaagacaaagtcttggaccaagatcactccaatctccatttggcttctcaagaaaagcctcctttcttgttaaggcagctgctactccccctgtcaagcaaggatcagacagacctttgtggtttgcatcaaagcaaagtctttcctacttggatggcagccttccgggtgactatggatttgaccctctgggactttcggaccctgaaggaacaagagggttcattgagccgaaatggctagcatatggtgagataatcaatggtcggtatgcaatgttgggtg

SEQ ID NO: 266728 - DNA, 354 bp, Glycine max
cccacgcgtccgcccgcagcagccatggttctcaaaactgaactatgccgatggaggggttccaagatctacccaggaaagggcatcagatttgttcgtggtgattctcaggttttcctgtttgcaaactcaaaatgtaagaggtatttccacaatctcctgaagccttcaaagctcacctggactgcaatgtacacaaagcaacacaaacaggacattgctcaagaagctgtgaggaagaggatacatgctgacaaaaagccttactctaggtccattgttggtgcgaccttggaagtaatccagaataagagagctgagaagccagaatttcgagatgcagctagggaagct

SEQ ID NO: 266729 - DNA, 384 bp, Glycine max
  unsure (1)..(384): unsure at all n locations
ctcacgcgctcctatattcgctcctccaccgtcgctctctcgaacaaccacaggaggcgtcttcatcacatggcaaacgcagcatctggtatggcagtccatgatgactgcaagttgaggtttttggagctgaaggcaaaaaggacacaccgtttcatagtttttaagattgaggagcagcagaagcaggtcattgtggagaagcttggtgagcctgcccagggctatgaagatttcactgccagccttcctgctgacgagtgccgatatgctgtttatgattttgagtatctgactgaagggaatgtccctaaaagcagaatntttttcattgcgtggtcccctgacacatcaagggtgaggagcaagatgatttatgcaagc

SEQ ID NO: 266730 - DNA, 450 bp, Glycine max
cccacgcgtccgttttttttttttttttttttattttttttttattttttataggtgtttttttttttaaaatttttttattattataaaataaaaaatatttatataaaaatataaaattttaatattttttatatttaatttaatataattaatatattaaataataaaatataatttattttctatatataaaaaaatttattttttataaaaattatttatatataaaattaatattttattaatataatctttatttatattatttataaaattttaaataatattatattttattatttattatattaatttatattatttttaataataaaattttataatttattatattttaatataatattatcttattttattttaatttcttttattattattttatatttttataaaataaatataatattttataattaaattatt

SEQ ID NO: 266731 - DNA, 333 bp, Glycine max
cctttcgtcaccatgccaccgacactctcactctcactagtgttggtggtgctggttgtcgccgccgtggacgcgcattttccggcgaccggcgagcttccaacgttccgcgaggcgccggcattccgcaacggaagagaatgccgcaaccgcccgcgaagcgactccgtgatccacatcgcgatgacgcttgacgcgacctacctccgaggctccgtcgccggagtgttctccgtgctgcagcacgcgtcgtgtccggagaacgtcgtgttccacttcatagccaccacgcaccgccggacggagctccgtcgcatcatcaccgcgacgttc

SEQ ID NO: 266732 - DNA, 350 bp, Glycine max
accctcaactcaaatccaatcctttggttggtttcgaattcgacggcgaccaaattcccaacacatggactcggttctcttgcacttgcatctccacactctccctcctctctcctccgccactcaccgccctctctgccaccctctcgccgcctcctccgcttctttccaccgctcttctcctcctctcccacgcttccgcttctcgccgcttctcgccgctaacaccctcaccgctaataacatctcgccaagaagtggactatacactgttggtgactttatgacaaagaaagaggatttacatgtggtgaaaccgacaacatctgtggatgaagctttagaaattc

SEQ ID NO: 266733 - DNA, 386 bp, Glycine max
ctttgcagctgctgcatatctgaagtccattgatttcccaaaagataaaaaggtttatgtgattggagaagatggtatcttgaaggagcttgagcttgctggatatcagtaccttggtgggccggaagatggtgggaaaaagatagaactgaagccaggatttttgatggagcatgatgaagatgttggagcagttgttgttggatttgatcgccacttcaactactataaaatccagtatgggacactctgtatacgtgaaaaccctggatgtcttttcattgctacaaaccgagatgctgttactcatctcacagatgctcaagaatgggcaggtggtggctcaatggttggcgctatcagtggatctactcaacgtgagccat

SEQ ID NO: 266734 - DNA, 465 bp, Glycine max
catacacattctaacatacaacttatttattgttctcatagtatacatagccttcttgtgggtgctacttaccaactcacactctatccatacctgttctttcaatctcaacatgtttaacccatttcaaccaaacattattctccaaaaagattctagtatttcatcctctctggttttacaactcaccaaaattggcagctacggcgtacctacactttaatctctcgatcgtaccctttacgcttctccaatccatattatagacagcgaatccttcattttttcttatcttttctacatcttttaaatttaacattttctcatctcacatattatatctatcttactgtcttgccttctttttggcacccttctgtttttactctaatttctactaatttattttttgtctttttaacattatcctaaaggactaattttttcaaatctttttattttttt

SEQ ID NO: 266735 - DNA, 382 bp, Glycine max
cccacgcgtccgtgttgacaaacacattctttaatggctctcaagatgtgggctccttgcactgccaatgcactcaaagtctcttctacctccagacctcatctcttgcatcctttttctttctccagatgcttgtcttgcgacttggatggacttaagtatgcagattcacacgaatgggtcaagcacgaaggctcagtcgccaccattggtatcactgaccatgcccagcaccatcttgtagaggctgtgtatgtggagctgccagaatcaagtggcacagttacgcagaaatctggcttcggagcctgtgaaagtgttaaagcaacaagtgacataaactctacaatctcgggggagattgttgaggttaacaaaaagc

SEQ ID NO: 266736 - DNA, 281 bp, Glycine max
ctagcttctaaactctaacacttctctatctcttcgatcatcaactttccacagggcggccgaagttcgacccctaccagatagtctacgtcttcatacgcgttaccggcagcgaagtctgctcggcgagttccgtgtcccacaatatcggaactgtcggtctatgcctccagaagatcggagaagacatcgtccaataaaccgccgaggactggaatggcctccgcgtcaccgtcaagctcaccgttcagaatcatcaggcgaacgtcacggtggtctcc

SEQ ID NO: 266737 - DNA, 438 bp, Glycine max
aagagctctaatctacatatccattttaggaacatgaatgttcacccatatggcggtgtttaataacttgctcggtccactaataatttcaatggagctcaactgaaggctgtttgtgttgaggctggcatgtttgctctactccgtgatgcaactgaggtgaaccattatgtctttaatgaatgttttatttcagtccaagccatgaagtatgcatgcctctatttttatgcttaagcttgatttttgaactagctatttttcattttactaaatattctttgtcctatttttctcatgtgtaactttattgttgttgtgcaattttgtattttattcttttatttttttttaggttattatatatgttgtatttctactcttttttctttttatactttatttttttaaaatccttattattgtttttttattttt

SEQ ID NO: 266738 - DNA, 371 bp, Glycine max
  unsure (1)..(371): unsure at all n locations
cccacgcgtccgagagtttgttgttagctataagctagtttatcgtgaggagaagatgaagttgtttgttttctttgttgctgcantagttttggtagcatgtccatgccatggcgcaggctaccaaaggtttcctctccgaatgaaaactggctatggtgagcgttcttcggaggtaaaatgcgcaagttttaggcttgctgtggaagcacacaacatcctttcccttaaaaccattcttgaagagtgctttgaacctacataggactatattaatggctaacaatttaaattagacttttaaacatttaccaacatgcttttttttattctatttatcttcaattttattacaactacttatttatatt

SEQ ID NO: 266739 - DNA, 291 bp, Glycine max
ctcacgcgcttctatattcgatcttacatcgaagctctcgggagcaaccacaacaccggctgcatcacatggcaaacgcagcatctggtatggcagtccatgattactgcaacttgaggtttttggagctgaaggcataaaggacacacctgttcatagtttttaagattgaggagcatcataaacaggtcattgtggagaagcttgctcagcctgtccagggctattaagatttcactgacagtcttccttcttaacagtgccgctatgctgggtatgaacactagtatc

SEQ ID NO: 266740 - DNA, 349 bp, Glycine max
cccacccgtccgaaaagaaccaggtcgtattgtaatgggtctttatgggaaggctgtgccaaaaactgcagaaaacttccgagcactttgcacaggggaaaagggaactggtaaaagtggaaagcctctccattacaaaggtagctcattccatagaattattcctagctttatgcttcaaggaggtgattttacacaaggaaatggaatgggtggagaatcaatttacggagagaagtttgctgatgagaacttcaagttaaagcatactggaccaggacttctatcaatggcaaatgctggtcctaataccaatggttcacaatttttcattacaactgtgacaact

SEQ ID NO: 266741 - DNA, 418 bp, Glycine max
gtttgtatggagggtgttgcctttactcacaatcctcatgtctttagtagtattcttgtacttgcaggattcttacagggcccatttacatcctctcgtaaagttaccgcggagtaagtgcagtcttcttccccatcgtcatttctggataaccagcaaacgcattgtgaccccacaagggatcatttctggttcagtggagataaatgaagggaaaataatatctgtcatcaagggatatagtaagcaggggaagtctaagcaagaaaaaataattgattatggaggtgctgttgtcatgcctggcttgattgatgtgcacgtacatcttgatgagccaggaagaactgcgtgggaaggatttgatactggtaccagagctgctgctgcttgtggtgtaacaacagttgttgacatg

SEQ ID NO: 266742 - DNA, 384 bp, Glycine max
  unsure (1)..(384): unsure at all n locations
cccacgcgtccgcccacgcgtacggtgatctgcagctactatgggtaagggaacggggggtttctgtaagaggaggaacaagacccacaccctctgtgtgaggtgtggccgccgcagcttccacctccagaagagtcgttgctctgcgtgcgcttaccccgctgcgcgcaccaagaaatataactggagcgtgaaggccattatgagaaagaccaccggaactggaacgatgaggtacttgcgtaacgtgcctcgcagattcaagagcggcttcagagagggtaccgaagctgcacccaggaagagaggagctgctgcctctgcctaagctctgaatgaatgacagcaatttttgcttggtcagtgaattatangagttaaatg

SEQ ID NO: 266743 - DNA, 449 bp, Glycine max
ggatgtgcctcttctgcattctggaaattatggtgatattgataatggaaccgtaggtgaagataaactgaaaatggaaaacatcactttttatgtggagcatcctcgtccaattgaaccacctgctgagcctgcccctccaccacctcaaccattgaagctaactaagcaagaacagaagaaactccgaacacaaagacgtatagccaatgagaaagagcgacaggagatgataagacagggtgtaatagaaccaccaaaaccaaaggtcaagattagcaacttaatgaaagtacttggcactgaagcaactcaagatcctactcggcttgaaaaggaaatacgtagtgcagctgctgagcgtgaacaggctcacatatataggaatattgcacgctaacttactcctgcttagcctctggtagaaaaagaaaaaaagcttttttatt

SEQ ID NO: 266744 - DNA, 420 bp, Glycine max
  unsure (1)..(420): unsure at all n locations
cttgaagaagaagcatgcttctggaacttataaaagcctagtattttatctagaggcgtgtgaatctgggagtatctttgaaggtcttcttccagaaggtctgaatatctatgcaacaacagcttcaaatgctgaagaaagcagttggggaacatattgtcctggggagtatcctagtcctccccctgaatatgaaacctgcctgggtgacctgtacagtgttgcttggatggaagatagtgacatacacaatttgcgaacagaaactttacatcaacaatacgacttggtcaaagaaaggactatgaatggaaattcaatctatggttcccacgtgatgcagtatggtgacataaggcttagcaagaacaatctngtcttatatttgggtacaaatcctgctaatgataaatttacttt

SEQ ID NO: 266745 - DNA, 390 bp, Glycine max
ccgagcttaggagaatagaacaggaccaggaggcatcaccattgccacaatggttaaaggtcgccaaggagaacgcgtgagactctacctcaggggttcaattcttggatacaagaggtccaagtcaaatcaatacccaagcacctccctaatccagattgagaatgtaaactctaaggaagaagttgcgtggtactgtgggaagcgcatggcttacatctacaaagcgaatgtaaagaagaacggaagccactatcgctgcatatggggtaaggtcaccatgcctcatggctacagtggtatatttcgagctaaattcaagtccaatcttccacctacgtcaatgggtgcaagggttagagtattcatgtattcaagcaatatatgaga

SEQ ID NO: 266746 - DNA, 396 bp, Glycine max
attaagttctacttttcaccattgtatggaactaatttacatatacttatactggaacaagtataacaatgaagacaattaattcattgtttggcctcttgttccttctcctaattgcatttaccatgaagcctgccgttgctagtggtgttcatgacacagatgatcgcatgttagaaaatggaggtgactacttcatcttacctagttttgatgaagagggtggtggagttacacttgctagcattggtgtgacacaccctcttgcagttgttcaatcttcctcaaagaaccatcttggcttgccagcatcaattaaaactaaagaaacaatgatcatcttcactgatgaaatggtaagcattaaattcaccaatgttcctgactacaataatg

SEQ ID NO: 266747 - DNA, 422 bp, Glycine max
cccacgcgtccgctgacctatcttggtagagatttgaagtttaaaccttcaagggagcaaaccattttaatttgcctttagattctgagtcactgctgctatggcgctacgcgtacttcttgtgttggggatgttgctgatgttgtgccttgttaaggtttcatctgatccaaagatagaagaagaaatactggaagcagaagaagaactgcagtttcccgataacgagccacttatcgtgagagacgcgaacagaaggctaatgcaagatatggattgtggtgggttgtgcaagacgaggtgcagtgcacattcgaggcccaacttgtgcactagggcgtgtggcacgtgctgtgtgaggtgcaagtgtgttccacctggtacatttggaaatagggaactatgtggaacctgctacactg

SEQ ID NO: 266748 - DNA, 419 bp, Glycine max
  unsure (1)..(419): unsure at all n locations
tgctgatagcccatatgcaggtggtgttttcttagtttcaattcattttcctcctgagtatgccttcaagccaccaaaggttgcttttcggactaaggtgttccacccaaacatcaacagcaatggcagtatatgtcttgacattctcaaggaacaatggagcccagctctaaccatttccaaggtccttttgtcaatttgctcattgttgacggatcccaaccctgatgatccacttgtacctgagattgcacacatgtacaagaccgacagggccaagtatgaggctacagcccgcagctggacccagaagtatgccatgggatgaccgtattgagattttagctgttcaatgaagctgcaaaatcataatttatgntaaaaaacaaaagatattttgaacggaatttgaatgcttt

SEQ ID NO: 266749 - DNA, 416 bp, Glycine max
cagaaagctaaaggctaaagcctaaaaccttcttcctttacacctcgctggaaccagcggtggatcctcagcctgagccagtcagctacatatgcggagattgtggaatggagaatacgctgaagcccggtgacgttatacagtgccgtgagtgcggttaccgaattctttacaagaagcgcactcgtcgcattgtccagtacgaggcacgctgaagaaaactgctataacgttagcaagtgatttccatgaagaaattgttactacatctgtgttgtgtgatattgaagaactacttttaattatacagtagattgctttttgggtgatgtttagcaaaagataaaaactctgaatgtgaatatattacaaacatgcgtgtttcattagtttgcaattgtattcctactatgggt

SEQ ID NO: 266750 - DNA, 205 bp, Glycine max
  unsure (1)..(205): unsure at all n locations
cccacgcgtccgnccacgcgtccgggatttttccgttctaatactctatctgagagtgatggatatttatcaaatctgttcctatctaacgaagcgctattggatcaaatgacaaagacattgttgagaaaaagatggcttttcccagatgagatggttgttgctatctgctccaataacgaatcattggtttaactgaataact

SEQ ID NO: 266751 - DNA, 411 bp, Glycine max
cccacgcgtccgactttttctacttaccttttctcttaatccaaatacgatggcagcgatggtaaccacaaccctctcttcaaaccccaaactctcattcttcaacggaaagcccgtcacatattcttcccgcgtcgcgcccaccaccaaattatcctcatccaaacaaggcacaatttccatgtccctaaccccacccccctacgacctccagtccttcaaattccagcccatcaaagaatccatcgtgtcacgggaaatgacgcgccgctacatgaccgacatgataacctacgccgacaccgacgtcgtaatcgtcggagccggttcggccgggctctcctgcgcgtacgagctcagcaagaaccccgccgtgagcgtggccatagtcgagcagtcagtgagcccccg

SEQ ID NO: 266752 - DNA, 346 bp, Glycine max
cggacgcgtgggggccaataagaagcacgtcagctgctatgaatggtgaataaaacacagaagaaacaaattgctacatagcacacactccctcttctcttctacggttatggcgtccacgttgggcacttcttcaattgcggttcttccttcgcgctgcatctcttctttttcttccaagccttccattcacacactctctctaacttcagggcagagctatgggcggaaattttatggaggaattggaattcatggcatcaagggaaggtctcagctctcagttgccaatgttgccactgaagttaactctgtagaacaggcccaaagtattgcttctaaagaa

SEQ ID NO: 266753 - DNA, 378 bp, Glycine max
gtggaccccgtttccctgcttctcatgaatatacaattgagtatttgcaaaatcgttcacatatcaaggttgatgttctccctttagaagatgtgccaaaggatattgccaactatcatgtctgcatagtaaaaaacatgaggctagattcagaaataatttctcgtgcagttcagatgcagcttataatgcagtatggtgttgggctggaaggtgttgatattgatgctgcaacaaagcatggaatcaaagttgctaggataccaggtgatgtttcgggaaattcagcttcatgtgctgaaatggccatatatctaatgctgggtctcctccgtaagcaaaatgaactgcacgtttccatacaacaaaaagagcttg

SEQ ID NO: 266754 - DNA, 210 bp, Glycine max
aataactagaaacagtgtgatgaaaatgaaggtccttgttttcttcattgctaggaggtttctagcatggcaatgccatgcgtaccatatgatacctctcctaatgaacactggctatggtgcccgtactccggaggtgaaatgctcaagcttgatgcttgctttggaagcacacaacatctttggctttgagaccattccttaacagtg

SEQ ID NO: 266755 - DNA, 399 bp, Glycine max
gctggggtgaaaatggctacttcaagatggaattggggaagaacatgtgtggtgttgcgacgtgtgcatcttatccaattgtggcataaattgcataacaatatggtccctggtgactaccaccttgtcatgcttcagagtttagagcgtattgctgatgccagtattgatgaatgatgattaaagataagtgtaattgtatgatgaaaattgctcctagttgggttggcatgatgtataaaataagctagaagttgttgtaaatcacataagtatattatggccttaattgtgtgtatcacagacataataacgatcatatattgatagttcatagttacatattgtattgtattgatgctcccgcttcaaatatcagttataagatagcattgtctt

SEQ ID NO: 266756 - DNA, 294 bp, Glycine max
gttgctgcagtagttttggtagcatggccatgccatggcgcaagctaccaaaggttccctctccgaatgaaaactggctatcgtgagcgttctttggaggtaaaatgcgcaagttttaagcttgctgtggaagcacacaacatccgagcctttaaaaccattcctgaagagtgcgttgaaccaacagaggactacattaatggcgaacaatttagatcagactctaaaacagttaaccaacaagctttcttttatgctagtgaacgcgaagtccatcacaacgacatatttata

SEQ ID NO: 266757 - DNA, 470 bp, Glycine max
ctcacacttaataatctaagacttttttaaaatatcatacaaactcttatacaggtgggcttatattaaattatcttccaactcccttatttacacttcaccaatcctcctcctttcctctaaaatactatacacactttatgctatctcacatattatcaaataaaccatcctatcaaatcatttatccatctcacctttctatcccatcatataaaactactaataccctatttacacacatctctttatttacatgacacttattccatcctattttaatacatttactcacatttatcccatgtctaaatatttttcaaattttatttaatctatcattatatttaatattatccaatattattataccctatctctctataataatattattattttaatctatatttaattttatttaaacatattatcattttatcttcatactataatcatattatattatt

SEQ ID NO: 266758 - DNA, 353 bp, Glycine max
  unsure (1)..(353): unsure at all n locations
cccacccgtccacactaanaagggggtttcgctgaaaaagctgaggaagataatgacttctgcgagcgcttgcctttcgacatcgacagcgtagaattggcgtcgctcttcgggcaggctggcaccgttgaggttgctgaggttatttataatagggccactgaccggagtcgtgggtttggatttgttaccatgagtacacttgaagagcttaagaaggctgtcgagatgttcagtggttacgaactaaatggaagagtgttgactgttaaataagctgcttcaaaaggagcacaatctgaacgcctaccacgcccaccacgttcctttagttctggtttaagagtctatgt

SEQ ID NO: 266759 - DNA, 383 bp, Glycine max
cccacgcgtccgcccacgcgtccgcccacgcgtccgcgcaaaactgtcagagcaaaccgagccaaagttgggtacattgggcctgccactgatttcaactacgatcacagacatcttggtactggccctcaaacactccttgaaattgctgagggttgccacccatttttcaagacactctcaaatgccaaaaaccctgttatcattgtcggtgctggggtttttgagaggaaggatcaggatgcaatttttgctgctgttgaaaccattgcacaaaaagcaaatgttgtcagacctgactggaatggccttaatgtattggttcttcatgctgcccaagcttgtgggcttgaccttggacttgttccacaatctgagaaaag

SEQ ID NO: 266760 - DNA, 393 bp, Glycine max
cccacgcgtccgcaaaaatattattaagatgatcaacattattggagcacttgttctagtctgtgcatttctcttcctcagttgtgtgtatgcacaagacacaacaacccttgtgcctgcaatcataacttttggtgattctgctgtggatgtagggaacaatgactatcttcccacccttttcaaggctgattaccctccttatgggagggactttgttaaccaccaacctactgggaggttttgcaatggcaaattagctactgatttcactgctgacacattgggtttcaagacctatgctccagcatatcttaacccacatgcatcaaggaaaaaccttcttattggagcaaactttgcttcagctgcatctggttatgattaaaatgc

SEQ ID NO: 266761 - DNA, 369 bp, Glycine max
  unsure (1)..(369): unsure at all n locations
gcgtccgcccacccgtccncnttnntacaaaatggacgattctcacgatgagctctacattagtcggacgctgttaaatttttatgatagctgggaattaacaagtcccctgcgcttgcttttttggtcgcgatgatacgatactttgtgaaattacttgtactttacttttttgcttagttttacgacgaaacttctttatctgttaaaaaaacactaacttcaataggcccctttggaattcgggcgccaaagcgcccgaatacctggaatttttaaccatataaaaaaatattatttcatacaataaattttaataaaaaaggggccccctttctaaagatccaaatttttctcccccgtctttcc

SEQ ID NO: 266762 - DNA, 439 bp, Glycine max
  unsure (1)..(439): unsure at all n locations
cccggaatccggtcggccacgcgtccgccaacccgtccgccaacccgtccgttttaacacacactttctctctctctctctctcacgcaggacttgtagcaatggcgagccctcccactccacgcgaagagttcgtgtacatggcgaagctggcggagcangccgagcgctacgaggagatggtggagttcatggagaaggtctccgcctccgccgagagcgaggagctgaccgtggaggagcgtaacctcctctccgtcgcctacaagaacgtgatcggcgctcgccgcgccttctggcgcatcatctcctcaatcgagcagaaggaggagagccgcggcaacgaggaccacgtcgccgtcatccgcgactaccgctccaagatcgaggccgagctctccaacatctgcgacggaatcctcaaactcctcgacacgcg

SEQ ID NO: 266763 - DNA, 416 bp, Glycine max
cccacgcgtccgcaactcaatttttctctcaaccggcccaatttagcataagccgagcggggccaccgcaacagcagcagccacctcgtccttcatggggacgcgcctcctggaggcccattccggggcggggcgggtgcaggcccggttcgggtttggcaagaagaaagccgccgccccgaagaaagtttccagggggtcgggctctagctccgataggcccctgtggtatccgggcgccaaggcgcccgagtacctggatgggagccttgtcggagactacgggttcgacccatttgggctagggaagcccgccgagtacctgcagttcgagttggactcgctggaccagaaccttgcgaagaacgtggctggggacatcattgggaccaggaccgagctcgcggacgtgaagt

SEQ ID NO: 266764 - DNA, 446 bp, Glycine max
  unsure (1)..(446): unsure at all n locations
cccaaaacgcancgttttcccttcgcaactctctccgcacttccaccttcgcactcgcgcagacgaagctcccgttctgggcaaacccgataacaacaacaactcttcaccctatcttcccaaaatcgataagacgggacgcttctgcagccccagagccgccagagaactcgcactgtcgataatctatgctgcgtgcttggagggaatggacccggttcggctctttgagaaacggatgaatgcgcggcgagaagccggatataaatttaatgaggaaaagttgttggagtataatcatatgagtttcggagggccgcctgttactgttggatcggacgaagaagcaaatgagctactgcggcacattgaagaagagtctgccattgaagcagaagtccttacagctcctccaaagctggtatacaacaaactgattttaagat

SEQ ID NO: 266765 - DNA, 450 bp, Glycine max
cacagagttagaggagaaatcatcatggcatcagcagcatctgggtttgtgttgtcacgtagtgttgcagctgccaccacaaactcaagggtggtcatgttcaacacaaagaacaacgcttctaggcttgttgtaagggcttcagatgagcctgcagcggcggcacccgccaccgccacacccccagctgaagctgaagctaaaccaaagccaccacctattggccccaagagaggtgctaaggtgaagattcttaggaaggaatcttactggtacaaaggcactggttcagtggttgctgttgatcaggaccccaacactcgctaccctgttgtggttcgattcaacaaagtcaactatgccaatgtatcaacaaacaactatgctttggatgagattgtggaagtggaatgagtctaatttatttgtaatttgattcttggcatgcta

SEQ ID NO: 266766 - DNA, 422 bp, Glycine max
gaggagttgtaaattaagagcatggctgcacaagctcttgtatcatcatcttctcttagcttgtcagcggaggctgcaagacaaagtcttggaccaagatcactccaatctccatttggcttctccagaaaagcctcctttcttgttaaggcagctgctaccccccctgtcaagcaaggatcagacaggcctttgtggtttgcatcaaagcaaagtctttcttacttggatggcagccttccgggtgactatggatttgaccctctgggactttcagaccctgaaggaacaggagggttcattgagccgaaatggctagcatatggtgagataatcaatggtcgttatgcaatgttgggtgcagttggtgcaatagcacctgaaattctaagcaaggctggtctgatccctcaggagacagc

SEQ ID NO: 266767 - DNA, 322 bp, Glycine max
aggaaaaaccgaaggaaaaattgccattaaaaatgaaaactttgccgggggctcttataggcatgacggtaaccatcaacgtcaccatcaacaacgccatggccaatgttaaggacaagattcacgtcacggcgggccttcatccggagaatcaccccgggaagcacctcggagagcaactgacacatgcacggaccatcatccataacgacatacacattgatttaacccttaatcttcgtctcaggcttattgatcctatcattaagcctttcgttatggcatacgctcacgactacattaatgacaagatgatctaccc

SEQ ID NO: 266768 - DNA, 416 bp, Glycine max
  unsure (1)..(416): unsure at all n locations
cttcatttcatcgtttcgttacgttctgcttcgcgtggaccaacaagaagtgtgggtgtcattcaatggccagcgctcagctctcagcaatatcttcgtcgatctctacggcgtcgtttgaagggcttcgaccttcggctgttcagtttgcttccgcgggcagaattagaattggcaatctctcccaaaggtctttccggggcttggttgtcaaagccgccaccgttgttgcccccaaatacaccgcgattaagcctctgggagacagagtgctgataaaaattaaggaagcagaggagaaaactgagggtgggattttgcttccatcaactgctcaaacgaagcctcaagggggtgaggtggttgctgttggagaaggaaagacaattgggaaagacaatgtanagattagtgtg

SEQ ID NO: 266769 - DNA, 122 bp, Glycine max
gtttgttgtacttaaactacattcccatttgtttttgctttatgagatttcatcggcctgtatttttggtttctgttttcggacttcaatggaaattaatggatgagaactaatgaataaaa

SEQ ID NO: 266770 - DNA, 423 bp, Glycine max
ctcaaagaaaagccaccttaacatctcttctctgaaaattctctttagagagatagagggaggaagaaagaatggcagcttgcactgtctactcaacacaatctctgagcacaaattgctccatctcaaccccatcaaagacgcaactcagttttttccaccaaaagcaggtagttttctggaggaacagcaagaagggcagctgcagcagcagaagaagctatgtgataacatgtgcagcaggtgactcacagacagtggtgattggcctggctgcagactcagggtgtgggaagagcaccttcatgaggaggctgaccagtgtgtttggaggagcagcagagccaccaaagggtggcaaccctgactccaacactctcatcagtgacaccaccactgtcatatgcctggatgaatacccac

SEQ ID NO: 266771 - DNA, 358 bp, Glycine max
agaggagttgctgttaaggacccatctgctccccatggaggtcgtcttttgattgaggactatgcttatgcttctgatgggctagagatattggatgccatcaagtcctgggtgcaagaatatgtctcattctactacaactcagatgaggaactccaaaaagaccctgaactccaagcttggtggaaagaacttgtagaggtgggtcatggtgatttgaaagataagccatggtggcaaaagatgcaaactcgtgaagagttggttgaagcttccgctatcctcatatggattgcttcagcccttcatgctgctgttaactttggacagtatccatatggaggtttaatcctaaaca

SEQ ID NO: 266772 - DNA, 416 bp, Glycine max
  unsure (1)..(416): unsure at all n locations
tctagatcgcaatcgcctcaggaattcaagttatcaaacaaaatgagaggcagaaagactgccaacttcaaatagatagctcaatgaaattaattgtagttctgctgtatttcatttttggtttacctttgtatcttcggaagcattacaattttatttgaaatgtaaaattttgtttttccaaaaaaaaaaaaaaaaaaaaaaaaaaaaaaaaaaaaaaaaaaaaaaaaaaaaaaaaaaaaaaaaaaaaaaaaaaaaaaaaaaaaaaaaaaaaaataaaataaaatcccactaaaaaaataaaggttggggtaaaaataaaaaaaaatttttaataaaatataaaaaaanggggggggggcttttttaaaaaaaaaattttttttctccccgttggggagaaatatttttttttt

SEQ ID NO: 266773 - DNA, 434 bp, Glycine max
acagagagaatggctgcggaaaacgttgttgagttcacagacttacccgtcaagaggcgaagagaagaagaagaaggaaccaatggcgtctccaacgacgccgtttcagcgctccccaatgaccctcaataccctggcatctctgcggttattcccggttggttctccgaaatcagcccaatgtggcccggggaggcacattccttgaagatggaaaagattttgtttcaagggaagtctgactatcagaatgtcatggtcttccagtcatcaacatatggcaaagttcttgttttggatggagtcattcagcttacagaaagggatgagtgtgcctaccaagagatgatcactcatcttcctctttgctctattccaaatcccaaaaaggttttggttattggtggaggagatggtggagtgctgcgggaagt

SEQ ID NO: 266774 - DNA, 331 bp, Glycine max
ccccccagtagtagttaaagtcttagggagtagaataagatcagtgatggagagaaagttcatttcagtagttgttttgggagtatgtttggtgctgggaatgtcccaatatgttgatgcaaggaacttggagaaaaaatcaaaggaagaggtgaagaagccagaatcgtgcttagatggagggtccattggtggtgttgggggcattggcggcattggcggtgctggtggaggtggtggtggtttaggaggtggctatggaggaggagctggtggtgatagtggtttaggtggtggatatggaggaggagcaagaggtggtggagttgga

SEQ ID NO: 266775 - DNA, 260 bp, Glycine max
aaaaaaacccaacccccccttttaaaaaatcaaaatttacttaccctttcattcaaaataaaattttttttatagttccaccaaaattaaattcattgcccctcttttaaaaaccttttaattaaaaaaaccctgccttaaccaaaataaattcctttaaaaaaaatcccttttttccaaatttgcaaaaaaaaaaaaaggcccaaaccaattcctttttaaaaaattttcccaatctaaattgtaaatggaacccccct

SEQ ID NO: 266776 - DNA, 460 bp, Glycine max
ggaagagagggttctctgagactgaaactgatgaaacagccaccgttgatttggggctgaacctctcacccaaggaagctgctgctgctgatggtgcacatccacgtgagaagccaaagacttcgccgaaggagaagacccttctgcttcccgatcccgccaagcctcctgccaaggcgcaagtggtgggatggccacccgtgaggtctttccggaagaacatgttcgcagcccaaaagagcagcggcggagaggaaagcgaaaagagcagccctaatgcaagctttgtcaaagttagcatggatggagcaccttacctccgcaaagttgacttgaagatgtacaagagttacccagagctctctgatgccttgggcaaaatgtttagctccttcaccattggaaattgtgaatcccaaggcttcaaggatttcatgaatgagagcaagttgatggatct

SEQ ID NO: 266777 - DNA, 380 bp, Glycine max
cccacgcgtccgcccacgcgtccgaagaacttagctacaagctaaggaaggatcggatggaatggctcaagcaatggcatcaatgactagcttacgtggttcctctcaggctgtgttggaaggtagccttggctccacacgcttgaatgtggggagtggaagcagggtggcctcagtcacacgtgcagggttcacagttagagcacagcaacaacaagtgaatggtggtgaggtacaaagtagccgtagggcagtgctttcacttgttgctgctggtttgaccactggctcttttgttcaagctgtgcttgctgatgccaaacctatcaaagttggaccacctcccccaccttctggcggattacctggaacattgaact

SEQ ID NO: 266778 - DNA, 435 bp, Glycine max
  unsure (1)..(435): unsure at all n locations
cccacgcgtccgctgcaacactgtctctgtctctcctcctcctgttctcactcaggatggccgtaaccgttagatcgagcgactacnactacgattgtgtgtacactgcatacgttagaaccggttcggtgttgaagggcggaacggactctaagatcgggctgaagctgtacgacaagtacggctactacatctacattaaaaacctcgaagcatggggcggcttgatgggcaagggctacgactacttcgagcgcggcaacctcgacatcttcagcggaaggggaccctgtcttgacggacccgtctgtgccgttaacgttacttctgacggatcgggttctcaccacggctggtaccttaactacgtccaggtcacctccactgggccccacctttcctgcgctcaagatcagtacgaggtggagcagtggc

SEQ ID NO: 266779 - DNA, 421 bp, Glycine max
cggacgcgtgggcggacgcgtggggaacaagtagttgagaactaagaaggagaagggagggcttcctcaatgatctcttccccagctgttaccactgtcaaccgtgccggtgccggcatggttgctccattcactggcctcaagtccatggctggcttccccaccagaaagaccaacaatgacattacctccattgctagcaacggtggaagagtgcaatgcatgcaggtgtggccaccagttggcaagaagaagtttgagactctttcctacctgccagaccttgatgatgcacaattggcaaaggaagtagaataccttcttaggaagggatggattccttgcttggaattcgagttggagcacggtttcgtgtaccgtgagcacaacatgtcaccaggatactacgatggacgctact

SEQ ID NO: 266780 - DNA, 390 bp, Glycine max
agtttatattgtgtactactccatgtatgggcatgttgagaaactagcagaagaaataaagaaaggggcttcctctgtggaaggtgttgaggccaagttatggcaggtacctgagacactgctggatgaggtgcttggtaagatgagtgcaccacccaagagtgacgtaccagtcattacccccaatgaactatccgaggctgatggctttgtattcggcttcccaacaaggtttggaatgatggctgctcagtttaaagcctttctagatgctactggaggcttatggagagcacaacagcttgcaggcaagcctgctggcctcttctacagcaccggttcacaaggtggtggacaagagactacagcactcactgctatcactcaact

SEQ ID NO: 266781 - DNA, 356 bp, Glycine max
ctactcaacacaatctctgagcacaaattgctccatctcaaccccatcaaagacgcaactcagttttttccaccaaaagcaggtagttttctggaggaacagcaagaagggcagctgcagcagcagaagaagctatgtgataacatgtgcagcaggtgactcacagacagtggtgattggcctggctgcagactcagggtgtgggaagagcaccttcatgaggaggctgaccagtgtgtttggaggagcagcagagccaccaaagggtggcaaccctgactccaacactctcatcagtgacaccaccactgtcatatgcttggatgattaccactctttggacagaactggaagaa

SEQ ID NO: 266782 - DNA, 412 bp, Glycine max
ctgatatcaatcacaatttctctctcttcttcactcttcattctcatttctcttctgagttggtgccatggctaagagctcattcaagatggaacacccacttgagaggaggcaggctgaagcatctcgaataagagagaagtatcctgacagaattccagtaattgttgaaagggctgagaagagtgatgttcctgaaattgacaagaaaaagtatcttgtacccgctgatttgactgttggtcagtttgtgtatgtggtgcggaagagaatcaagctgagtcctgagaaggcgatcttcatttttgttaagaatattttaccaccaactgcggcaatgatgtctgcaatttatgaggaaaacaaggatgaagatggctttctatatatgacttacagtggagagaacaca

SEQ ID NO: 266783 - DNA, 431 bp, Glycine max
tttcttcttttggttaattaagggggggccactttaagtagttaccacccccttttagacatagttcttctccctcggttctctattctctacactgggaaaccaaaatgaaggtagcatttgcagctgttctacttatatgccttgtcctcagctcctccttgttcgaggtgtcaatggctggttctgctttctgttcctccaagtgctcgaagaggtgttctagagctgggatgaaggacaggtgcatgaagttctgcgggatttgctgcagcaagtgcaactgtgtgccatctgggacttatgggaacaagcatgagtgcccttgctacagagacatgaagaactccaagggcaaggccaaatgcccttgattatttttttttttcttcaccatccacacatcaacttcaagcctttgattcagtcac

SEQ ID NO: 266784 - DNA, 422 bp, Glycine max
ttttctttcctaagaagggtcattaacccttctcttctctgcagcaactgggccgaaccctaaggtcttcttcgacatgaccatcggcggtcaatctgctggccgcatcgtgatggagctctacgccgacgtcactccccgcaccgccgagaacttccgcgcgctttgcaccggcgagaagggcgtagggcggagcggcaagcccctccactacaagggctcgtccttccaccgcgtgatcccgagtttcatgtgtcagggtggcgacttcaccgccggaaacggaaccggcggcgagtcgatttatggcgccaagttcgccgacgagaacttcgtgaagaagcacaccggtcccggcatcctctccatggcgaacgccggtcccggaaccaacggatctcagttcttcatttgcacggaga

SEQ ID NO: 266785 - DNA, 396 bp, Glycine max
gtttgtgttcttggtttcctcccctttctctctctctctgccttgcatttttggctcgttttctcaataggggtttcgaaaatgccgatgtttcagccttgtcggaaggacttggttgccgggtacgagggtggtggcgacggccagattctagatctggacaccgccgtgaaagacggcgttttgggcggcgtggagggcggcgtcctgggaggtggggttggtgagaaggtggatctggggaagatgattgaggagcttgagttatgtgaagtgccgagtgtgttcatttgcccaatctcattggaaccaattcaagaccctgttactctctgcacaggccaaacctacgagaggtccaacattcttaaatggtttaacttgtgacacttcacc

SEQ ID NO: 266786 - DNA, 427 bp, Glycine max
gtgatctgcagctacgatgggtaagggaacggggagtttcggtaagaggaggagcggggcccacaccctctgtgtgaggtgtggccgccgcagcttccacctccagaagagtcgttgctctgcgtgcgcttaccccgctgcgcgcaccaggaaatataactggagcgtgaaggccattaggagaaagaccaccggaactggaaggatgaggtacttgcgtaacgtgcctcgcagattcaagagcggcttcagagagggtaccgaagctgcacccaggaagagaggagctgctgcctctgcctaagctttgaatgaatgacagcaatttttgctgggtcagtgaattataggagttaatgtttctgtgttggtgccaaactctttggaacacattttctttctgtcgttttaatttcatttaatatgt

SEQ ID NO: 266787 - DNA, 450 bp, Glycine max
  unsure (1)..(450): unsure at all n locations
aaagcacaatttttttgcttcaacgggccttaccttacctgaagatggcttcggtgtcgtttgccgtgggattattaccttgctcttcttcttcttgctatacccgcgtctcttatggttcagttcgatttcccgtattgaacaacgccaactcactgaaactcagctcctcagctaacatctccagtccaattcttcaccaaaagctttgcactgttccttctccccttgctctaaggcctcgccctctcaccattgtatccgctaagggctacaaaatgaaaacccacaaggcatctgcaaagcggtttagggtgactgggcgaggcaagatagtgcgtangagagctggcaagcaacatttgctcgttaagaagaataccaagcgcaaatcccgactctccaaaatgcatgcggtcagctagagcgactatgacaatgtaattggag

SEQ ID NO: 266788 - DNA, 387 bp, Glycine max
ttcaaacgtccaaatgatctagatccaccaaaccaaaccaaaccaaaatggcaggaggcgaagcctcattcatgatatcaacaccatccttatcttccaccatacaaaaacaccatcatttgaagccatccaacgtgagctaccaaggtcttagacccctcgcaaggttcaccaaaacctgatcaaccaaagcgagcaccactaccaaaagggttattccaaaaggtggtgttagagctaaactcaactcagaccttgtgataagcctgatcactgacctcttcctcttctagagaaaggacgtgttcttaaacttccaaaggtagaacgtgagcaaatcatgtgcctgagcagaacggcctgacacactttgaggctggtgataca

SEQ ID NO: 266789 - DNA, 355 bp, Glycine max
gttgtgataataataacagacaacgaaaccctcaaacgaagggaacaatgcgaatataagtgagagaagaatatatcaatatcgtctccaaatacgacgtctttcaggttggagttttagcacaagatgtctctgagaataaaagcagtagtagataagtttgtccaagagttgcaggaagcgttagatgctgatattcaggataggatcatgaaggacagagagatgcaaagttacattgaggagcgtgaacaagaagttgctgagcgtgaagctgcttggaaagctgatctttctcgtcgtgaggcagagattgctcgtcaagaagcaaggctgaaaatggagagagacaatc

SEQ ID NO: 266790 - DNA, 462 bp, Glycine max
cccacgcgtccgttggaaacatttttaagaaagctttagagaaaaatgatgctggggagcatttcccagtaattgccttcaacttaggtggaaacctcgtaataaggatcgtaagcgagcaaactgatattcttgaaccatttactgcgtcgagtttgccaagttctcttatattgtggaaggaagcaaatgctaaaggaagtctatttcaaagatttccttcagatttgttgacacagctgaagacagattgtctcgtcctgcacaatcatcgttatgccatatccccacgcaagcttcaatataataccaagttatctgacttttttgagattctggcaacatctgaggatagagatggaaagactttcgtttccacagcacgtggtaagaaatatcccgtgactgtcaacctatggcaaccagagaaaaatgcttttgaatgggctacatcttttaaag

SEQ ID NO: 266791 - DNA, 253 bp, Glycine max
gatcaaggaaacatctaagcaacaaccaggcgaataggcgatggcagttgcgattggggagttgattggatatgtattaccgataatatggatccaatgtggcttgccatagtgggattattgtattaatgaattttatgatttcaagtgcgcgttgcgcttgggatttacaatgtttcagtggattgtctaatgtgttttatggatgagaagaatgtggtttagtgatttataaattttttattgttgctta

SEQ ID NO: 266792 - DNA, 432 bp, Glycine max
cttggttgtaggttgtcttctctattattgacctgtgctataaatctttgtttgggagagagacaaacagatctataatgtaaagggaagggaggttcacattcacattacaagcaacaacttaacgcttaacaacagcactctccctaatccttctgtgtatgcaaaatgagaccatgcaaatgcaaatgcaatgttctctctgctctcattcttcttgtcacattcctttttattgcttcttccgtccactgtgaagacccatatcggtacctcacttggaaggtcacctatggtgacatctatcctcttggtgtcaagcaacaagggatcttaattaatgggcagtttccagggcctcaaatagatgctgttacaaatgacaacttgattatcaatgtctataactacctcagagaaccgttcctcatt

SEQ ID NO: 266793 - DNA, 287 bp, Glycine max
gtggttgaaagttaaaaagtagcaaagatgtttccattcgggcacaaaggtcaaaggatgaaggggactattggggttattccaaaaaatgtgtttgatattaaccaccttacccatgtttaccggatccgtcggacccgcttaaaacttttaaggcgggcccttcataccagtacctttttaagcctcttcattttccatccaactaattagggctcccaaggctattggtggaaaaggaaaagttggaaaggctccaattttggagggaaggttacctttcccac

SEQ ID NO: 266794 - DNA, 451 bp, Glycine max
  unsure (1)..(451): unsure at all n locations
attgtttgttgttgtaactcgttcttcttcttttgttgttctgtgtttgtgttggttggttctctcacctgaaaatgtcttgctgcggtggtaactgtggttgcggaagctcctgcaagtgcggcaacggctgcggaggctgcaagatgtacccagacttgagctacactgagtcaaccaccaccgagaccttggtcatgggagtggcacctgttaaggctcaatttgagggtgctgaaatgggtgtgcccgctgagaacgatggctgcaaatgtggaccaaactgctcctgcaacccctgcacttgcaagtgaggtgttgggagagcaagcttcaagcagagatagcccttaattaggaataatgataaactattaatgtgtagctaaaaacttatgtattatgtctgtgatggttttcgngcactctggtgttttgtgttaaacaaaca

SEQ ID NO: 266795 - DNA, 432 bp, Glycine max
gttttgttccttagggattcagcatcagtggctacagcctgcatgcttcacggtgcagggcagccggcccgcaaccgcccgcaaatcctctggcctttccggaaccgtccgcattcccggcgacaagtcgatctcccaccggtccttcatgttcggcggtctcgcgagcggtgaaacgcgcatcaccggccttctggaaggcgaggacgtcatcaatacgggcaaggccatgcaggccatgggcgccaggatccgtaaggaaggcgacacctggatcatcgatggcgtcggcaatggcggcctcctggcgcctgaggcgccgctcgatttcggcaatgccgccacgggctgccgcctgaccatgggcctcgtcggggtctacgatttcgacagcaccttcatcggcgacgcctcgctcacaaagcgcccgat

SEQ ID NO: 266796 - DNA, 387 bp, Glycine max
gttggcattgcaaaaagagagagaatggcgaccacacccggtttgtgtggcagtgtgtggttgagcacctcgttcctgaggaagcaggcaatggcatcagtgaacatgagaatgctgaaggctaatgctggtgtttttggcttaaagggagggcgtggagggcgtgtgagtgcgatggcaagttacaatgtgaagctgataaccccagaaggagaacaagaatttgaatgcccagatgatgttttcattcttgaaaaggctgaggaatttggcattgaccttccctactcatgcaaggctggtgcttgctcttcctgtgccggcaaagttgtttctggcaaagtcgaccaatctgatggtagttaccttgatgatacccaaatcggt

SEQ ID NO: 266797 - DNA, 449 bp, Glycine max
tcttgacaaacttgcactaaaatatgatcgggaaggggaaccatcacagctagcagcgtgttggcatttttgtcagtactgttgatccattaaaagaacccccgcttgtgactgctaacactgtcctatctattctttctgttgactacccagtggataaggtctcctgttatgtctctgatgatggtgctgctatgttgacatttgaagctctggctgagacatcagaatttgctaggaaatgggttcctttcagcaagaaatataatatcgaacctcgggcacctgagtggtattttgcacagaagattgactacttgaaagataaggttcaaccatcatttgtcaaagatcgtagagcaatgaagagagaatatgaagaatttaaaattcgcatcaatggacttgttgcaaaggcacaaaagattcctgaagaaggatgggtgatg

SEQ ID NO: 266798 - DNA, 484 bp, Glycine max
cgaaatcccggggcggacgcagccgtccgcccacccttccgccaacccgtccggtcctttgccattgaaatctctccaaaaccttgggttagtcgctttcaattttgcgagctctgtttcgagttggaagaagaaaacgagtccagctgcagcgtcggagtcggaggcagaggcagaggcgtttgcgtcggctctggcgagcgggaaggaagcgactttgttggagttctactcccccaagtgcaggctctgcaattccttgctcaaatttgtctccgaagtcgaaaccagaaactctaattggctcaacattgttatggctgatgctgagaaccccaattggctacccgagctccttaattatgatgttagctatgttccttgctttgtgcttcttgacaacaatggaaaggccctggcaaagacgggtgtcccaaatagccgtttacatgttattgcaggactctcccatcttctcaaaatg

SEQ ID NO: 266799 - DNA, 456 bp, Glycine max
ctgaagaataaattaggatttgatgaagcttttaactacaaagaagagccagacgtcagggcagctttgaaaaggtactttccagaaggcattgacatttactttgagaatgttgggggcaagacacttgatgcagtactcccaaacatgaaatttcatggccgcatacctgtctgtggaatgatctcgcagtacaatcttactcagttcgatggtgtaacaaatttggcaaatctcatatttaagcgggttaaaatggaaggttttattgcaactgatttctatcatttatatccaaaattcttggagtttgtcctgcctcatatcagagaagggaaggttgtgtatgtggaagacattgctgagggccttgagaatggccctgcagccttggttggcctctataccggtcgcaatgttggtaaacaaagtggtgttgttactcacaagtaaaat

SEQ ID NO: 266800 - DNA, 448 bp, Glycine max
aaaagcgtgaatcatgtcggacgaatagcatcacttcgattctcaggcggatgcgggagcgtccaagacgtatcctcagcaggctggtaccattcgcaagaatggctacatcgtcatcaaatccaggccttgcaaggttgtagaggtctctacgtcaaagacaggcaagcatggacatgcaaagtgtcactttgttgcaattgatatttttaatgggaaaaagcttgaagatattgttccatcatcccacaactgtgatgttccacatgtgaatcgcactgactatcagcttattgatatctctgaagacggctttgtgagtctgttgactgataatggaaataccaaggatgatctgaagcttcctactgatgaggcattgcttgctcagattaaagatggattttctgaaggaaaagatcttgtggtttttgttatgtctgcaatg

SEQ ID NO: 266801 - DNA, 421 bp, Glycine max
gttgttcccttcttttttctttctccgccccttttttgttgttccttcttctcgggcggcgctttgtgatctctctctgcaaccatgtccgtcgagaaagagagagagacccaggtttacttggccaagcttgccgagcaggccgagagatacgaagaaatggttgagtgtatgaagaaagtagcaaaacttgatcttgatctgactgtggaagaaaggaaccttctctcagtgggatacaaaaatgtgattggtgcacgaagggcctcttggcgcataatgtcctcaattgagcagaaggaagagtctaagggaaatgagcacaatgttaaactgatcaagagttactgccaaaaagttgaggaggaactctccaaaatctgtggtgacattctgactattatagaccagcatttgattc

SEQ ID NO: 266802 - DNA, 391 bp, Glycine max
gggggttgaatgaatgatacgcgtcacattttcttgatgataaaaaaatggcagcggcggcggcagtgacggtgctactcccacctaggattccgaccaccaccaacgttacccgctgctctgctttgccttctctccctcctcgcgtctccaacaccaaaaccactttgttctcaccttccctcaacaacttttcagtgtcccgaaaatcttctctgcttcagaccagagcttcttcagaggaatcatcctcagtagatgccaatgaggtgttcacagatttgaaggaaaagtgggatgctcttgaaaacaagtccacagtacttctttatggtggaggggctatagttgctatttggctatcgtcaattcttgtgagcgccatcaactc

SEQ ID NO: 266803 - DNA, 367 bp, Glycine max
agttgctgcttcttcagccactccgcacctcgcagcctctgtgccctcaacaaccatggcgtggaatcgaaactaccgttccagatcccacccaaatcgacgtcaaactcttcaatcgctggagcttcgaggatgttgaggttaatgatatgtctctggctgattacattggagtgtccccatcaaagcatgctacatatgttcctcacactgctggtaggtactcagtgaagaggttcaggaaagcgcagtgccccattgttgagaggctcaccaactctctgatgatgcacgggaggaacaatggaaagaagctcatggctgtcaggattatcaagcatgccatggagatcatccacttgctcac

SEQ ID NO: 266804 - DNA, 455 bp, Glycine max
tccgggtgacgacgcgtccgccgccttcctttcttccttttgcaacaacaaaatcatcggcgccaaagccttctacaggggcggcgaatcctacctcgaaagaccaatcgacgaatctcaagaatcgaaatcgccacgcgacaccgaaggccacggcacgcacaccgcctccaccgccgcaggcgccgtcgtctccaacgcaagcctcttccactatgcgcagggcgaagccagaggaatggctacgaaagcaagaatcgcagcctataagatctgctggaagctaggttgcttcgactctgacatcctcgccgccatggacgaggctgtctccgacggcgtccacgtcatctcgctctccgtcggcgcgtccggctacgcgccccagtactaccgtgactcaatcgccgtgggagcgttcggcgctgccagacacaacgttctcgtctcgtgct

SEQ ID NO: 266805 - DNA, 457 bp, Glycine max
atttcgttgcgcctttgatctctgtccccgctgcgtctctcgtaatcatgcctaagcagatcgacgagattaaggatttccttctcactgccagaaggaaggatgcgaggtcagtgaagatcaagaggagcagagatgtggttaagttcaaggtcagatgctccaagtacctctacacactttgtgtgtttgacccagagaaagctgataaattgaagcaatctcttcctccaggtttgagtgttcaagacctgtaaaggtactgggcgagagatcaagaagaagcaattcattgattcttctgaagtttgattctctgtagttgaagcttgagatttttgtcagttggtcttttattatagattattgctaagacatggttgtttttatctgttttggaaaatgaaacttgaatttatgtctaatggagtattctagtgctgtggaactatatata

SEQ ID NO: 266806 - DNA, 323 bp, Glycine max
gtgtatttccctacctctcccttcaagatgcacatcttcgtcaagaccctcaccggggggaccatcacccttgaggtggaaagctctgacaccatcgacaacgtcaaggccaagatccaggacaaggaaggaatccccccggaccagcaacgtctcattttcgccggaaagcaacttgaggacggccgtacccttgctgactacaacattcagaaggagagtactcttcacctcgtcctccgtctccgtggtggcatgcagatcttcgttaagacactcaccggcaagaccataaccctagaggttgaaagcttcgacaccat

SEQ ID NO: 266807 - DNA, 391 bp, Glycine max
cccacgcgtccgcccacgcgtccgcgacgcagaaggttcatccaatctccgaatggttgagtcgcattgcaaccatgtcgaggagaaaggtcagagagccaaaggaggaaaacgtgactcttggcccagctgttagagatggcgaacatgtctttggcgtcgctcgcatatttgcctcctttaatgataccttcattcatgtcactgatctgtctgggagggaaacgcttgtccgcatcactggtggaatgaaagttaaggctgacagagatgaatcatctccttatgctgctatgcttgcagctcaggatgttgctgccagatgcaaggaacctggcattactgctcttcatatcaagctccgtgccacgggtgggaacaagacaaaaac

SEQ ID NO: 266808 - DNA, 444 bp, Glycine max
tacacctgtttctttctctgaaatggtgggaaaacgtgagagttcaaaacgctgagttgggggttccacaacactgggctcaagtgtacttaagtcgtgagttgttcaggtcctcaagatgcttgcactgacagattctcctctacttattgctaaaacatttgaagcaactaaaataccaacaagcacacgaggcactgtggtatgtgctgcaaaaggtccaagaccaagatatccccgagtttggaagacccataaaaaaattgggaccatttccaaggctgccaagcttgttaagtctattaaggaactgtctaatgtcaaagaggaagtttatggagctcttgattcctatgttgcttgggaattagagttccctttaattacagtgaaaaaggcactcaagaccctagaattcgaacaagactggaagcgggtaataca

SEQ ID NO: 266809 - DNA, 438 bp, Glycine max
aaattattaaaatatgaagtctgctcttatctaaatcacccttatttatccagagtaggtagccttcagcagaatataagaagctgcaaagttcccttcttttggggcagagtcaattcatcaattaggagttgggtgagagaatggaagcctcagagcagaacaattcaaaggtagtgttgattgattctttgcagtcatgggagttccacgtcaaccaagcctataatcagaatactcctgttgttgttcacttcactgcttcatggtgcatgccatcggtggctatgactcctgtttttgaagaactggcttcaagctatccggaagttctgtttctcactgttgatgttgatgaagtcaaggaggtagccaccaaaatggatgtaaaggcaatgccaacatttttgctgcttaaagacggtgcttctgtggaca

SEQ ID NO: 266810 - DNA, 473 bp, Glycine max
gcccggaatccccgggcggacgaaggcgtccgccaacccgtccgccaacccttccgactttttttgacaggagaccttcatttttgcagaggggctctctgaaaatcaatgcaattaccaaaaaatgggaacccactaaggttgtacctcaggctgatagagttcttgttcgtttggaggagctatcagataaaacagttggtggagttttgctgcccaagtcagctgttaaatttgagcgatatcttgtgggagaaatcctaactgttggtgctgaggctggagaactaaaggctggaacaaaggtactattcactgacatgaatgcttatgaggtggatttggggactgatgcaaaacactgcttctgtaaagcaagtgacttattggccgtggttgagtaaggtttgccactgtatgagacaaaacgggagcaatcctttttatgatatatctttgacaaatgtattttt

SEQ ID NO: 266811 - DNA, 456 bp, Glycine max
ccaacccgtccgcccacccgtccgcccacccgtccgattggatgcaaggttcctgagtgcgtggaaggaggaaagagttgaacctgcaaaggtctttaaataaggtggcattggtgatatcgtgactgatcaacctgtagacaagaaaaaattggttgatgatgttaggaaggctctttatgcagccaaaatctgtagttatgcacagggaatgaatttgatccgtgcaaagagtattgaaaagggttgggatttgaagttgggtgaactggcccgtatttggaaaggtggttgcatcattagagcaatattcttagacagaatcaagcaagcgtatgatagaaaccctaatctggcaaaccttcttgtggatccagagtttgcaaaggaaataatcgatcgccaatctgcctggaggagagttgtttgccttgctatcaattctggtatcagcac

SEQ ID NO: 266812 - DNA, 423 bp, Glycine max
ggaacacgctgatctcagtgttctctcaatactttcatgggatccgctgtcttagtacggatgtggagatgtgcaatctggggtttaagcccaatttcatgacttatggcagtgtactcagtgcatgtgccagcatttctgatctgaaatggggtgcccatttgcatgctcggattcttcgcatggaacatagcctggatgcgtttttgggaagtggtctcatagacatgtatgccaaatgtggatgcttagcactggcgaggcgtgtgtttaacagtttaggggaacagaatcaagtttcttggacttgcttgatttcaggggttgcacagtttggacttggtgatgatgctttggcactatttaaccaaatgaggcaggcttctgtggtgttggatgaattcacccttgtgacaattcttg

SEQ ID NO: 266813 - DNA, 313 bp, Glycine max
cccactcgtccgaaaaaccatggtgtcaccaatctcacttattgtcctcttgttagcagtttctttagcagattcagcttcacttcaagaaagttttgtccaatgtctcaacttgaattcggacaaaacatttccattttactcatcaatctacactgcaagcaacccttcattcaccatcatccttgactccttcgcacagaacctaatgcttttggtgccttcagtgccaaaaccctagttcatattcacaccctctcgtgatttccatgttcaagcatcattaatcttctccaagaaacttgttattcac

SEQ ID NO: 266814 - DNA, 487 bp, Glycine max
  unsure (1)..(487): unsure at all n locations
agaaaaccgggcgcgacccaacatccgatttatcaaaagtttgcacattcttctngtcaaatataccaaccattatcccccggccgttattatttaaaattacttactcttacacactacttaatatctcaattctattgtctcctaaattccatatactatccatactttcacaactctttttacttattaaaccctttcatttccctacctatataccttccaacctaaccctctctttcctgcttacttataatctaatattcctgttccctacatcctttccattatcctctcattctcaacttctaaactaacacaccctttaccgtaccatatatctccgcttttcttttcatttacgctctattcaactctctttattatccatatctcttactcctatttcctctcctaacattcccttccttctttatactaattttctccttctcttttaactttataatctctccttctttttttt

SEQ ID NO: 266815 - DNA, 288 bp, Glycine max
cgtgaagctcgtcaactgccaggacatattgcccacgcgctacacgcttgacgtggacttgaatgacgcggttaaccccgacgttctcaacgcgaaggataagaaggtcactgctctcaaggagaccaagaagcgcctcgaggagaggttcaaaaccgggaagaaccgttggttcttcaccaagctcaggttctgagcggtaatcttatctagttttgttattcgaatgcttttggatcttgcttgaatagatacttaataatgctgggttgagattatatatgggaa

SEQ ID NO: 266816 - DNA, 302 bp, Glycine max
gcgtccggcaggatgtcgaagagaggacgcggtggttcggcggggaacaagttccggatgtcgctgggtctgccggtggcggcgacggtgaactgcgccgacaatacgggggcgaagaacctctacatcatatcggtgaaagggatcaaagggcgtttgaaccgtctcccctcggcttgcgttggcgacatggtgatggccaccgtgaagaaggggaaacccgatctgaggaagaagggtttgccagctgtcattgttcgccagcgcaagccatggcgccgaaaggacggcgtctacatgta

SEQ ID NO: 266817 - DNA, 421 bp, Glycine max
cccacgcgtccggtttatcgtgaggagaatatgaagttgtttgttttctttgttgctgcagtagttttggtagcatggccatgccatggcgcaggctaccaaaggttccctctccgaatgaaaactggctatggtgagcgttcttcggaggtaaaatgcgcaagttttaggcttgctgtggaagcacacaacatccgagcctttaaaaccattcctgaagagtgcgttgaaccaacaaaggactacattaatggcgaacaatttagatcagactctaaaacagttaaccaacaagctttcttttatgctagtgaacgcgaagtccatcacaacgacatatttatattccgcataaataacaccgtactctctaatatcccatactatgaaaaacatggatattgggtggaggaatttaatg

SEQ ID NO: 266818 - DNA, 458 bp, Glycine max
  unsure (1)..(458): unsure at all n locations
cccacgcgtccggtgtgaattactacaccacttattatgcggaacatgctgaacctgtcagtgccaaccgaaccttctacacagacatactagccagtctcagtacggaaaggaatggtctacatgttggaaccccgactgatttgaattggctctttatcttttcaaagggaattcatcttcttatggcacacataaaggataaatacaagaatcttcctatttacatcactgaaaatggcatggctgaatcaaggaatgactcattaccagtcaatgaagcccgcaaggatagtataaggattagataccatgatggccatcttaaaattcttcttcaagcgatcaatgaaggtgttaatttgaagggctattatgcatggtcattntcggacagttttgaatgggatgctggttacacaattcgattcgggctcatatttgtggattacaagaac

SEQ ID NO: 266819 - DNA, 197 bp, Glycine max
acgctctagaacgggtggagactttgatccatatgaagcacagtaatctcttgtaatatcagatgctaattaggataaggcggaaggcatgagacatacaatagatgcagatatagctactatactaactatgacacgagtagaggctatcaatgcgatttcataactagctgatgcgtacgaatatctgaataact

SEQ ID NO: 266820 - DNA, 429 bp, Glycine max
gattcttttaacaacaatgatgatttattactactacaaatgaagaaaaagccttaaaaaatgaagcatgaaatgccattacaaatgaactcattaaaggctcccacaagcagggacatgaacatcatccctccgaccaaactgaacaaacataaatcaaacagacaggaaaaagatgattaaatcttggtctagttgatgattatattatatagtatcatatataattaagcggtaagctgttcctgcttgtgggtctcaataacaacatcactctgagggtaagcaacacaagtgaggacaaaacctgcagcaatctggtcatcatcaaggaaattaccgtcggattgatcgacggagccttgcttaatcattccggcacacgaagaacaagacccagccctacacgagaacggaagatcaatgcct

SEQ ID NO: 266821 - DNA, 416 bp, Glycine max
aacaacaatgttgatttattactactacaaatgaagaaaaagccttaaaaaataaagcatgaaatgccattacaaatgaactcattaaaggctcccacaagcagggacatgaacatcattcctccgaccaaactgaacaaacatatatcaaacagacaggaaaaagatgattaaatcttggtctagttgatgattatattatatagtatcatatataattaagcggtaagctgttcctgcttgtgggtctcaataacaacatcactctgagggtaagcaacacaagtgaggacaaaacctgtagcaatctggtcatcatcaaggaaattaccgtcggattgatcgactgagccttgcttaatcattccggcacacgaagaacaagacccagccctacacgagaacggaagatcaat

SEQ ID NO: 266822 - DNA, 424 bp, Glycine max
gaactgtgacgtctagaggcatgctacagcggcctgcatcctgtagagcggccgcacaatttcagcacactggcggtcgttactagcggatctgagattcattaacaggccaaatcgaacgctatggacagcccagcaatcgtgcacttataggatattgatgcgactgtcacagggtacacaacacgagtaaaaatatagagatagcgaatagatgaccttgacatcgtggcgcatatatacagatgcagcagctgtattcttgactgcctggaaatcttgcgcaagtactttggtgctagacttgaaaagaagatctatgtcgataaaccatcctgggtatccaagttttaccaactcgattatcttcggacgaaaagggaccgagaaagtggcactaatagaaattgatgatagccaaccg

SEQ ID NO: 266823 - DNA, 415 bp, Glycine max
acgaatataaataaaattaattaaaaatcagataaatgaatatgaaccttaatgattgaaagcattaaaaggaatcccagtgacccagtagccctgcctggggtctacaaaaagatgactgcaaagtaattttctttactgctctcaacattttatcaaaacatagcagatcaattacatgccattcatgcagaagtggagtcggatgatgatgcagccctcttcttggcaaagtattcctcagctcgagcaaggttctttgcaactgaaagcttaacccacttcttgcgcccaagcaatacggtgagagagcaaccggcagcctcgagcttttcctttgcagatgctgaaaaggcacgggccttcaagttcagctttaccttcagcttcccgtcaccaagaatcttcaaaggga

SEQ ID NO: 266824 - DNA, 415 bp, Glycine max
cccacgcgtccgcttagctacaagctaaggaaggatcaaagagaatggctcaagcaatggcgatcaatgactagcttacgtggttcctctcaggctgtgttggaaggtagccttggctccacacgcttgaatgtggggagtggaagcagggtggcctcagtcacacgtgcagggttcacagttagagcacagcaacaacaagtgaatggtggtgaggtacaaagtagccgtagggcagtgctttcacttgttgctgctggtttgaccactggctcttttgttcaagctgtgcttgctgatgccaaacctatcaaagttggaccaccttcctcaccttctggcggattacctggaacattgaactcagatgaaccaagagaccttaagctgccattgaaagatagggtctttcttt

SEQ ID NO: 266825 - DNA, 414 bp, Glycine max
agccttcggccaagccttccgtgagccgttaagatgccttgggtgaggctttcagagtcttcaaggctcgacgttgctattgacatgggtaatccatttctcaatctcactgttgatgggttccttaagatcggagctgtcgcagccacgcgatcagctgctgaagatacttatcatattatccaaaaggggaatatctcaagtcgtgatttcgagaaaactttgaagaagatgtgtaaagaaggtgtatattggggaactatagctggcgtttatgttggaatggaatatggggtagagaggatccgtggcaccagagactggaagaatgccatgattgggggtgcagtaactggggccctggtatctgcagccagcaacaacaagaaagacaagattgcgatagatgccatt

SEQ ID NO: 266826 - DNA, 421 bp, Glycine max
ctcttggcttcaagattatattcttgtcaggaagaacactggacaaacaggccgtaacaggggcaaacttaaagaaggctggctaccacacatgggaaaaattaattctcaaggatccacaagatccttccactccaaatgcagtttcatacaaaacagcagcgagagagaaactgataaggcagggatacaacattgttgggatcattggagaccaatggagcgatctcctcggaggccacagaggcgaaagcaggacctttaagcttcctaatcccctgtactacattcagtagttccttcacctctcaacaatctagcttgctcctatctatctatatgtaataagatgcgttcaaataggggcactagctttactttatgttgtttcagctgtgttgtaacaagtcattgtagatac

SEQ ID NO: 266827 - DNA, 449 bp, Glycine max
atcgcgatcttctgaaacatgtctggggaagaggaagaaaacgccgcagagctcaaaattggagacgagtttttgaaggcaaagtgcttaatgaactgtgaagttgcattgattcttgagcacaagtatgagcagcttcaacagacatccgatgatcccatgaatcaagtttctcaggtatttgaaaagtcactgcagtatgtgaagcgcttcagccgctataaaaatcccgatgctgttagacaagttcgagaaattctcgccagatatgaattggctgagtttgagttgtgtgtccttggcaacctttgcccagaaactgtggaggaagctattgctatggttccatctatcaagtcaagaggacggtctcaggatgatgaagcaatccagaaaatgttaaatgacctgtcgttgattaagaaatttggataaatacgtcaaagtgt

SEQ ID NO: 266828 - DNA, 462 bp, Glycine max
cccacgcgtccggaatggcacaaattaacatcatggcacaagggatacaaacccttaatggcaattccaatttccataaaccccaagttcctaaatcttcaagttttcttgtttttggatctaaaaaactgaaaaattcagcagattctatgttggttttgaaaaaagattcaatttttatgcaaaagttatgttcctttaggatttcagcatcagtggctacagcctgcatgcttcacggtgcaagcagccggcccgcaaccgtccgcaaatcctctggcctttccggaaccgtccgcattcccggcgacaagtcgatctcccaccggtccttcatgttcggcggtctcgcgagcggtgaaacgcgcatcaccggccttctggaaggcgaggacgtcatcaatactggcaaggccatgcaagccatgggcgccaggatctcgtaggaaggcgacacctgga

SEQ ID NO: 266829 - DNA, 436 bp, Glycine max
gcgcccacgcgtccgcccacgcgtccggtgactactggacttctgatgccgggccattagaggcctttaagaggtttggaaagaatcttgaagagattgaaaagaagcttatagagaagaacaataatgagacattgagaaaccgctatgggccggctaaaatgccttacactttgctctatccttctagtgaggagggattgactttcagaggaattcccaacagtatctctatctaagggctctatggttgctgaagtactgtccctggctttaaataaatgtgaaatagaaggagtctgattccttcatcagttgtgtatgtttaagttatgtatttggagtggctgaatgtacttgtatttgtcattaataaaccatgtttgtgtaatggaaaccaaaatggtaaatgcaatcatgcaagtttgaacttttt

SEQ ID NO: 266830 - DNA, 439 bp, Glycine max
cacatggatcccgaccctatctgtgccttttcctatgtttgcgaattaaatgaagcattcagaaaccataactgaagaaaactaaggaaggaaggaagagtgagcgtgaaagatgccttgggcgaggctttcagggtctccaaggctcgacgttgctattgacatgggcaatccatttctcaatctcactgttgatggtttccttaagatcggagctgtcgcagccacgcgatcagctgctgaagatacttatcatattatccaaaaggggaatatctcaagtcatgatttcgagaaaacgttgaagaagatgtgcaaagaaggtgtatattggggaactatagctggcgtttatgttggaatggaatatggggtagagaggatccgtggcaccagagattggaagaatgccatgattgggggtgcagtaactggggcc

SEQ ID NO: 266831 - DNA, 450 bp, Glycine max
accagagttccaaattttttggtttggggatagatagagtgatacgcgtcacattttcatagtaataaaaaaatggcagcggcggcggcagtgacggtgctactcccacctaggattccgaccaccaccaacgttacccgctgctctgctttgccttctctccctcctcgcgtctccaacaccaaaaccactttgttctcaccttccctcaacaacttttcagtgtcccgaaaatcttctctgcttcagacgagagcttcttcagaggaatcatcctcagtagatgccaatgaggtgttcacagatttgaaggaaaagtgggatgctcttgaaaacaagtccacagtacttctttatggtggaggggctatagttgctatttggctatcgtcaattcttgtgagcgccatcaactcagttcccttgcttccaaagattatggagttggta

SEQ ID NO: 266832 - DNA, 453 bp, Glycine max
gccagttcccatttttaagccaataccgaatccagttcccatttataagccaattcccattgttaagccagtaccgaaaccagttcccatttataagccaattccaatttttaagccagtaccaacaccaattcctttttttaagcctataccaaagcctgttcctattgttaaacctattcctattccagtttttaaacccatacctaaaccatttccaattgttaaacctatcccttaagccaaagtcattttttaagccagagactttcttcagaaaacctattcctaaacttcacccaaatctgataaagcacggtcttctacattttccaattcacaatacaattcctacaatttcaactccataagatgatttggccgtgtcctataaaattattgtacttagaacgttatcccattctatttccaatatagctacgtttggtctaa

SEQ ID NO: 266833 - DNA, 457 bp, Glycine max
cccacgcgtccgcccacgcgtccgggagactgttcctgattggatagcaattgtaggaagtggttatattggccttgaattcagtgatgtatatacggcccttggaagtgaggttacttttattgaagctttagaccagctcatgcctggatttgatcctgaaattagcaagttggctcagagggttctcataaatccccggaatattgactatcatactggagtttttgcatccaagatcactcctgcaagagacggaaaacctgtcacaattgagctcattgatgcaaagaccaaggaacagaaggacactttagaggtggatgctgcactaatagcaacaggaagggctccattcacacaaggtcttggattggagaatattgatgttgtaacgcagcgtggttttgttcctgtcgatgagcgcatgagagtacttgatgcaaatggaaacctg

SEQ ID NO: 266834 - DNA, 314 bp, Glycine max
tctcataataatcgtcaccctcaatgtgacgactattcaatacttaatgggatctcatgcaaaatttatagaatgagatgttttggtgcacaaaaaaacaaaaaaaaaaaaaaaaaaaaaccaaataaaaaaaaaaaatataaaattaaaaataaaaaataaaaaaataacaaaaataaaaaaaaaaataaaaaaataaaataaaaaaaaaaagggccgccccttttaaagatccaaattttacttacccgtccttcctacttaaaaccttttatttggggcccccaaattaaatttaattgccacttttttaa

SEQ ID NO: 266835 - DNA, 465 bp, Glycine max
cccacgcgtccgaaaagcaccgcacaacgctttacgaaccttaccttacctctctctgttagacgtttatcacagtgagtgaccgctatcaacggcatacacagcgcgagtttgtttatccacattccgcaatgagaagatgatgacgacgccgtttcagcaaccgccccaaaccgtacggagactggtggtggaagtggttgacgcgcgcatcctgcttcttatagatggccaatgcagctcgagcccttacttggtgtgcttgacttcgactgtcatattatgcttattttttttctgtttaagttgcttgaccttttttgtaacttgtttttcttttttattttttttgtttttgttttctttttttttcttgttttatattttttctttttttttttattttttttgtttatttttttatttttttttttttttttatttttcttttttatttattttttt

SEQ ID NO: 266836 - DNA, 462 bp, Glycine max
aaaaaggttttagatcgtaaaaactaatcactacgaaaacaagagatatcgaagatggctctgcccaaagctaaggagatcgtgtcgtccaattccgtcgtcgttttcagcaaaacctattgccctttctgcgtcgatgtgaagaagctcttcggtgacctcggtgccaattacaaggccatcgaactcgacactgaatccgatggaaaagagctccaagcagcattagttgagtggacggaccagcgaaccgtgcctaatgtgtttattggtggaaaccacattggtggctgtgactcaacaactgccctgcacactcaggggaagctggttcctctgctgatatctgctggagctgttgccaaatcaactgcttaaaggatctcccatttctaggttatgcagttaaataaaaataaaaacccaagtagttgggtcggttatataattcaggtcccagaa

SEQ ID NO: 266837 - DNA, 454 bp, Glycine max
gtgatttcagtgagtgatcggtgttcacttgatctcatcataatcgtcagcgtcaattggggaagatgccgatcagaaacatcgccgtcggaaggcctgaagaggcgactcaccccgacacgttgaaggcggctttggctgagttcatctcaaccttcatcttcgtgttcgccggctcaggctccggcatcgcctacaacaagctcaccgacaacggcgctgccacccctgccggcctcatctccgcctccatcgcccatgcattcgccctcttcgtcgccgtctccgtcggcgccaacatctccggcggccacgtcaaccccgccgtcaccttcggcgccttcgtcggcggcaacatcaccttcctccgcggcatcgtctacgtcatcgcccagctcctcggctccatcgtcgcctccctcctcctggccttcgtcaccgcctccactgttcc

SEQ ID NO: 266838 - DNA, 457 bp, Glycine max
cacaaagctgctggagcatttggtggcatcagaatttggagccggcctcaaattcctgtgccttttccttctcctgccggggacattaccatacttgctggagattggttcaagcttgaccaccgaagactgagacgactcctagagaatggtcataatctccccttccctgatggccttcttatcaatggacgtggttggaatggaaacaccttcactgttgatcaaggtggaacctgacagcaagtggaccaagaccaaaccctcagggatcataccactatggattgatcaaaccgagtcgaaccatcatgcttgcaaattctgctccttatatcaatggcaagcagaggtatgcggtcaacggtgtctcatacaatgaaccagataccccattgaaacttgccgactacttcaacatccctggagttttctacgttggaagcattcctaccta

SEQ ID NO: 266839 - DNA, 167 bp, Glycine max
gtgagccacacacacaatccattccctttctgcactacggcaatgaccacccaagcttccgccttcttcgtaaccgttccgtccgtcgcaacccctttccgtctccaccgtaatcccttccttgttctagcccaatcgtaacctatcagataaatccttttaaatta

SEQ ID NO: 266840 - DNA, 444 bp, Glycine max
gctgcatcagaggagttgtaaattaagagcatggctgcacaagctcttgtatcatcatcttgtctgaccttctcagcggaggctgcaagacaaagtcttggaccaagatcactccaatctccatttggcttctccagaaaagcctcctttcttgttaaggcagctgctaccccccctgtcaagcaaggatcagacaggcctttgtggtttgcatcaaagcaaagtctttcttacttggatggcagccttccgggtgactatggatttgaccctctgggactttcagaccctgaaggaacaggagggttcattgagccgaaatggctagcatatggtgagataatcaatggtcgttatgcaatgttgggtgcagttggtgcaatagcacctgaaattctaagcaaggctggtctgatcccctcagagacagcactcccatggttc

SEQ ID NO: 266841 - DNA, 130 bp, Glycine max
cttggatttttacaccttaatccgattcagatattatgtcttcttactcgattgttgaaagtctaagtcgttgagtttttagttccagaatcaattttcaatcccacaagtaattttgggaaatgccatc

SEQ ID NO: 266842 - DNA, 449 bp, Glycine max
cccagcgcgtccgtgagattataccccaatcattttgttctcggtatggtttggctattggtgcatcagtggctccctttgtccgtgtgcttgtatgcatatgtttcccagttgcctttccaattagtaagttgttggattttttgctgggccatcgacatgaagccctattccgtagagctgagttgaaaacactcgtaaatttgcatggtaatgaggctggaaaagggggggaactgacacatgatgaaacaacgatcattgctggggcacttgaactcagtgagaagacagcgagtgatgccatgactcctatatctgaaacatttaccgttgatattaattcaaagcttgatagggaactgatgaatgaaatattggagaaagggcacagcagagtcccagtctattatgagcagcctacaaacattattggccttggactggtc

SEQ ID NO: 266843 - DNA, 443 bp, Glycine max
caaagccatggccacctccaacttctctattgttctctccgtctccctagccttcttttgggtgctacttaccaaggcacactcgaccgataccgtttctttcaccttcaacaagttcaacccagtccaaccaaacattatgctccaaaaagatgctagtatttcatcctctggggtgttacaactcaccaaagttggcagcaacggcgtgcccacctcgggatctctcggtcgtgccctttacgctgccccaatccagatttgggacagcgaaaccggcaaggtagccagctgggctacatcctttaaattcaacattttcgcacccaacaaatcaaactcagctgacgggcttgccttcttcttggcacccgtcgggtcttagccccaatccgacgatggatttcttggtcttttcaacagtcccttaaaggacaagtctt

SEQ ID NO: 266844 - DNA, 405 bp, Glycine max
gattttgattgttgcaactggctcaacagttataaggctgacagatttcggtgtagaaggaggtgatgcgaaaaacatcttttatttgagggaggttgacgatgctgacaaattgtacgcagcaatcaaggcaaagaagaatgggaaagctgtggttgttgggggaggatacattggtctggagcttagtgcagtgttgaaactcaacaatattgatgttaccatggtctacccggagccttggtgtatgccacgatcttttacggctggtatagctgaattctatgagggatattacgcaaatattggtgtaaatattattattggaaacagttttattttgttcattcttattccgtttgatcggttatttttaccttgattcttatcgtaaatttttttgta

SEQ ID NO: 266845 - DNA, 426 bp, Glycine max
  unsure (1)..(426): unsure at all n locations
ctaaactaaaaatggatcgagaatggggatcgaagccggggagcggaggtgcggcgtcggcgcagaacgaagccatagaccggcgagagcgtctccggcgattggctctggagaccatagacctggcgaaggatccctatttcatgcgcaaccacctcggaagctacgaatgcaaactctgtctcactctccacaacaacgagggcaactacttggctcacactcagggaaagcgccaccaaaccaacttggccaaacgtgcagctcgcgaggccaaggactcccccgcgcagccccaacctcacaaacgcaaagtcactcttcgaaaaacagtgaagattggacgacctgngtaccgtgtcaccaagcagtatgacccggagactaaacaaagatctctcctattccagattgaatatccggaga

SEQ ID NO: 266846 - DNA, 451 bp, Glycine max
atatgctcaagcctgggatgatgcattaagcaaggcaagatttgagttccgatggatggagcagtttgctttgtcattggatccgatgacagccatgtccttccatgacgaaaccctgccagcagatggtgcaaaagtggctcatttctgctcaatgtgtggccctaaattctgctctatgaagataaccgaggatgtgaggaagtatgctgaggaacatggctatggaactgatgaagctttgcagcgtgggatggatgctatgagtgctgaatttcaagctgtcaagaaaactatcagcggggagcaacatggtgaagctggcggagagatttacttgccagaagaatacgttagttccaagaggacttaaatggagcaaatcagttggaagaacttggagctagcttcccaactggcttatcaaggtgtggagaagcattattaagcc

SEQ ID NO: 266847 - DNA, 421 bp, Glycine max
cccacgcgtccgggagaatatgaagttgtttgttttctttgttgctgcagtagttttggtagcatggtcatgccatggcgcaggctaccaaaggttccctctccgaatgaaaactggctatggtgagcgttcttcggaggtaaaatgcgcaagttttaggcttgctgtggaagcacacaacatccgagcctttaaaaccattcctgaagagtgcgttgaaccaacaaaggactacattaatggcgaacaatttagatcagactctaaaacagttaaccaacaagctttcttttatgctagtgaacgcgaagtccatcacaacgacatatttatattcggcatagataacaccgtactctctaatatcccatactatgaaaaacatggatatggggtggaggaatttaatgaaaccttatat

SEQ ID NO: 266848 - DNA, 380 bp, Glycine max
tttcataaggactttagttcttccaaaaaaaaataatagacttaaaaaagcacactgcatggtcatcaaagcatcatcaaagcacactgcatcctaacagcacacgtacgtagaaaggtgaagttccaggtcttgcacaacatacacaacacaccataatttattttatatacaatcttatggtgcccaagatgcagatgcatggactaattaaacaacaacgttagtctgataggcagtgtccatagatatattgcgtacccataaaatggccttgcttccaaggaaatggcaaacagggttagttccaggatcaactaccatgagttcacatagcagggatgattcatgggcttatgtatataactgccctatattta

SEQ ID NO: 266849 - DNA, 443 bp, Glycine max
gtggaagaagagaaagtggcatcgcttaggtacagatacagacacaacctggtaaaaatcgggaccccagtgccgcacaattttgcttcactcgcagcggaggtttacttttgatctagtacctgctatccctatgtataagcatggacttctagcatactattgtttgattaaccaagttcttccatattggttgaggaagcctcgagtcaatatttagtttttgctgccatctgtgggtttctgatggatgatgccgggcatcgtgaaaatggaaggcacaaagcagcagatcaatataaatctgctcagggacagtggttgatgcaacatcagccttccatgaagcagattatggcaattatggctgaaagagatgcagccattcaagaaagaaatctggccatttccgagaaaaaagcagcatatgctgagcgcgatat

SEQ ID NO: 266850 - DNA, 453 bp, Glycine max
gttcagtctttcttggaactttgttactctcacacatgtctcgctccgtgcctttggtttgaaccatttttgtcttgcttctgcttctggtggccactgagatgatggggccaacaatggtggcagaagcaagaacttgtgagtctcagagccaccgtttcaaggggccatgtttgagtgacaccaactgtggctctgtttgccgaaccgaacgtttcactggaggacactgccgtggcttccgtcgcagatgcttctgcaccaaacattgttaattttaaaaaattaattaagagtgctttgatagaagatgatagatctatcatctttctactcgtgttgttaattaaccactttgtgtttgagaataaaggttacccattctactatgggtttctttgtttgcctcttattttatctagttagagatccttttatgaaacgagtgatcag

SEQ ID NO: 266851 - DNA, 475 bp, Glycine max
cgacaccacgcgtgcgggttgttagaatagcttcaatccaaccacgtgcatcatcttcaatttcccaacccaacccgactttttcatcatctgaatcaaatgcaaactcacaattcaacaaatctttgctctcatggaaccgactcaagcctccctcaaccaaatgcaacttccccaaactccgccacaagtggaagcaataccaaggaatcaaccactgggaaggcttgctggatcctcttgacgatgacctacgctgggaaatcctaagatatggccactttgtggatgctacatatagctcctttgactttgacccttcttctcttacctatgccacatgtctttactcgaagaaatcgctattgaacaagtgcgggttgggaaactatggataccgattgactaaatatctacatgtcacgtgtgggattcacatgccaacatggataaataaatgttttaaacaagcctg

SEQ ID NO: 266852 - DNA, 452 bp, Glycine max
gaaacagtgtgatgaaaatgaaggtccttgttttcttcgttgctacaattttggtagcatggcaatgccatgcgtacgatatgttccctctccgaatgaacactggctatggtgcccgtactccggaggtgaaatgcgcaagttggaggcttgctgtggaagcacacaacatctttggctttgagaccattcctgaagagtgcgttgaagcaacaaaggaatacatccatggcgaacaatatagatcagactccaaaacagttaaccaacaagcttacttttatgccagagacctcgaagtccatcccaaggacacatttgtgttcagtatagatggcaccgtactctctaatattccatactacaaaaaacatggatatggggtggagaaatttaactcgaccttgtatgatgaatgggttaacaagggcaatgcaccggcactgcccgag

SEQ ID NO: 266853 - DNA, 457 bp, Glycine max
cccacgcgtccgcccacgcgtccgaaagctatggccacctccaacttctctattgttctcgccgtctccctagccttctttttggtgctacttaccaaggcacactcgaccgataccgtttctttcaccttcaacaagttcaacccagtccaaccaaacattatgctccaaaaagatgctagtatttcatcctctggggtgttacaactcaccaaagttggcagcaacggcgtgcccacctcgggatctctcggtcgtgccctttacgctgccccaatccagatttgggacagcgaaaccggcaaggtagccagctgggctacatcctttaaattcaacattttcgcacccaacaaatcaaactcagctgacgggcttgccttcttcttggcacccgtcgggtctcagccccaatccgacgatggatttcttggtcttttcaacagtcccttaaagg

SEQ ID NO: 266854 - DNA, 447 bp, Glycine max
  unsure (1)..(447): unsure at all n locations
cccagtcgtccgcccactcttccggttctttctctttcattcatccttggtaatggcttntgcatggcaagcaaccttagcaggcaacacctatgccttttcttccaggagattctccttgaagcaccaaaagaacagtaagagaaggttttctttgttcactgttagagctgattctgatgactctgactgcaatgaggaagagtgtgccccggataaggaagtntttttttgtttttttttttttttttttttttttttttttttttttttttttttttttttttttttttttttntttttttttttttttttttttttttttttttttttttttttttttttttttttttttttttttttttttttttttttttttttttttttttttttttttttttttttttttttttttttttttttttttttttttttnttttttttttt

SEQ ID NO: 266855 - DNA, 408 bp, Glycine max
gcttaggatcacccaagatagaacctaagactcacaacacaacacacagagagagtttgaggaagaaatcatcatggcttcagcagcatctgggtttgtgctgtctcttaatgttgcagcttccaccacaaactcaagggtggtcttgttcaacacaaagaaccacgcttctaggcttcttgtgagggcttcagacgagcctgcagcggcggcacccgcaaccaccacccctccagctgaagctgaagcaaagccaaaaccaccacctattggccccaagagaggtgctaaggtgaagattcttaggaaggaatcctactggtacaaaggcactggttcagtggttgctgttgatcaggaccccaacactcgctaccctgttgtggttcgattcaacaaagtcaacta

SEQ ID NO: 266856 - DNA, 447 bp, Glycine max
atagcgtcaatggcatcatcatttgtgggtactttattacccaaccacttcacacaaaccaagcactgatctgttcctgcaaggagatcacgtgctccaagaaggaggagagtgcacttagcaacaacaagagcagagaccatgactactgtcatagaaaaactgggcattaagattgagaggaaccctcctgagtccaagctcactcaactgggtgttaggcaatggcccaaatggggttgccctccaagtaagttcccatggacatatgaagccaaagagacttgctatcttctggaaggaaaagtgaaggtctttcctagtgggtcgaatgagtcagttgaaattgctgctggtgacttggttgtgtttcccaaagggatgagttgcacttgggatgtgtctgttggtgttgacaagcactaataatttgaataaatcctacaa

SEQ ID NO: 266857 - DNA, 449 bp, Glycine max
  unsure (1)..(449): unsure at all n locations
cccacgcgtccgcccacgcgtccgatcgagttaactagaaacagtgtgatgaaaatgaagggccttgttttcttcgttgctacaattttggtagcatggcaatgccatgcgtacgatatgttccctctccgaatgaacactggctatggtgcccgtactccggaggtgaaatgcgcaagttggaggcttgctgtggaagcacacaacatctttggctttgagaccattcctgaagagtgcgttgaagcaacaaaggaatacatccatggcgaacaatatagatcagactccaaaacagttaaccaacaagcttacttttatgccagagacctcgaagtccatcccaaggacacatttgtgttcagtatagatggcaccgtactctctaatattccatactacanaaaacatggatatggngtggagaaatttaactcgaccttggatga

SEQ ID NO: 266858 - DNA, 397 bp, Glycine max
ggaagaatagaatgggatctggaagtggatattctcactggagagttcttcaggagaaggggtggatggatgaagcatccgatgctcaccaatcagctccgccacgccactcctggccttggcatcgccgtcgtcgccttcggtatctacctcgtcggcgaacaagtctacaataggctctatgctcccgatcctcattcgatttctcacgtgaaagccggggatcaccactaaacgtttggacggacgcactccattccatcatcacttaatttgcttgctagcattgttctcgcagcctttaatgtttatattttcagaccgtgttcgcttctttgtgcactcactatgttgtcttgtatgcctacattttatgcctttaatttttttttacatt

SEQ ID NO: 266859 - DNA, 418 bp, Glycine max
cccacgcgtacggaactaatgaataagctattaatttccatggaagaagtttgactgctcgcggtggtgcttctcacaatgttctcctctgcctatggctatggatatggtggtggctgggttaatgcacatgccaccttctatggaggaagtgatgcctcaggaacaatgggtggggcatgtggatatggcaacctctacagccaagggtatggaacaaacactgctgctttgagcactgctttgttcaacaatggtcttagttgtggctcatgctatgaaataaggtgtgtgaatgaccataggtggtgcctccctggctccattatggtcactgccaccaatttctgccctccaaacaatgccttaccaaacaattcacgatgatggtgcaacccttctatgcaccattttgacc

SEQ ID NO: 266860 - DNA, 456 bp, Glycine max
atcttgatttcacgctcagcctggcgtcacctgacaattttgaagcattggggttgcaaagtggaattgttctgaacaagccttgttcttatcgtcgccgctgtagacatggtttatcactctagttttgtgaatgaagatggagtgagtagagcatgtgggtgccctcttcttcctctcaagagccacattaagggacctgctcctgtttcagatcaagacagaactgatattgtggatgaagccataaccttcttccgagccaatgtgttcttcagaaactttgacatcaagagccctgctgataagcttctcatatacttgaccttttacattaatgttgctctcaagaggcttgaaggttgcagaaccttggcagaaggaaccaaggcaatcatcaacttgggtctcgaaaaggttcctgtccctggagagtctggctttccattttcgggc

SEQ ID NO: 266861 - DNA, 459 bp, Glycine max
  unsure (1)..(459): unsure at all n locations
cccacgcgtccgcgagataactagaaacagtgtgatgaaaatgaaggtccttgttttcttggttgctacaattttggtagcatggcaatgccatgcgtacgatatgttccctctccgaatgaacactggctatggtgcccgtactccggaggtgaaatgcgcaagttggaggcttgctgtggaagcacacaacatctttggctttgagaccattcctgaagagtgcgttgaagcaacaaaggaatacatccatggcgaacaatatagatcagactccaaaacagttaaccaacaagcttacttttatgccagagacctcgaagtccatcccaaggacacatttgtgttcagtatagatggcaccgtactctctaatattccatactacaaaaaacatggatatggcgtggagaaatntaactcgaccttgtatgatgaatgggttaacaagggcaatgc

SEQ ID NO: 266862 - DNA, 456 bp, Glycine max
aaaaggccatataattttttttatttgaaataatgtccgggatcatccacaagattgaggggaccctccatgtgggagggcacaagaaagaggagcacaaaggagaacaccatggtgagcacaaaggtgaacacaaaggagaacaccatggtgagcacaaaggtgaacacaaaggagaacaacaccatggggagcacaaggagggacttgtggataagatcaaggacaagatccatggtgatggccatgacaagggtgagaaaaagaagaagaaggacaagaagaagaaggagcatggacatgaccatcatggtcatagcagcagcagtgacagtgattagatcttatatgttaaggtgtacggtacgatggtagtgaggagccagaatccctcttcctgctttatgatataataaaaataaaatagcgattccggaaatcatgtctgtagctgct

SEQ ID NO: 266863 - DNA, 305 bp, Glycine max
cagtgagtgatcggtgttcacttgatcctttataagtcgtcatcatcatcatcatcatcacggttgattgaagaagatgccgagcagaaacatcgccatcggaaggcctgaagaggctactcaccccgacacgttgaaggcggggttggctgagttcatctccaccttgatcttcgtgttcgccggttcaggttccggcatcgcctacaacaagctcaccgacaacggcgccgccactcccgccggcctcatcttcgcttccatcgcccatgctttcgccctcttcgtcgccgtcttcgtcggct

SEQ ID NO: 266864 - DNA, 397 bp, Glycine max
ctcaaattcgatttgtaccaaattttcttcacaaaatgtctggtcgtgggaaaggtggcaggggtttgggaaagggaggtgccaagaggcacagaaaagttcttcgtgataacattcaaggtatcacgaaacctgcgattcgtaggttagcgagaagaggtggcgttaagaggatcagtggtttgatctatgaggaaaccagaggagttctgaagattttcttggagaacgtgattcgagatgctgtgacctacaccgagcacgctaggaggaagacggtgactgccatggatgtggtttatgcgctcaagaggcatggaaggaccctctatggtttcggaggctgaatgattgattcttagtattattaaattatgttgcatgatataatattatg

SEQ ID NO: 266865 - DNA, 453 bp, Glycine max
gggaaacctacaagtcaccgttgctgctatttagggcttaattgagttaattatgaatgagaggcatagtgataccacaactcaggatccagctgctaatgctttcttagccagtaccatgcgctatatagagttccagaaacaaaaagggggtgcggtaggcgagaagtatgaagccatcaaggtttcacatgctggatgaccgatacccttgttgttgtcgtgttagattttgaagcaatttgttcttgggcagttccagctactgtttacaattgtctttagatttcaactgaagaaccacaagtttgtgttcctttctgatatgtgctgacagcaaatgtacactccgtcattgagttaagactctgattcattgtgtaactaatgagacttggccaccattaaacattgttagatctttttttctttcaattttacaccaattaagag

SEQ ID NO: 266866 - DNA, 430 bp, Glycine max
  unsure (1)..(430): unsure at all n locations
tgctagccacacacacatatcattccctcttttcactaccgcaatgaccacccaagcttccagcttcgttttcaccgatccctgcgtcgcaacccctttccgccgccaccggaatcccttcgttgttcgagcccaagcggaaccttcagataaatccgttgaaattatgaggaagttctcagagcaatactcccgtaagtcaggaacatacttttgtgttgacaagggggtcactttcttttgtatcaatgttttttctgaccatatttattctttntgtttctccattttactcttttcttctttttctttgtatgattttctttttgttttttttttatttttgaatttattctttttttgttctttttattttttttatttttttatttttctttatatttaattttactttttttttttttttttt

SEQ ID NO: 266867 - DNA, 449 bp, Glycine max
ctcttgctgacttggcctctactcaccccattaggttgggacttgctctcaacttttctgtgttctattatgaaatccttaactcgccagatcgtgcttgtaatcttgccaagcaggcatttgatgaggcaatttccgagcttgacacattgggtgaagagtcatacaaagatagtacattgatcatgcaacttctccgtgacaatctgactttgtggacatcatacatcacggacgatgctggagatgagatcaaggaaacatctaagcaacaaccaggcgaataggcgatggcagttgcgatgtggtagttgattggatatgtattaccgataatatggatccaatgtggcttgccatagtgggattattgcattaatgaattttatgatttcaagtgcgcgttgcgcttgggatttacaatgtttcagtggattgtctaatgtgtt

SEQ ID NO: 266868 - DNA, 458 bp, Glycine max
gaagaagaagaggcatgcccagaagaaaagggagatattcccttgcaatgtcatgcgccggagacaccaactttggtggatactggtggtatagcagtgacgaatacgacgaaaccgacacccttatgtcctcgaaaagcctctcgtgggattcctacgggtcccggcgccggcgcaggaataatgaacggagctacgacatgcgtgttctgccgctgaacggtaaggtgaaggatacattcgcggtggagaagcgctacagcgacccttacagagatttcaggacttcgatgctcgaaatgatcgtcgagaagcagattttctcgaccgctgatttggagaatctcttgcagtgttttctgacgatgaattcgcatcaccattataagatcattgtccatgtcttcaccgagatttgggaggctctgttctctgactggtattgataattagagaga

SEQ ID NO: 266869 - DNA, 330 bp, Glycine max
gacacacgcgtccggtgaaacagaaactgattacaatatgaatcagtgtgatgaaaattaacgtccttgcggggctcctttctacaactttgggagcatcacaattccatgcatacaacatgtcccatcttccaataaacacttactttcgtgcccctactccgtaagtaaactgcaccaagttaaacgcttacactagaagcacacaacatcttttactttaaaaccatacactaacacttcgatcaatcaactaactgaaacatccattgctaacaatatataacatacttctaaacatttaaccaacattcttactattatgccata

SEQ ID NO: 266870 - DNA, 450 bp, Glycine max
caattccgcgctttaacaacagaaagaaattcacacatttccctttcaatggcacgaaccaggcaaacagcgcgcaagtccaccggcggcaaggctcctcggaagcagctcgccacaaaagccgctagaaagtccgctccggcaaccggcggagtaaaaaagccgcaccgttttaggcccggcacggtggcgctgagggagatccgaaagtaccagaagagcacggaacttctgatccggaagctcccgttccagcggctggtgcgcgagatcgcactggatttcaaaaccgatttgcggtttcagagtagcgctgtttccgcgcttcaggaagcggcggaagcttatttggttgggttgtttgaagatactaatctttgtgccattcacgcaaagcgcgtcaccatcatgcctaaggatattcaacttgcaaggaggatcaggggcgag

SEQ ID NO: 266871 - DNA, 359 bp, Glycine max
ccactttgtagtgtggcaatccacaattgttttctttaattttacgattccaatccctcccgaaaaaaaaaaaaaaaaaaaaaaaaaaaaaaaaaaaaaaaaaaaaaaaaaaaaaaaaaaaaaaaaaaaaaaaaaaaaaaaaaaaaaaaaaaaaaaaaaaaaaaaaaaaaaaaaaaaaaaaaaaaataaaaaaagtcccccccttttaaagtctccaaccttctaaccccatcaatccaattacaaacctcttaaaaatatcccccaaaataaaattcatatcccttttttaaaaaccatattccctttaaaaccctttaatttcccaatttaaatcccttttaaaaaaaatccttttt

SEQ ID NO: 266872 - DNA, 444 bp, Glycine max
  unsure (1)..(444): unsure at all n locations
cccacgcgtccggatcgagataactagaaacagtgtgatgaaaatgaaggtccttgtttgcttcgttgctacaattttggtagcatggcaatgccatgcgtacgatatgttccctctccgaatgaacactggctatggtgcccgtactccggaggtgaaatgcgcaagttggaggcttgctgtggaagcacacaacatctttggctttgagaccattcctgaagagtgcgttgaagcaacaaaggaatacatccatggcgaacaatatagatcagactccaaaacagttaaccaacaagcttacttttatgccagagacctcgaagtccatcccaaggacacatttgtgttcagtatagatggcaccgtactctctaatattccatactacaaaaaacatggatatggngtggagaaatntaactcgaccttgtatgatgaatg

SEQ ID NO: 266873 - DNA, 448 bp, Glycine max
tgaacacacacatagaaactccaacaacaagtatgaagaagatgattctaaccctcttcttaggatgattttatctctcctctgcctctcccacgcctccgtggtggatttctgcgtagcagactacacaggccccaatggccccgcagggtactcatgcaagagcccagcaaaggtcacggtggacgacttcgtctactccggccttggcaccgccggcaacacctcaaacatcatcaaagccgcggtgacgccggcgttcgacgcgcaattccccggcgtcaacgggcttggaatctccattgcacgcctagacctagcagccggtggagtcatccctcttcacacgcaccctggtgcctcagagctgctggtggttgtgcagggaacaatctgcaccggcttcgttgcttcggacaacactgtgtacctcaaaaccctaaaaagg

SEQ ID NO: 266874 - DNA, 343 bp, Glycine max
cccacgcgtccggaaacatttggaggaaatttaaggagcaaagagtcatctccattttttggaaatggatcttcttgacatcgactccattgccgctgccataaagggttgttccggcgtaatccaccttgcatgtcctaacatcattggtcaagtcgaagatcccgagaaacagatattggaaccggcgataaaaggaacggttaatgtgttgaaggcggcgaacgaagcaggggtggagcgcgtggtggcgacttcatcgatttcgtcgattatgccaagtcctaattggccagctgataagattaagggagaagagtgttggacggaccttgaatactgc

SEQ ID NO: 266875 - DNA, 440 bp, Glycine max
ggcgcagtgcctccagaatctcccttcctcttacaacaagttcacttacaactgcgatggcgacacgttcaactacctcgttgagaacggattcacttactgtgtggttgctgttgagtctgctggacggcagattccaattgctttcctcgaacgaatcaaggaggattttaccaagaagtatgctggaggaaaagctgcaacagcggctgctcatagcctcaacagagagtttggacctaagttgaaggaggagatgcagtactgtgttgatcacccagaggaaattagcaagcttgctaaagtgaaagctcaggtttcagaagtcaaaggagttatgatggaaaatattgagaaggttcttgaccgtggggagaaaattgagcttttggtggataaaacagagaaccttcgctctcaggctcaagatttcaggcagc

SEQ ID NO: 266876 - DNA, 359 bp, Glycine max
tggaagaacggaaggccttatgaaaagagaggaaaagaaaataatagacttaaaaaagcacactgcatattcatcaaagcatcatcaaagcacactgcatcctaacagcacacgtacgtagaaaggtgaagttccaggtcttgcacaacatacacaacacaccataatttattttatatacaatcttatggtgcccaagatgcagatgcatggactaattaaacaacaacgttagtctgataggcagtgtccatagatatattgggtacccataaaatggccttgcttccaaggaaatggcaaacagggttagttccaggatcaactcccatgagttcatgaagcatgtgatgattcat

SEQ ID NO: 266877 - DNA, 485 bp, Glycine max
aacccgggtctcgacacacgcgtgcgcccacgcgtccgtgaaattcgaacaatgattttttcattttctttttaatacttttttgggttagactccctaagaatctgtcgatatttccaattaaatcttcttgttcctgtgaaggtcctataaaaaaaagggctatgccctttctttactcagaagggccttattccaagttccaccaaacaagtttttattcatttgaaacatctttttttccgaatacaagaaaaaattcatttcaatttcaattatttctataagataaaatcgatatagatagattttatcttatagaaataattgaaaaatacattcaattatgtcttcgcgtatcaaatattttcttttcatatcgatgcgtacgatatttttccagcaattaatgtatgtgagacagaaactttcacttacagttttttctttttaatattgtatttcattttttttaataattaata

SEQ ID NO: 266878 - DNA, 452 bp, Glycine max
gtttgttttgtgctttagataaaagttctgtctatatcaagaggggttttaagatcatagtgggtgttttgcaacaatggctaagttctttgctgctatgatcttggcactctttgccatttccatacttcaaacagtggtaatggctgctaatgaacaaggaggccacttgtatgacaacaagagcaaatatggaagtggaagtgtcaagagttaccaatgcccatcacaatgctcgaggagatgtagccagacccaataccacaagccctgcatgtttttctgtcagaagtgctgcatgaaatgcctgtgtgtgccctcggtgtattatggtaataaagctgtgtgcccttgctacaacaactggaagaccaatgaaggaggacccaagtgcccttgagcttcaacttgtttaactttaaatgtcgctttcctacatatttattgctttc

SEQ ID NO: 266879 - DNA, 451 bp, Glycine max
cgaggagaagcagaaggagcaaaagcaatgtcgccgaagaagccgagaaccacgacaggggaccctgatttggttagggggattggcaagtattcgaggtcgcagatgtaccacaagaggggcatctgggccatcaaggccaaaaacggtggcgttttgccccgccacgatcccaagcccaagcccgaggccccggcccagaagccgcccaagttctaccccgcggacgatgttaagaagcccctcgtcaacaagcacaagcccaaacccgcgaaactcagggctagcattactccagggactgtgttgatcctgcttgctgggaggttcaagggaaagagggttgttttcctgaagcagctcccatctggattgcttcttgtaactggtccctttaagatcaatggggttcctctcagaagggtgaaccaatcgtatgtcattggtacat

SEQ ID NO: 266880 - DNA, 412 bp, Glycine max
cccacgcgtccggtctaatcagaaatggcctcttcagtgatggcatctgtggccctcaacgttggcctttcactggtgaggagtcctcaattagaggccttccctccctctcaaggaactcctcttcattcagagttgtggccagtggtggcaagaagatcaagactgacaagccttatggaattaatggtggcatggctttgagggaaggagttgatgcatctggcaggaaaggaaagggaaagggcgtttaccagtttgtagacaaatacggtgctaatgtcgatggttacagtcctatctacgacaccaaggactggtcttcaaccggtgatgtctacgctggctgtacgactggccttggctatctgtgctgtgactctacttggtcttcttgcttgtggtgcacttt

SEQ ID NO: 266881 - DNA, 450 bp, Glycine max
gaaagttgtgagaggagttttcacgtcttttttaaatgggtgcttcgctatcggtctcgggaaaatccatccatgaattcatggtcaaggatgctaagggcagagacgtgaacctcagcatctacaaagggaaggttcttcttgtagtaaatgtcgcttcaaaatgtggatttacgaataccaattacacccagttaactgagctttacagcaaatacaaagacagaggccttgagatactggcatttccatgcaaccagtttctgaagcatgagcctgggagtagccaggacgtataggaatttgcctgcacaagatacaaggccgcgtatcccatttttggaaaggtacgtgtcaatggacctgatacagcacctgtctacaaattccttaaagcaaataaatcatgatttctgggttctaggataaagtggaatttcaacaagtttt

SEQ ID NO: 266882 - DNA, 167 bp, Glycine max
tttacgcgttcgatatgatccttccatctagcagcaccttaggatggcatagtcttaaaggtaatgtgctgggtcaaacgaagaatggcttatggtggatacctaggcacccagagtctatgaagggcgtagtaagttactattggctttgtgtagtttaaaataag

SEQ ID NO: 266883 - DNA, 432 bp, Glycine max
  unsure (1)..(432): unsure at all n locations
cccatcaaaacaatcattcctctgttaccaaaaccacactgtaaccggcctgtttttggtattggcttcaaatgagttcggctactaagaacgcggcaaacgcggttggggccaaaacggcaagagcatgtgacagctgcataaccaaacgtgcacgttggtactgtgctgccgatgatgcttttctctgccaggcctgcgactcttctgttcactcggcgaatcctttggctcgaagacacgaacgagtccgcttgaaaacggcgtcctacaagtccactgatgaacaacaacaacaacaacaacaacaaccttccacgtggcacactaagaaacctcgaacgccgaggcacgggaaacattctcgtaacaacaaccctntccatttggtccctgaagagggttcggaggaggcgaattcccatgatgaga

SEQ ID NO: 266884 - DNA, 171 bp, Glycine max
tcggcgcttcacgatgggtgcttacaagtatgtttcggagctatggcgcatgaagcagtctggtggtatgagattcttgcagcgggtgaggtgctgggagtaccgccagcaaccttctattgtccgtttgacatggtctacttgtttagacaagtgtcgccgcttgggttt

SEQ ID NO: 266885 - DNA, 232 bp, Glycine max
cccacgcgtccggtccttccggggcttggttgtcaaagccgccaccgttgttgcccccaaggacactgcgataaatcctctgggagatagagtgctaataaaaattaaggaagcagaggataaaactgagggtgggattttgcttacatcaactgctcatacgaagcctcaagggggtgaggtggttgctgttggggaaggaaagacagttggtaagaacaatgttgatatt

SEQ ID NO: 266886 - DNA, 430 bp, Glycine max
cccacgcgtccgggtgtgtgtaacaggtgctggaggattcgtagcgtcttggcttggtaagcttcttctttccaaaggctacattgtccatggaactgtgagagaccctgaacctgctactcagaaatatgaacacttgctcaaactccacggagcttctgaaaacctcactctcttcaaggcagatctcttgaactacgaatctcttcgctcagcaatttctggatgcactgcagttttccatcttgcttgccctgtaccctcaatcagtgttcccaaccctcaggcaattctttcttttgggctttcattgcttacaaaaacaataaaaaaggtatgtcatttaatcaattcttctgcaggttgaaatgattgagcctgctgtgaaaggaacaactaatgtacttgaagctagccttgaaactaaagt

SEQ ID NO: 266887 - DNA, 440 bp, Glycine max
cccacgcgtccgcattggcattgggtaacattgttgctcttcctctctcaaacttggaacgttctctaaagttatcttcttcttcatcctcttgttgtatcaccaaactcttccccatttcccgcatcaatgtctctcccacctcggtattagttcgagcctcttcctcatcctctttcgggtctcgcctcgaagacaccatcaagaagaccgtagctgagaacccagtcgtcgtttattccaaaacctggtgcacctattcttccgaggtcaaaatcctcttcaaaaaactcggcgtcgaccctctcgtcttcgaattagacgaaatgggtcctcaagggccacagttgcagaaggtattggaaaggatcacagggcatcacactgtgccaaatgtatttattggtggcaaacacattggcggctgtacagatacactg

SEQ ID NO: 266888 - DNA, 404 bp, Glycine max
  unsure (1)..(404): unsure at all n locations
tagaaacagtgtgatgaaaatgaaggtccttgttttcttcgttgctacaattttggtagcatggcaatgccatgcgtacgatatgttccctctccgaatgaacactggctatggtgcccgtactccggaggtgaaatgcgcaagttggaggcttgctgtggaagcacacaacatctttggctttgagaccattcctgaagagtgcgttgaagcaacaaaggaatacatccatggcgaacaatatagatcagactccaaaacagttaaccaacaagcttacttttatgccagagacctcgaagtccattccaaggacacatttgtgttcagtatagatggcaccgtactctctaatattccatactacaaanaacatggatatggggtggagaaatttaactcga

SEQ ID NO: 266889 - DNA, 347 bp, Glycine max
cttcacattttagaagaataccccctcttttgctgcatcagaggagttgtaaattaagagcatggctgcacaagctcttgtatcatcatcttctcttaccttctcagcggaggctgcaagacaaagtcttggaccaagatcactccaatctccatttggcttctccagaaaagccttctttcttgttaaggcagctgctaccccctctgtcaagcaaggatcagacaggcctttgtggtttgcatcaaagcaaagtctgtcttacttgtatggcagcttttctgttgactatggatttgaccctttgggacttttagaccctgaaggaacaggatggttcattgagc

SEQ ID NO: 266890 - DNA, 193 bp, Glycine max
tgagatgaggtggagtggtgtcggaatcgactagtggtggaggaatgaacagttttttgtcttttgttgtttctcgtcacatctttttgctgttttccaaggcttgctcaaagtgcttgcttgaattgacaccaactttacttttaatcttttagtcttttatgaagacgtagtctttgtttttcttttcatg

SEQ ID NO: 266891 - DNA, 235 bp, Glycine max
tccacgcgtccgcccacgcgtccgcagagttgcagaagtgtgtgcgagtgtgagatgattgagaagattgacgaaggaacttatggtgttgtctacaaggctagggataagaagactggagaactagtggcattgaataaggtaaagactaacatagagagggatggctatccgatgtcatccttgatggaaataaacattctcttgtcttttaatcattcctgcaatgtgaatg

SEQ ID NO: 266892 - DNA, 417 bp, Glycine max
cttcttcttcttcttcttcactctacaaccactaaactaagtggttggttttggttgagtgtcatttttttgaagctcttaaacttaaggcttaagccatggcatcctcatcctctctgcatctatctcaggcccttctggcacgtgctgtgtaccttcatggctcttcttcttctgaccgtgtctcactctccttcccatcattctctggcctcaagtcacattctacatgcaaagcagcagcagccacgtcctcgcgtagaaggggtgcttgtccatccaccaacgttgttcgagccgctgcggttgagacactcgaccaaaccaccgaggtttctctggtggagaaatccgtcaacaccattcggttttttgccaatgattcctttgagaaaggccaactttgtcaccctggtc

SEQ ID NO: 266893 - DNA, 445 bp, Glycine max
aaaccctagcccctcttctcttcattcttcactcaggaaacaagcataatggccttgtgtaataaggttggaaatgtcttgaggcagggtgctgctcgcagcacacaagcacctgtttcatccatgcttaattacattcgctgcatgtcttcaagcaagctttttattggaggcctttcatatggagttgacgatcagtctcttaaggatgcattttctggctttggagatgtggttgatgcaaaagttataactgacagagactctggaagatcaaggggatttggatttgtcaacttctccaatgatgagtctgcaagttcggcactctctgcaatggatgggaaggatctagatgggcgaagcattagggtatcctatgcaaatgatagaccttctggacctcaatctggcggcggcggccgtggtggttatcgcagttggg

SEQ ID NO: 266894 - DNA, 217 bp, Glycine max
cccacgcgtccgcccacgcgtccggttgagaactaagaaggagaagcaaatggcttcctcaatgatgtctgtcccagctgttaccactgtcaaccgtgccggtgccggcatggttgctgcattcactggcctcaagtccatggttggctgtgtcactagaaagaccaacaatgacattacgttcattgctagcaacggtggaagagtgcaatgcatg

SEQ ID NO: 266895 - DNA, 438 bp, Glycine max
cccatttcctctcagaaccctcgatcactctcacgcgctcctatatcctctccttcgccggcgctctctccaacgatcacaacaacatcgtcatcccatggcaaacgccgcatctggtatggcagtccatgatgactgcaagttaaggtttttggagctgaagacaaagaggacacaccgtttcatagtttttaagattgaggagcagcagaagcaggtcattgtggagaagcttggtgagccagcccaaggctatgaagatttcactgccagccttcctgctgatgagtgccgttatgctgtttatgattttgagtatctgactgaagggaatgtccctaaaagcagaatttttttcattgcatggtcccctgacacatcaagggtgaggagcaagatgatctatgcaagctccaaagacagattcaagagggagct

SEQ ID NO: 266896 - DNA, 231 bp, Glycine max
aagacgaaaggaacaagtacaaccctcgaaagtgaattaggaagaaaacacattgaaggaagaccatgacacagaataagattccagataaattcaataatacacaatttttttttttttattttcatttccccccctctagtagtcagtggtgggaagctgtagagatgaaagcagaagttattgtaggccataaggcctgtctagttatggaagaagtcatagaaatga

SEQ ID NO: 266897 - DNA, 274 bp, Glycine max
cccacgcgtccgaatttctctctgccttgctcatttacacacctgtccaacctttcacttgcagctgtatttgaatccctctctctcctttccaaatggccagcgttgaggttgcacatcaaacaccaacaacagttccagaaaatgaaacaaccgaggtaatcaagacccatgaaacaacctcggaaccagtaccagccactgaggctcctgcaacagaacaagcagcagctgaggttcctgctcaagaagaacaacaagcaacttaggttcc

SEQ ID NO: 266898 - DNA, 418 bp, Glycine max
ggcgagtgaggaatgcagagaaatgagaattcgtcattggctgagtccttctgaggcgagggggccctgccaaacgcagaagctccggcagaaattgccaccgcaaacacgtcgaagacgggtagtaatagcactcgctttcattctcccacattcccaattctgagcgttaagatgagtgagaaagagaaaggcaataatagtgagggacagtcgacgttgctgcacggcaagtacgagcttggtcgtgtgctggggcacggaacgttcgccaaggtgtaccacgcgcggaacctgaatacagggcagcacgtggccatgaaggtggtgggaaaagaaaaggtgataaaggtcggaatgatggagcaggtgaagagggagatctcggtgatgaagatggtgaaacaccataacatcg

SEQ ID NO: 266899 - DNA, 433 bp, Glycine max
cccacgcgtccgcttttcagtgtccttaaaatcttctctgcttcagaccagagcttgttcagaggaatcatcctcaggagatgccaatgaggtgttcacagatttgaaggaaaagtgggatgctcttgaaaacaagtccacagtacttctttatggtggaggggctatagttgctatttggctatcgtcaattcttgtgagcgccatcaactcagttcccttgcttccaaagattatggagttggtagggcttggatacactggatggtttgtctaccgataccttctgtttaagtctagcaggaaggagctagctacagacattgaatcactgaagaagaaaattactggaactgaatagagtggtgttagcaggtatcaagtcaagtttatcttctgagcaccaatttgttttgttgtgctggtatcccct

SEQ ID NO: 266900 - DNA, 384 bp, Glycine max
aaaaaatttctagagcgagaaagtgtgaggagagagaaagtagctgatcctccatggcctggaccaaggaacgcgaaaactttgtctacaccgccaagctcgccgaacaagccgaacgctatgaagaaatggtggaagcaatgaagaatgtggcgaagctgaacgtggaattgacggtcgaggagcggaaccttctgtcggtagggtacaagaacgtggtgggtgctcgtagggcttcgtggaggattctatcgtcgattgaacagaaagaagaagctaaagggaacgatgtgagtgtgaagaggataaaggagtataggcagaaggtggagtctgagttgtccaatatctgcagtgatatcatgactgttattgatgaacacc

SEQ ID NO: 266901 - DNA, 217 bp, Glycine max
caaagagctaacatgagattcaagaccggcatggctaatgaagaggaacagaaaaaccacgtcttcggcatcaaagatctcggtcacaagactctccttcagagtgatgcactctatcagtatatacttgaaaccagtgtctatgcaagagagcacgagtgcttgaaagagatacgcatgatgactgcaaaacacccactgaacatcatggcaacac

SEQ ID NO: 266902 - DNA, 308 bp, Glycine max
cttgtctgttatcactgtgttgcgagcagtgatcgattctgcgaactgcgattcgcattgccaatttaaacagcgtgcgttcgtacgtcggagatggagtcgctaccgacgacgaatcgaggaggagcgagatcgaagcccgatcagacctcgaaatcgtccctcgtcatggccttcttctcctgcgtcgcgtggctctacgtcgctggaaggttatggcaagactcatagaatcggaatttgctcgctaggtcttctgaaaaagaattcatctcatatgtctaatgttcttacagtggaagataagt

SEQ ID NO: 266903 - DNA, 458 bp, Glycine max
gcggcaactaaaccttaatgcaagaattaggtttcatcaccgatgtgcatggatcttgcaacagcttcaagatcaacaagctcgctcgctttgctgtagaggaacaaaacaaaagagagaattcagttcttgagtttgcgaggtattttactgcattcctacattatatctttacattaaaattctttctcaacctaataatattctgtatcacttacttcaatgtaatttttagtagagccttgttttttgcattttttatatcatcttttattcttcatgatttatctatttttataatgctttttatatcttaattgaatgaacttttttatttatctatatctattgtatttattttattgtatttttttttgtttaatcatttacttttttctatttatttgatcttattttatttctactttttttatttaatttttttttttctttttttt

SEQ ID NO: 266904 - DNA, 164 bp, Glycine max
tcgacgcttcagaagacatggcctcattgggtgggttacaaaatgtgagcggcatcaagtttgtgatcaaataggtgtcaatagtcaatgcaaagttcgagctgaagccgtttccatatccactgaatggtttggagcctgtgatgatctagcagtcacttgag

SEQ ID NO: 266905 - DNA, 274 bp, Glycine max
aaaatcctcaattttctgagcagccgaacactctctctctgtctctcgaaaattctcagtgggcagagaaaatctgaatcatgtcgtggcaagcgtatgtcgacgatcaccttctgtgtgacatcgaaggtaaccacctcactcacgctgctatcatcggccatgacggcagcgtttgggctcagagtaccgacttccctcagatcaaacctgaggaggtaactgccatcatgaatgactttaatgagcctggatcacttgctccaacaggatt

SEQ ID NO: 266906 - DNA, 447 bp, Glycine max
cccacgcgtccgcccacgcgtccgcccacgcgtccgagagagtgagaaaagaaggaagaagaggaagaagagatggcagatgaactacccgtcaaagcttttggttgggctgcttcagacacttctggcacccttgccccttttcatttctccagaagggaaaatggcgtcgatgacgtcactctcaagattctcttctgcggggtttgccactctgatctccacactctcaaaaacgactggggtttcaccacctaccctgtcgttcctgggcatgaaattgttggtgttgtgacagaagttggaaacaatgtgaaaaacttcaaagtgggtgataaagttggagttggtgtgatagtggagtcttgcaaggaatgtgaaaattgccaacaggatctggagaattactgtccccggcctgtgtttacctataactctccttattat

SEQ ID NO: 266907 - DNA, 288 bp, Glycine max
gccacttctgaatctattgaatcaacaatcatgtcggacgaagagcaccatttcgagtccaaggccgacgccggagcctccaaaacctaccctcagcaagccggtaccatccgcaagaacggctacatcgtcatcaaaggccgcccctgcaaggttgtggaagtttcgactttcaaaactggaaagcacggtcacgctaagtgtcactttgttggaattgatattttcactgtcaagaaacttgaggatattgtgccctcttcttacaactgcgatgtgcctcatgtg

SEQ ID NO: 266908 - DNA, 404 bp, Glycine max
cgttttcttcagaaaatttgccatcgttgagggaagcgcgagagccttcgttgttcaagatgagagctaagtggaagaagaagcgcatgaggaggttgaagaggaagcgccgaaagatgagacaaagatctaagtaggtgcttgaacaaggagtggagatgatgtgcttttccatctgctaccagcttcatgacattttatgctgtcatggctcttatgatgatcttgaggtctagtggcgaggggagcttccatcttgactttagtttagctttactggtctaaagattgctgctttagtgtgggttaagttatgatattgagagttttgtgttatctaattatgtactggtacgttttgtatactttttggtttatcttaatagcttaaatattagtatttt

SEQ ID NO: 266909 - DNA, 441 bp, Glycine max
  unsure (1)..(441): unsure at all n locations
acccacgcgtccgaatttctcaaatatcaagttatgacgagtttgcactttgcagagatggaaaagaaagagagaaagatcatggtggctgtggatgagagccaagagagcatgcatgcactctcctggtgcatcaccaatcttatttccgaaaccaacaagcttgttctgctttatgtcaggccaccttctgctttctactccttggatgccgcagggtataacttttcctccgatgttgttgatgctatggaaaagtacagtatgcacttggctaattcagtcatggaaagagctgaagctgtttgcagagacttgaacgctactaatatcaatatggagagagtggttggtgtaggacatgccaagaatgtaatatgcagtgctgtcaagaaactagaggctgacacctnggtcatgggaactcatggctatggattc

SEQ ID NO: 266910 - DNA, 211 bp, Glycine max
cccacgcgtccgtccacgcgtccgcccacgcgtccggggagggcgcattagttttaggggagaagtgcaaaattaccaaaacacagtgtctcaagtggtaaatttactgggaaatgaggactcagctgcaaattacttgagcaagtgcatatactcaattgggttgggtagcaatgattacctcaacaactacttcatgcctcaattctat

SEQ ID NO: 266911 - DNA, 212 bp, Glycine max
cccacgcgtccgcccacgcgtccgttctttctctgcgattttttcttcaatttccagatcggcgaaactaaagaagatggagaaagcgatcagcagacagaagattttgcttcatcatctgaacccttcatcgtctacccacgtcaacgaatgatcctctgtctatgcttcagcatgtgtggcgggggacagcgctgcttatcaaaggacat

SEQ ID NO: 266912 - DNA, 322 bp, Glycine max
ctcactcgttcattccaacctacccttattcttcttcttcaattccacacccatcatggaccgtttgccgatcctctttctcctcgccaccctcatcaccctcgccttcggtgcccgccacgatattctccggttacccttcgaagcatccactttgttcaaatcacccggtggcgatcaaaacgattagggcacgaggtgggccgttttaattgccggttccaatggctactggaattacaggcaccagtctgatgtttgccatgcgtatcaactactgaggaaaggtggtctcatagtttaaaatatttgtgtatttatg

SEQ ID NO: 266913 - DNA, 450 bp, Glycine max
  unsure (1)..(450): unsure at all n locations
tagccacaatgcagatattcgtgaaaaccctaacggggaagacgataaccctagaggtagagtcatcggacacaatcgacaatgtgaaggcgaagatccaggacaaggagggcatcccgccggaccagcagcgcctgatcttcgccggtaagcagctggaggacggccgcaccctcgccgactacaacatccagaaggagtccacgcttcacctcgtcctccgcctccgcggcggcgccaagaagcgcaagaagaagacctacaccaagcccaagaagatcaagcacaagcacaagaaagtcaagctcgccctcctccagttctacaaggtcgacgactccggcaaggtccagaggctccgcagggaatgccccaacgccgagtgcggcgccgggactttcatggccaaccacttcgatcgccactattgcngcatgtgtggtttgacct

SEQ ID NO: 266914 - DNA, 385 bp, Glycine max
cagccacagtttctgaggagaagaatatagtcgttcgagatggcccgtacgaagcagactggtcgtaagtccacaggaggaaaggctcctaggaagcagcttgcaaccaaggctgcacgtaagtctgcaccaactactggtggtgtgaagaagccacatcgttaccgtcctggtaccgttgctcttcgtgagattaggaaataccagaagagtaccgagcttttgatcaggaagctccccttccagaggctggttcgtgaaattgctcatgacttcaagactgatctgcgttttcagagccactccgtgcttgcattgcaagaagctgctgaagcataccttgttgggctctttgaggacactaacctgtgtgccattcacgctt

SEQ ID NO: 266915 - DNA, 370 bp, Glycine max
gtgcctctcttccatctccccagccaaaacctctctcaggaaggccacattacgcccttccggcttcgcaacccttaacactcggtcttctccttcctcttcatcttccttcccctctctcattcaagacaggcctgtttttgctgcccctgcccccatcatcaccccaactgtgagagaggatatggcaaaggaatacgagaaagctattgaagaacttcagaaattgttgagggagaagagtgaactcaaagcgacagctgctgaaaaagtggagcagataacagcttctctagggacatcatcatctgatggcatcccatcatcagaagcctcagacaggatcaaagctggtttcattcacttcaag

SEQ ID NO: 266916 - DNA, 388 bp, Glycine max
ctggaaccgggattgccccatttcgctcatttttatggaaaatgttctttgagaagcacgaggattacaagttcaatggtttggcatggctcttcttgggtgtccctacaagcagctcattgctttacaaggaggagtttgagaagatgcaagagaaaagtcctgaaaacttcaggcttgacttcgctgtgagtcgagagcaaacaaacgagaaaggggagaagatgtacatccaaacccgaatggctcaatacgcagaagagctttgggaattactgaagaaggataacacttttgtgtacatgtgtggactaaaaggaatggaaaagggaattgatgacattatggtgtcattggctgccaaagatggcattgattggactgagta

SEQ ID NO: 266917 - DNA, 451 bp, Glycine max
caattctgaatttgcgggttttggatttggacttggtcgtcaacacagtctaatgtaatatcgttttgctccttcgcttatgaagcttcttcttcttcttcttcttgttcctgcaacgcactgaattcgatcaatcaatccatcttcaattgctttgtttcgatcggaggaaaatggccgatcagttatcgaagggagaggaattcgagaaaaaggctgagaagaagctcagcggttggggcttgtttggctccaagtatgaagatgccgccgatctcttcgataaagccgccaattgcttcaagctcgccaaatcatgggacaaggctggagcgacatacctgaagttggcaagttgtcatttgaagttggaaagcaagcatgaagctgcacaggcccatgtcgatgctgcacattgctacaaaaagacttatattaacgagtctgtatc

SEQ ID NO: 266918 - DNA, 447 bp, Glycine max
cccacgcgtccggtttttttctcccatcatataaaaccgaccctctcctttccctcttcacgagaccaatggctcccccaaaggccgagaagaagcccgcggagaaaaagcccgcagagaaggctccggcggagaagaagcccaaggccgagaagaagatatcgaaggaaggaggaagcgagaagaagaagaagagaacaaagaagagcgtggagacctacaagatttacatcttcaaggtgctgaagcaggttcaccccgacatcggaatctcaagcaaggccatggggatcatgaacagtttcataaacgacatcttcgagaagctcgcccaggagtcgtcgcgattggctaggtataacaagaagcctaccattacttccagggagatccaaacggcggtgcgtttggtcctccctggggagttggccaaacacgctgtctctg

SEQ ID NO: 266919 - DNA, 419 bp, Glycine max
ggcaaaaggacacgtgtgaacaaaacagcaaaacagtgaaacctgagaatctgaactgagaggaagccatggcagtgagaataaacagctccattcaaaacaccctctgtctcctcaaccctcctctgttttccctccgttacagagcttcttccctgaagttgaaaccccaattgcattttcgtcaaaacccctctcgaggagctttattctgcacatgcgccaccaccgatatcactccccaaagtaccgaacactttgtcctcactacccctctctactacgtcaatgctcctccccacatgggtagcgcttacaccaccatcgctgccgatgccattgctcgcttccagcggctattggggaagagtgttatatttattactggcacggatgaacatggggagaaaattgcaact

SEQ ID NO: 266920 - DNA, 435 bp, Glycine max
cccacgcgtccgcccacgcgtccggccaaattatgcagaattttcttcattgcttggtccccggatacatgtagggttaggagcaagatgatttatgccagctccaaagatagattcaagagggagcttgatggaattcagattgagctgcaagcaactgatcctactgagatgggtcttgatgtgttcaaaagccgtgccaattaaatgattccgattattcataaataggagttgtgatggggatggtcaacttggctaatttggactcaattttccaagttttgacatgaggtctattgcagcttcaacaaagcttctcttgttccagtgtatcttgtggtttgtggcatataacccgtgtttgggtgtaatcttagtcctattcctagtagttaattttgtaactgttctttgtgtgattgaacgaaaatt

SEQ ID NO: 266921 - DNA, 375 bp, Glycine max
cacggagaagctgatgaaccagatcatggatttgaagttcacgtcgaaatcgctgcagcggggatcgcgtaagtgcgagaaggaggagaaatcggagaagctgaaggtgaagaaggcgatcgagaaaggcaacatggacggagcgcggatctacgcggagaacgcgatccgtaagcgcacggagcagatgaactacctccggcttgcctcgcgcctggacgccgtcgtggcccgcctcgacacgcaagcgaagatgacgacgatcagcaagtcgatgggcaacatcgtcaaatcgctggagtcgtcgctggccactgggaacctccagaagatgtcggagaccatggactcgttcgagaagcagttcgtgaacat

SEQ ID NO: 266922 - DNA, 412 bp, Glycine max
ctcttccaccgcacactctctgctcctagggtttctccttcgagtgagggaaatggctcccgaaccgcctagtacgggtctgtttgttggactgaacaagggtcacgtcgtcaccaagaaggaattgcccccacgcccctcagatcgtaaggggaaaacaagcaagagggtgcactttgtgaggaacctcataagagaggttgctggttttgcaccctatgaaaagcgtataactgagttgctgaaggttgggaaggataagagggcactgaaggttgcaaagagaaagcttggaacccacaaacgtgcaaagaagaagcgtgaggaaatgtccagtgttctcaggaagatgagggctggtggtgctggagacaagaagaaataagtcttatttactcctttccagattcac

SEQ ID NO: 266923 - DNA, 434 bp, Glycine max
ctcaaacaccgaagccaaaaggaacaacacctaggccagtggaacctcagttgaatgtgaagagcaaaaacatgctgagggaatatggagggcagtggctgagctgcgccacacgccatgtgaggatctatgctgcgtatatcgacccggtgacttgtgagtttgatcaaacccagatggataagctcacccttattcttgatcccactgatgagtttgtgtggaatactgagacttgcaacatggtttattcttacttccaggagcttgttgatcactacgagggcgctccattgacagaatacacacttcgcctgattggttcagacatagagcactatataagaaagatgttatacgatggggcaatcaagtataacatgaatgcaagggttctgaatttcagcatgggcaagccacggatcatgttcaac

SEQ ID NO: 266924 - DNA, 361 bp, Glycine max
cccacgcgtccgcccacgtttccgcaacccttttgcgtgcttagcagagagagacgcacccggtgggctaagacccgcgaggtgttataggcaaattaagaacaaaccataccccaagtcacggttttgccgtggtgttcctgatcccaagatcaggatttacgatgttggtatgaagaagaagggtgttgatgaatttcctttctgtgtccatctggttagttgggagaaggaaaacgcttctagtgaggccctggaagctgctcgtattgcttgcaacaagtacatggccaaatttgctggaaaggatgctttccacttgagagtcagggtgcacccatttcatgttcttaggatcaac

SEQ ID NO: 266925 - DNA, 434 bp, Glycine max
cttcggaaacaagtgtacgtgggacccttccttcgcaagcaagagagagaaagtgctgctggcgaggcaaaattcaacaatgggtttgtgaagaatctatcagaatcaaccaccgatgatgagttgaagaacacttttggtgaatttggaactattactagtgctgtagtaatgagggatggggatgggaaatcaaagtgttttggatttgtgaattttgagaatgctgatgatgctgctagggctgttgaggctctcaatggcaaaaattttgatgacaaagaatggtatgttggaaaagctcagaagaaatctgaaagggagaatgaattgaaacaacgatttgagcagagcatgaaagaagctgctgataaatatcaaggcgcaaacttgtatgtaaaaaatttagatgatagcattggtgatgaaaaact

SEQ ID NO: 266926 - DNA, 411 bp, Glycine max
gcatgctacactcgcgggcctttcttgcctagtgtttcttccaagcactctccaccttccatttctccagcttttggcttgaggagtctgaaatcaagctctttatttggagaatcgctaagagtggcctccaaatcaacaataaaggtttcaaagacaaagaatacttcactcgtgaccagatgtgaaattggtgacagtctcgaagaattcctcacaaaagcaacaccagataaggggttgatcaggttgttggtgtccatgggagaagcattgagaacaatttccttcaaagtgaagacggcttcatgtggtggaacacaatgtgttaatacttttggggatgagcagcttgcaatggatttgctagctaatcagcttctttttgaagccttaaattactctcatttc

SEQ ID NO: 266927 - DNA, 383 bp, Glycine max
cacacgcgttcacacctctgctcacgctgcttgtgttgcagctcagcttctagcacatctagggctaaaggtaaaggagaagggtcacgtaaaggttcacatcattgtccatgtcaacgtccatgtatactctaccacatgcaatatcactgaccagctgatatacatgctcgaacgcattgacaagcgtgttattgagaggtctgataaggtagccgctaagactaacaagaatgccttcaagcatgcctgactgctggacaaacttaaagctggactcgccataggtatcaccattgataatgctgtaacgacgtatgattcttccacatattattgcgcacctatacatacgccttgacataaggatatcattactaata

SEQ ID NO: 266928 - DNA, 441 bp, Glycine max
gtcttcaacaactgagactaaatctcttgtaacttaaattttggaatccatgtttgcaaacgatgttgcgagtccaatacgactttgtttccttcaccatagatgaacttgatctttgaaagattggcaaatggagtgaaagaaacaggaacttcaaattggtttcctttgaaaccaaaatattcaagtgatgtaaggcttgcaaggttagaatcaaaatttccaatgaagtgattttcagaaatttccaacttccggagagatgtcatgttaacaaaagatgagggaagtggtccctcaaattggtttccggatagatctaactccttcaacttctttagcttaaaccaatccgtgggaagaaaggtgccatttatatcacattgttgaagagacaaaacttttaaagatgtcaattccccgatatttttaaaaactcat

SEQ ID NO: 266929 - DNA, 426 bp, Glycine max
cctgttcatacttgtttcttcaatttcatttcttttattacttttcctctttgcattccaagtggccactgttgaggttgcacaacaaacaccaacaactgtgacagaaaatgaagcaaccgaggtaaccaagattgaggaaactaccccagaacaaccagctacccaggttactaccaccgaagaaccaaaggaagaaaccaccaaagaagcaaaagaggaagaagaagccccagttgagactaatgaggcaacagaagtgacagaggaagtgaagcctgaggtagaagagaacccagcacctgagagaacagaagaagaagaagtgaaagaggaaactaaagaaaccgaatcagcaccagtggaggaacagaagcaagaggagaacaaaccagctgaaacccgtgaagaaaccaaaacagaaca

SEQ ID NO: 266930 - DNA, 428 bp, Glycine max
  unsure (1)..(428): unsure at all n locations
gataattttctttgtagttgatagccatggttacccgtggaaagcttgaggttgacattgagctcaagtccaacgcagacaagtactggcaaacccttaggaattctactgaaatattccctaaggccttcccacatgattacaaaagcattgaggttcttgagggtgatggcaagtctcctggttctatccgccacataagttatggtgaaggttcaccacttgtgaaatcatcctttgagaagattgaggctgttgatgaggaaaagaaggtagtgtcgtacactatcattgatggggaactcctncagcactacaaaacattcaagggagacatttcagtgactccaattggcgatggatgcgaagtaaagtggaatgctgcgtacgaaaaggttagccatgatatttctgatccaacccttgtc

SEQ ID NO: 266931 - DNA, 401 bp, Glycine max
cttcagagcgcaggcaaacaacttcttctcatacatggcatctcaaggtttgtgtccttcgagaaaaaatattcttcttttggactctgaagggaagcgtgtggcagtcaagtattactcagatgactggccaacaaacaatgcaaagttagcttttgagaagtttgtatttactaagactgttaagacaaatgctcgtacggaagctgaggtaacactacttgagaacaatatcattatttacaaatttgtacaagacctgcatttctttgtcactggtggtgaagatgaaaatgagctcattctagcatcagttcttcaaggtttctttgatgcagtcacccttctgttgaggagtaatgttgacaaaagagaggcacttgagaacttagatctcattc

SEQ ID NO: 266932 - DNA, 388 bp, Glycine max
cccacgcgtccgcccacgcgtccgcccacgcgtccgcatgtatatggcatgccatatcaatgttcaatatatcaccttcttccaacacggcctcatcactggctagtggcacacacagttgcaagagaaagagagcgagattccgatggcgactctggattccgacgtgcctatggttcccgccggcgagccctcgagcagcgccggtccttcttccaagaagcccaagcgcttcgagatcaagaagtggaacgccgtcgctctctgggcttgggacatcgttgtcgataactgtgctatctgccggaaccacatcatggatctctgcatcgagtgccaagccaaccaggctagcgccactagcgaggaatgcactgtggcatgggga

SEQ ID NO: 266933 - DNA, 343 bp, Glycine max
acacaagcaacaactcaatctcacacttagtgttgttactatggaatcacccgttcaaaccagggattctgcaagggaaggttgctctactcactggtggaacctgcggaatcggattcgaaacttccacccaattcagtaaacatggagcctctgttgcgctcatgggtcgccgcaaacaagtccttcagtgcgctgtcttcgctctacaatccctcgtcattcccgctgctgagcttgagggggatgtacggaaacaagaagatgccgcaagggtggtggaatccacgttcaagcattgtggaacgattgatatactcgtccatgctgcagctgggaactt

SEQ ID NO: 266934 - DNA, 366 bp, Glycine max
cggacgcgtgggctggaatggttgaatccaattcagttggaacattttcaccggtgcaaaagcaagagagtcagaggggactttttgttgatagaggtgttggatcttctagacctgtaaaatcttctagttcaaatattttctctactgatctcaatttggatagcgataccaagaattcaatgccagctgctgctggagctgttgctgctgcagctgttgctgatcagatgctggatccccaggaagatagacatttggcaatgatcctggtgtgtctgtcaacccgttgtaaaacgatcgctgtacttgaacttactagatatcttaactggttaggtcatgataacgaacacttctatgatg

SEQ ID NO: 266935 - DNA, 433 bp, Glycine max
gttgccattctcatcctcctctgtctctctctcttcaccattgccatggatccgtacaagcgccggccatccagcgccttcaagtctcccttctggactacaaattctggtgctcctgtttggaacaacaactcctctttaaccgttggagctagaggtccaattctgcttgaggattatcatcttgtggagaagcttgcaaactttgacagggaacgtatcccagaacgtgttgtccatgccaggggagctagtgcaaagggtttctttgaggtcacacatgacatttctcacctgacatgtgcagatttccttcgagcccctggagttcagacgcctgtaattgttcggttctcaactgtcattcatgagcgtggtagccctgaaaccttgaaggaccctcgaggttttgccgtgaagtttacaccagaga

SEQ ID NO: 266936 - DNA, 397 bp, Glycine max
aacatatctcatttatagtttactattgaatgatgggtttgaaaatggcaatggtgatcctaggcctgctggccatgttccttttggtctcctcagaggtggcatccgcgaattcaaaagaggtgacaaatggagttgaagatgccaaatatcctggtggaggctatggtgggggttacccaggcaatggcggtggtggctatcctggccgtggtggtggctaccctggtcgtggtggtggctatccaggtcgcggtggtggttaccctggtcgtggtggcggctatccaggccgtggaggagggtattgtcgctatggctgttgcggtggccggacatacaatggaggttgtagaaggtgctgctactacgccggtgaagcttgtgctgcacaaac

SEQ ID NO: 266937 - DNA, 390 bp, Glycine max
cccacgcgtccgcatctgcttctcactgatctccattcccattccatggcttccactgaatgatcccctggcaagaaaattcagattcaaagggatgacactacatttgacgcatatgtggttggaaaagaggatgctcctggaattgttgtgattcaggagtggtggggtgtggattacgaaattaagaaccatgccgtgaagatttctcagcttggtagtgggtttaaagctcttattccagatttatacagaggaaaggttggtctggatgttgctgaagctcagcatttgatggatggtcttgattggcaaggtgctgcgaaagatattgctgcttcggttaactggcttaaagcaaatggctcaaagaaggctggtgtaactgga

SEQ ID NO: 266938 - DNA, 458 bp, Glycine max
agaaacatgactattgctttccaattagctgtttttgcattaattgctatttcatttatttgattgattagtgtacctgttgtatttgcttctcctgaaggttggtcgaataacaaaaatgttgtattttccggtacatcattatggattggattagtgtttctcgtgggtattcttaattctctcatttcttgaagctctatttattctagatcaaaaacgaaatgacccctcccccagaattctttcggattgtcgggcacattaaaaaaggaatggataagttcctaaaaataaagaaaactataacacattataaggaggggtcaaatattaattaagataaaagatatagaatatctatctgtatatatatatatatagatataatttattaataattagaactttcttttttcttaaaaaaaaaaaaagttaattaaaagatttgattgaat

SEQ ID NO: 266939 - DNA, 393 bp, Glycine max
gcatgtttagtttcaaacaacagcacccaaattctgtttcatgcgtcctcctggggctatcgttgcacctggtgagagtatcatagcaacagtgttcaagtttgtagagcaaccagaaaataatgaaaagcctgaaaaaactggactcaaatttaaaatcatgagcttgaaggtgaaaggattaattgattacgtccctgaactgtttgatgagcagaaggaccaagtagcagtggagcagattttgcgagttgtttttctagatccagagcgtccctgtcctgctttggaaaaactgaaccgacagctggctgatgctgatgctgcccttgaggcacgcaagaaacctgcagaagatgcaagtcctaaaattatcggggaaagacttgtcat

SEQ ID NO: 266940 - DNA, 171 bp, Glycine max
tgatcgagataactttaaacagtgtgatgaaaatgaaggtccttggtttcttcgttgctacaattttggtagcatggcaatgccatccgtccaaaatgttccttttccgaatgaacactggctatggtgcccgtactccgaaggtaaattccccaagttgaaggcttgctg

SEQ ID NO: 266941 - DNA, 381 bp, Glycine max
cccacgcgtccgagcatggccatgccatgtttcaggctaccaaaggacatctgggataatggaaactggctatggagagcgttcttcgtaggtaaaatgcgcaagttttaggctagctgcggaagcacacaacattcgagcctttaaaaccattcctgaagagtgcgttgaaccaacaaaggactactttaatggcgaacaatttatatcagactctaaaacagttaaccaacaagctttcttttatgctagtgaacgcaaagtccatcacaacgacatatttatattcggcatacataacaccgtactctctaatatcccatactatgaaaaacatggatatggggtggaggaatttaatgaaaccttatatgatgaatg

SEQ ID NO: 266942 - DNA, 442 bp, Glycine max
cccacgcgtccgcccacgcttccgagggagtgttacatcttaaactaccaatgctacaagcgccccaacgacagaatgctcggcaccgagttctgtggcaagcttatcagacgcaccgaaaacctgggccccagcgagtaccgcttcctcctcaaagccatcgtcagctccggcatcggcgaacaaacgtacgccccaagaaacatcttcgagggccgcgaggccactcccacgttgcgcgacagcatcggagaaatggaggagttctttcacgacagcattggaaaactcctcgcgaaatctaacgtcttcccctccgagatcgacgtcctcgtcgtcaacatctccatgctcgccaccgtcccttccctctcctctcgaatcatcaaccactacaaaatgcgccacgatgtcaaggtctacaaccttcaccggcatgggc

SEQ ID NO: 266943 - DNA, 459 bp, Glycine max
tctcagttctcactcaaaattcaaaatcctatttaaggtgtttatgaaggcatcacgcattggtttgttcggtatggtggtgctgctttttgtggctgaagttcaagtgtcaaaggcagtgacctgcagcccagtgcagctgagtgcatgtgtgagtgcaataacctcttcaacccctccatcaaacctatgctgctccaagatcaaggaacagaaaccatgcctttgccaatatctcaagaaccccaatctcaagaagtttgttgactctcctaatgcaaggagagttgctaacacttgtggaactcccttcccaaggtgctaaggtgttactaaatttgaagtggttttaatttctctgcctgattatgcatcttgatatctatccatgtgttctggccagagaccaaatagtgaaagaacatatatatatatggggtatcatatatatatatatat

SEQ ID NO: 266944 - DNA, 414 bp, Glycine max
gatttgatccaattgaaattttaaaaatgactgggataaacttaagaattcaattattgaagttgaataagtaaacaatttaattggattggtcgaatggtatcaaaaaaatggagtactaactcccatttcttatttattattgaattaaccgatcaacttgctttgttatcgaacatttctttttgatttcaaaaattttccggaaaaaatttgaatctatttttatatgcgaatcaatcctactacttctggtcctgaggtttctgcgcttgaaaaaaaaaatctgggacgtatcgcccaaataattggtccggtactagatgtagcttttcccccaggtaagatgcctaatatttacaacgctctgatagttaagggtcgagatactgttggtcaacaaattaatgtgac

SEQ ID NO: 266945 - DNA, 334 bp, Glycine max
gggcgtgtgaaaaactgccatgatgtgttagtttcgaaagcaattgcagcaacgatcccaatgcttttggaagctttggcgccacaatgggtagctctctttttgcatccatgtcttaactcggggtgatttctttatctttttcccaaggatgtgtagggcgttatgcaataaaagctgaactagtttatctacgtaactttaaaatgtgattcagtggatattcgtttgttaaaaaaaaaaaaaaaaaaaaataaaaaaaaaaaatataaaaaaataacaaaaaaaacaaaaaaattaaaaagaaagaatatattgctaaaaattaaatttt

SEQ ID NO: 266946 - DNA, 333 bp, Glycine max
  unsure (1)..(333): unsure at all n locations
accacgcgtccgcccacgcgttcgatgacattgtgctactttgtctagggctagcagcactgtaacctcgactcacctctacgaaatccggaccctctttcaaaccttttatttttccaccaaatctgcgatggcaacaacatcggaggtgccggcgaaccggcgtcgcgcggcgaaccccgcggaggagatggacttcgagacgacggatggcgtgaaggccatcgcaagcttcgaggagattgggatcaaggacgatctgctccgcggaatctaccagtacggcttcgagaagccctncgncattcagcagcgggccgtcacgcccatcat

SEQ ID NO: 266947 - DNA, 417 bp, Glycine max
aacaaatcaaagccatggccacctccaacttctctattgttctctccgtctccctagccttgtttttggtgctacttaccaaggcacactcgaccgataccgtttctttcaccttcaacaagttcaacccagtccaaccaaacattatgctccaaaaagatgctagtatttcatcctctggggtgttacaactcaccaaagttggcagcaacggcgtgcccacctcgggatctctcggtcgtgccctttacgctgccccaatccagatttgggacagcgaaaccggcaaggtagccagctgggctacatcctttaaattcaacattttcgcacccaacaaatcaaactcagctgacgggcttgccttcttcttggcacccgtcgggtctcagccccaatccgacgatggatttcttg

SEQ ID NO: 266948 - DNA, 437 bp, Glycine max
  unsure (1)..(437): unsure at all n locations
gtcaggaagaacactggacaaacaggccgtatcagaagcaaacttaaagaaggctggctacgacacatgggaaaaattaattctcaaggatccacaagatccttccactccaaatgcagtttcatacaaaacagcagcgagagagaaactgataaggcagggatacaacattgttgggatcattggagaccaatggagcgatctcctcggaggccacagaggcgaaagcaggacctttaagcttcctaatcccctgtactacattcagtagttccttcacctctcaacaatctagcttgctcctatctatctatatgtaataagatgcgttcaaataggggcactagcttcactttatgttgtttcagctgtgtgtcaacaagtcatgtaagagacttcactatngttgtttctctttcgtggctttaataaattat

SEQ ID NO: 266949 - DNA, 436 bp, Glycine max
cccacgcgtccgcccacgcgtccggctcccgcgaccggaggagtgaagaagccccaccgctgcaggccgggaaccgtggcgctgagggaaatcagaaagtatcagaagagcaccgagcttctcatcaggaagcttccgtttcagagactcgtgagggaaatcgcgcaggacttcaagaccgatttgcgttttcagagtagcgccgtttctgcgcttcaggaagctgctgaggcctacctcgttgggttgttcgaggacactaacctttgcgcgattcatgcaaagagggttaccattatgcctaaggatattcagcttgctcgcaggatcagaggcgagagggcttaggttggttagggttctgattttgaaggaggcgagacggcttagaaaaagaatcatctatctatgtgtttatgtgggcatgtgaaacgtg

SEQ ID NO: 266950 - DNA, 384 bp, Glycine max
tcactttctctctgtatttctctttctcattttctactctttccttttcatcgcatcttagttttatttgcacatcttgtagttcccatggatactgctctcatggaagagcacaatattcttaatgatcatgatcataataacaagtctgacgcacatttgacttctgccgctgcttttgtacacggtcgaattcaagaccctcgttatgacgcttgcactatatgccttgaaactttctatgatattcatcctttcacactgactaacttcaatcatgactttcatcttcaacgcattctcgaatgacgtcaaagaaccttccaatgtcccatttattgacagcctatccatctcaaatattccactttccaacaattactt

SEQ ID NO: 266951 - DNA, 454 bp, Glycine max
gtgacgggaagggagtgatgttcttcttaagagaggtgagtgcagagcaaaaggtggggcggctggattcaaagttgcaattgtgggggctgctggaggaattggtcaatccctttctttgctgatgaagatgaacccattggtttcagttcttcatctttatgatgttgtcaacacccctggtgtcacagctgatgttagccacatggacactggtgctgtggtaatttccttttcatagggttattgattgtcaattaaattgtaacataagactgagttgtagttgttgtgttaatgctgaggctagttacaatagtttttattggagtatatgatcaattagtttgttaagaattatttacacatggttaggttaacaaaataaataggagcattgtaattcacttttcctatcttttaatcaatatgacatctcttgagacttattctc

SEQ ID NO: 266952 - DNA, 410 bp, Glycine max
gatcgagataactagaaacagtgtgatgaatttgaaggtccttgttttcttcgttgctacaggtttggtagcatggcaatgccatgcgtacgatatgttccctctccgaatgaacactggctatggtgcccgtactccggaggtgaaatgcgcaagttggaggcttgctgtggaagcacacaacatctttggctttgagaccattcctgaagagtgcgttgaagcaacaaaggaatacatccatggcgaacaatatacatcagactccaaaacagttaaccaacaagcttacttttatgccagagacctcgaagtccatcccaaggacacatttgtgttcagtataaatggcaccgtactctctaatattccatactacaaaaaacatggatattgggtggagaaattta

SEQ ID NO: 266953 - DNA, 382 bp, Glycine max
  unsure (1)..(382): unsure at all n locations
tcgaccacgcgtccgaccacgcgtccggtccttgatctcttcggtgttacaattttggtagcatggcaatgccatgcgtactatgtgttccctctccgaatgaacactgactatggtgcccgtactccggaggtgaaatgcgcaacttggaggcttgctgtggaagcacacaacatctttggctatgagaccattcctgaagagtgcgttgaagcaacaaaggaatacatccatggcgaacaatatacatcagactgcataacagttaaccaacaagcttacttttatgccagagacctctaagtccatcccatggacacattcgtgttcagtatagatggcaccgtactctctaatattccatactacaganaacatggat

SEQ ID NO: 266954 - DNA, 376 bp, Glycine max
aagctagtttatcgtgaggagtatatgaagttgctcgatttctttgttgctgcggagctggggtagcatggccatgccatggctcaagctaccaaaggttccctcttcgaatgaaaactgtctatggtgagcgttcttcggaggtaaaatgcgcaagttttaggcttgctgtggaagcacacaacatacgagcctttaaaaccattcctgaagagtgcgttgaaccaactaatgactacattaatggcgaacaatttacatcagactctaaaacagttaaccaacaagctttcttttatgctagtgaacgcgaagtccatcacaactaacatagttatattcggcatagatgacaccgtactctctaatatccata

SEQ ID NO: 266955 - DNA, 389 bp, Glycine max
cccacgcgtccgcccacgcgtcctggaggagaagcagaaagaggagacgaagcggtggcgccgaagaagccccgaaccacgtcgaggaaccctgatttggtcaggggaattggcaaatattcgaggtcgcagatgtaccacaagaggggcatctgggccatcaaggccaaaaacggcggtgttttgcccctccacgatcccaagcccaaacccgaggccccggcccagaagccgcccaagttctacccggccgatgacgtgaagaagcccctcgtcaacaagcacaagcccaagcccgcgaaactcagggctagcattactccagggactgttctgatcctgcttgctgggaagttcaagggaaagagggttggtttcttgaagcagct

SEQ ID NO: 266956 - DNA, 385 bp, Glycine max
gctctaccggtcttgacgacccaggccgacccacgcgtccgaccacgcgtgcgcacgaatgggtcacattatcaacatggcacaaggcatacaggcccttaagggcaactacaatgtgcataaaccccaacctcctaaatcttcaagtaatcttgattttgcatctaaaaaactgaaaaattcatcaaactctatgttggttctgaaaaaagattcaatttttatgcaaaactcttgctcctttacgatttcacgatcagcggctacagactgtatgcttgacggtgcaagcagacgtccacgatccgcccgcaaatcctcaggccattccagaaccgtacgcattcccggcgacaagtccatctctcaccggcactttatgttc

SEQ ID NO: 266957 - DNA, 428 bp, Glycine max
aagaagtgcctgtgaggatgcagatgatggttaagagcatgggattgagaattgcatgccaggccaccaggatttccgctgatagagtccctgacatgggcaaaagacagctcatgaatcttcttcttcttggtgccatttcactccccactgctggaatgcttattccctacacctacttctttgtccctccaggttcaggttcttcagctggcggtactgttgccaaggatgccgttggaaatgatgtaattgccgagaattggctcaaggcacatggacctggtgaccgaacccttacacaaggattgaagggagatcctacctatcttgttgtggagaaagacagaacccttgcaacatttgcaattaatgccgtgtgcactcatcttggatgtgtcctgccatggaatcaagcggagaacaag

SEQ ID NO: 266958 - DNA, 433 bp, Glycine max
cctaaacctatctttcttctctctctgtgtgttcgcttcatcggcaaccagaagcagccatggccactggaaggactgtgaaggatgtttcacctcatgagttcgttaaggcgtactcctctcacctcaagcgatccggcaagatggagctgccagagtggactgatattgtgaaaactgcaagatttaaggagttggctccttatgatcctgactggtactatgtcagagctgcttccatggcaagaaagatctacttgagaggaggacttggtgttggtgcctttcagaggatttatggtgggagcaagaggaatggtagtcgccctcctcatttttgcaagagcagtggtgccattgctcgtcacattcttcaacagttgcagaacatgaacatcatttaactggacaccaagggtggcaagaaaatcac

SEQ ID NO: 266959 - DNA, 380 bp, Glycine max
gaccacgcgtccggggagatcctacctatctttttgtggagatttacagaacttttgcaacatttgcaattaatgccgcgttcgctcatcttggaggtgtcgtgccatggaatcaagcggagaacaagttcatctgcccttgccatggatctcagtacaatgaccaaggaagagtcgtgagaggacctgctccattgtctctggcattagcacattgtgatatagatgatgggaaggtcgtgttcgttccttgggttgaaacagatttcataacacgtgatgctccatggtgggcttatactccttaaaacctctgctgtcataatatatatttaaacatgaaattcaaacattctgctttgtattaatgcataaatata

SEQ ID NO: 266960 - DNA, 323 bp, Glycine max
gcgtcacgactagggataactgaaccgacttcgaataatacctcagccatggtgcacgtagtcttatagaggaactatggtaagacattgcagaatccgcgtcgttcgtactagaaggatcgtatcgacgcggagttgaagctggttggtgagtacgggcttcggtgcaagagagagctgtggagggtgcaggacgcgctctatcgaagtacgaaacatcgcgcggaacctattcaacctcgacgagaagaactcgcgccggatctttgagggagaggggctgctccgaacgatgttccgttacgggaatactcgatgagaca

SEQ ID NO: 266961 - DNA, 244 bp, Glycine max
aattccaaagggcacaggcctaccacaaacaaaccaccactaaaaaatcccccaaattataaccctactactcacaaacctccatcataaaacccatcaactaaaaaacctccaaaacataacccaccacattcacaaaccaccaacaaaaaaacccccatcttataaacccacattttagaaaccaccaaaatacaaacccccattttaaaaaccaccacaatacaagcccccatcagaaaaa

SEQ ID NO: 266962 - DNA, 325 bp, Glycine max
gcaggacacaacagggaaaacggcaccggcttcgtagaataaaacagccatggtgcacgagcctttaggggaactatgggaagacattgaagaagccgcgtacgtcgtacgagaaggatgcgtttggacgcagagttgaagctggttgatgagaactgtcttcggtgcaagagagagctgtggagggtgcactacgcgctcagtcgtatacgaaacaacgcgcggaacctactgactgtatactagaagaaccagggccggatcttcgagggagaggcgctgctcctaaggatgttccgatacggtcgtactcgatgagacacag

SEQ ID NO: 266963 - DNA, 322 bp, Glycine max
acagcgcacacttggcagaactgaagcgacttagaattatacctcagccgtcgttcacgtagtcctatagaggaactatggtacgacattgcagaatccgtgtagttcatactagaaggatctaatcaatacgaatttgtatctgaaaggtgagtacgggcttcggtgcaagagagagctgtggagggtgcaggacgcgctcagtcgaatacccaacatcgcgcggaacctattcaacctcgacgagaataactcgcgccagatcttctaaggagactcgctgctccgaaagatcgttccgtacgggaaaacccatgagaca

SEQ ID NO: 266964 - DNA, 313 bp, Glycine max
gagaatcttgagaggttctatagagtcagaactcattcactgtagatgggccatgcttgcttgtccaggtattttggttccagaggcattgggcttatgcaactgggtaaaggctcatgaatgggcagcagttcctggggtccaagcaacctacctaggctatccagttccatggggcaccctacccaccattctggccattgaataccttgctatttcctttgtggagcaccaaatgagcatggagaaggacccagagaagtagaaatacccttatggtgctcttgatcctttgggatactcttaggaccct

SEQ ID NO: 266965 - DNA, 404 bp, Glycine max
cccacgcgtccggagtgcgttgaagcaacatttgaatacatccatggcgaacaatatagatgagactccagaaacagttaaccaacaagcttacttttatgccagagacctcgaagtccatcccaaggacacatttgtgttcagtatagatggcaccgtactctctaatattccatactacaaaaaacatggatatggggtggagaaatttaactcgaccttgtatgatgaatgggttaacaagggcaatgcaccggcactgcccgagactcttaagaattacaacaagctggtgtctcttggcttcaagattatattcttgtcaggaagaacactggacaaacaggccgtaacagaagcaaacttaaagaaggctggctaccacacatgggaaaaattaattc

SEQ ID NO: 266966 - DNA, 460 bp, Glycine max
tttaaatggtctttctggtggatgcatttagtagggaaattttccttttttgtttgtaatggctgtagatgagagaactctacaactggcatgatgttgccaaaaggactgaaattgtatatgatcgtgctttcaagtgctccaatcaaaatctacttgaacgtctctcacgatacctcttttgtggagcatgggcgggcaagctgtttttcttggttatgattgttggattcttgttatggcagctattggaattatggcagcctgcagatgatatagaggaggtaccagatttcactcttccatgcagctgtgatgaagagatgttggagaaaaactcagtgaaatgagtaatgtgataaattattttggtgaaccatggagttaatgttttgcagaatatcaaaagaatacaagtgctggtaacactaatccaagttcccagatcttgaaatggaga

SEQ ID NO: 266967 - DNA, 445 bp, Glycine max
cccacgcgtccgggagtacattgtttagatgcaaacaaatatattggggatctcctggcagaatttaaagctgcaaaggatcggagtaaaggagaaatcttgcactgtaaactgatattcaagaaaaagttatttcgtgagtcagatgaagctgtgacagagcctatgtttgtgcaattatcttatgtacagatgcaacatgattatattttgggaaattaccctgttggaagggatgatgctgctcagctttctgccttacaaatcttagctgagattggatttcttagcacaccagaatcatgcattgactggaattcacttctggagcgtttcctgcccagacaaatttcaatgacacgagcaaaacgggaatgggagtatgacattctttctcgttatcgctcattggagaatctgacaaaagatgatgcgcgacaacaat

SEQ ID NO: 266968 - DNA, 453 bp, Glycine max
catattctttgttgcaatatcacaaacacctcgtccgtcacaatgcagctagctgtggcgggcaacgctgtcgtttcaccgtcgccgttccgacctcatccccttctccggtcatccttctccggcgtctccgttaagctcactccccaatccataacgttttcacgcttgaagcccctcaccgtcttcgccgccaccaagaaggccgtcgctgtcctcaaggggacctccgccgtcgaaggcgtcgccactctcatccaagaagacgatggcccgacgacagtttctgttagcatcactggccttactccggggcttcatggttttcacctacatgagtatggtgataccacaaatgggtgtatatcaacaggagcacattttaatcctaataacttgacacatggtgctcctgaggatgaagtccgtcatgcgggcgacctgggaaacata

SEQ ID NO: 266969 - DNA, 255 bp, Glycine max
agcccgcatgcttctaagtgtgaaaaatttgcaaagcatttgtagccgccaccccactttgggtgtttgtacttaaactacattcccatttgtttttgctttttgagatttcatcatcctgtatttatggtttctgttttcggacttcaatggaaattaatggatgagaactaatgaataagctattgtgttgtgttgctttgtttcaaaaaaaaaaaagcaaaaaaaagatgaagataaaactattacaaatac

SEQ ID NO: 266970 - DNA, 449 bp, Glycine max
gagataactagaaacagtgtgatgaaaatgaaggtccttgttttcttcgttgctacaattttggtagcatggcaatgccatgcgtacgatatgttccctctccgaatgaacactggctatggtgcccgtactccggaggtgaaatgcgcaagttggaggcttgctgtggaagcacacaacatctttggctttgagaccattcctgaagagtgcgttgaagcaacaaaggaatacatccatggcgaacaatatagatcagactccaaaacagttaaccaacaagcttacttttatgccagagacctcgaagtccatcccaaggacacatttgtgttcagtatagatggcaccgtactctctaatattccatactacaaaaaacatggatatggggtggagaaatttaactcgaccttgtatgatgaatgggttaacaagggcaatgcacc

SEQ ID NO: 266971 - DNA, 281 bp, Glycine max
cccacgcgtatcgaccacgtttctcgaaaaaattataaaaaaaaaaaaaaaaaaaagaaaaaaagtgaaaataaaaaaaaaaaaaaaaaaaaaaaaaaaaaaaaaaaaaaaaaaaataaaaaaaaaaaaaaaaaaaaaaaaaaaaaaaaaaataaaaaaaaaaaaaaaaataaaaaaaaaaaaagggattccatttaaaggaaaaaaattttataattcttaaaaaggtatttattacctttaataaattacaccaaaaattaaaaaaaatgacgtttttt

SEQ ID NO: 266972 - DNA, 316 bp, Glycine max
agctgctgttcttgcgcgtgaacaagcctcttgtaagccaaaaccatggttaagcataacgagtgttatcccaaacggacacttgcgtaagcactggcagaactatgtgaagacttggttcaatcagccagcacggaagacaaggagacgattggctcgtcagaagaaagctgtgaagatataccccagacctactgctgtacctctcaggcccattgtacatggtcaaactttgaaatacaacatgaaagtgagaggtgtacggttaatttatcttgattaactcatggttgtatgtcttaatagtcaatttgta

SEQ ID NO: 266973 - DNA, 423 bp, Glycine max
cttgttctcattttgcccccttttttcttctgctctcccgaatcagaaacccgaatcattggttgggatttcagaggaaagaaatttaaacagagcacgaagatgaagggtctcttcaagtccaagcctcgcactcctgcagatgtagtgcgccagaccagagatcttctgctctttgttgatcgcagccccgaaacccgcgaaagcaaacgtgaagagaagatgtccgagctatttaaaaatatcagggagctaaagtcaatcctgtatggaaatagtgaatctgaaccagtgtctgaagcctgtgcgcagttgactcaggagttctttaaggaggatacgttgcgactgcttatcaagtgtcttccaaaattgaatttggaggccagaaaagatgccactcaaggttgtgcaaatttacaa

SEQ ID NO: 266974 - DNA, 446 bp, Glycine max
ctgctacttactactatagtgtctgattcacaggccagagggcaaagattttgagcacaatggcctcgacacagtgctttttgcaccaccacgccctcaccactccagctagagcttcaacacagcgcctagttgtgagcaccaaaccaaaccacattgtttgcaaggcagcacagaagcaggttactgtccaagagggtgaggacactactactggccttgtctctcgcaggttggccctcactgtgctcattggtgctgctgctgttggctctaaggtggcacctgctgatgcagcctatggagaagctggtattttacccttttgccccttctttagatgaccaactgatgattgtcatgcatgactcatattcattcagaacctcaatcgtgcagataattgaggtcaaatatggctaatatggcttgcaaactttgtttgg

SEQ ID NO: 266975 - DNA, 389 bp, Glycine max
ggaacaagggcgcataatttattaaagccacgaaagagaaaacggcgatagtgaagtctcttacatgacttgttgacacacagctgaaacaacataaagtgaagctagtgcccctatttgaacgcatcttattacatatagatagataggagcaagctagattgttgagaggtgaaggaactactgaatgtagtacaggggattaggaagcttaaaggtcctgctttcgcctctgtggcctccgaggagatcgctccattggtctccaatgatcccaacaatgttgtatccctgccttatcagtttctctctcgctgctgttttgtatgaaactgcatttggagtggaaagatcttgtggatccttgagaattaatttttcccatgtgt

SEQ ID NO: 266976 - DNA, 408 bp, Glycine max
cccacgcgtccggtgtaaagaaggtgtatattggggaactttagctggtgtttatcttggaatggaatatggggtagagaggatccgtggcaccagagattggaagaatgccatgattgggggtgcagtaactgcgactctgttatctgttgccaccaccaacaacaaagacaaaattgtacctgatgccattactggggcagcaattgctactgctgcagagttcataaattaccttacctgaatgaatgaaagtggatgtcttgctggttttcttgcatgttttggaaagggattgcaactcagcctcttttgtcatatactttgtaacggttccatcttgatattggtgcagttacttctaagatatgctatttatttaactttctataaaacctatgttttgat

SEQ ID NO: 266977 - DNA, 451 bp, Glycine max
cccacgcgtccgcccacgcgtccgagctaaccgccaggcataccgtaccctccttgtgacagttccaggacttggtcagtacatctctggtgccattctctttgaggaaactctctaccaatccacaactgatggcaggaagattgtcgacgtgctcctcgagcaaaacattgttcccggtattaaagtcgacaagggtttggtaccccttgctggttccaacgacgagtcatggtgccaaggtcttgatggtcttgcctctcgctcggctgcatactaccagcaaggtgcccgtttcgccaaatggcgtactgttgtgagcatccccaacggtccctctgctctggcagttaaagaagctgcctggggtctggctcgctatgcagcaattgctcaggacaatggattggtcccaattgtggaaccagagatcttgcttgatggggagcat

SEQ ID NO: 266978 - DNA, 444 bp, Glycine max
cggcgagcttgatttctccaaccatgaagtgttttcgagtcccaacatgggtgagcttcccagcagcggttcaatggacagtttcttcgacgagcttctcaaggacacgcacgcctgcacccacacccacacctgtaaccctcccggccccgatttctcccacactcacacgtgctaccatgtccacaccaaaatcgtacccgaccctgaggaggaccatgtcgccaccgatgacaccgccgagtccgccgagaagaagtcgtcgtcgtcgaagaagcggtctctggggaacaaagaggccgtccggaagtaccgcgagaagaagaaggcgcgtgcagcgtcgctggaggacgaggttgtgaagttgagggctctgaaccagcactagatgaagaagctgaaggcgcaggcggctctcgaggccgaaatcgcgaggctcaagtg

SEQ ID NO: 266979 - DNA, 398 bp, Glycine max
cgatggtgcagaggctcacttatcgcaagcgccatagctatgctaccaaatccgaccagcaccgggttgttaagacccctggtgggaagttggtgtaccagaccactaagaagagagcaagtggacctaagtgccctgtcactggcaagaggatccaagggattccacacttaagacctgctgaatacaagaggtctagattgcctaggaaccggaggaccgtaaaccgagcctatggaggtgttttatccgggggagctgttagagaaaggattattcgcgctttccttgttgaagagcaaaaaattgtgaaaaaggtattgaagatccagaaggcaaaagaaaagcaggcatcaaagaattaagcttgtgagttattcgtgagtgaaaaaaagatc

SEQ ID NO: 266980 - DNA, 448 bp, Glycine max
aacacgcgtacggtcgtcatcaacaactcgtagcagagatacaacatgcatatcaaaacagcgtctgtatgtcccaatcgagacagacatgggtaggaaggaagattttgagctgcatgctgagaaagcagagactgcgacactcgactcaatcaaactaagacttgcttatcctatatggatagtacaagcaggccaccgttggacctgtcaacaccagccgtacgggaatgttcaacatgagggacagagctaaatgggatgcatggaaggctgttgaagggaaatccaaggacgaagcaatgagtgattacatcactaaggtgaaacagctgctggaagcagccggcatgcctgcttgataacattgtcatgccttgctttcttattctgtgctagaagttcccaacagtttggaaataaacaattgcagtgtttgaagctttta

SEQ ID NO: 266981 - DNA, 429 bp, Glycine max
cccacgcgtacgacaaaagtggcagtattatgtggcatcaccgaagtgcagggagctgccaacagcgtcgagatcaacaatctcgctcgctttgctgtagaggaacaaaacaaaagagagaattcagttctggagtttgtgagggtgattagtgcacagcagcaagtggtttctggagtgaattactacataacattggaagcaaaagatggtgagattaaaaatgagtataaagcgaaggtttgggagagggaatcccaagagttgctagaattcatgccaacattaagtgcaggaggcgagatcgaccatctcgctcgctttgctgtagaggaacaaaacataagagatgaatgcaaatctggagtttgtgggggtgattagggcaaagcagcatgtggtggaagggttcatatactacatcacttt

SEQ ID NO: 266982 - DNA, 384 bp, Glycine max
cccacgcgtccggatcggtgttcacttgatctcatcataatcgtcagcgtcaggggaagaagatgccgatcagagacatcgccgtcggaaggcctgaagaggcgactcaccccgacacgttgaaggcggctttggctgagttcatctcaaccttcatcttcgtgttcgccggctcaggctccggcatcgcctacaacaagctcaccgacaacggcgctgccacccctgccggcctcatctccgcctccatcgcccatgcattcgccctcttcgtcgccgtctccgtcggcgccaacatctccggcggccacgtcaaccccgccgtcaccttcggcgccttcgtcggcggcaacatcaccttcctgcgcggcatcgtctacgtca

SEQ ID NO: 266983 - DNA, 454 bp, Glycine max
cccacgcgtccgaacacaacaaacaaatgagctgccctgcgatggctcagttgctctcaagcgactctttattacaaacgcttctttccttattatgctttcaatgttttgggtggccttgacaatgaaggaaagggatgtgtcttcacatatgatgctgttggttcctatgagagggttggatatagctctcagggttctggatccacacttattatgccatttcttgataaccagctgaagtctcctagcccactcctgttacctgcgcaggatgctgttactccattgtctgaagcagaagcagttgatctggtcaaaactgtttttgcatctgcaactgagagagatatatacactggagataaagttgaaatcgtcgtcctaaatgccagtggtattcgtcgtgaatacatggacctaaggaaagattaatgctttacagaaatttact

SEQ ID NO: 266984 - DNA, 460 bp, Glycine max
cccacgcgtccgaagatccaaattctcgagtctcaaatcagtgaaaagttggaagaagtgaagaagaaggacaaaattatagcagaaaaagaaaattccattgaagataaatcaattaccatacaatccttgcagaatgagattgcttctctccagaaaaaagggtcactggatgctgaggagcaggttggaaaggctcatgcacgtgctggtgaactacagaagcaggtggacaaacttaaaagggaactagaaacacaaaacaaggagaaagtgaactgggaaactcgagtacctgagttagagaataagattcatgacttgaactcaaaattagaagatcttcaaaagataaatgaggaacagaagacaaaaattcaaaaaagtgaacgcgctcttaaagttgctgaggaagaaatgttaaaggcaaaagttgaggctactgccatagaaaaagagc

SEQ ID NO: 266985 - DNA, 429 bp, Glycine max
tcttggtagagatttgaagtttaaaccttcaaattaatcataccattttaatttgcctttagattctgagtcactgctgctatggcgctacgcgtacttcttgtgttggggatgttgctgatgttgtgccttgttaaggtttcatctgatccaaagatagaagaagaaatactggaagcagatgaagaactgcagttttccgataacgagccacttatcgtgagagacgcgtacagaaggctaatgcaagatatggattgtggtgggttgtgcaagacgaggtgcagtgcacattctaggcccaacttgtgcactagggcgcgtggcacgtgctgtgtgaggtgcaagtgtgtcccacctggtacatctggaaatagggaactatgtggaacctgctacactgatatgaccacccatggcagcaagacc

SEQ ID NO: 266986 - DNA, 432 bp, Glycine max
gaaaaagcctgtgtttgcttatcgattgctggctcatggaactatggaggagaagatatataagcgccaggtaacaaaggagggacttgctgctagggtggttgatagacagcaggtgcataggaccatttctaaagaagaaatgctgcatctgtttgagcttggtgatgatgacaaccctgagactttggctgatctaagtcaagaaaatgagcatcaagacaaccctattttggttgggcattcactgaaacacacagcaccacattcaaatggcagtagttattctgataagttaatggaaagcttacttagcaagcatcatccgcggtggattgccaattttcatgaacatgaatccctgctacaagaaaacgaataggaaaagctatcaaaagaggagcaagatatggcttgtgaggtttaccagaa

SEQ ID NO: 266987 - DNA, 404 bp, Glycine max
actataacaatcaataacgacaaggacattagcaaatatataaaaatccaaaaactccatcctcctccacaagaggcaaagtccaaaatagagctaatgctcctaacaaggtaaatccactggttccagaaaccgatttattcagacctctcattttttgcacgagcaagacactaaatcgcaactagacaagcacataatgtgtagacaagcaactttgcagtacaccaccttaaaaagacttcttggcaacgaatacaagcaggtcaatgacacgtgagctgtatccccactcgttgtcgtaccaagaaacaagcttcacaaagttcttattcaatgcaattccagcctttgcatcaaaaatacttgatctgctatcgcccacaaagtccgtggagaccaca

SEQ ID NO: 266988 - DNA, 357 bp, Glycine max
tcgcccacgcgttcgcccacgcgttcgcttccttaagctccttagtgctgctccttgcagctctggttctatcccctcaagttcttgcaaactatgagaatcccccagtgtacaagcctcccactgagaaaccaccagtttataagcccccacttgagaagcctcctgtttacaaacctccagttgaaaaccccccaatttataagcctccagtagagaagccaccagtgtacaagcccccagttgagaaacccccagtttataagcccccagttgagaaaccaccagtgtacaagcccccagttgaaaaaccaccagtgtacaagcccccagttgaaaaacccccagtgtacaagc

SEQ ID NO: 266989 - DNA, 420 bp, Glycine max
cttgattccgatgcgaatggtaattgcagaaaccccaaccctcctttcctctccctcctcgtagatcgagtcagaatcatggccaaagctgaaggtggcaaggaaccaataaatgaacaagcagtagcaaatatgtatgctgcaatgaggtctgagctcaaccaaatttactccaaaataactgaactggagatggaagttagtgagcacacattggttaccaatgccattcaaccacttgaccaatctagacgatgctatcgtatgattggaggggtgcttgtggagagaaccatcaaagaggtcttgcctgctgtgcagcgaaataaagaaggactcgaagaggttgtggcaaggcttaacgaggcgttggaaaagaagaaaaaggaaatttctgagtttgaagctaattataaaatc

SEQ ID NO: 266990 - DNA, 210 bp, Glycine max
cccacgcgtccgatttctttcacacaaaaaaatctatttacatttaacgaaaaaaaaaaaaagaaaaaaggaaaaaaaaaaaaagaaaaaaaaaaaaaaaaaaaaaaaaaaaaaaaaaaaaaaaaaaaaaataaaaaaaaaaacaaaaaaaaataaaaaagaatgataaaaatttaaatataaaagaacataacttaaaaacagaaaata

SEQ ID NO: 266991 - DNA, 451 bp, Glycine max
agcttgcagaagcgatttctcatttctcattcttaacaacacacttcaacaatggccaaaagcttcaaatacatcatcctcggaggaggagtttccgctggttatgcggcgagggagtttgccaaacagggcgttaagccaggggagttggctatcatttccaaagaagcggtagcaccttatgaacgtcctgctctgagcaaggcttacctttttccagagtcccctgctagacttcctgggttccatgtctgtgttggaagtggaggggaaaggttgcttcctgagtggtacgcagagaaagggatagagttaatacttagcacagaaatagtaaaggtggaccttgcggcaaaatctctgatcagtgcgggaggagaaacattcaattatcagattttgattgttgcaactggctcaacagttataaggctgacagattttggtgtat

SEQ ID NO: 266992 - DNA, 449 bp, Glycine max
ttctaacaagcaatggctatgagatcgtgggtgagtcgaggaggatccatgactcgtttgatggactcaacaaatcgaggggctttgagtcggttcttgagcgacaagggtcgcattctcagcgaggaggaacaggccaaagagaatgtctacatccagaaatgggagagggagaggttggagaaacagaagcaactgtctgagaaggccaaggctctcacggacaaagatgcttctgctgctgctcataagaaacctgaaggtgctcaaaaggactgagtttatctttcacacaacccgtcaaggtcactttgtgggaaataagcatggagaataaaacacattgaccctgagtgaactttggtctttgtatagattgtgtttcttgtttatttgtagtttcgtgacggatgaaaccatgccattgcatccaccaaacttggtacgtt

SEQ ID NO: 266993 - DNA, 419 bp, Glycine max
agaagttattgagtgcttgtacttaaattgaattctgcataaggctttaaagagttgattgaaaaaaaaaaaaaaaaaaaaaaaaaaaaaaaaaaaaaaaaaaaaaaaaaaaaaaaaaaaaaaaaaaaaaaaaaaaaaaaaaaaaaaaaaaaaaaaaaaaaaaaaaaaaaaaaaaaaaaaaaaaaaaaaaaaaaaaaaaaaaaaaaaaggggggccctttaaaaaggacaaaatttaacatacccttctttcaaattaaaaacttttttaaaaggggcccaaaattaaaataaagtggactgtttttaaaaacttaggaattgaaaaaacctttagttacccaaataaaaagccttggaaaaaaatccccttttaccaaattgggaaaatcctaaaaagccctaaacgattggcctttc

SEQ ID NO: 266994 - DNA, 418 bp, Glycine max
cccacgcgtccgcccacgcgtccgaaaagagttctttcaaaatgcaaacagccttaaccttggctgcccccaacgttgtgccattggcacccacaaagagtgtctcccatattaccatctttcccaccaaattgaaagccccgcgctcctcacctcgttactctccgattagggttgcaaccgtggagcccgacacttcaactgtcgactacaactctgcgttctcagtgtttcctgcagaagcatgcgaaactgtaggaggggaagcctgcatggcggagatgtaccctgaaacgaagctacagccagaggctaagactccacgagtcgttacagagaacgttgagagagagtatcttgaatacgatgatcctaaaacggtatttcgaggagaggcttgtgatgatcttggaggaac

SEQ ID NO: 266995 - DNA, 421 bp, Glycine max
cccacgcgtccgcggacgcttgggcggacgcttgggcgatataactagaaacagtctgatgggaattaaggtacttgctttcgtcgttgctacaattttgttagcatgtcaatgccatgcgtacgatatgttcactgtccgaatgaacactggctatggcgcccctactccgtgaagtgaaatgtcgcacgttggaagcttgctgtggaagcacacaacatcttctgctttgagactaatcctgaaaagtgcgatgcatcatcaaatgaatacatccatggcaaacaatatacatcatactttcaaacagttaaccaacaagcttacttttatgccatagacctcgaaattcattctaaggacacatttgtgtttagtatatattgcaccgtactctctaatatcacatactacgaaaaac

SEQ ID NO: 266996 - DNA, 452 bp, Glycine max
cccacgcgtccgcccacgcgtccgcccacgcgtccgcccacgcgtccggccttgttgctgcgatggccagccacgcggctcttgcttctacaaggatcccttcaaacacaaggttcccatccaaggcctctcactctttcccaacccaatgcgccttaaagagacttgaggtgacagaattctctgggcttagatccacttcatgtgtcacatatgctaacagtgctagagaatcttccttttttgatcttgtagcttcccaactcactcccaagaccaatggatcaactcctgtgaggggagagacagtggccaagttgaaggtggcaatcaatggtttcggacgcattggtagaaacttccttcgctgctggcacggccgaaaagactcaccccttgaagtcgttgttgtcaacgacagtggtggtgtcaagaatgcttcgcacctgctg

SEQ ID NO: 266997 - DNA, 443 bp, Glycine max
gcaccttccaagagattgctggaagcaaggacactgttggacagtatgagagtcacactggcttcacccttccaggactctaccgtgttgttcacggtattgatccctttgatccaaagttcaacatcgtctctcccggtgccgacatgagcatatacttcccatacactgaaactgagcgtaggttaacagagttccaccccgacattgaagagcttctttacagctcagtggagaatgaagaacacatatgtgtattgaaggaccgcaacaagccgatcatcttcaccatggcaagacttgaccgtgtgaagaacatcacgggacttgtggagtggtatggcaagaatgcgcgcctccgcgagttggtaaacctcgtggtggtggccggagacaggaggaaggagtccaaggacttggaagagaaggccgagatgaagaag

SEQ ID NO: 266998 - DNA, 427 bp, Glycine max
ggaactccaaaaagaccctgaactccaagcttggtggaaagaacttgtagaggtgggtcatggtgatttgaaagataagccatggtggcaaaagatgcaaactcgtgaagagttggttgaagcttccgctatcctcatatggattgcttcagcccttcatgctgctgttaactttggacagtatccatatggaggtttaatcctaaacaggccaactattagcaggagattcatgcctgaaaaggggtctcctgaatatgatgcgttggctaagaaccctgagaaggagtttttgaagactattactggcaagaaggagaccctcattgaccttacagttatagaaatcttgtcaaggcacgcatctgatgagttctaccttgggcagagagatggtggtgactactggacttttgatgccggtcca

SEQ ID NO: 266999 - DNA, 446 bp, Glycine max
cccacgcgtccgaattgcttctgctgaacgttatgacattgctgtatgtgctgcggattggcgtcttacggcgtttaaatcagttgatgatagtacaagattctggatcaagggttgaaggttttcagttcaaggtcttttagggaaagaaatgtgttccagtgcttttgttgatggaacaatggtgatttttcgtttggcaccacaggattatcaccgtttccattttccagtatcaggaatttttgagcaatctgtagatatccctggatgcttgtatactgtgaatcccattgctgtaaatagtaagtactgtaatgtcttcacggagaacaagagagttatttcaagaatttcaactgtagattttggaaaggtggcatttgttgcaataggagctacaatggttggtagcattacttttacaaagaaaaagggcgattatg

SEQ ID NO: 267000 - DNA, 441 bp, Glycine max
ccacttttgagtgccacagagttctgagtttcataggagaaaaaaaatgacagaggaacaaaccaaaacggttgagtcagaatcagtaacaccaccacctgctgctgctgctccttcacaggttcctcctgctgctgaggctgaacatgttcctgaggctccaaaggatgtgactgaggagaaatctgtaattccagtgccttcttctgatgacaagcctgatgaatccaaggctcttgtcttggttgagaagactcaagaagttgctgaagtgaaaccaactgagggctctatcaaccgagatgcggtgcttgcaagagttgcaactgagaagaggttgtcattaatcaaagcatgggaagaaagtgaaaaatcaaaagctgaaaacaaggctcacaaaaagctttcatcagtttctgcatgggaaaacaagtagaaagc

SEQ ID NO: 267001 - DNA, 391 bp, Glycine max
cccacgcgtccgcccacgcgtccgcccacgcgtccgcttacacatcgcaaacgccaacctagaaaaaaaaaaaaaaaaaaaaagaaaaaaaaaaaaaaaaaaaaaaaaaaaaaaaaaaaaaaaaaaaaaaaaaaaaaaaaaaaaaaaaaaaaaaaaaaaaaaaaccaaaaaaaaaaaaaaaaaaaaaaaaaaaaaggccccccttttaaaaaaaccaaatttaacacccccaaaaaacccccatcaaaccccccaaaaagaacccaaaaaaaaaaaaaattaacaggggttaaaaaactaaagaaaccgaaaaacccgtgcgctacccaaccaaaatcccattgaaaaaaaaccccttttaaacaaatgccaaatacccaaaaagccccac

SEQ ID NO: 267002 - DNA, 453 bp, Glycine max
cccacgcgtccggcgaaggtggtctcacttgactcgattgcacgtgatccacgacacactgtgcgcttggcaaaagcttcgaatccacttcctcagtaacatctgcaagaagtcttgtccttcaccatgccaccaaagcctttagactatgggtccataaatgaaaacgtgtagaagagtcaatatgctgtcagaggtgaatcataccttcgagcttctgagcttcagaaagagggcaaaacgattatatttactaatgttggcaacccacatgcattgggacagaaaccactgagcttccctcgtcagggtgatgctttgtgccaagctgcattcctacttgatgatcctaatgttggactgctattccctgctgatgcaattgcaagagctaaacactatctttcattgacactgggcggtttaggcgcttatagtgactcccgcgggctt

SEQ ID NO: 267003 - DNA, 449 bp, Glycine max
gtagttgagaactaagaagaaggaaatggcttcctcaatgatctcctccccagctgttaccaccgtcaaccgtgccggtgccggcatggttgctccattcaccggcctcaaatccatggctggcttccccacgaggaagaccaacaatgacattacctccattgctagcaacggtggaagagtacaatgcatgcaggtgtggccaccaattggcaagaagaagttcgagactctttcctacttgccagacctcgatgatgcccaattggcaaaggaagtcgaataccttctaaggaaaggatggattccttgcttggaattcgagttggagcacggtttcgtgtaccgtgagcacaacaggtcacctggatactatgatggacgctactggaccatgtggaagctgcctatgtttggctgcactgatgcttctcaggtgttgaaggagc

SEQ ID NO: 267004 - DNA, 444 bp, Glycine max
gtttgttgtgagctataagctagtttatcgtgaggagaatatgaagttgtttgttttcttggttgctgcagtagttttggtagcatggccatgccatggcgcaggctaccaaaggttccctctccgaatgaaaactggctatggtgagcgttcttcggaggtaaaatgcgcaagttttaggcttgctgtggaagcacacaacatccgagcctttaaaaccattcctgaagagtgcgttgaaccaacaaaggactacattaatggcgaacaatttagatcagactctaaaacagttaaccaacaagctttcttttatgctagtgaacgcgaagtccatcacaacgacatatttatattcggcatagataacaccgtactctctaatatcccatactatgaaaaacatggatatggggtggaggaatttaatgaaaccttatatga

SEQ ID NO: 267005 - DNA, 414 bp, Glycine max
cccacgcgtccgcccacgcgtccggtccagtagcgtccatcgtagtatcctggaccatgtggaagctgcctatgtttggttgcactgatgcttctcaggtgttgaaggagcttcaagaggctaagactgcataccccaacggcttcatccgtatcatcggattcgacaacgttcgccaagtgcagtgcatcagcttcatcgcctacaagcccccaggcttctaagtgtgaaaaatttgcaaagcatttgtagccgccaccccactttgtttgtttgtacttaaactacattcccatttgtttttgctttttgagatttcatcatcctgtatttttggtttctgttttcggacttcaatggaaattaatggatgagaactaatgaataagctattgtgttgtgttgctttgtttc

SEQ ID NO: 267006 - DNA, 449 bp, Glycine max
gtgaggataaaaaatggctatggccacagctgtcgtgtgtcctcagaacatcgccggagccatcgtgagctcacctagcaagaccaagaagagagtggtacacgtgagaggcataaattcatttgggggactgaaggctagcaatggtgttgtctctttggggattcctatgagcactgagaagtgctttgctaaggttgtgagctcagtgaaagcagctacatcaaatgggaaaggaaaaggaggggctctttcttccacgtgcaacgctgctggtgagatattcacgattgctgctatcatcaatggacttgttcttgtcggggttgctgttggctttgtgctcttgcgagttgaagcatgggtcgaggagtccgaagcagagtgaaaattcaatcagataagcaagcaattaattaatatccagaatagttgtatgttcctatatt

SEQ ID NO: 267007 - DNA, 378 bp, Glycine max
gcaaaaatggcacctgcaacactgtctctgtctctcctcctcctgttctcactcagcatcggcgtaaccgttagatcgagcgactacgactacgattgtgtgtacactgcatacgttagaaccggttcggtgttgaagggcggaacggactctaagatcgggctgaagctgtacgacaagtacggctactacatctacattaaaaacctcgaagcatggggcggcttgatgggcaagggctacgactacttcgagcgcggcaacctcgacatcttcagcggaaggggaccctgtcttgacggacccgtctgtgccgttaacgttacttctgacggatcgggttctcaccacggctggtaccttaactacgtccaggtc

SEQ ID NO: 267008 - DNA, 456 bp, Glycine max
aattactactttctctctctttgtaacttgtaagcatggagtcctcaaagatctatgcttagctcttcctttgcatgctcttcgtctcctccgccactcccattctcggttgtggctactgtggcaaaccccccaaaaagcacaagcctggtaaaacaccaaagacacccacagtacccgttgttaagccaccagtcacaatccctcccattgttaagccaccagtcacaatccctcccattgttaatccaccagtcacaatccctcccattgttaatccaccagtcacaatccctcccattgttaatccaccagtgacagttccacccgttgtgcttccaccaatagtgaagcccccgggttttctccctccaattcttaacccaccaagtacaccaacaccgtcgccggggaaaggaaggaacactccatgtccaccaccaaagtctcctgcac

SEQ ID NO: 267009 - DNA, 430 bp, Glycine max
gaaaaaagcgatcatagtttcacttcggccttatccagtttagggtttcggttctctacccgatctttcacgtatcgaaaccttaaatttacgatcaggtctgagcaatctggttggtagaacctttggtcttagtgagtcaagttttatgtctgaattagacgatcaaattcctactgccttcgatccttttgctgatgcaaatgctgatgactcgggtgctgggtcaaaggagtatgtgcatattcgtgtacagcagcgaaatggtaggaaaagcctgacaaccgttcagggattgaaaaaggaattcagctataacaagatacttaaagacgtcaagaaagagttctgttgcaatggaacagttgttcaggacccagaactaggacaggttattcaacttcaaggtgatcagaagaagaatgtttct

SEQ ID NO: 267010 - DNA, 452 bp, Glycine max
cttttcttcttcttcgctccgtgccatgtcttcctctctcgctcttccttccactcccttcgtcgccaatggaacaagaatcttcgctctcaagcactctctccctcgctctagggtttccatgagcgtctccgctggatctcaggcttccgttcaccaggctttgttcgccgattacaaggcctccacttcattcctcttcccgggccagggtgctcaagctgttggaatggggaaagaagctcaaaatgtgcctgctgctgcggttttgttcaacaaggcaaatgacattttggggtttgatcttcttgatatatgcatcaatgggccaaaagaaaagttagattccaccgttattagccagcctgctatttatgtcacacgtcttgctgctatagagctacttcgtgcacgtgaaggaggtcagcagattattgactcagttgatgtta

SEQ ID NO: 267011 - DNA, 433 bp, Glycine max
gcacaaccgatcttttcctctgagaagacgtgtcggtagctgaagcattttataagcctcgactttcctgaactagttttaacatacaatctttcaagtacacctccccagcttccatttaagaatggagatcactagaataggccaatggttaagtcttctgatatgtgtactactattactgcagacagaaggggttcctgtgggaatcacttttgttgaaaatgcagtggcaaaaggggctgtttgtttggatgggagtcctccagcttaccacttccacaagggatctggagcagggattaacaactggatagttcactttgagggaagaggatggtgcaacaacgttactacttgcctttcccgtaaggacactcgattaggttcatctaagaaaatggatacatcactttccttttctgggtttttc

SEQ ID NO: 267012 - DNA, 439 bp, Glycine max
cccacgcgtccgaaagaatcgagtgattttcgtttgcgttgctgttgcgactgagtgagtgaagatggcgtgcttgcacgaccacagttgcgaagaccatgactgttcctctaactggtctctctacaaacacatcgacctctccaaggtaactgctttgaatgaggcaaatccaggaagtgttaagtcagttttcaaagcttgggaagagcgtctggattcttctggggttcacttggaaagcaatgagggtgatcctgagttacttgtcttcattccatttacttcagatgtcaagattaagaccatatccatagttggtggagctgatggaacaagtccttccaagatgagagtgttcatcaatcgagaaggaattgacttttcagatgcgcaaagcatgcaggctattcaggaatgggatttggttgagaatatg

SEQ ID NO: 267013 - DNA, 392 bp, Glycine max
cccacgcgtccgcccacgcgtccgaaaacactatagcaatagaaacatttgctgttgaaaaacccctcactcttcatcactacactagctagccacatacaatgtcgaccaaatttaaggtgtttcgtgaattcacaagcgatgactcattcctaaaccaagttatccctgaaaacatcaccgaattccaagtgactctgtccctcgctagagactacgatggcaacaactcaaccaacggaaagttcattccttactgggacactgaaaaggtcactcccgaagtgataaaaaaattcaagaaaaaatacgaacccaccgcactgagggttaaggttcttgtcagcattggaaacaaaaacaaacaatttcctttcaccattggctcggac

SEQ ID NO: 267014 - DNA, 406 bp, Glycine max
ggagagaactttaaacagtgtgtttaaaatgttggtccttgttttcttcgttgcgacaatttgggtagcatggcagtgccatgcgtacgatatgttccctctccgaatgaacactggctatggtgcccgtactccggaggtgaaatgcgcaagttggaggcttgctgtggaagcacacaacatctttggctttgagaccattcctgaagagtgcgttgaagcaacaaaggaatacatccatggcgaacaatatagatcagactccaaaacagttaaccaacaagcttacttttatgccagagacctcgaagtccatcccaaggacacatttgtgttcagtatagatggcaccgtactctctaatattccatactacaaaaaacatggatatggggtggagaaattt

SEQ ID NO: 267015 - DNA, 447 bp, Glycine max
  unsure (1)..(447): unsure at all n locations
gtgttattggtgggtttaggaagtactaacaggaaatggctgtgatcccgtgtcactgttggcgttccgtcggatccgacaaaccctacctctctggtcagagtctccgccgttgcgctccttcccccgccgtctccgtttcatttcgacgccgaatatcatgcgtcgcctcttccgctgtcgctcagaaagttgggctgaaagattttcttcacttggatgattttgataaggatactattttgaagatgttggaccgggcccttgaggtcaaggcattgctgaagtcaggggacaggtcatttcggccttttgaggggaagacaatggcaatgatatttacaaagccgtccatgagaacacgtgtttcgttcgagactggctntacattgttaggtggccatgctatatatttaggacccgatgacattcaaatgggcaagcgag

SEQ ID NO: 267016 - DNA, 429 bp, Glycine max
gccaaaggccatatcatcttttattattcgaaataatgtgcgggatcatacacaagattggggggaccctgcattttggaagggccaagaaataggaactctaaagggaacaccatggtgagcacaaaggtttactccaaggaaaacaccatggagagtacaaaggtggacacttaggagaacaacgacattgggagcacaaagagggacttgtggataagatcaaggacaagatccatggcgatggccatgacaagggtgagaaaaagatgaagaatgacaataagaaaaacgatcatggacatgaccattatggtcatagcatcagccgtgacagtgattagatcttataagttaagcaagagtacaggacgatattagtgacagagtcaggattcctatttctgccttatgagataattcagataa

SEQ ID NO: 267017 - DNA, 438 bp, Glycine max
ttaagaattacaacaagctggtgtctcttggcttcaagattatattcttgtcgggaagaacactggacaaacaggccgtaacagaagcaaacttaaagaaggctggctaccacacatgggaaaaattaattctcaaggatccacaagatccttccactccaaatgcagtttcatacaaaacagcagcgagagagaaactgataaggcagggatacaacattgttgggatcattggagaccaatggagcgatctcctcggaggccacagaggcgaaagcaggacctttaagcttcctaatcccctgtactacattcagtagttccttcacctctcaacaatctagcttgctcctatctatctatatgtaataagatgcgttcaaataggggcactagcttcactttatgttgcttcagctgtgtgtcaacaagtcatgt

SEQ ID NO: 267018 - DNA, 408 bp, Glycine max
cccacgcgtccgcacgatggcaattacaatacaattgggtcgcggtggagtggaaaagcagagtcaggttacaacaacattcttcagtgagagcagtatttataaaaaaaattggtgtaaatactttttttattgtttgtaatttaatattttttttcttttcattcttgtacttttttttatttttcttcttacaaattatgttttgtccctagaacattgtaaatattttttcttactgttctgtttaaatcgttttaagaactaaaaataaattaagcaaggattaaaaacatttaaaaaaataaaataaaatatactcagtgacaaaaagtaaaaagatatttaattttattaaataaaaatattagaagatgtttgacccttcattggtgggatttacatgat

SEQ ID NO: 267019 - DNA, 408 bp, Glycine max
caattgtggtggatgtgttgaattggactgattcgccggaatgccaggagaaggcatcatggattttgatggttatggcacacaagtcctatggtgacaagcaggccatgattgaggcaggggttgcatcatccctgcttgagttgtcccttttgggttccacattggctcagaaaagggcctcaagaatattggagattttgagggtggacaaagggaagcaagtttctgggagctatggcttgggtgcagctgtctctgcccctatttgcggctcttcgtcggcgaggccagacggaagaggaggaggaagagagtgttttgaggaggacgaagagatgatgagtgaagagaagaaagccgtgaagcaattagtccagcagagtttgcagaacaacatgaggaaaa

SEQ ID NO: 267020 - DNA, 452 bp, Glycine max
  unsure (1)..(452): unsure at all n locations
gatcgagataactagaaacagtttgatgaaaatgaaggtccttgttttcttcggtgctacagttttggtagcatggcaatgccatgcgtacgatatgttccctctccgaatgaacactggctatggtgcccgtactccggaggtgaaatgcgcaagttggaggcttgctgtggaagcacacaacatctttggctttgagaccattcctgaagagtgcgttgaagcaacaaaggaatacatccatggcgaacaatatagatcagactccaaaacagttaaccaacaagcttacttttatgccagagacctcgaagtccatcccaaggacacatttgtgttcagtatagatggcaccgtactctctaatattccatactacaaaaaacatggatatggngtggagaaatttaactcgaccttgtatgatgaatgggttacaaggggcatgcacc

SEQ ID NO: 267021 - DNA, 406 bp, Glycine max
ccacttccaacgccatgcctctttttggaattttccagataccctcatttatggacagaatcactgacctcgccatcttcattactccgctatggatttcggttatcgtcggcgtcgtcgtgggctgggcgtggaagcccaaatgggcctttcaccccaaagacgctcttctcaagtttcgctcccctcgccctcccaatccccaaaacgacaccgcttttacctactccgccaccagttccttcgcgcgtgagaaagacgcgagtgggagtcctgtggtgacggaagacgatttgctgcatcttgtggaagttggttgaggaaaaagatggagggcggggcatggattcagatgatggaccgttctaccccgaccatgacttatcaagcgtggcgtagggatcct

SEQ ID NO: 267022 - DNA, 303 bp, Glycine max
cccacgcgtccgagaagattcgtgaagagcgtggttacacctacatggatgtttgtgaggtctgcccagaaaagttgccaaattatgaacagaaaatcaaaagcttctttgaagagcatcttcacactgatgaggagatccgcttttgtgctgctggaagtggctattttgatgttagggatcgcaatgaagcttggattcgtgtgtgggtcaagaaaggaggaatgatcatcttacctgccggaatttatcatcgctttacgctagatgagagcaactacattaaagctttgcgtttttttg

SEQ ID NO: 267023 - DNA, 318 bp, Glycine max
gaaaaataaagcgttccatagcctcccataaaaatgaagaatactatcttctctgctctctttctactttgtgccttcaccacctcatacctaccttcaaccaccgcggtggtcgataccaacggtgatattcttcagaatcctggcacatactttatcttgtccgtttttcgacccggcggcggagtagaattcgccgccactcaaacgaaacttgccctctcactgttgtgcagactctcttcgggaggggatttccagtaatcttatcgtcccagttacgaatccctatcatcggcgaaggacaactcttcagca

SEQ ID NO: 267024 - DNA, 396 bp, Glycine max
agcttatgaagagtgggttcaccagcccattgtcagcaaggaaggcccccgtttctttgaaaatgagattctggagttcttgacgcgcacagtctggtgggcaataccagtcatttggctgccagttgtatgctggtttatatataagtccatacgaatgggcctcagttgtcctcatttagctctattggtggttcttggcatttttgtttggacactgcttgaatactcattgcatcgttttcttttccacattaaaacaaagacctactgggggaataccttgcattatcttctccatggctgccaccataagcaccccatggatggcttaagactcgttttcccttctgctgcaacagctatattattgatgccgttctggaacttggtgaa

SEQ ID NO: 267025 - DNA, 368 bp, Glycine max
  unsure (1)..(368): unsure at all n locations
cccacgcgtccgcttccacgctgattctgactctcttcctggtcttcaccttcctcggtctcattctcctcgctctcggcatcctctccattcccagctcctcgcgcggcaatttgcccaaacctaacgatctcgcatccatcgctcgcaacacaatcgagacttccgacagtgacgagaggggggagcagtgggttgaagtagtgtcgtgggagcccagagcctttgtttatcacaattttctgacgaaggaggaatgcgaatatctaattgacatagcaaagccaagtatgcataagtcaacagttgtcgatagtgaaactggaaagagtaaagacagcanaatgcgtacaagctctggaactttt

SEQ ID NO: 267026 - DNA, 333 bp, Glycine max
atccgcgcatattctcatttcaatttgcatttgcatttgcgtttcatttggcgttttgtttctttctggaagcttcgttcgggcatcaatggcgtccttcgatgaagctcctcccggaaactccaagaacggcgagaagatcttcaaaaccaagtgcgctcagtgccacaccgtcgacaaaggtgccggccacaaacaaggacccaatctgaatggtttgtttggaagacaatctggtacaactcctggatattcctattccactgctaacaaaaaacatgggcgtgatttgggaggaaaaagaccctctatgattacttgctcaaccccaaa

SEQ ID NO: 267027 - DNA, 331 bp, Glycine max
cccacgcgtccgaatcactctagctgttgcaaatttctactatttttcaatggcttctgcagatgttgagttccgttgctttgttggtgggcttgcttgggtcaccggcaacgatgccctcgagaaagccttttcaatctacggcgacatcgttgaatcgaaggtccgtttgatgcaggcaccgcaactgatctcacacgattcggattcggattttttctcgatcctcttctgatctgtgatctctgatctatttgcgttacttgatctatgatatgatacttgtgttactatatgattcttttattactcacgccaataggtacgttca

SEQ ID NO: 267028 - DNA, 315 bp, Glycine max
aaaaggttgcagcaacaatggcagccatggctgcactccagagctcaatggccggtctctccctctcttccaactctttcttaggccaactccttcctcccatcactctcccttctcttcttccgggtaagtcaacagagaagcaatgtcccattgtaatgaggcttaaacgatgggagcggaaggagtgtaaaccaaacagtcttcctatcttgcacaaaatgcatgttaaacttggagatacggtgcaagtcatatctggacgagaaaggggtaaagttggggagattactaaaatcttcaagcataacagca

SEQ ID NO: 267029 - DNA, 337 bp, Glycine max
ggaatatgctagcagaaacatcactgttaatgcagttgctccagggtttattgcatccgacatgactgccaagctaggacaagacattgagaaaaagattttggagacgatcccattaggaagatatggccaaccagaagaagttgccggactggttgaattcttggctcttaatcaagctgccagttacatcactgggcaggttttcaccattgatggaggtatggtgatgtaaatcagcaacctgtttacctggcaacatgaacttttgcacttttgaactactcttgtactatgatagtttgtctttgctgaagtttgcttaaagatggtttta

SEQ ID NO: 267030 - DNA, 311 bp, Glycine max
gaagaacagagcctcgctgaaaccgaagcgggcctggaaagttgggagcccaacggcgaagacgccggcgatgagagcttcgtcgaaccgccggaagaggccaagctcttcgttgggaacttgccttacgacgttgatagccagaaattggccatgcttttcgaacaggccggaaccgttgaaatcgctgaggttatttataacagggaaactgaccagagtcgcgggtttgggtttgtgacgatgagtactgttgaagaagctgaaagcgctgtggagaaattcaaccgctatgatatcgatggaagact

SEQ ID NO: 267031 - DNA, 423 bp, Glycine max
cccacgcgtccgcggccaccggagccggcaccgtctttgattctggcacggtcttcaccaggctagttgcaccggtatacacggctgtccgggacgagttccggcgaagagtggcgatggcggcaaaggcaaacctaacagtgacatccctaggaggctttgacacatgctacacagtcccaatagttgcacccaccatcacattcatgttctcaggcatgaacgtgacgctgccacaggacaacattctcatacacagcactgctggcagcacctcatgcttgggcatggcttcggctcctgataacgtgaactcagtgctcaatgtcattgccaacatgcagcaacaaaacaccgtgtgctctatgacgtgcccaattcaaggtttggagttgctcgtgaactttgcaccaaataattaaa

SEQ ID NO: 267032 - DNA, 237 bp, Glycine max
cccacgcgtccgcttcaagattgtattcttgtcaggaagatatcttgacaaaatggccgtaacagaagcaaacctaaagaaggctggcttccacacatgggagcagttaattctcaaggatccacatcttatcactccaaatgcactttcatacaaatcagcaatgagagagaatctgttgaggcagggatacagaattgttggaatcattggagaccaatggagccatctgcttgg

SEQ ID NO: 267033 - DNA, 350 bp, Glycine max
cttccttgtctctttctcttctcaacaacatgcagatcttcgtcaagactttgactggcaagaccatcaccctcgaggtcgagagtagcgacaccatcgacaacgtcaaggccaagatccaggacaaggaaggtatccctcctgaccagcagaggttgatttttgctggtaagcagctggaagatggtcgcactcttgctgattataacatacaaaaggaatcaacacttcacttggtcttgaggctcaggggaggaaccatgattaaagtgaagactctaactggaaaagaaattgaaattgacattgagccaactgatacaatcgaccggatcaaggaacgcgttgag

SEQ ID NO: 267034 - DNA, 427 bp, Glycine max
  unsure (1)..(427): unsure at all n locations
cccacgcgtccgcccacgcgtccggataactagaaacagtgtgatgaaaatgaaggtccttgttttcttcgttgctacaattttggtagcatggcaatgccatgcgtacgatatgttccctctccgaatgaacactggctatggtgcccgtactccggaggtgaaatgcgcaagttggaggcttgctgtggaagcacacaacatctttggctttgagaccattcctgaagagtgcgttgaagcaacaaaggaatacatccatggcgaacaatatagatcagactccaaaacagttaaccaacaagcttacttttatgccagagacctcgaagtccatcccaaggacacanttgtgttcagtatagatggcaccgtactctttaatattccatactacaaaaaacatggatatggggtggagaaatta

SEQ ID NO: 267035 - DNA, 405 bp, Glycine max
cccacgcgtccgcccacgcgtccgcccacgcgtccggttttgcagccatggaaacaggcatagcatgctacactcgcgggcctttcttgcctagtgtttcttccaagcactctccaccctccatctctccatcttttggcttgaggagtctgaaatcgagctctttatttggagaatctctaagagtggcatccaaatcaacactaaaggtttcaaagacaaagaatacttcactcgtgaccagatgtgaaattggtgacagtctggaagaattcctcacaaaagcaacaccagataaggggttgatcaggttgttggtgtccatgggagaagcattaagaacaatttccttcaaagtgaagactgcttcttgtgggtgaacacaatgtgttaatactttttggg

SEQ ID NO: 267036 - DNA, 382 bp, Glycine max
  unsure (1)..(382): unsure at all n locations
accatccccatcaccggaactggtatcaaccctgctcgtagtcttggtgctgctatcatcttcaacaaggaccttggttgggatgaacactggatcttctgggtgggaccattcatcggtgcagctcttgcagcactctaccaccaggtcgtaatcagggccattcccttcaagtccaagtgattcaatcaaacggttcatgcttaatcaagttgggaacaacaacaacaacaaaaatcaagccaatgtttgtgggttttggtttcatttcattaagatgatcntgttatctcttttcttctttttaaaatttaaagtctttgtattttgtatgtaaagatgtaaaattatgattattaggtggtgcatgtgtcgcgtcatg

SEQ ID NO: 267037 - DNA, 330 bp, Glycine max
  unsure (1)..(330): unsure at all n locations
attccctccatttctgagaatggcgaaggctgcggagaagaagccagcggctgagaagtctccggcggagaagaagcctaaggcagagaaaaagattccgaaggaaggcggtggcgagaagaagaagaagaggtcgaagaagagcgtggagacctacaagatctatatcttcaaggtgctgaagcaggtacaccctgacatcggtatttctagcaaggccatggggatcatgaacagcttcatcaacgacatcttctagaagctcgcgcangaagcggcgcgtctcgccaggtacaacaaggaggcctactattacctccagggagattc

SEQ ID NO: 267038 - DNA, 368 bp, Glycine max
cccacgcgtccgcccacgcgtccgccaacacttccgaaccttgcattgtatctacccacttctcaaccaacaatggcaatggcaacccaagcctctctcttcaccccacccctctccggtctcaaacccagcgaccgagccaccgcgccatggaaacaatcctccaccctctccttctccacctcgaagcccctcaagttctcgcgaacaatcagagcagcagccaccgaccagaccacagaggcaccggttgggttcaccccaccggaactggacccaaacaccccttccccgatcttcggaggcagcaccggcgggctcctgcgcaaggcccaaagggaggagttttatgtcatcacatgggactt

SEQ ID NO: 267039 - DNA, 383 bp, Glycine max
cagattttgattcgattcgattcgattcagtcgaggttttaagcagcagcaagatgtctgggcgtggaaagggaggaaagggattgggaaaaggaggagcaaaacgacatcgtaaggtgctccgcgacaacattcagggaattacgaagccagcgattcgtcgtttggctcgcaggggtggcgtgaagcgtatcagcggtttgatctacgaggagactcgcggtgttctcaagatcttcttggagaatgtcatccgtgacgcctttacttacacggaacacgctaggaagaagaccgttacggttatggacgttgtttatgcgcttaagaggcagggaatgaccctttactgatttggtggttagggtttttgcttgattttt

SEQ ID NO: 267040 - DNA, 333 bp, Glycine max
cccacgcgtccgcccacgcgtccgcaactagccaatgacaagaggaccaagccttatgtgaagaaaatggccaagagccaagactatttcttcaaggagttctctagagccattaccttgctctcagagaacaaccctctcactggcacaaagggtgaggtcagaaagcagtgcaatgttgccaacaagcaccatgatcaggacccttgaattttcctccccttgtctatgatcgaggaagaaaatctgtaatatattatgcaaaaaataattaaggtcttttccttttaaatgggctggttcaatgaaccgagaccactgcaggttcatggg

SEQ ID NO: 267041 - DNA, 355 bp, Glycine max
gttggccatggcaaacatgattgtggcttccaccaaacctctggttccagtctgcaccagttcccgttcccccacacccaaagtccccattctccaaatttcactccccaaagccccaaccttgaaactgaaactcccgatttcaaagccccagatgctgtccctccttggagggatagcaccactggtcttggccagaccctccctcgcagaagaaattgagaaagcagcactctttgacttcaacctcacccttcccataataatggtggagtttctgctgctgatggttgccttggacaagatatggttcaccccgcttgggaaattcatggacgagagggacgcggcgatc

SEQ ID NO: 267042 - DNA, 384 bp, Glycine max
cttacttcccaagctggtatagtagaaagcttggatgtcttggtaaaggagtttgtagctgccagcgatgaagagaagaaatccgtgtttacccgattggaagaggaagttgtgaagcttaagggttccgcctcaaggtacgggaagatttacttgaaagctgccaagaattacagggaaaaaggttctgattatgctaagaacgaaattcagcgcctacagcgcattcttgacaagtccattagccctgcgaaggccgacgagttaactctaaagaaaaatatcttgtcgacatatgctgcttgacttattggtgcattgttaaccaactctcatggaagctcgtgatccaccgcagctgccgatgattgtttgactttgata

SEQ ID NO: 267043 - DNA, 388 bp, Glycine max
cccacgcgtccgcccacgcgtccgatttagtgctgcgtactaagtttttggtttcatcagatccacaccggaattctattcagactctatacatagttacatcgatcctcgcggggagagccaaataacgagatacacaggttttaattctttgagagcggaaatggatacattttcacatgtaccaccaggctttcggtttcatccaaccgatgaagagctcgttggttactaccttaggaaaaaggtagcgtctaaaaggattgatctagatgtgatcaaagatgtcgatctctataaaattgaaccatgggatctccaagaactatgcaaaataggaaccgatgaacaaagtgactggtacttcttcagtcataaagataagaaa

SEQ ID NO: 267044 - DNA, 411 bp, Glycine max
acgaaaaatgcaccacacctaaaatcgggtcaaattctaacagttcaaatggattctgtaggaataagatcggctaacccttatttggcgactcctggagcaacggttcatggccattatggggaaatactttctgaaggagatatattagttacatttatctatgaaaaatcgagatcgggtgatataacacaaggtcttccaaaagtagaacaggtattagaagttcgttcgattgattcaatatcgatgaacctagaaaagagagttgatacttggaatgggcgtataacaaaaattcttggcattccttggggattcttgattggtgctgagctaacgatagcgcaaagtcgtatttctttggttaataaaattcaaaaagtttatcgatcccagggagttcacatt

SEQ ID NO: 267045 - DNA, 277 bp, Glycine max
atcaccgatgtgcatggaggtgccaacagcgtcgagatcaacaatctcgctcgctttgctgtagaggaacaaaacaaaagagagaattcagttctggagtttgtgagggtgattagtgcaaagcagcaagtggttgctggagtgaattactacataacattggaagcaaaagatggtttgattaataatgagtatgaagcgaatgtttgggtgagggaatggttgaactccaaagagttgctagaattcaagccagtcaatgtttttagcacaccaa

SEQ ID NO: 267046 - DNA, 319 bp, Glycine max
attaacagcttctgagttctaagctaagtctgcttttattcttttctctcccggtatatatatagtatttgcttatatatatatatactactcattaggaactgtgattgcagttcctaatgcagattttaacgcggcgccaaggagcatttttgtgcttctggttgtctgtgctttttgtggtagtagacttttgctatggtgaccatagtacagtcgaggtagtagggttgggagaatgcgcagattgcaaggagaaaaacattcaaactagccaggctttctcaggtttacgtgtgacagtagactgcaaggcagc

SEQ ID NO: 267047 - DNA, 385 bp, Glycine max
cccacgcgtccgggaaaggaaagggttttgtagagggagagaattccaaaccaaaaatccgaaataaataattttttttttaaaaaaaaaaagaaccgggtgtgggtgttgttggtgttggcggaggcagatcggagatctgtgatagatatagatggagggagttggggcccggcttgggcggtcctcgacccgctacggaccggccacggtgttcactggaccggtccggaagtggaagaagaaatggatccacgtgtccccttcttctgcttcctctaattccaacgccaataatcatcacaaccacgcttcccatgcctctcatcttctcctctacaagtggacccctctcacccacaggcagaacaccgccactactaac

SEQ ID NO: 267048 - DNA, 384 bp, Glycine max
aaaaaattcaagaaaaaatacgaacccaccgcactgagggttaaggttcttgtcagcattggaaacaaaaacaaacaatttcctttcaccattggctcggactcgaacagcgaagcatgggtctccgaggccactgcttcgctgaagagcatcattaaaacctacaaccttgatggcatcgatgtcagctacgaggacatcgccgccaacgaagccgactttgttaattccgttggggggcttgtgaggaacctgaagcagaacaagctcattactgtggcttccttcgcaacaagcgctgatgccgccaacaacaaattctacaatctcttgtacgcagaatatgctactttctttgacactgtggtgtttctgagctgggta

SEQ ID NO: 267049 - DNA, 357 bp, Glycine max
gtgagggccttccatggcttccgcttgtgcttcctctgcaattacagctgttgccatctctacgccgagttccgggcagaagaatggatcaggaggttgttttcttagtggaaggaaattgagggtgaaaaaggagagagcagcaattggaggacgatcgatgggcactacagtgtgcgcagttgctgagcctgacagacctctatggttcccaggcagcacccctcctccatggcttgatggcactctacctggagacttcggctttgaccctcttggtcttggatctgacccggagagtctgagatggaatgttcaggcagagctagtgcactgcagatgggcaatgttgggtgc

SEQ ID NO: 267050 - DNA, 377 bp, Glycine max
gagaaatggcgatggcaatggcgcttcgcaggctttcatcttcaattgacaagcctctgcgccctctcttcaatgccggttccctctactacaagtcgtctttgcctgatgaagctgtttacgacaaggagcgacccggagttacatggccgaagcagttgaatgctccacttgaggtcgtggatcctgagattgctgatattattgagcttgagaaagctaggcaatggaaggggctagaattgataccgtcagagaatttcacctctgtgtctgtgatgcaagcggttggatcggttatgaccaacaaatacagtgaggggtaccctggtgcaagatattatggtgggaatgagtttattgacatgggctgaaca

SEQ ID NO: 267051 - DNA, 419 bp, Glycine max
gcaattgaagttgaagtcttgcccttctctcttcaactccaaacacaagacatcatcatccatggctgcctccgtctccactgtcggagctgtcaacagagctcttttgaacctgaatgggtctggacctggggtttcagctcccagttcatccttctttgggagcagcttgaagaaggttattggctcaagggtccccaacacaaagatttcctctggaagcttcaagattgttgctgtagaagagaagaaagagattgaagagacccagcagaccgacaaggacagatggaagggtcttgcctatgatatctcagacgaccaacaggacatcacaagaggaaagggttttggtgactcccttttccaagctccacaggatgctgggactcactatgctgtcatgagcttctacgagt

SEQ ID NO: 267052 - DNA, 417 bp, Glycine max
cttacttcccaagctggtatagtagaaagcttggatgtcttggtaaaggagtttgtagctgccagcgatgaagagaagaaatccgtgtttacccgattggaagaggaagttgtgaagcttaagggttccgcctcaaggtacgggaagatttacttgaaagctgccaagaattacagggaaaaaggttctgattatgctaagaacgaaattcagcgcctacagcgcattcttgacaagtccattagccctgcgaaggccgacgagttaactctaaagaaaaatatcttgtcgacatatgctgcttgacttattggtgcattgttaaccaactctcatggaagctcgtgatccaccgcaactgccgatgattgtttgactttgatatcgaaattgctgggagatattcaacgtggatac

SEQ ID NO: 267053 - DNA, 428 bp, Glycine max
tggaatgtattttagtgccaaagataatggagagatgatgtcaatgatctataactggccagctcacgaggtagacatgattgtcttaacagatggaagtcgaattcttggcttaggtgaccttggagttcagggaattggaatccccataggaaaacttgatgtgtatgttgctgctgctggtatcaacccacaaagaatacttccagttatgctggatgttggtaccaacaatcaaaagttacttgaagatcgcctttatttaggacttcgacaaccaaggttggaaggtgaagagtatctatcaattatagatgaattcatggaagctgttcatgctcgatggcccaaggctattgtgcagtttgaggattttcaaatgaattgggctttttaaacccttaaaagatattataaaaagttttgta

SEQ ID NO: 267054 - DNA, 381 bp, Glycine max
gtcgaagcgaggtcgcggaggatcggcagggaacaagttccgcatgtcactgggtctgccggtggcggcgacggtgaactgcgccgacaacaccggcgcgaagaatctctacatcatatcagtgaaggggatcaagggaaggctgaaccggttgccgtcagcttgcgtgggtgacatggttatggccaccgtcaagaagggaaagcctgatctccgtaaaaaggtgctccccgctgtcatcgtccgtcagcgcaagccgtggcgccgaaaggacggtgtttacatgtacttcgaagataatgctggggtcatagtgaatcccaagggtgaaatgaaaggttctgctatcactggttctattgggaaggagtgtgctgatct

SEQ ID NO: 267055 - DNA, 334 bp, Glycine max
acgccgccgagcccgccaaaaaccccgtcgtcaccgacaagcccaagccccaagcccgacaatctgcatccccggccgcggcccgtgcaaccaaatgggccgtggacagctggaagtccaagaaggccctgcagctgcccgaataccccaaccaggaggatctcgaggccgtcctccgcaccctcgacgccttccctcccatcgtcttcgccggcgaggcccggacactcgaggagcacctcgccgaggccgccatgggaaatgccttcctcctccagggcggagactgtgccgagagcttcaaggagttcaatgccaacaacatccgtgacac

SEQ ID NO: 267056 - DNA, 375 bp, Glycine max
gagaatatggcgaccacaggcgctttgtgtggcactatgttgaacacctccttcgtgaagaggcaggcatcagtgggcatgacaagcttcaaggctaacgctgctgtctttggtgtaaaaggaggacgaggaggtcgtgtgagggccatggcaacttacaaggtgaagctgataactccagagggagagcaagaatttgaatgcccagatgatatatacattcttgatcaggcagaggaaaatggcattgatcttacctactcatgcagggctggttcttgctctgcatgtgctgccaaagttgggagtggcaaactagaccagtcagatcgtagctttcttgatgacgaccaacttgatgcaagatttgttctt

SEQ ID NO: 267057 - DNA, 425 bp, Glycine max
aaagcattgaattcaaaaacttaagttcattccttgtgttttgctttcttcctcaaaaccaaacatgtcgaacacatgcggcaactgcgactgcgctgacaagactagctgcaccaagggaaacagctatggtgttattgtagagactgagaagagttacatcgagactgttgtcatggatgttccagcagctgagcatgatgggaagtgcaagtgtggcactaactgcacttgcacggactgcacctgtggccattaaggaatatgtatgaaaatgtaattgccatgtgtttggcaatacaaatatccaaataatgtaatcttcgtatgaataaatgtgtgtgctgttatcctacttcaggtctgtgtagtcatgcagtctgaatcatttcaagttcctgtcttagttaatataacagccatgg

SEQ ID NO: 267058 - DNA, 269 bp, Glycine max
gtgagtgatcggtgttcacttgatctcatcataatcgtcagcgtcaattgaagaagatgccgatcagaaacatcgccgtcggaaggcctgaagaggcgactcaccccgacacgttgaaggcggctttggctgagttcatctcaaccttcatcttcgtgttcgccggctcaggctccggcatcgcctacaacaagctcaccgacaacggcgctgccacccctgccggcctcatcttcgcctccatcgcccatgcattcgccctcttcgtc

SEQ ID NO: 267059 - DNA, 252 bp, Glycine max
cccacgcgtccgatgaaaatgaaggtccttgttttcttcgttgctacaattttggtagcatggcaatgccatgcgtacgatatgttccctcttcgaatgaacactggctatggtgcccgtactccggaggtgaaatgcgcaagttggaggcttgctgtggaagcacacaacatctttggctttgagaccattcctgaagagtgcgttgaagcaacaaaggaatacattcatggcgaacaatatagatcagac

SEQ ID NO: 267060 - DNA, 356 bp, Glycine max
agcaaccatggcaatggcaacccaagcctctctcttaaccccacccctctccggtctcaaagccagcgaccgcgcctccgtgccatggaagcaaaactccagcctctccttctccagcccgaagcccctcaagttctccagaacaatcagagcagcagccgccgacgagaccacagaggcaccagcaaaagtagaggctgcaccggtcgggttcaccccaccagaacttgacccaaacaccccttccccgatcttcgggggcagcaccggcgggctcctgcgcaaggcacaggtggaggagttttatgtcattacgtgggactcacccaaagaacagatctttgaaatgcccactg

SEQ ID NO: 267061 - DNA, 204 bp, Glycine max
aaaaaaaaaaaaaaaaaaaaaaaaaaataaaaaaaaaaaaaaaaaaaaaaaaaaaagggaaaaaaaaaaaaaaaaaaaaaaaaaaaaaaaaaaaaaaaaaaggggggtttagttcgggggcggcctttttagaggatccaagtttacgtccgcgtccttgcaaaataatagtttttttttggggcccctaaaattaaattaatg

SEQ ID NO: 267062 - DNA, 268 bp, Glycine max
  unsure (1)..(268): unsure at all n locations
cccacgcgtccgtgctttgttatcgaacatttctttttgatttcaaaaattatccggcaagagtntgaatctatttttatatgcgaatcaatcctactacttctggtcctgaggcttctgcgcttgaaaaaaaaaaatctgggacgtatcccccaaataatgggtccggtactagatgtagcttttcccccaggtaagatgcctaatatatacaacgctctgatagttaagggtcgagatactgttggtcaacaaattaaagtgactt

SEQ ID NO: 267063 - DNA, 377 bp, Glycine max
tttaaggttcactcctatcgcatagcacccactggtgttgacaccagaatccattgggaaaacgaagatgaaggttggatcggaggtaccaataccaaacaccaacaaacccacagacccaatagcatgttacaggctgatgactttccagatctcctctgtgcttctttaggttctcattacgaattcttaggcgtatgaccagatgcggatttagaagaaattaaagttgcttatcgaaaactgacaaaggagtatcatcccgacacaacttccctacctgtcaaaactggctcagaaaagttcatgaaattaagagaggtttacaacgttcttagcaatgaagagagtcagaaattctatgactggacccttgc

SEQ ID NO: 267064 - DNA, 404 bp, Glycine max
taattttcgaaatgggaaaaaacgaaaaataacttttccaaattcatgacaaccgaatcacacaaaaactattttatatgctgtttttctgtttgaaggatcacacaaactagtaaccagaaaaatggcagaaacaaagttgagctccttcaaagacaaaagatggtcactccatggcatgacagctctagtgacaggaggcacacgaggcatatggtacgcaatagctgaagagttagcagaatttggggcagctgtgcatatttgtgcacgtaaacaacaagatattgataaatgtttagaagaatggaataagaaaggacttcccataacagggtcggcatgtgatgtactatctcgtgaccaacgtgaaaatttaatgaaaaatgttgcttcaatcttta

SEQ ID NO: 267065 - DNA, 411 bp, Glycine max
gagataactagaaacagtgtgatgaaaatgaaggtccttgttttcttcgttgctacaattttggtagcatggcaatgccatgcgtacgatatgttccctctccgaatgaacactggctatggtgcccgtactccggaggtgaaatgcgcaagttggaggcttgctgtggaagcacacaacatctttggctttgagaccattcctgaagagtgcgttgaagcaacaaaggaatacatccatggcgaacaatatagatcagactccaaaacagttaaccaacaagcttacttttatgccagagacctcgaagtccatcccaaggacacatttgtgttcagtatagatggcaccgtactctctaatattccatactacaaaaaacatggatatggggtgggagaaatttaactc

SEQ ID NO: 267066 - DNA, 410 bp, Glycine max
catctttgctattacctctttttccaaactctaaaaatttttagttccacaaaaccaaaccaaaatggcaggagcctgggcctcatccaccatgatatcaacaccagccttatctccaagcacaagcatccaaaagcaccatcatttgaagccatccaacgtgtgctttcaaggccttagacccctcacaaggttcacaaccaaagtgagcagcaccaccaaaagggttattccaaagggtggtgtcggtgttagagctgaactcaactcagcacttgtcataagcctcagcactgggctctccctcttcttggggagggttgtgttcttcaacttccaaagggagaacgtggcaaagcaagtgcctgagcagaacggactcacacactttgaggctggtgacacacgtg

SEQ ID NO: 267067 - DNA, 406 bp, Glycine max
gaaagaatgggcaaagtttcaattccagtcccgcaaaacggtttctccatacgcaatgtctcaacgtccaaacgctcatgtttcaccccttcaccttcaacgctcagaatttcttgctctggagtagctgagttagatggatctcatgagaataagggaggtttgtttaatttcaatggaatcaagggcgtggcttgtggtattcttgcagcttgtacggttacttctgctgcatttcccgttactgctgctacccagagacttcccccattgtcaactgagccccatcgctgtgagcgtgcatttattggcaacacaattggtcaggcaaatggtgtatatgataaaccattagatctccggcaatgtgatttcacagatgaaaaaaccaacctgaaggggaagt

SEQ ID NO: 267068 - DNA, 373 bp, Glycine max
gctggtcacatggtcactatggatcaaccaaaaactgctctagagacgctaacaagctggatgcatgggaaactgacaatgacaaagagtggagataatgtctctcctaaatgatgcactcacagcacaaaaaccaaaaccatccctctattgctgcatagatattgatgtcatttccttgtgtatactgggagggtggaatgtaattctttttcttttttcttttttttttctttctctagtttctcttatccctgaccattgatggatttggaactaatcatctatcattgccaccaaatcacgcacaactttacacttgtaacctgatttcaatcaaagcaaatttcaattcttgaaaaaaataaatttc

SEQ ID NO: 267069 - DNA, 343 bp, Glycine max
cccacgcgtccgcccacgcgtccggagcaaagaatttatctatggactcataccaacgacgagtaccggaaatactccattctctggaacttggatcagattgtgttctttgtggacgaggtgcgcataacggcgttcaagaacagcatggacttgggagtgaaattcccattcgaccaggctatgaagatctacaacagatggaggaacgcttatgactgggcaacgaggggtggattggagaaaacggattgtgcgaatgcacccttcatagcaccttacaacgggtatcacatcgacgggtgcgaagcttttgggaacgccaaggtctgcgacacgcaag

SEQ ID NO: 267070 - DNA, 392 bp, Glycine max
cagaaacaacaaacacaaaccgaaaaggcgaaaggggttttccgagtgagatctaggggttccatcgattcggagagaggatattgatcgaacgacctcagcgagcaaggacaggaggtggagtactagatcatggattcggtgccttcgaattcgcatggaaacctcgatgagcagatttctcagctcatgcagtgcaaacccttgtccgagcaagaggtaagggtcttgtgtgataaggcaaaagagattttgatggaagagagcaatgtacagcctgtgaaaagtcctgttacaatttgtggtgatattcatgggcaattccatgatcttgcagagctttttcgcattggagggaagtgtccagatacaaattacttgtttatgggaga

SEQ ID NO: 267071 - DNA, 405 bp, Glycine max
caggtacctccttggataaggctttttcttcagtacttgttcttggtggaacaacctggtaagtttgtaacaatggctgcctcagttacttcctcttttcgcatcagcaatttgaagtcggtttttgttggtgagactaataaactcagagtttcaagtgttcctggtgcccatgttggtttcaatagaaagactgtagaatgtaaggaatcacgaattgggaagcaacctattcctgtgccatccaatgtcacggtcaaattggaaggacaggatatacaagtgaaaggtcctttgggagaacttgcattaacttatcctcgagaagtgttggttgagagggaagagtcagggactctaagggttaaaaaggcagttgaaaccagaatggccaatcaaatgcat

SEQ ID NO: 267072 - DNA, 345 bp, Glycine max
acgcccacgcgtacgaccacacgtccggtctatcattaacaggcatatcttctacaagaccgtaaacgacaagaccatcacccttgacgtggaaagctctgacaccatcaacaacgccaaggccaagacccaggacaaggaaggaattcccccagaccaggaacaactcattcacgcgaggatagcaacttgaggacggccggacccttgctgactacaacattcagaaggagagtactgttcacctcgcactgcggctccgaggtggcatacaaacctgtaatcagacactaaccggctagagcataaccctataggtcgcaagctccaacaccatcgataacg

SEQ ID NO: 267073 - DNA, 412 bp, Glycine max
cccacgcgtccgcccacgcgtccggttactggcaaaggcttatgttgttgtgaatgatgcatgctaccatcaaatcattagccattggctaagcactcatgcaattgttgagccatttgtcatagcaacaaacaggcaactgagtgtggttcaccctatttacaaacttctgtttcctcactaccgtgacaccatgaatattaattcacttgcccggaaagccctggtcaatgcagatggtattatagagaaaacattcttgtggggtaggtactctatggaaatgtccgctgtcatttacaaggactgggttttcactgatcaagcattacctaatgatcttgtaaagagaggagttgctgttaaggacccatctgctccccatggagttcgtcttttgattgaggactat

SEQ ID NO: 267074 - DNA, 350 bp, Glycine max
gttaataaagaatggcaacaatagctactagtggtgtgagtctttcaagccctagcacagtacttgctatgaaatcagactcagcacaaaaggcccaggccatgagcttgccagctctgttcaggcccattcaaaagtggcccggtttggtgaaggcccggcccgtttgggccacgccggagaagatatcggagaaggtggaggagagcatcaagagcgcggaggaggcgtgctcgggagctggcggcgacgcagagtgcgcggcggcgtgggacgaggtggaggagctgagcgcggcggcgagccacgccaaggagaagctgaagcaatctgacccgctcgagaactac

SEQ ID NO: 267075 - DNA, 198 bp, Glycine max
gtagctcataactaagaacgagaagcaaatggctcgctaaatgaactcttccacagctgttaccactgtcaaccgtaccggtaccggcatggttgctgcattcactggtctcaagttcatggctggattacctaccagaaagaccaacgatgacattacctccattggtagcaactgcggacgagtgcaatgcatgca

SEQ ID NO: 267076 - DNA, 240 bp, Glycine max
tcgcagaatacaaggcccagtgctgaagaccttcctgaggatttagctctgattgtaacttgatgttggaaagaggatccgaatgatcgaccaaatttcagtcaaatcatacagatgctccttcgatatctatgcaccgtttcaccaccagaaccgagtgttcctctgctgattacttcatctgagaacgcggtgttgccaccagaatctcctggtacaagtgcattaatgcttggaaga

SEQ ID NO: 267077 - DNA, 391 bp, Glycine max
acgctgcagcattagggtttatcatctgcttcaatggggaagggaacagggagcttcggtgggaggaggaacaagacccacactctctgtgtgaggtgtggccgccgcatcttccacctccagaagagtcgctgcgccgcttgtgctttccccgctgcacgcacgcggaaatataactggagcgtcaaggcaattcgcagaaagaccaccggaactggcaggatgagatacttgcgtaacgtgcctcgccgcttcaagagtggcttcagagaaggtaccgaagctgcaccaaggaagaagggagcagctaccactgcatagacctttcaaagatcgttctcggtgggtacggatttacaggaatagattgctttttgggcttttggcaagt

SEQ ID NO: 267078 - DNA, 415 bp, Glycine max
aacaaatcaaagccatggccacctccaacttctctattgttctctccgtctccctagccttctttttggtgctacttaccaaggcacactcgaccgataccgtttctttcaccttcaacaagttcaacccagtccaaccaaacattatgctccaaaaagatgctagtatttcatcctctggggtgttacaactcaccaaagttggcagcaacggcgtgcccacctcgggatctctcggtcgtgccctttacgctgccccaatccagatttgggacagcgaaaccggcaaggtagccagctgggctacatcctttaaattcaacattttcgcacccaacaaatcaaactcagctgacgggcttgccttcttcttggcacccgtcgggtctcagccccaatccgacgatggatttct

SEQ ID NO: 267079 - DNA, 258 bp, Glycine max
ggcgacgcagagtgcgcggcggcgtgggacgaggtggaggagctgagcgcggttgtgagccacgccagggagaagcagaagcaatctgacccgctcgagaactactgtaaggacaacccggagaccgatgagtgccgcacctatgataactgaactcatgcatttcaacgtttcaatgtatatctattattctaccttctgttacatcagagacaccatgtattattattattaattaattcttattcatagtaagaa

SEQ ID NO: 267080 - DNA, 371 bp, Glycine max
cgagataactagaaacagtgtgatgaaaatgaaggtccttgttttcttagttgatacaatgatggtagcatggcaatgccatgcgtacgatatgttccctctccgaatgaacactggctttggtgcccgtactccggaggtgaaatgcgcaagttggaggcttgctgtggaagcacacaacatctttggctttgagaccattcctgaagagtgcgttgaagcaacaaaggaatacatccatggcgaacaatatagatcagactgctaaacagttaaccaacaagcttacttttatgccagatacctagaatttcatcttaaggacacattttgtttcagtatagattggattcgtacttttttaatatttc

SEQ ID NO: 267081 - DNA, 425 bp, Glycine max
cccacgcgtccgcccacgcgtccggtgcgatcactcatctcacctcttctcatcaacgctgcgaaagacaatggagctgacaccccagcagctgagccaatacaacggcacggacccatcgaagccgatctacgtggcggtgaagggccgcgtctacgacgtcaccaccggaaaatccttttacggccccggcggcccctacgccatgttcgccggcaaagacgccagcagagccctggcgaagatgagcaagaacgacgacgacatctccccctccctcgacggcctctccgacaaggagatcggcgttctcaacgactgggagaacaaattccaagctaagtaccctgtcgttgctcgcgttctcaattaatcatatgataacctaagtgtattttggactctatcatgtgagtggcatgatc

SEQ ID NO: 267082 - DNA, 351 bp, Glycine max
cttgggactcggtcctcttattcgcgacggacattctcgccgttgtgtgctacatcgcgagcggttgctcgacatcggatagggcggctctgctggccttccagaaggcgctgagcgagcactaccttggactcttcaactcgtggacgggtccaactgctgcctcgactggtacagcattagctgcgacgcctccaccagacgaggaaccgacataaacctgcggggggagtccgtagaccccatcttatagaaagcctgtcggtccggctacatgaccggaaaactctcagaggcgaaactgggtatgtacaccctcaccaccctagtcgtcgctgattggaaagacat

SEQ ID NO: 267083 - DNA, 425 bp, Glycine max
acgccataacctaaatctcctctttgtttacaggtcagagagcgatggcacgtaccaggcaaaccgctccgaagtccaccgggagcaaggcgcctaggaagccattggcgactaaagccgttaggaagtcaggtcctgacaccggcggagtgaaaaatccccaccgcttgaggcccggaatcggggctctgagggagatcaaaaagtaccataatagcactgagcttttcatccaaaaactcgcattccagatgctcgtcggagaaatcgctcaagatttcaaaacagatcttcgattccagagcagcgctgtttctgcgcttcaggaagccgcagaggcttatctcgatggactcttcgaggacaccaacctctgcgctattcacgccaagagagtcaccattatgcccaacgttattcaactt

SEQ ID NO: 267084 - DNA, 391 bp, Glycine max
ggattacaacaacaacaacaacaacgccttatcccactaggtggggtcggctacatggatcaacttccgtcataatgttctatcaggtggaatactatggaagtccagttagcttgaagagcattgctcaaattagcactcctgatgccagttctcttttggtacagccatatgacaaatcaagcttgaaggctatagagaaaaccatagttagctctgatcttggtatgactccaaataatgatggagaatcgatacaattgagaatcccacagttgacatctgataggaggaaggaactatcgaagatagtggctaaacaagctgaagaagggaaggtggctttgaggaatataaggagagatgcattaaaagcttatgataaacttga

SEQ ID NO: 267085 - DNA, 124 bp, Glycine max
atggttaatttttttgttttattatggatggtacacttacttttaattacaatatttgttttaacattatcgtttttgccacttggtgacatgagaaattttgggagttgtgtattgaaatgag

SEQ ID NO: 267086 - DNA, 285 bp, Glycine max
cccacgcgtccggaagaagcctgttgtggagaaagaagctccagggcatgccatatgagggcatgcacgtacggcctcggaggggaaccagaaaattatgttaacaaaataatctggaaccctaatgtatcagtgtcatcatcagtgtgtagtttaagctagctttgctatggttacgttctttgagatgagagtcttgatgaacagtaccattctgatgtattgctttccttgaaagttaatgcatgcttcttatattctgtctaataaaaaaaaaaaataaaa

SEQ ID NO: 267087 - DNA, 407 bp, Glycine max
ccagcgactgacttttcgagaaagaaaaacaaaaatgagtttccggcattccatcatgaacgctcttcccattctcctcttcttcctcttcgtttctgcattagcttctgcgaagaaaactggtgatgtgacggagctgcaaattggcgtgaagcataaaccagtatcatgtgaagttcaggcacacaaaggtgacagagtcaaagtacactatcggggaaaactcactgatggaactgtttttgattctagctttgaaagaaataatccaattgaatttgagcttggtactggtcaagtgatcaaaggttgggaccagggattattgggaatgcgtcttggtgagaagcggaagctgaaaataccatcaaaacttggctatggagagcagggttccccacccacta

SEQ ID NO: 267088 - DNA, 417 bp, Glycine max
ttcttgtctaaaataaaaaaccctaacttctgaacctttcaccggatattcaccgattggctatctccactaatcaaagaaaagaaaatgagtagacgctcgagcagaactgtctacgtcgggaatctacccggtgatatccgtgaaagagaagctgaagatttgtttctgaagtacggacacataacacacatcgacctaaaggttcccccaagaccacctggttatgcatttgtagagtttgaagatgctcaagatgctgaggatgcaattcgtggtcgtgatggctatgattttgatggccaccggttacgggtggagcctgcccatggtgggcgtggtcatttatcctcaaaagatcggcacaatagtcacagcaatggccgaggtggacgtggcgtatctaggcgctctgaa

SEQ ID NO: 267089 - DNA, 415 bp, Glycine max
cccacgcgtccgggcattggagtcgccatacccctgagggtgctaaacttgaagctgagtggaatgccaagtttgcagaatatgagaagaaatacagtgaggaagctgcagagctgaaggctattattactggtgaattaccagctggttgggagaaagcacttccggtgagtaaactaacaaacttccaggtttctcttaatatttattctgggctaaatctccttattagttgaatgatgtctaatccaattttattggtgcccttataatgagaaaaattctgaatggtggtgatttgtttccatgatttgttataatcattagctttcctaattacagttaaaattcatattaagtagcatgtgcattgcatcttcactcatcatccctatttttgcttcatgataaaact

SEQ ID NO: 267090 - DNA, 260 bp, Glycine max
aatcactatagcactagaaacatttgcttttgaaaaacccatgacgcttgattactgcactagctagccacatacaatgtcgaccaaatttaaggtgcttcgtgaattcacaagcgatgactgattgctaaaccaagatatgcctgaaaacatcatcgaattccaagagactctgtatctagctagagactactatggcaacaactgaaccaacggaaaggtcattccttactgggacactgaaaaggtcactcccgaag

SEQ ID NO: 267091 - DNA, 382 bp, Glycine max
ggccatataatttttttttatttgaaataatgtccgggatcatccacaagattgaggagaccctgcatgtgggagggcacaagaaagaggagcacaaaggataacaccatggtgagcacaaaggtgaacacaaaagagaacaccatggtgagcacaaaggtgaacacaaaggagaacaacaccatggggagcacaaggggggaactggggataagatcaaagacaagatccatggtgatggccatgacaagggtgagaaaaagaagaagaaggacaagaagaagaaggagcatggacatgaccatcatggtcatagcagcagcagtgacagtgattagatcttatatgttaagcaggtgtacggtacgatggtagtgaggag

SEQ ID NO: 267092 - DNA, 325 bp, Glycine max
gccttgtgcccattgttgagcctgagattttgactgatggggctcatgacatcggcaaatgtggctgctgttactgaaactgtgcttgcagctgtttacaaggcactcaatgagcagcatgttcttcttgaaggaactcttctcaagcccaacatggttactcccggctctgatagcccaaaggtaccaccagaggtgattgctgagtacacagttcaagcactccgcaggactgtcccagctgcggtgccaggggttgtgtttattgctggtgggcaaattgaagaagaagcttccctcaacctgaatgcaatgaacaagttgg

SEQ ID NO: 267093 - DNA, 180 bp, Glycine max
gaacaagtatcggtgaactaatatggagatgcaaacggctaagtcaatgatctatttgtcggctggagccagtgacaaaagtgccggtgcctgtatggctgctccattaactagcctcaagttcatggttgacatggcgacctgaaagaccaacggtgaccttacctgcattggtagcaa

SEQ ID NO: 267094 - DNA, 232 bp, Glycine max
cccacgcgtccggtggtggtggtttaggaggtggctatggaggaggagctggaggtgatagtggtttatgtggtggatatggaggaggagctgtaagtggtggagttggaggacttggaggtggtagtggtctaagtggtggaattgggggaggcatttacaaaggaattggtattggtggaggcatttacaaaggaattggatttggtggggttggtggtggcttacgtgc

SEQ ID NO: 267095 - DNA, 419 bp, Glycine max
cccacgcgtccgtaaaaacgtgtatttgtattcatccatccctaggcactccatttggcgatttcattccatttgtaacctctctctctcccttcactacacttcattcattcattcaccagtcagaggcagaggccagagagtgtggtgtgtgtgtgtgtctctctctttctctgcttttgagtaattaaatgagagcaaaaatgacgctcaaaacagcggcggtggctgtggctatagtgtgcatttctgcctttagcatcactgtggtggctgaagatccatacaggttcttcaactggaatgttacatacggagacatttatccacttggtgttcgccaacagggaatacttatcaacggtcaattcccaggtccagacattcattctgttaccaacgacaacctcatcatcaat

SEQ ID NO: 267096 - DNA, 384 bp, Glycine max
ttcttaattcttaaatcttaatttcttacacacacacacactcttactctggtatgtatataccgcaaccactcgcgtcgtcactgtcacagtcaaaggccaaggcagaaccctaaattgtctcacactttcgtaggaatccgattttggctttttccgtgacaagatgccggcgaatgacgacggctccgacaaggagaagtgccttgatctctttctgaaaatcggcttatacgagcgcaccgctaaaaacaccggcgcaaacaacaaagtcaccgccaatcttactgcagtcatctacgaagccggtgttattgatggatgcagccgaacggttggaaatcttctttacacgggtgcaacgaaataccctgcaaatgcctt

SEQ ID NO: 267097 - DNA, 397 bp, Glycine max
cccacgcgtccgtacgaatttccagaatacaaattcacactctctttggctctggtgttgtgttgtgttgaggtacttgagaagagaaaatggtgtcgtcgcaggttgtgaatacgtacccgttgtcgagctacacgttcggcacgaaggagcccaagatggagaaggatacctccgtcgcggatcgtctcgctcgcatgaaagtcaactatatgaaggagggaatgaggaccagtgtggaaggaattttactggtacaagagcacaatcatcctcatatacttcttctgcaaattggaaacacattctgcaaactcccaggtggtcgtctcaaaccaggagagaatgaaaatgagggcttgaagagaaagttgactagcaagcttggtgctaattc

SEQ ID NO: 267098 - DNA, 411 bp, Glycine max
cccacgcgtccgggattgtgatactggatataaccaaggatgcaatggaggacttatggactatgcatttgagttcataatcaacaatggcggcattgattctgatgaggattacccataccgtggtgttgatggtagatgcgacacatataggaaaaatgctaaagtcgtttctattgatgactacgaagatgttcctgcctatgatgagttagccttgaaaaaggccgttgcaaatcagcccgtgagcgttgctattgaaggagggggcagggaatttcaattatatgtatctggtgtattcacggggagatgtggcacagcactagatcatggtgtcgtggctgttgggtatggaacagctaaaggtcatgattattgcatcggaaagaattcatggggttctagctg

SEQ ID NO: 267099 - DNA, 385 bp, Glycine max
gacgtagttgagaactaagaagaaggaaatggcttgctcaatgatcttctccggagctgttaccaccgtcatccgggccggcgccggcatggttgctacattcaccggcctcaaattcatggctggcttccccaccaggaagaccaacaatgacattacctgcattgctagcaacggtggaagagtacactgcatgcaggtgtggccaccaattggcaacaagaagctcgagactctttcctacttgccagacctcgatgatgcccaattggcaaatgaaagtctataccttctaatgaaaggatggattacctgcttggaattcgagttggagcacggtttcttgttccgtgagcacaacaagtcaactggatactatgatgga

SEQ ID NO: 267100 - DNA, 396 bp, Glycine max
ccacgcgtgcggcgactttctatttctccctcaacacaacacgagacaacatgttcctctttggcgggggctatggcattctcgctgtccctcggtctctggcagaaagaagccaaaattctcttccttggtctcgataatgccggcaaaaccaccctccttcacatgctcaaagacgagagattagttcaggaccagccgacccagcaccccacttcggaggaattgagcattgggaagatcaagtttaaggctttcgatttggggggccatcaagttgctcgcagggtctggaaagactattatgccaaggtggatgctgttgtgtacctgggtgacgcctttgacaaagagaggttcgcagaatctaagaaggagctcgatgccttgctttca

SEQ ID NO: 267101 - DNA, 404 bp, Glycine max
gttttcgctcaccggtgtgcagtcgagcccccgaagaaaaagcgaaaatgccgtcgcacaagacattcagaatcaagaagaagttggcgaagaagatgaggcagaacaggcctatcccctactggatccgcatgaggaccgacaacaccatcaggtacaacgcgaagcgccgtcactggcgtcgcaccaagcttggattctgaggtgcttgctttgcctcggttctgtttatccaattaattagtgttttattttcttgagccaaaaacaatgctttggagattttaatattttgcattttgttccaagactatattgtgtaaggaacttattgtagttcagactaatggtggtgttggtcacctttttttaaaagtatttttggaattctttgccgttggttt

SEQ ID NO: 267102 - DNA, 387 bp, Glycine max
aatggctcccaagggtttaacctttctggctgtgttaatatgcgtttcagcactgtcactgagtccttctgttgcgggggaagggcaaaataatggccttgttatgaacttctacaaggaatcatgccctcaggctgaagacatcatcacagaacaagtcaagcttctctacaagcgccacaagaacactgctttctcctggctcaggaacatcttccatgactgtgctgttcagagctgtgatgcttcactgttgctggactccacaagaaggagcttgtctgagaaggaaacagatagaagctttgggttgagaaatttcaggtacattgagaccatcaaagaagctttggaaagagaatgccctggagttgcttcatgtgctga

SEQ ID NO: 267103 - DNA, 352 bp, Glycine max
ctttggatctctggaatctttgcacaatactgtccacagctggaccggtgaattagaaaaacctaaccacgacatggggttgttggctacggctgcaagagatcccattttctttgctcaccattcaaacgtcgataggatgtggaacatatggaagacagaattgctggatggaagaagatttgatcacaaaagtgacgaatggttggaatccagtttcttcttctacgacgagaacagtaactatgtgcgtgtgaaggtcaaagactgcctcgactccaagaagatggggtatgattaccaacgtgttgaccttccatggctgttggctggggaactcatcaaaccaaag

SEQ ID NO: 267104 - DNA, 423 bp, Glycine max
cccacgcgttcgcccacgcgtccgggaaagtgagtgagagaaagagatcacatagcagaatggcttctactcaatgtttcttgcaccaccatgctcttaccacccctgccagatccccatcacaacgcatcatggttagcaccaagcctaaccagcttgtttgcaaggcacagaagcaagaggatattgatgtcagcccaatctctcgccggttagctctaaccgtgctcattggtgctgctgctgttggctccaaagtccaacctgctgatgcagcttatggggaagctgccaatgtgtttggaaagccaaagacagacacagatttcctgccatacaatggagatggattcaaactatcgattccctcaaagtggaacccaagcaaagaggttgagtacacaagtcacgtgtgtagatatg

SEQ ID NO: 267105 - DNA, 408 bp, Glycine max
cccacgcgtccgccgattgctagaatggaatttcgatgctcagtcatctcttgtaccattctcttctctcttggtcttgcaggagagagccatgtccatgcatcgctacctgaggaagattattgggaagctgtttggccaaacactcccattcccactgcactgcgagagcttctaaagcctctccctgcaggtgttgaaatcgatgaactccctaagcaaattgatgatacacagtacccaaaaacattcttctataaagaagaccttcatccaggcaaaacaatgaaagtacaattcaccaagcgtgcctatgcacaaccttatggcgtatatacatggttaacggatattaaagacacctctaaagaaggatatagttttgaagagatatgcatcaagaaagaa

SEQ ID NO: 267106 - DNA, 428 bp, Glycine max
cccacgcgtccgctctcccacaaaacaaagtgcacgttgcacctgcaatttataattaacttgtgcaatggcaaagcctagagttgatgctgagtatctgaaggaaatcgagaaggctcgtcgtgaccttcgcgctcttatctccaacagaaactgcgcccctctcatgcttcgattagcgtggcatgatgctggtacttacgatgctaaaacaaacacaggaggccctaatggttctatcagaaacagacaagagttgaatcacgcagcaaacaagggactggaaacagcacttgccttctgtgaggaagtgaaggccaaacatccaaaaatttcatatgccgacctttaccaactagctggtggtggtgcagtagaagttaccggggggccaactattaactttggtcccgggagaaaagaatcat

SEQ ID NO: 267107 - DNA, 381 bp, Glycine max
cccacgcgtccgttgacatatatgttccaggctgtcctccaactgctgaggctttgctgtatggactcctccagctgcagaaaaagatcaataggcgcaaagacttcctccactggtggacaaagtgaggtcgattcggtttattttcttggcatcgaagctattttataataagcaattacatggtagtttaccttgctaagaagcactcatgttagatggagattgtgtccgtacaatactttgtcacagtttctgaatgctttatgtgctgctgcttttacggggcttcaggcccatttgaagttgaataatggatggttattggtatctgtcaatgcttaatctgcacctgagagtgtaaacaatttctgaatgact

SEQ ID NO: 267108 - DNA, 271 bp, Glycine max
ccccaaaattttctctgaataagaagcaacaatgtctggtcgctgaaagggttgcaagggtttgggaaagggtggagcaaagaggcatcgcatggtgctccgttgcaacatccagggaattacgaaacccgcgattcggaggctagccagaagaggcggcgtgaaaagaatcagcggctcgatctacgaggaaaccagtggtgtgctcaagatcttcctcgagaacgtcattcgcgacgccgtcaactacaccgagcacgctaggagaaag

SEQ ID NO: 267109 - DNA, 269 bp, Glycine max
gttcggattgcggcgacgtgagcggttcgctgcccgcgacgttgtgagaagtccactgaagcttatcatttagaggaagagaagtagatgatacaatataggcgtctttttgttgggtgatctgtattattatcattattcatattcttatgtaacaaattcattattattcctcattgtactttctttatatgggttgtgacaatgtaatcttattgtgatttgtttggttccctggtttgtctcgcatttatggttgagctttagct

SEQ ID NO: 267110 - DNA, 411 bp, Glycine max
gtgaagagttggttgaagcttccgctaccctcatatggattgcttcagctcttcatgctgctgttaactttggacagtatccatatggaggtttaatcctgaataggccaactattagcaggagattcatgcctgagaaagggtctcctgaatatgatgcgttagctaagaaccctgagaaggagtttttgaagactattactggcaagaaagagaccctcattgaccttacaattatagaaattttatcaaggcacgcatctgatgagttctaccttgggcagagagatggcggtgactactggacttctgatgccgggccattagaggcctttaagaggttgggaaagaatcttgaagagattggaaagaagcttattgagaagaacaataatgagacattgagaaacc

SEQ ID NO: 267111 - DNA, 431 bp, Glycine max
cccacgcgtccgtccacgcgttcggttactggcaaaggcttatgttgttgtgggtgaggcatgctaccatcagggcattagccattggctaagcactcatgcaattgttgagccatttgtcatagcatcaaacaggcaactgagtgtggttcaccctatttacaaacttctgtttcctcactaccgtgacaccatgaatattaattcacttgcccggaaagccctggtcaatgcagatggtattatagagaaaacattcttgtggggtaggtactctatcgaaatgtccgctgtcatttacaaggactggctgttcactgatcaagcattacctaatgatctttgtaagagaggaggtgctgttatagacccatctgctaaccatggaggtccgcttttgcttgaggactatccttatgccgctgaagggc

SEQ ID NO: 267112 - DNA, 279 bp, Glycine max
tcgctaggtcttcaatcgaactcgccaggaacggaactttctcagattgacacacaccatgaaggaaagtggtttcgagaataatgatacaaagcaagctgctgctgatgtgttgcttctatattcaaaatttgcaatggcatgcattggatgtaaggctcgtccatgtgatttgaggtttcatttgatgaaggagatttcaggtatgccctcttctctaaatagggagtcaccacagaatgcagcatctcctgatgcaatgggtgagtcattcagcac

SEQ ID NO: 267113 - DNA, 320 bp, Glycine max
cccacgcgtccgagaggccaaaatatccattgcacctttctctttctccgatggctaatccctcactcttggtcttcagtctcctcctattatccgccaccgtagccgccgccgaacggatcgacgatgaagacgaccttctgatccgtcaagtggtgccggatgcggaggaccaccacctgctcaacgcggagcaccacctctccgccttcaagacaaagttcggcaagacctacgccacgcaggatgagcacgaccaccgcttccgtatcttcaagaacaacttgctccgcgccaagtcacaccagaaattggatccc

SEQ ID NO: 267114 - DNA, 304 bp, Glycine max
cccacgcgtccgcccacgcgtccgtgaaggtggaggcctggttcggttctcggaaaacatgcgccgccattcgcaccgccctgagccacgtggagaatctgatcaccggcgtcaccaatggctaccgctacaaaatgaggttcgtttatgcccattttcccatcaacgcaagcatcggcaacgacaacaagtctattgagatcagaaatttccttggcgaaaagaaggtgagaaaagtggaccttcttaacggtgtttacggtgttcgatctgaaaaaagtaaagatgaattgattttggatgg

SEQ ID NO: 267115 - DNA, 282 bp, Glycine max
tccacgcgtccgctgagagggttgagagaccggagacctataagcagtggcaggttaggaaccagagagctgggttcaagcaagtccgttttgatcctcagctggtgaatcatgaaaaggaaatggtgaagaaggaatatcacaaagattttgtagtggctgaggatggcaagtgggttttgctggggtggaaagggcgtattctgaatgccatttctgcttggactcctgcttaagcattgtccagaaagtgtcttgtaactagtaactagttatctactc

SEQ ID NO: 267116 - DNA, 375 bp, Glycine max
aacttgggaaattcgaatgaacattattctgggaacggctaaaggattaacttatcttcacgaggggttagaaccaaaagttgttcaccgtgatattaaatcaagcaacattttgctcagtaagaagtggaatgcgaaggtttcagactttggcctcgcaaaactccttggctctgacagcagctatatcacaacccgtgtcatgggtacatttggatatgttgctcctgaatacgcgagtactggcatgttgaatgaacggagtgatgtttatagttttggaattcttattatggaactaattacaggaaggaatccggttgattatagtcggcctccagaagaggtgaatttggtagactggctcaagaagat

SEQ ID NO: 267117 - DNA, 403 bp, Glycine max
caaccgagtaaaagaaaaggctgtgtccgttactccggagtggaagatggctactgcgccgggaaatcaaatgctggagggcggaggacgagctcctcaatctacgggtacagacatgaccggaatatgctttcgggatcagctatggctcaatagcttacctctggatcgcatcttggtcttcgattacttagcactcttcactttctacgactggacctgcaacaacgagcagctgcgcatgcgcttcgttcacccactcgacatctctcaactctcgaaaatgactgagacggagcatatgctcagcgaagttatggagccgcacctgtttgtcattcgcaagctgaatagagatagacccgacaaagttacacctatgctcgcgtattacgtactcgat

SEQ ID NO: 267118 - DNA, 349 bp, Glycine max
gtcccaaagagctaacaagagattcaagaccggcatggctaatgaagaggcacagaagcaccacctcttcggcatcaaagatctcggtcacaagactctccttcagagcgatgcactctatcagtatatacttgaaaccagtgtctatccaagagagcacgagtgcttgaaagagatacgcatgatgactgcaaaacacccactgaacatcatggcgacaccagcagacgaaggacaacttctgagcatgcttgttaagctcacgaattcaaagaacgccttggaaatcggtgactgcactggttactctctgctctccactgccctggctcttccccctgatggaaag

SEQ ID NO: 267119 - DNA, 220 bp, Glycine max
aaaaaaaaaaaagcaaaagaaaaaaaaaaaaaaaaaaaaaagaaaaaatgagaagaaagtgaataggaatataaaaagaagaatagtgtaattaagataatgagaaaagctagaaaaatgacatatataaaaagtagtgtaaattaaatacagtggcgacagaattacaataacggaactgggaaaaccccgacactaccaaactcattacactaaaagc

SEQ ID NO: 267120 - DNA, 390 bp, Glycine max
cccacgcgtccgcccacgcgtccgtacattgcaaaaatggcatcattcaccatgacagcttccatccttggcagcccagccgtcaccaaccggtcggcagtagcaacgcagaggagatcactcgtagtgaatgctgccaaagctgttgaagcagaaaaggtcagttatgacaatgacatggatggtagcaatggaaggaggaacttgatgttcgccgcggcggcggctgctgtttgctctgttgctgggatggcagtggcagatgagcctaaaccaggaaccccagaagccaagaaaaagtatgctccgatttgtgtcaccatgccaactgctaggatttgtcgcaattgagggactttggtttttattttacttctgatgattggaaat

SEQ ID NO: 267121 - DNA, 411 bp, Glycine max
cctaaacgtacgtttattctctctatgtgtgcgctcttgaacggaatccacatgcaggcatggacactgcaaggactgtgaaggatgtttcacctcatgagttcgctaaggcgtactcctctcacctcaagcgatccggcaagatggagctgccatagtggactgatattgtgaacactgctagatttaaggagttggctacttatgatcctgactggtactatgtcagagctgcttccatggcatgaaagatctactcgagaggaggacttggagttggtgcctttcagaggatttatggtgcgagcaagaggaatggtagtcgccctgctcatttttgcaagagcagtggtgccattgctcgtcacattcttcaacaagtgcagaacatgaacatcattgaactggaca

SEQ ID NO: 267122 - DNA, 410 bp, Glycine max
cccacgcgtccgcccacgcgtccggctagctagttcacagcttcagttcgtttttgttgatcctgtgaacttatggctgacggggtggttctgttggatacatgggccagcatgtttgggatgagggttaggattgcattagctgaaaagggtgttgagtatgaatacaaggaagaaaatctcaggaacaagagtcctttgcttttgcaaatgaacccaattcacaagaaaattccagttctgatccataatggcataccaatttgtgaatctgcaattatagtgcagtacattgatgaggtctggaatgataaagctccaatcttgccctctgacccttatgagagagctcaagccagattctgggtagattacattgacaaaaaggtgtatgacacttggaagaaaat

SEQ ID NO: 267123 - DNA, 392 bp, Glycine max
cccacgcgtccgcccacgcgtccgcccacgcgtccgaaacgccgcagtctcttctctgtcagaaaccctaatggcagagcgcggaggtggcgaacgtggcggcgaccgtggcggtttcggacgcggcttcggcgggcgagggcgcggaggcgacaggggccgcggccggcgtagaggtccccgccgcgaggaggaggagaagtgggtcccggtgactaagctgggacgcctggtgaaggaaggaagaatccgaagcctggagcagatctacctccactcgctgcccatcaaagagcaccagatcatcgacacgctggtgggccccaccctgaaggacgaggtgatgaagatcacgccggttcagaagcagacccgggccgggcagagaaccc

SEQ ID NO: 267124 - DNA, 271 bp, Glycine max
  unsure (1)..(271): unsure at all n locations
ctgaaatgagacgattttgaaacggtgcattgcaagtcagccagtggttgtatttattgcaacagtcgacgatgaatttcaatattatgaattatatatataataagtgaaatgcggnatataagtaaatcatgctgtcctgcttgtggcgtatggtacagaaaatggtgaagattattggatagcaaagaattcatatagtgataaatggggagataatggctatatcagaataaaaagaaaactgagcacttgtaaatttttaatcgag

SEQ ID NO: 267125 - DNA, 267 bp, Glycine max
  unsure (1)..(267): unsure at all n locations
cccacgcgtccgcttaactctcagttctgccacatattaacattccggcgcaaaatgaaggtcatcgccgcctacttgctcgccgttttgggaggcaacgcagccccttccgccgatgacttgagggacatccttggctccgttggagctgacgcgaacgatgacaacatcagcaacttcttgtctgaagttaagggcaaagacattgtggagcttatcgcctccggtagggaaaagctggcctncgtgccttctggcggtggcgcc

SEQ ID NO: 267126 - DNA, 423 bp, Glycine max
gagggaggcatgagattccgacggaagtgattgaggtgaagcaagaagagttgattaagaatcggccaagagaggatcaggtcaagctaactgggattgcattcggacccacttatcagcctgcttcgacaaaggggaagcctacaaagctgcacaagaggaaacatcaaattggttcattgtactttgatatgaaacaaaatgaaatgaaacttgctgagcggcgtgtaaagggcatgcttaccaaagctgaaacacaagcgaaatatggatggtgatttgagatgatgatattggaaatacttacattgaaacgtgaaaaagcaaagtcgaagttttcatatttagttgcaatccttgtgtttcactgttctgtgtacatttgctccgtctttaagtgcaaattatggatttctattctta

SEQ ID NO: 267127 - DNA, 398 bp, Glycine max
cagaaatcagttgaagagcatgggtcgtggagttagcagtggtggtggtcaaagttcattgggttatctttttggcagtggagaggcccctgccccaaaaccagcaacaaataatgccccatcccaacctgaagtgcaggctgtaaataatgtgcctcctccaaaagcatctcctcctactaaaacaatagaccctaacaaggctgctggtatcaacagtcattctactgatggccagaacaccggcaacttcatcacggaccgaccctcaaccaaggtccatgctgcccctggtggtggttcttccctaggttatctctttggtgaacctggggaggggaaatgataccttgtttgcaaagcttttgctcgatgatgaatgatttattttgaaattc

SEQ ID NO: 267128 - DNA, 371 bp, Glycine max
cccacgcgtccgcttaatgttgttaagaaggcagagaatcttatgctggagagaggggataacaaagagtatctcccaattgagggtttggcagcatttaataaggcaactgcagagttgttactcggagcagacaacccagcaatcaaacagcaaagagttgccactgtccaaggtctttctggaactggttctctgcgactaggtgcagctctgatagagcgatattttcctggggcaaaagttttgatatcagctcctacctggggtaatcacaagaatattttcaatgatgctagtgtcccatggtctgagtaccgatattatgatcccaagacagttgggttggattttgagggcatgattgaaga

SEQ ID NO: 267129 - DNA, 421 bp, Glycine max
cccacgcgtccgaaaaaaaaagatatgaagcttcacagaaacgctataagctgcctataagtttcttgtttgattagaatggagccccaacacttctccatctacaatcttagaaacctttattcgaagttctgatggctgtgcgatcatcctcctacgatgtgttcctcagcttccgaggggaagatactcgtcgtggtttcactggcaatctctacaatgtcctccgggaaaggggaattgacaccttcattgatgacgaggagctccagaaagggcacgaaatcacaaaagcacttgaggaggcaattgagaagtccaagattttcatcatcgtgctctctaaaaactacgcatcttcctccttttgcttaaacgaactcactcacatccttaactttactaaggggaagagtgatcg

SEQ ID NO: 267130 - DNA, 367 bp, Glycine max
  unsure (1)..(367): unsure at all n locations
gcaagttgcaacttttgacgttttgattttgttgtatagaacaacatggtgttactcgctcactgagttgagttcactggttacacaatgtcgaagagagaagaatttgctccgtggcacttcttttttcttcttcttcttctatgggggtttgtcggcggcgatgcgccggggagggaggtgtggtgcgtggcgaagaacaactcggaggacacggcgctgcaatcggcggaggagtgggcttgcggcgcatgctgatccgattgcggagcgattcatggaggaggaccctgcttcgacccttccagtatgcagaatacggcgtcgtatgctttcaatgattatttncgtaaacacgctatctctg

SEQ ID NO: 267131 - DNA, 390 bp, Glycine max
ctcaatcatccatagacatggccaccgtcacttctgcagcagtttctattccctcattcactggcctcaaggcaagcgcaggcaaagtgagtgccgccgcagttaaagtctcagctccccaagccacaaggttctgcggcatcaaggcttccctcaaagacgttggagtcgctgttgtggccactgctgcgagcgcagttctagctagcaacgccatggccattgaagtgttactgggcactgatgacgggtctctggttttctctcccaactctttctccgtggcccctggggaaaagatcgtgttcaagaacatcgcagggttcccccacaatcgtgtgttcgacgaggactagattcctagcggcgtggatgcagggaaaatctcca

SEQ ID NO: 267132 - DNA, 332 bp, Glycine max
agaacaagtagttgagaactaagaaggagaagcaaatggcttgctcaatgatctcttccccagctgttaccactgtcaaccgtgccggtgccggcatggttgctccattcactggcctgaagtccatggctggcttccccaccagaaagaccaacaatgacattacctccattgctagcaacggtggaagagtgcaatgcatgcaggtgtggccaccagttggcaagaagaagtttgagactctttcctacctgccagaccgtgatgatgcacaattggcaaaggaagtagaataccttcttaggaagggattggttccttgcttggaattc

SEQ ID NO: 267133 - DNA, 305 bp, Glycine max
cccacgcgtccgcccacgcgtccgagatgctacaggattggtagttaaaggggatctcgatgttcattcagtttatgctacttctctccctacttcacatccaagtttctcacctcaaagggtactggaaatgtcggagacctggaaagccagtgctctacctaaacatgctgttaaactttttattggagttctttctgcttcaaatcactttgcagaacgtatggcagttcgaaaaacatggatgcaagcagctgcaatcaagtcttcagatgtagtagtgcgattctttgttgcattgaatc

SEQ ID NO: 267134 - DNA, 289 bp, Glycine max
ctgaaaatgagggaaagttccactcattccacccagttgcgaccatcctcagttacctgaccaaggcccctatggttccaccgagtacgccagtggttaatgcactgtcaaagcagcgagctatgctggaaaacatcctaagggcttgagttggattagctcctgagaacaacatgatcctggagtacaagtgaaggtcaaagtcttaagagtaatgggttgggatacctggagtgaatgaaatcaaaacttaacttatattccatacccttttttctggtaaaaatta

SEQ ID NO: 267135 - DNA, 120 bp, Glycine max
tgaacttcaagcatggtggaaggaagttgtggagaagggtcatggtgacttagaagatgagccttggtggcctaaactgcagactgtggaagatctcattcaatcctgctctattatcat

SEQ ID NO: 267136 - DNA, 347 bp, Glycine max
agaagaccgttcaagtgttttgatattggtttgggacgaggagtaagttaatttgtgtggcgtttccattaaaacggcgtcgtaatcatacgttggtattcagacagcatgaaaactccgatttcgggtttctacagaaaccccgtgaagttcagaatgccaactgcggagaacttggttcccattcgattggacatcgaaatcgaggggcagagatacaaggacgcgttcacttggaacccttctgatcccgattccgaggttgtcgtctttgcaaaaaggactgttaaagacttgaagctccctaccgcctttgtaacacaaattgctcaatcaattcaatcaca

SEQ ID NO: 267137 - DNA, 323 bp, Glycine max
tcgcgagataactagaaacagtgtgatgaaaatgaaggtccttgttttctttgttgctacaattttggtagcatggcaatgccatgcgtacgatatgttccttatgctaatgaacactgtctatggtgcccgtactccggaggtgaaatgcgcaagttggaggcttgctgtggaagcacacaacatctttggctttgagaccattcctgaagagtgcgttgaagcaacaaaggaatacatccatggcgaacaatatagatcatgctccaaaacaatttaccaacatgcttactgttatgccagagacttttaagtgttttccc

SEQ ID NO: 267138 - DNA, 283 bp, Glycine max
acaaaggaattagtttctggatccatcttgcataagctttgttgatggtgatgatgagtttcgaaacagcaggtttaagctcataccatcagtcccaaatggctcatggattgtacgccagagtgttggtagtactccttgtttactgggaaaggcggttgattgcaactatattcggggtcccaagtatttagaaattgatgttgatattggttcttctactgttgctaatggagttttgggtctggttattggtgtgattacaacattggaggttgatatg

SEQ ID NO: 267139 - DNA, 316 bp, Glycine max
cccacgcgtccgcccacgcgtccgggaggcgcagagtagagcagcagagaagagagaaaacggcactgcagccgtagaaggaaaaccgaccatggtgcacgtctccttttacaggaactatggtaagacgtttaagaagccccgccgtccgtacgagaaggagcgtctagacgcggagctgaagctggtgggggagtacgggctgcggtgcaagagggagctgtggagggtgcagtacgcgctcagccgcatccgcaacaacgcgcggaatctccttaccctcgacgagaagaacccgcgccggatcttcgagggc

SEQ ID NO: 267140 - DNA, 305 bp, Glycine max
ggcattcttaagctccttagtgctgctccttgcagctctaattctataccctcaagtggtcgcaaactatgacaatcccccagtgtacaagactgccactgagaaaccaccaggttataagcgccccacttgagaagcctcctgtctacacacctacagttgacaacctcacaatttatatgcctctcagtagagaagccaccagtgtacaagcccacagttgtgaaacccgcagtttataagctcacacttgtgaaaccacccgcgtacaagctcccagctgataaaccaccagtgtacaaccc

SEQ ID NO: 267141 - DNA, 443 bp, Glycine max
  unsure (1)..(443): unsure at all n locations
cccacgcgtccgatttcatcaagcctgccatggcttcctcgtgtgcttcctctgccattgcagctgttgccatctccacaccaagttcccagaagaatggatcactcttgggaagcacaaaagcttcttttcttagtgggaggaaactgaaggtgaacagttttacagcaccagttggagcacgatccagcactacagtgtgtgcagttgctgagcctgataggcctctgtggttcccaggcagcacccctcctccgtggctagatggcagtttgccaggagattttggctttgatcccctaggtcttggatctgatcctgagagcctgagatggaatgtccaagcagagcttgtgcactgcagatgggccatgttgggagctgctggcattntcatcccagaattcctcacanagattggtatcctgaacaccccttcatgg

SEQ ID NO: 267142 - DNA, 306 bp, Glycine max
tcgcgaaaaagaagaataaaaaaagcatagaaaatcctgtttcccgataaaaactgcgagcgtacatggtctggtcacgcggatcgggttgattgagatgcacaccgcgagcaggagcaacagtggcggcggcggcgtgctggcgtcgcggacgagttcgcggtcggtgacggagacggtgaacgggtcgcacaagttcgtgataaagggatactcgctggcgaaggggatcggagtcggaaaacacatcgcgagcgagacgtttacggtaggaggtggccagtggacgatatacttttaccctga

SEQ ID NO: 267143 - DNA, 395 bp, Glycine max
tcggctccgcaaagctagaaagggaagcaccagcaggtgagaagccagaaccagtgcgcacccatctccgcaacatgattattgtgcctgagatgattggtagcatgattggagtctacaacggcaagactttcaatcaggttgaaatcaaacccgagatgattggccattatctcgctgagttctctatttcatataaacccgtcaagcatggtaggcctggtattggtgccactcactcttccaggttcattcctctcaagtgaaagccttaccgagactcttgtcagattttgtttttatttaagcattttattattgacttgtctgtcggtcatgacttgattccatgggatcagcattttatagaggttttggattgtgcaacttcgata

SEQ ID NO: 267144 - DNA, 253 bp, Glycine max
ctagctgttgcaaatttctactattttttaatggcttctgcagatgttgagttctgttgctttgttggtggtcttgctttggtcacctgcaacgatgccttggagaaagccttttcaatctacggcgacatcgttgaatcgaaggttatcaacgaccgtgagactggaaggtccagaggattcggatttgtgaccttcgcctcagagcagtcaatgaaagatgcgatcgcaggaatgaacggtcttgaccttg

SEQ ID NO: 267145 - DNA, 394 bp, Glycine max
ctctgagtaccaaaagcttttgcagaggctatatgatttgggagcacgcagagttcttgtgacaggcacaggacccttgggttgtgttccatcagaattggcccaacgtggtagaaatggacaatgtgctcctgaactacaacaagctgcagcactcttcaacccacaactcgaacaaatgttacttcaactcaaccgcaaaattgcaactgacgttttcattgctgcaaacactggaaaagctcacaacgacttcgttactaacccccaacaattcggatttgttacatcacaggtagcttgttgtggacaaggaccttacaatggtattgggctatgcacagcactcttcaacctttgctccaacagagagcagtatgcattttgggatgca

SEQ ID NO: 267146 - DNA, 218 bp, Glycine max
gtaagactttgtcattgaggtgctgcattggcttcaagtcaggaagaggtgagtctctcgggagtaattggaagcccatttgcttgcagggtgaagattgcccttaagttgaagggagttgaatacaaatatgtggaagaaaatctggccaacaagagtgacttgcttctcaaattcaacccagttcacaagagagttccagtgtttattcacaatga

SEQ ID NO: 267147 - DNA, 398 bp, Glycine max
  unsure (1)..(398): unsure at all n locations
cccacgcgtccgcttcctcaccgattgctagaatggaatttcgatgctcaggcgatctggtttaccattctcttctctcttgctcttgcaggagagagccatgtccatgcatcgctacctgaggaagattattgggaagctgtttggccaaacactcccattcccactgcactgcgagagcttctaaagcctctccctgcaggtgttgaaatcgatgaactccctaagcaaattgatgatacacagtacccaaaaacattcttctataaagaagaccttcatccaggcaaaacaatgaaagtacaattcaccaagcgtncctatgcacaaccttatggtgtatatacatgggtaacggatattaaagacacctctaaagaaggatatacgtttgaaga

SEQ ID NO: 267148 - DNA, 445 bp, Glycine max
atggccaccgtcacttctgcagccgttgctattccctcattcactggcctcaaggcaagcgcaggcaaagtgagtgccgcagttaaagtctcagctccccaagccacaaggttgggcatcaaggcttcgctgaaagacgttggagtcgctgttgtggccactgccgcgagtgcagtgctggctagcaacgccatggccattgaagtgttgctgggtggtgatgacgggtctctggctttcgttcccaacaatttctccgtggcctctggggagaagatcgtgttcaagaacaacgcaggtttcccccacaacgttgtgttcgacgaggacgagattcctagcggcgtggatgcagggaaaatctccatgagcgatgaagaccttctcaatgcgcctggtgagacttacagcgttactttggatgctaaggggacctacagtttct

SEQ ID NO: 267149 - DNA, 398 bp, Glycine max
acgcaacttttgataatacatattacaggttgatccttcaacagaaaggcttgttgtcttctgatcaagttttgcttgacaacccagacactaaaaatctggttacaaaagttgccacctcaaaaaaggctttttatgaggcttttgcgaagtccatgatcagaatgagtagcatcaatggtggacaggaggttagaaaggactgcagaatgatcaattaataagtcttaaatcaattcaagttaaattgatgttccaaacaagttggatcaaattttctagatgccaagaatattatgtctttttcctctattagataaatatgtatatttatctgaaggtaataaaatctcaagcaatgtttgggaaattaatttagatgtcagtgacaaaatata

SEQ ID NO: 267150 - DNA, 347 bp, Glycine max
  unsure (1)..(347): unsure at all n locations
cgcaaggagatctgcaaatacctcttccaagagggagtttgctttgcgaagaaggacttcaatttggcgaagcaccctgagattgacgtgccgaatctgcaggtgattaagctgatgcagagtttcaagtctcgcgagtatgtgagggagacttttgcttggatgcactattactggttcctcaccaacgatggaatcgagtttctcagaacttaccttaaccttccttccgaaattgtccctgctactttgaagaaacaggccaagccacctggcaggccctttggcgggccatccggtgatcgccctangggtccaccacgctttgaaggggagcgtaggtttgg

SEQ ID NO: 267151 - DNA, 391 bp, Glycine max
caagtagttgagaactaagaagaaggaaatggcttcctcaatgatctcctccccagctgttaccaccgtcaaccgtgccggtgccggcatggttgctccattcaccggcctcaaatccatggctggcttccccacgaggaagaccaacaatgacattacctccattgctagcaatggtggaagagtacaatgcatgcacgtgtggccaccaattggcaagaagaagttcgagactctttcctacttgccagacctcgatgatgcccaattggcaaaggaagtcgaataccttctaaggaaaggatggattccttgcttgaaatcgaagtggagcacggtttcgtgtaccgtgagcacaacaggtcccctggatactatgaatgacgctact

SEQ ID NO: 267152 - DNA, 338 bp, Glycine max
attcattcaagattcagcaagtgcgttttggaagcagagaccgaaatacttcgagatggcccgtacaaagcaaactgctcgtaagtcaactggaggaaaagctcccaggaagcagcttgcaaccaaggctgcacgtaagtctgcaccaacaactggtggtgtgaagaagcctcatcgttatcgacctggaactgttgctcttcgtgagattaggaaataccagaagagcactgagctcctaatcaggaagcttcctttccagaggttggttcgtgaaattgcccaagatttcaagactgatctgcgttttcagagccatgctgtgcttgcattgcaag

SEQ ID NO: 267153 - DNA, 382 bp, Glycine max
caaattctctgtgttgtgttgtgtacttgtgttaattgtgttgttgttgtaggaaatttaagtgaagagagaatgatgatgaagtctgctatgtgtgcattggtgcttgtggcactggttgtggttgaagtggggcccatggctgaggctgcggtgacttgcaacccaacacagttgactccttgtcttacggcaattaattcaggttctgcaccttcgagtgcttgttgccagaagctgaaggagcaaaagccatgcttctgtggctacctcaaaaaccctagcttgaagcagtatgttaactctcctaatgccaaaaaaacccgttagttcttgtggtattgcctattcaacttggtaagcacctcttatatatatatat

SEQ ID NO: 267154 - DNA, 430 bp, Glycine max
  unsure (1)..(430): unsure at all n locations
atcgatctcccgcgcaactcttgtgcaaaagcgggtctcatctcccgttcttggtttgccagcaatgggtaaggtgggaagagtgagttgctccatggaggaaaaaccttattctgtgaaggaaagcagctctagcatgttggggatgggggcatctctgatggcagctgccagcgctgcagccatgtcaggcccagccatggccttggtagatgagagactgagcactgaaggaaccggacttccctttggcctcagcaacaatcttcttggttggatccttttcggcgtctttggtcttatctggactctctattttgtctacactttcactcttgaagaggatgaagagtcaggactgtccctttaaatatcctgngttgtagggtgggtgatgatgaatgatggattgatacattgcaatgagtcc

SEQ ID NO: 267155 - DNA, 427 bp, Glycine max
cccacgcgtccgaccatggaaaaatctaagcgactctttatgaaatccaagcgatcttttcgtaggcgtttgcccccgatccaatcgggggaccgaattgattataaaaacatgggtttaattagtcgatttattagtgaacaaggaaaaatattatccagacgcgtaaatagattgaccttaaaacaacaacgattaataacaattgctataaaacaagctcgtattttatctttgttaccttttcttaataatgaaaaacaatttgaaaaaagcgagtcaaccgctagaactactactttaagaaaaaaaaaaatatagaaattaagaattctaaatccaattttgaattgagatttgaatgaaatattgattgatgttttgtttgaaaattacgacaattcaatttgggtttttatgttgtaag

SEQ ID NO: 267156 - DNA, 393 bp, Glycine max
tcggtggaaagaaaaaacatcagtgatcttgagttactaacaatccatccgtgtaaaacgtgattggatttgggtcagtaatttaatgtacgaattacgaggtggcagcgactttaagtgttgaatggtgtgcaacatagaatcgcattggcgcgaacacgatgatgaggtcaaagatagtgttgcttggagactccatcacggagcaatcgatccgagagaatggatggggtgttcctcttgccaatgcctattctcgcatggctgatgtacttgttcgtggttatggtggatacaacactatgtgggctatgttcttactgggccatctcttccctctggactcaactaaaccacctactgctaccacaattttctttggcgctaatgatg

SEQ ID NO: 267157 - DNA, 440 bp, Glycine max
  unsure (1)..(440): unsure at all n locations
cccacgcgtccgcccacgcgtccgcccacgcgtccggaaaatgttgttcgggattctagtgggaaaaagatccaatcccagctggtgccgatacttgatgattttcttggtttaagaaactaccacactgtggcatacttgggagtgtctccaactgtaaaacccaaatactggcttgctttttcagcagctgttcctccactcggttttagcacttactatgtatcctatgccaaaaaagaagctactatttcagatagagatacagcttaccaatcatggaataagagtgatacaattacagtgggcctaaaaaacttgaaactagnttattctgtgaaggaagggaaacttactaaatatatcaacagcagaagcaatgtcaaaggacctctagagcangcatataaattttacactgggtatggaaatgatggaac

SEQ ID NO: 267158 - DNA, 443 bp, Glycine max
ccggcaatgtgatttcacagatgaaaaaaccaacctgaaggggaagtccctgtctgctgcactcatgtcagatgccaagtttgatggagctgatatgacagaagttgtaatgtcaaaggcttatgctgttggtgccagcttcaagggatattttacaggggtggacttctcaaatgcagtcttggaccgtgtgaactttgagaaagctgatcttgaaggagctgtatttaagaacacggtattgtcgggctccacctttgatgatgctaagctggacaatgccgttttcgaggacactatcattggttacattgatcttcagaaactatgcacaaataagaccatccgtgatgaatggagagttgaactaggattgtcatgaaaagcaaagtattcattggcttctaatacttggatgctgctatgctatgacacgacacaaa

SEQ ID NO: 267159 - DNA, 448 bp, Glycine max
  unsure (1)..(448): unsure at all n locations
cccacgcgtccgcccacgcgtccgcccacgcgtccggatcacccaagagagaacctaagacacacaacacaacacaaacacacagagttagaggagaaatcatcatggcatcagcagcatctgggtttgtgttgtcacttaatgttgcagctgccaccacaaactcaagggtggtcatgttcaacacaaagaacaacgcttctaggcttgttgtaagggcttcagatgagcctgcagcggcggcacccgccaccgccacacccccagctgaagctgaagctaaaccaaagccaccacctattggccccaagagaggtgctaaggtgaagattcttaggaaggaatcttactggtacaaaggcactgggtcagtggttggctgtgatcaggaccccaacactcgctacccttgtgtggntcgattcaacaaagtcaactatgccaatgg

SEQ ID NO: 267160 - DNA, 423 bp, Glycine max
  unsure (1)..(423): unsure at all n locations
cccacgcgtccggttatggaaactatggacatagtttaaggagtccaagcttcaagagtgtgagtggatcacactttggggggttagaacaacaatcaaattactcttcttgctgcactgagagtattggtgggggtcaggtttctccttcttcaacaggtgaccttaggaggtggttgagatgatttgttgcacactttaatgagaagaaacatgaccggacccattaggccatggccataattcacttcatatttgatttttatttgggctttttgtgatgttagagttaattttagtttaaccctttctcaccctcccaaaagaaagtatntaattacccccgggcgacctgaatctgatgttaagaaccagagaagcaagcaagtactttttctgctaggaaactcagaacaatttaat

SEQ ID NO: 267161 - DNA, 428 bp, Glycine max
aagcccaccattttccatttccatgtatctgtgtactttctattcttagaagaaagaagaaaactcacttttgtagagttcgagttcttattctcatggctattaccggcgaaattttccgacagagcataaaggaaatgcttgaggagtctccttccggtgcgccggaacttcaagttctcgccgttgacgacagcctcgttgatcggaaggtgatagagcggttgttgaggatttcttcctgcaaagtgacggttgtggagagtggaacgcgtgctcttcagtatctggggttggacggagggaacagttctctcgggtttgatagtgttaaggttaatctcataatgacggattattccatgccggggatgactggatatgaattactcaagaaaatcaagcaggagtcttctgtgtttagagag

SEQ ID NO: 267162 - DNA, 299 bp, Glycine max
gagagtcgaggttgtggacaacgagtactttatcacacctgacaacgctggcatgctcaagctggcaaaggaagcatacacaatcctgcttgattaccgaatcccaacatcggggtacgagacgtgcggatccggtgtggagagtccactgcaaatgaatggactcccaataagcgtgtacgcgcccgaaaccgttgggtgcgtcgtggttgaccgggagggccggtgcgcggcagcaacatccacgggagggctgatgaacaaaatgaccggtcgcatcggtgattcgccgctgatag

SEQ ID NO: 267163 - DNA, 430 bp, Glycine max
  unsure (1)..(430): unsure at all n locations
ctttgtcctcaaaccttatcccttatcctcccaaaaccaaaccatgtctacctccggagcttgtctcgcactcccaaccctcactctccgaactcgacaacctctctgttctccccaatgcttctcctcgtgcctcttcctcacccctaacttcaaacccatttccattttcggcggtttcctcaaaacaacgctgtcgtcgtcgtcgccgttgtcgctgtcgtctcgcttcggtccccatgtctctgtgttggagcacgaggaggacaccttcggcgacagagacaggcccagcttttcccgcgaccttaagctctntgtcgggaatctcccctttagtgtcgacagtgcgcgggtcgcggagctcttcgagagtgcggngaatgtggacgtgggtgacgctgattatgataggactactgggaggagc

SEQ ID NO: 267164 - DNA, 393 bp, Glycine max
cccacgcgtccggagaaggatgtgccctgggtaccctcttggccttaaggtcattcaggcaagtttggccaattcgttgcatggatttaactggagattgcctgataatgtgaggaatgatgattcgaatatggatgagatttctgggctctctacacctaagagactaccactggaaactgtcgaggagcctaggctttcataccatctttattctctctgagcagtgcctttgcacaaagcgattctctctaataacattgacgcatggataatgggtcttgagtgagattatgattgtcacactggatcgcaatatattgttctatctattcataacaatggtacacagagatactgggcttcttggtcatggcattgatgtcagtcatt

SEQ ID NO: 267165 - DNA, 437 bp, Glycine max
  unsure (1)..(437): unsure at all n locations
gaaaaacaagtagttgagaactaagaagaaggaaatggcttcctcaatgatctcctccccagctgttaccaccgtcaaccgtgccggtgccggcatggttgctccattcaccggcctcaaatccatggctggcttccccacgaggaagaccaacaatgacattacctccattgctagcaacggtggaagagtacaatgcatgcaggtgtggccaccaattggcaagaagaagttcgagactctttcctacttgccagacctcgatgatgcccaattggcaaaggaagtcgaataccttctaaggaaaggatggattccttgcttggaattcgagttggagcacggtttcgtgtaccgtgagcacaacaggtcacctggatactatgatggacgctactggaccatgtggaagcntgctatggttggctgcactgatg

SEQ ID NO: 267166 - DNA, 365 bp, Glycine max
aaagaaaagaccatcaaagtttcacttcagccttatccggtttagggtttcggtttttgacccaacctttgacgtatcgaaaccttaagtttcggatcaggtctgagcaatctggttggtagaacctttggtcttagagagtcaagttttatgtctgaattagacgatcaaattcctactgccttcgatccttttgctgatgcaaatgctgatgactcgggtgctgggtcaaaggagtatgtgcatattcgcgtacagcagcgaaatggaaggaaaagcctgacaaccgttcagggattgaaaaaagaattcagctataacaagatacttaaagatgttaagaaagagttctgttgcaatggaac

SEQ ID NO: 267167 - DNA, 438 bp, Glycine max
cccacgcgtccgtttccacttgtctccgaattagttatcttgagaaacattattcccattgctatatattatggctagcatgaaggttacatgggtggttgtgatcatgtgcatggccgtggtgggtgcaccgatgatggcgcaagccatgacatgcaatgatgtgacggtgaacatggcacagtgcctatcctacctgatgcagggaggaacaccttcaacactttgctgcagcggagtcaagaacattcttggctctgctgtcaccaccgttgacaaacaaactgtgtgcaactgtctcaaggcggatgctgctaggtacaacatcaatgaccagtatgctcaggcactcactggtttctgcaaggtcaatgtcccttacaagatcagccgctccactaactgtgcaagcatcaggttctgaacaagccatggaca

SEQ ID NO: 267168 - DNA, 406 bp, Glycine max
ggagtcgaaggacttggaagagaaggccgagatgaagaagatgtatggcctcatcgagacctacaagttgaacggccaattcagatggatatcctctcagatgaaccgtgtgaggaacggagagctctaccgtgtcatctgtgacacaaggggtgcctttgtgcagcctgcagtttatgaggcctttgggttgactgtggttgaggccatgacttgtgggttgccaacgtttgccacatgcaatggtggtcctgctgagatcattgtgcatggaaaatctggttaccacattgatccttaccatggtgaccatgctgctgagatccttgttgagttctttgagaagagcagggctgatccatctcactgggacaaaatctcccagggtgactcaagcgtattcatg

SEQ ID NO: 267169 - DNA, 445 bp, Glycine max
  unsure (1)..(445): unsure at all n locations
ttccctttgaccattcaaccttcctcgcctttgcctccgtttccgtgactgagatggctggaggtgttattcagcagatattgaggaggaaactccaccctcggtttactaactctcccttgttgtcacccatcgtagcaaaaaaagatgatgctggctctactggcagtcagtccttaagagcacttgcattaattggagctggtttgtcaggtcttttcagtttttcaacaatggcagcagctgatgaagctgaacatggcctggcatgtccaagctatccatggcctcacaagggaattcttagttcatatgatcacgcttcgattcgtcgtggtcatcaagtttatacagaagtctgtgcttcctgccattctatgtctntgatatcgtatcgtgatttggttggtgttgcttatacagaagaagaggtaaaggctatggc

SEQ ID NO: 267170 - DNA, 423 bp, Glycine max
ccgtaaccatgtctcagactgttgtcctcaaagttggtatgtcatgtgaaggatgtgttggagcagtgaagagagttttaggaaaattggatggtgtggaatcatatgacattgatttgaaggaacagaaggtggtagtgaagggaaatgtccagccagacacagttcttgcgaccgtttccaaaactgggaagaagactaccttctgggaaggtgaagcagcagcatccgaaactagcacagcaactgcctagaacatttcgctctattctgttcagaagaagtagctgcgtaaatcaaatactattttatggacttgaaataacgatgggacttgttatctggtgtattttagtgtgtcacaacaaagattgctgtatatgactgcttttaacatctgtgctacttgattaatgtgctttt

SEQ ID NO: 267171 - DNA, 437 bp, Glycine max
cagaaattttttgatactatttgctatacccctctctttatagtactttgtagtaaagtaggaaaataaattgaatatatatctattgaatttattcttcttattatttttcgcattcggattgaagaatttaatcagatagttatatgagtgcaataaaacagcttcttttgaatataatttatagaatactatattacttatagttaatagaaaagatgatgattttaaattgcagtaaaaatattgagtctcattttctatgtataagaattacgtgaaaaaaatgaattaaattatacgtagaagttgttgcttttcccaaggttggttgattagtcatcctgtcttgaagcggtcgtaaaagaccaaccctttttaaattaaattttcaatatcatttgtatgaattagcatatatatattaacataaataa

SEQ ID NO: 267172 - DNA, 262 bp, Glycine max
atttcattgtcatttgcttgtttagaaaaaagttggattgaagctggagtgtactggggattgttagtacatccctggaatcctaataaaatgaataatatttaatattaaaaaaaaaaaaaaaaaaaaaaaaaaaaaaaaaaaaaaaaaaaaaaaaaaaaaaaaaaaaaaaaaaaaaaaaaaaaaaaaaaaataatataaatgttaaaaaacaaaagaaaaaaaacaatataatgactataactaaattacatttaaatgg

SEQ ID NO: 267173 - DNA, 436 bp, Glycine max
ggttaccctggcaaggttatcagggtgatcataaatccttccttgtttgcaaaaagaagatgggaacatctcctgagatgctatgctgcttttgccctgctccttttaggcagttccttgagattgtagtgaacatgaagtttgatgaagaacctaactattccaggctaatatctttgcttgatggtatgcttggaccgaatcctgcattgaggccaattaacactgaaggtgctcaaaaggtcgggcagaagaggggtagattgaatattgaggaagaggatgattcacagcccaaaaagaaggttcgcttgggggttcctgctacacaatggatttcagtttacaatgcaagactgccaatgaagcaaaggtaccattacaatgtagcggacgcaagattagcacaacatgtggagagagggattgctgatgg

SEQ ID NO: 267174 - DNA, 198 bp, Glycine max
caatgtcgaagcgaggtcgcggaggatcggcagggaacaagttccgcatgtcactgggtctgccggtggcggcgacggtgaacttgggccaccaccaccgggccgaaaaatctttccatcttatcagggaaggggatcaagggaaggctgaaccggttgccgtaagctggcttggttgccatggttttggccaccgtc

SEQ ID NO: 267175 - DNA, 406 bp, Glycine max
gcaagcaaaaagaaagaatcccaggcgaggagaaagatggaggggaaggagcaggatgtgtcgttgggagcgaacaagttccccgagagacagccaattgggacggcggcgcagagccaagacgacggcaaggactaccaggagccggcgccggcgccgctggttgacccgacggagtttacgtcatggtcgttttacagagcagggatagcagaagttgtggccacttttctgtttctctacatcactgtcttaaccgttatgggagtcgccggggctaagtctaagtgtagtaccgttgggattcaagggatcgcttgggccttcggtggcatgatctttcgccttcgttactgcaccggtggcatctcaaggggacacataaacccggcggtgacatttgggc

SEQ ID NO: 267176 - DNA, 443 bp, Glycine max
  unsure (1)..(443): unsure at all n locations
cttctgctcagtggaaacagattcacaggtgaaatcccaccagatatagggagattgaaaagtatcctcaagttggatattagtgctaacagcttttcaggtactattccccctgggataggtaactgtgtcttactcacctatttagatttgagccaaaaccaactatcaggccctattccggtccaagttgctcaaattcacatattaaattatctcaatgtctcatggaaccacctaaaccaaagcctgcccaaggaacttagggccatgaagggtttaacttcagcagatttctcttacaataacttctcaagctcaataccttgagggggccaattctcactctttaattccacatcctttgttggtaaccctcagctatgtggatatgactccaagccatgcaatncttcttcaacagcttgtgtggaatctcaaca

SEQ ID NO: 267177 - DNA, 441 bp, Glycine max
  unsure (1)..(441): unsure at all n locations
catagctatctagctagcaagtgggacaagagatatatatacgtggtaccctagagtgccattctgtagtttatttctgctcaccaaggcttatcacatcacaatttgtgcattgcctcgtgtccttttttttctttgcttgccaaaaatcttacacacacaggtatctagcaaatgggttctcaccagcaagaaccatggctattggagaatgggaaaccgagggtgttgaccaaggagaataggcatggccgttctgcacacagcatgtcctccacgtctttgcgcangaagtctagccgaactcttgtctccaagcttccatgtgccacactcagaagcatccttttaaatttgcaagaggttattcttggtaccaagctttccattcttatccctgccattccagctgccatcattgccgagtgctatggctttgga

SEQ ID NO: 267178 - DNA, 327 bp, Glycine max
aacaaatcaaagccatggccacctccaacttctctattgttctctccgtctccctagccttctttttggtgctacttaccaaggcacactcgaccgataccgtttctttcaccttcaacaagttcaacccagtccaaccaaacattatgctccaaaaagatgctagtatttcatcctctggggtgttacaactcaccaaagttggcagcaacggcgtgcccaccttgggatcttttgggcgggccctttacgcttgcccaattcagatttgggacagccaaacccggaaaggtacccgctgggctacattctttaaattcaacattt

SEQ ID NO: 267179 - DNA, 276 bp, Glycine max
aaaagctggagtggctcacaagattgatttcagagaaggacctgctcttccgtttcttgacgagatgcttaaagatgaaaataaaaaggggtcgttggatttcgttttcgtggatgctgataaggacaattacttgaactaccacaagagggtactagagcttgtgaagattggaggactgatcggatacgataacaccctatgggctggatctgtggctgcaccacccgatgcaccattgatggattacattaagcctcttcgcgggcatgtgat

SEQ ID NO: 267180 - DNA, 438 bp, Glycine max
  unsure (1)..(438): unsure at all n locations
gaacaagtagttgagaactaagaaggagaagcaaatggcttcctcaatgatctcttccccagctgttaccactgtcaaccgtgccggtgccggcatggttgctccattcactggcctcaagtccatggctggcttccccaccaggaagaccaacaatgacattacctccattgctagcaacggtggaagagtgcaatgcatgcaggtgtggccaccagttggcaagaagaagtttgagactctttcctacctgccagaccttgatgatgcacaattggcaaaggaagtagaataccttcttaggaagggatggattccttgcttggaattcgagttggagcacggtttcgtgtaccgtgagcacaacaagtcaccaggatactacgatggacgctactggaccatgntgaagctgnctatgtttgtttgcactgatgc

SEQ ID NO: 267181 - DNA, 439 bp, Glycine max
cggacgcgtgggtttcgggattggtttctatggcttctgaagtaatagagtaccgatgctttgtcggtgggcttgcttgggccaccgacagcgatgctctcgagaaagccttctctcattatggtgagatcgtcgaatcgaaggttatcatcgatcgtgaaactggaagatcgagagggtttggatttgtgaccttcgcctcggagcaggcgatgaaagacgcaatcgaaggaatgaacggtcagaacctcgacggtcgtagtatcacagtgaacgaagcacaatcccgtggaagaggccgtggtggcggtggatacggaggtggtggtggttatggcggcggcggttacagccgcggtggatgaggatatggaagaggaggccgtcgtgaaggtggtggacgtggctataaccgcaacggtggacgtggtggatatgg

SEQ ID NO: 267182 - DNA, 435 bp, Glycine max
caaacacatgccatggcaccagcgtcaacgtgtatgaacttcaacctgtcaacaccattcaagggtctctctttatctgcttgttcatcattcttcggtggacagtagtggttctattcgcacagctcctgtctcggtggagcacttgacgcagcactaccctctgaccatagagaacactcacaagacgggggcgggcatcaccaagaacggacgcgactcgcagggcaagcgcctctgattcaagacttacggtgaccactgtcgcaagcccggatacatcatcggtctccagcgcggaacctagtctcatgcaggaaagactgtgtcgctggtcatagactatcccatgatctccttgattgatggacttgtaaaccctgagaaatattgacctgacatgacataggtgagtgattaccctacagaagtaca

SEQ ID NO: 267183 - DNA, 266 bp, Glycine max
catgtcgtagagatctaataacactgacttgggttactcaatgatcttcttcacaggtgttacgcaccaggaaccgtgccggtgccggcatgggtgctccattcaccggactcaaatccatggctggcttaaagactaggaagaccaacgatgacattacctacattgctagcaatggatgcagagtccaatgcatgcatgagacgacaccaattgggatgaagaatctagagactcttgactacttgccagacgatctatgatgc

SEQ ID NO: 267184 - DNA, 423 bp, Glycine max
  unsure (1)..(423): unsure at all n locations
cccacgcgtccggatcgagataactagaaacagtgtgatgaaaatgaaggtccttgttttcttcgttgctacaattttggtagcatggcaatgccatgcgtacgatatgttccctctccgaatgaacactggctatggtgcccgtactccggaggtgaaatgcgcacgttggaggcttgctgtggaagcacacaacatctttggctttgagaccattcctgaagagtgcgttgaagcatcanaggaatacatccatggcgaacagtatagatcagactccaaaacagttaaccaacaagcttactnttatgccagagacctcgaagtccatcccaaggacacatttgtgttcagtatagatgggaccggtactttctaatattccatactacaaaaaacatggatatggggtggagaaattta

SEQ ID NO: 267185 - DNA, 441 bp, Glycine max
cccacgcgtccgcccacgcgtccggcacttttcagttacaaagcatttcattgttttacaatatacaacactacaatggctgcttcaacaatggctctctcttcatcatcattggctggccaagctatcaagcttgccccctccacccctcagcttggtgttggaagggttagcatgagaaaaacagcctccaagactgttacctcaggaagcccatggtacggcccagatcgtgtcaagtacttgggcccattctctggtgagcccccatcctacctcactggtgaattcccaggtgactatggttgggacactgctgggctttctgctgacccagagacctttgccaaaaaccgtgaactggaagtcatccactccagatgggccatgttgggagccttgggctgtgttttccctgaactctcgtcccgcaacggagtc

SEQ ID NO: 267186 - DNA, 442 bp, Glycine max
ctcattcttcatccatagacatggccaccgtcacttctgcagccgttgctattccctgattcactggcctcaaggcaagcgcaggcaaagtgagtgccgcagttaaagtctcagctccccaagccacaaggttgggcatcaaggcttcgctgaaagacgttggagtcgctgttgtggccactgccgcgagtgcagtgctggctagcaacgccatggccattgaagtgttgctgggtggtgatgacgggtctctggctttcgttcccaacaatttctccgtggcctctggggagaagatcgtgttcaagaacaacgcatgtttcccccacaacgttgtgttcgacgaggacgagattcctagcggcgtggatgcagggaaaatctccatgagcgatgaagaccttctcaatgcgcctggtgagacttacagcgttactttgga

SEQ ID NO: 267187 - DNA, 428 bp, Glycine max
gggcgacgcaccggcattgccagagactcttaaaaattacaacaagctgttgtctcttggcttcaagattgtattcttgtcaggaagatatcttgacaaaatggccgtaacagaagcaaacctaaagaaggctggcttccacacatgggagcagttaattctcaaggatccacatcttatcactccaaatgcactttcatacaaatcagcaatgagagagaatctgttgaggcagggatacagaattgttggaatcattggagaccaatggagcgatctgcttggagaccacagaggcgaaagcaggacctttaagcttcctaatcccatgtactacattgagtagtaccttcacctctctcaacaatctagctagagtttgctcctatctatatgtaataaggtatgctgatatgcactattcaaat

SEQ ID NO: 267188 - DNA, 440 bp, Glycine max
ctctctgttctcttctgtcattgcttctcctccacacacgcacagagacacacacttttgcagtcacattgagaatggggcgtgttcgcacgaagacggtgaagaaatcctcgcggcaagtgatagagaggtactactcccgcatgacgctggacttccacacgaacaagaaggttctggaagaggtggccatcattccctccaagaggctccgcaacaagatcgcggggttctccacccatctcatgaagcggatccagaagggtcccgtgcgtggaatctccctgaagctgcaggaggaggaacgcgagcgtcgcatggacttcgtccccgatgtctccgccatcaggaccgaccagatcgaggtcgacaaggagacgctcgacatgctcgccgtcctcgggatgtccgaggttcctggcatcgttcaggtggatcct

SEQ ID NO: 267189 - DNA, 441 bp, Glycine max
cccacgcgtccggccagccatgtcgatcttttctattccctcaccaacgtaccgttgttcaatttcaatttcaatttctcgggagccattgccatgttctttcacggctcaagtgagaagaagagggaaagggaaagtggtaatgagcatggaggcaggcattggagtgatgggcaccaagttgggtatgatgagctatttcgaatccgacggagaggttgttcctgtcactgtcgtgggtttcaaagaaggcaacatcgtcacccagatcaaaactgaggccaccgatggatacgacgccgtccaggttggttaccgaagggtcagagatcgcaaattgaccaaacccgaaatcggtcatctccagaaggtcggcgccattcccatgcgccatcttcaggagttccgtcttcaagccgtcgatggcttcgaccttaacca

SEQ ID NO: 267190 - DNA, 441 bp, Glycine max
cggacgcgtgggttagtcccaattttctagggttttattcattttccgatggcttctgcagatgttgagtaccgttgctttgtcggtgggctcgcttgggccactgacgaccatgccctcgagagagccttctctcagtacggcgaaatcgttgaaacgaagattatcaacgatcgtgagactggcagatccaggggttttggatttgtgaccttcgcctcggagcagtccatgaaagatgcgatcggagcgatgaatggacagaacttggacggccgtaatatcactgtcaatgaagctcagtcccgcggtggcggcggcggcggcggcggaggaggaggaggatacaatcgtggtggcggtggatatggtggtcgtagtggcggtggcggtggcggtggtggataccgtaaccgtgacggtggttatggcggtggctat

SEQ ID NO: 267191 - DNA, 445 bp, Glycine max
ctttcttccatcttcttctcttttcacgtcattatcctaaacttgcagattttcacatcccaggcaacatgaaggggaggttcatgtttctgtcggtgctcctttgtgccacctttcatgtctccttctccattactgacggcttagtagcaaacggcaacttcgagctgggtccgaagccctccgccctgaaaggaactgtggtgattggtggcagccactcgatcccagaatgggagatctctggcttcgtggagtacataaagtccggccagaagcagggcgacatgctgctcgtggtccccgaaggggcctacgcggtgcgcctcgggaaccaggccttcatcaagcaaaggatcaaggtgatcaagggcatgtactactccatcaccttcatggtggcccgcacctgcgcgcatgatgagaggctcaacatattcgtcac

SEQ ID NO: 267192 - DNA, 402 bp, Glycine max
gaagaaagagacctgaaagtgtcgcactttcagatcgtgagctcgtaaaacctcacacaccagggggcgtcactggggcgtacatgcacctccatgaactacttatgtgaaatcactgatgctctatggttcattactgacggtttacctgccaacggcaccttatacctgggtgcaaaacccttcgacctgcacggaactgtggtgatcggtgcttttcactgtatcccagaatgctacatcatctgtcttcctgtagtcataaagttcgtcataatcatggctacatgctgctcgttttccccgatggggcctactcggttcgcctcgggaactaggccttcattaagcacatgatcaaggtgatcaaagtcatgtactacttcattaccttcatggtgg

SEQ ID NO: 267193 - DNA, 444 bp, Glycine max
  unsure (1)..(444): unsure at all n locations
attcttcatccatagacatggccaccgtcacttctgcagccgttgctattccctcattcactggcctcaaggcaagcgcaggcaaagtgagtgccgcagttaaagtctcagctccccaagccacaaggttgggcatcaaggcttcgctgaaagacgttggagtcgctgttgtggccactgccgcgagtgcagtgctggctagcaacgccatggccattgaagtgttgctgggtggtgatgacgggtctctggctttcgttcccaacaatttctccgtggcctctggggagaagatcgtgttcaagaacaacgcaggtttcccccacaacgttgtgttcgacgaggacgagattcctagcngcgtggatgcagggaaaatctccatgagcgatgaagaccttctcaatgcgcctggtgagacttacagcgttactttggatgcta

SEQ ID NO: 267194 - DNA, 447 bp, Glycine max
atcgcccaagccctatgcaaccaatccctttttcacacccattcgattcactttccatgggtagcctcaaggttgcattcttggctgcagtgctctgcatggttgtggtgagtgcacccatggcacatgcagctatcacgtgcgggcaggtgacgagtagcctggccaattgcatcggttacctccagaagggaggaacgccgtcgtcgggatgctgcaacggagtgaagagcctcaatgccgccgtcaagaccaccgacgaccgtcagacggcgtgcaactgcctcaagtcggtcgccagccaaatctccggcttcaacgccaacaacgccgactagctccccggcaaatgcggagtctgcatcccctacaagatcagcaccttcaccaactgcgctaccatcaaggtttgaagagaaagtcatggacgcatgaaaccggaaacta

SEQ ID NO: 267195 - DNA, 396 bp, Glycine max
cccacgcgtccgcccacgcgtccgcccacgcgtccgcccacgcgtccgcacactttggtgggcacagcaacaataacaatggcagcctcactacaagctgcagctaccttcatgcaacccaccaaggtgggcatggccactcgcaacctcaaatctacacaatgcatttctaaggcttttggcttggaacccgctgcagctaaactcatttgctcccttaagcccgatctcaaagattttgctcaaaaatgtgtcgacgccaccaaaattgcaggattcgcccttgccacctcagctctcgttgcttctggagcgagtgcagaaggtgttccaaagaggctaaccttcgacgaaatccagagcaagacatacttggaagtgaagggaactggaact

SEQ ID NO: 267196 - DNA, 334 bp, Glycine max
  unsure (1)..(334): unsure at all n locations
cccacgcgtccgcccttagctagtttttaccaatggctgctgcggttagtgctgcagtctcttttccatccaccaagtctacctctctcccaagcaggacctccatcattaccccagagagagttgtattcaagaaggcttcattgcaatacagagatgtttgtagcagtggaagggtagtttccatcagagctcaagtcaccactgaggctccagccaaggttgaaaaagagtccaagaaacaggatgaaagtgtggttgtgaacaagttcanacccaagaccccttacgttggtagatgcctgctcaacacaaagatcactggggatgatgc

SEQ ID NO: 267197 - DNA, 367 bp, Glycine max
aaacacgggccggctaacaatggctttaattgatttttgaaatgggggagacaactaatccaattaagagaacaatattaaaatctgaatatgatgcaatttcattccaaggggacaccaaaactgagggcaaagagcaaagatggctgactaggattttatgtaacacgtcactgtcataggcattccagatgaaaaattatcaacaaactactacttgtatgtttgccaagactgcgactggtccaaataaagaaggcaaacggatttaagaagcaacagtaaccagcaatatggaaaatgggagccgctgaacatttccggactttaagagcactcactcaatggcagacaaatttattcatca

SEQ ID NO: 267198 - DNA, 437 bp, Glycine max
ctttaatggaactttagctttaactggtcgtgaccaggaaactaccggtttcgcttggtgggccgggaatgcccgacttatcaatttatccggcaaactactaggagcccatgtagcccatgctggattaatagtattctgggccggagcaatgaacctttttgaagtggctcatttcgtacccgagaagcccatgtatgaacaaggtttaattttacttgcccatctagctactctaggttggggggtaggtcctgggggggaagttatagacacctttccatactttgtgtctggaggacttcacttaatttcctctgcagtattgggctttggcggtatttatcatgcacttttgggaccttggactcttgaagaatctttttcattcttcggttatgtatgggaaagatagaattaaaatgactacaattttt

SEQ ID NO: 267199 - DNA, 442 bp, Glycine max
cttgaagcgtatttttgagaaagtggacgtgaatggcgacggattggtgagccttgaggaactgaatcgattgcttcagatgacgggcaattcccaatatagcatagaagagttggaatcacttgtggaaaagaaaagtcttggtttcagtgatttcttgttcttttacaactcaatatcggagcagaacaagggagagagcaaaggaagtgagttggagagcgacctggccaagacctttgaggtgtttgacttggacggagatggtttcatcacaagccaagaccttgagtctgtcttgaagaggcttggcttctgggatcaaacacatgccaaggattgcagaaccatgattcgtttctatgacaccaatttcgatggtcgccttgattttcaggaattcaagaccatgatgttgctcaccaaagcttgaatatattca

SEQ ID NO: 267200 - DNA, 442 bp, Glycine max
cccacgcgtccgaagaaatttaagtgaggagctagagaatgatgatgaagtctgctatgtgtgcagtggtggttgtagcacttcttcttctggcggaggtggggcccatggctgaggctgtgacatgcaccccaacagagttgagtccgtgtcttccagcaatcacttccggtgctaaaccttccaatgcttgttgcacgaagctgaagcagcaaaaaccatgcttatgtggctacctcaaaaacgctagcttgaagcagtatgttaactctcctaatgcccgaaaaaccgttgcttcttgtgggattccctttccaacttgttaattaattaagccttcttataattaaagtgtgggatatatatatatatatatatatatatatatatatataaacaggttaatttatacacactttgatcctacaaagcatcttgacac

SEQ ID NO: 267201 - DNA, 421 bp, Glycine max
  unsure (1)..(421): unsure at all n locations
cccacgcgtccgagagtttgttgtgagctataagctagtttatcgtgaggagaatatgaaggggtttgttttctttgttgctgcagtagttttggtagcatggccatgccatggcgcaggctaccaaaggttccctctccgaatgaaaactggctatggtgagcgttcttcggaggtaaaatgcgcaagttttaggcttgctgtggaagcacacaacatccgagcctttaaaaccattcctgaagagtgcgttgaaccaacaaaggactacattaatggcgaacaatttagatcagactctaaaacagttaaccaacaagctttcttttatgctagtgaacgcgaagtccatcacaacgacatatttatattcggcatagataacaccgtactctctaatatcccatactatgnaaaacat

SEQ ID NO: 267202 - DNA, 444 bp, Glycine max
  unsure (1)..(444): unsure at all n locations
gaaagacagaaatggaggagaaagaagagctcaaaaagtctaaggttattaaaatagactctcaaaaatcatgggaacaccacatctcttatgctaccaatcaaaagtaccctattgcagttcatttctctgctttctggtgtgtcccttctttagttatgaatcctttctttcaagaattggcctccacttatgaagatgttttgcttctgacgttggatgtggatgaggttaaggaaattgcctccaagatggaaatcaaagccatgcccacctttctgttgctgagtggagggactcctgtggacaaaatcgtgggtgcaaatcctgatgaaattaggaaaaggattgaccattttgttcactcaactcgttcctagaacttttgttcattgtgctangaagcatttcatatatgtcttatattccaaagtaatatttata

SEQ ID NO: 267203 - DNA, 401 bp, Glycine max
  unsure (1)..(401): unsure at all n locations
ttcccttttcacgtcattatcctaaaaacttgcagattttcacatcccaaacaacatgaagggaaggttcatgtttctgtcggtgctcctttgtgccacttttcatgtctccttctctattatcgacggtttagttgccaacggcaactttgagttgggtccaaagccctccgccctaaaaggaacagtggtggtgggcgggagccactcgatcccagaatgggagatctccggctttgtggagtacataaaatccggccaaaagcaaggtgacatgttgctcgtcgtcccagagggtgcctacgcggtgcgcctagggaacgaggcctncatcaagcagagaatcaaggtgatcaagggcatgtactactccatcaccttcatggtggctcgcacgtgtg

SEQ ID NO: 267204 - DNA, 238 bp, Glycine max
cccacgcgtccgttcactttcctgggaaaaaattggaacctgcctctgttaaagtttgtatttttctgagtgggtgggttgattgagagtgctgtgcaagctttggaactttttcccaacctgctacttcaatggccactgaagaggttaacaaacctcaatcacttcctccataccctgagatgatagtgaaagcacttgaagcactgaatgagccaaatggatcgaacaagtcagc

SEQ ID NO: 267205 - DNA, 432 bp, Glycine max
  unsure (1)..(432): unsure at all n locations
attgcatccctcttgatttgtagtttgttttgtgctttagataaaagttctgccaaatcaagaggggttttaagatcatagtgtgtgttttgcaacaatggctaagttctttgctgctatgatcttggcactctttgccatttccatacttcaaacagtggtaatggctgctaatgaacaaggaggccacttgtatgacaacaagagcaaatatggaagtggaagtgtcaagagttaccaatgcccatcacaatgctcgaggagatgtagccagacccaataccacaagccctgcatgtttctctgtcagaagtgctgcatgaaatgcctgtgtgtgcccccagagtattatggtaataaagctgtgtgcccttgctacaacaactggnagaccaaggaaggaagacccaagtgcccttgagcttcaacttg

SEQ ID NO: 267206 - DNA, 249 bp, Glycine max
cccacgcgtccgagaagagaagggctacacaaacacaatctctaatggcactcaggatgtgggcttcttccactgccaatgcactcaaactctcttctgtctccagacctcatctcttgcctcctttttctttctccagatgcttatcttccgtcttggatggacttaagtacgctgattcacatgaatgggtcaagcacgaaggctcagtcgccaccattggtatcactgaccatgcccaggaccatc

SEQ ID NO: 267207 - DNA, 434 bp, Glycine max
attcttctaccacctcagcagagcgtgaaattgtgagggatatgaaggaaaagctggcttagatagccctcgactatgagcaagagctagagacatccaagaccagctcttcagtggagaagagctatgagttgcctgatgggcaggttatcactattggcgctgagcgtttcaggtgtccggaggtcttgtaccaaccatccatggtaggaatggaagcatcaggcattcatgaaacaacatacaactccataatgaaatgtgatgttgacatcaggaaagacctgtacggtaacattgtcctttcaggaggtacaaccatgtttcctggcatcgctgatagaatgagcaaggaaatttctgctttagccccaagtagcatgaagatcaaggtggtagcacctcctgagagaaagtacagtgtctggattgga

SEQ ID NO: 267208 - DNA, 406 bp, Glycine max
  unsure (1)..(406): unsure at all n locations
ggcgcgcgtccgtttggtaggatcacctctcctcctcgtgcgaacatcacttattcaattgaagcangagtgtgtgctggcattgacgggggcggggttccaaagcattacacanaattcatagatgttctaaccatgttggtgaaaaataagcacattcccatgagtcgaattgatgatgcggtgagaagaattctgtgggttaagttcatgatgggtatttttgagaatccttttgctgattacagtttggccaaatatttgggaatccaggaacacagaaatttggctagggaagcagtaaggaaatcaatggtccttctgaaaaatggtgaatctgctgacaagcctttactgcctcttcctaaaaaggcgccaaaaatacttgtgggctggaagccatgct

SEQ ID NO: 267209 - DNA, 449 bp, Glycine max
  unsure (1)..(449): unsure at all n locations
cccgaatctcccggntcggccgccgcgtacggccacgcgtncgctgaggattgcccatagtcttacaagcctgattgtggtcagaatggccgtgtgtttgttatcgggattggggatgataagatctctgtccaaaaattcantgcaaactcaacagtattggatttgttgaaaagatctgggagagcaagctctaggttgacaacatatacgttcccattgaaggaagagttgaggccaacgctgaatcataaacccgttagtgatcccaatagcaagtttaagatgggagatgtgattgaacttacaccacccatacctgacaagtctcttacagaatatagggaagaaatccagcgtatgtatgatcgcgggctaactgtgtcaaacatgggaaccgccgcaagcaccatggcttgctcaagaagttgacccgtgcttttagattt

SEQ ID NO: 267210 - DNA, 440 bp, Glycine max
atcaggcttggagttctgtccctggtgctggagcaggcagagtcacttcgaaccggtggaacttcactcacccttttcaaaaacggatggatggtacttgatgcaattggtgcagctaatgatctcagaactcaattcttagaaattcaaggctgagcttgatctggttcacaatatcagctgtacaggatggtggtgaagtccgtggatgggagggaactacgcgccttcaatttcaaacaagaggatcaaagccaagaggtacgtgcagttgagaggagagtgcttttggaaaccttggctagtcagctacctcgggatagcgttcaatattcttcacaattgcaaaggattgaagccagtccaaacggggataccttgttggaacttgtggatgggtctaagctgcttgcaaggattgtgatagagtgcgatggaat

SEQ ID NO: 267211 - DNA, 161 bp, Glycine max
gcaattcaagggacgaaccggcgttaacttgtcctaagaataatcgggagcgacaattgaggattatgccgatcagaaccatcgccgatggaaggcctgaataggcgactaaccctgccacgttgaaggcggttttggctgacttcatgtaaaccttcatc

SEQ ID NO: 267212 - DNA, 409 bp, Glycine max
tattgataggatcacctctcctcctcgtgcaaacatcacttattcaattgaagcaggagtgtctgctggcattgacatgttcatggttccaaagcattacacagaattcatagatgttctaaccatgttggtgaaaaataagcacattcccatgagtcgaattgatgatgcggtgagaagaattctgtgggttaagttcatgatgggtatttttgagaatccttttgctgattacagtttggccaaatatttgggaatccaggaacacagaaatttggctagggaagcagtaaggaaatcaatggtccttctgaaaaatggtgaatctgctgacaagcctttactgcctcttcctaaaaaggcgccaaaaatacttgtggctggaagccatgctgataatctaggatat

SEQ ID NO: 267213 - DNA, 442 bp, Glycine max
cccacgcgtccgctgaggattgcccatattcttacaagcctgattgtggtcagaatggccgtgtgtttgttatcatgattgagaatgataagatgtctgtccaagaattcagtgcaaactcaacagtattggatttgttgaaaagatctgggagagcaagctctaggttgacaacatataggttcccattgaaggaagagttgaggccaaggctgaatcataaacccgttagtgatcccaatagcaagttgaagatgggagatgtgattgaacttacaccagccatacctgacaagtctcttacagaatatagggaagaaatccagcgtatgtatgatcgcgggctaactgtgtcaagcatgggaaccgccgcaagcaccatggctggctcaagaagttgacccgtgcttttggatttcacttccattccaacatgaaatta

SEQ ID NO: 267214 - DNA, 457 bp, Glycine max
gaaaatgaaggtccttgttttcttcgttgctacaattttggtagcatggcaatgccatgcgtacgatatgttccctctccgaatgaacactggctatggtgcccgtactccggaggtgaaatgcgcaagttggaggcttgctgtggaagcacacaacatctttggctttgagaccattcctgaagagtgcgttgaagcaacaaaggaatacatccatggcgaacaatatagatcagactccaaaacagttaaccaacaagcttacttttatgccagagacctcgaagtccatcccaaggacacatttgtgttcagtatagatggcaccgtactctctaatattccatactacaaaaaacatggatatggggtggagaaatttaactcgaccttgtatgatgaatgggttaacaagggcaatgcaccggcactgcccgagactcttaagaattacaac

SEQ ID NO: 267215 - DNA, 444 bp, Glycine max
agaagaatgatctccaccccaagtcacaaattcttaaagagtcattagtcagtaataaatgtggtaatgttccaaaaaatgttgatcaacgtaaaaatgaacagaatcttacagcaaggaagcaaaatcataaagagaacatggctggaaatattgccactactactaaggtggagaaaagagcatatccatcatttgaagcttttacaatagaggaagaagaaggttcacgtggttatggcaccgtttaccgtgctcaaagaactactgatggaaaacgggttgcaataaaatgtcctcatactaatgctcataaaaaccatgtaaataatgaacggagtatgctcgagcgttttggtggtaaaaactatataataaggtatgagggctcttttaaaaatggcaacagcgactgctttgttttagaacatgttcaccatgata

SEQ ID NO: 267216 - DNA, 414 bp, Glycine max
cttgcccgcaaatccttggtcaatgccgacggtattatagagaaaacattcttgtgggggaggtactctttggaaatgtctgctgttatttacaaggattgggttttcaccgatcaagcattgcctaatgatcttgtcaagagaggagttgctgttaaggatccatctgctccccatggagttcgacttttgatcgaggactatccttatgcttctgatgggctagagatatgggatgctatcaagtcttgggtggaagaatatgtctcattctactacaagtcagatgaggaacttcaaaaagaccccgagctccaagcttggtggaaagaacttgtagaggtgggtcatggggatttgaaggataagccatggtggcaaaagatgcaaactcgtgaagagttggttgaagct

SEQ ID NO: 267217 - DNA, 443 bp, Glycine max
gcagaagaacaagtagttgagaactaagaaggagaagcaaatggcttcctcaatgatctcttccccagctgttaccactgtcaaccgtgccggtgccggcatggttgctccattcactggcctcaagtccatggctggcttccccaccagaaagaccaacaatgacattacctccattgctagcaacggtggaagagtgcaatgcatgcaggtgtggccaccagttggcaagaagaagtttgagactctttcctacctgccagaccttgatgatgcacaattggcaaaggaagtagaataccttcttaggaaaggatggattccttgcttggaattcgagttggagcacggtttcgtgtaccgtgagcacaacaggtcaccaggatactacgatggacgctactggaccatgtggaagctgcctatgtttggttgcactgatg

SEQ ID NO: 267218 - DNA, 425 bp, Glycine max
  unsure (1)..(425): unsure at all n locations
ctcaaagcaacacaagaacactctcttgaacattcatggatccagtgagcgtgtggggtaacacgcccttggcgacggtggatcccgagatccatgacctcatcgagaaggagaagcaccgccaatgccgcggcatcgagctcatcgcctccgagaacttcacctccttcgcagtcatcgaggccctcggcagcgccctcaccaacaaatactccgagggcatgcccggcaaccgctactacggcggcaacgaattcatcgaccagatcgaaaacctctgccgctcacgcgccctccaggccttccacctcgacgcccaatcctggggcgtcaatgtgcagccctactccggctcccctgccaacttcgccgcctacaccgncgtcctcaacccccacgaccgcatcatggggctggatctcccc

SEQ ID NO: 267219 - DNA, 458 bp, Glycine max
cccacgcgtccggtttgttgtgagctataagctagtttatcgtgaggagaatatgaagttgtttgttttctttgttgctgcagtagttttggtagcatggccatgccatggcgcaggctaccaaaggttccctctccgaatgaaaactggctatggtgagcgttcttcggaggtaaaatgcgcaagttttaggcttgctgtggaagcacacaacatccgagcctttaaaaccattcctgaagagtgcgttgaaccaacaaaggactacattaatggcgaacaatttacatcagactctaaaacagttaaccaacaagctttcttttatgctagtgaacgcgaagtccatcacaacgacatatttatattcggcatagataacaccgtactctctaatatcccatactatgaaaaacatggatatggggtggaggaatttaatgaaaccttatatgatg

SEQ ID NO: 267220 - DNA, 423 bp, Glycine max
aagtgaggcaggttccttatcttgttggctttgactcaaaagctgtgtgtggcatcagaaaatgaacaggttatcaatggcacttctccacccaaatcttcttcccactttcaattccaacactcttacctttccttccatcaaactcaaaccctcactctcgcacgtgccttctccaacccccacacgcttcagtctctctgtttccgcggcggaaaccaccgcttttgccgcccctcccactccccaacctgagaagcttggagttgtagttaagccaacggagaagccgagacttgtgttgaagttcatatggatggagaagaacattggaattgcgcttgaccagatggtaccgggccatggcaccattcctctgagcccatattacttttggccccgaaaagatgcctgggaagagct

SEQ ID NO: 267221 - DNA, 433 bp, Glycine max
  unsure (1)..(433): unsure at all n locations
tgatgacgaggacgatgaagacgaggaggagttgaagaagaagccctttgggttctctcggtccancaacaaggctgcttctaagcctctctctcgtggatcagcaactgtggaatcaaaggggcaagctgagaagtgtgccaagagaaagaggaagaaccagtatcgtggaatccgtcagcgtccatggggaaagtgggctgctgagatccgtgacccaagaaagggggttcgtgtttggcttggaactttcagcactgctgaagaagctgcaagagcttatgatgctgaagcaaggaggatccggggcaagaaagccaaggtgaatttcccggatgagccttcangcgctgctgcttcctcaaaacgcctcaaggtgaatccagaggctcagccaatgaaggaaaatctgaacaccgtgaagccgaaaatg

SEQ ID NO: 267222 - DNA, 384 bp, Glycine max
atgcgccccgctttaattatcagttataagaattaagatagcatgtctttgctactttgcgagtaaaaaaggaaaaaaaaaaaaaaaaaaaaaaaaaaaaaaaaaaaaaaaaaaaaaaaaaaaaaaaaaaaaaaaaaaaaaaaaaaaaaaaaaaaaaaaaaaaaaaagggggggggcgttttaaaggatcaaagtttacgtacgcgggaatgcaacgtaaaaatttttttataggggaaccaaaattaaattaacgggccggggtttaaaaacggggggacgggaaaaaccctggggtaaccaaactaaatggccttgaaaaaaatccccttttggcaaggtggggaaaaaaaaaaaaggcccgaaccaatggcctttccaaaa

SEQ ID NO: 267223 - DNA, 434 bp, Glycine max
atggctttaggtgttcctgctcttccgttgacatacgtggctcacgttctggcagttgttgccagcgtcttggtcgtggtctgggtcgtcaatttcaggggtggcttggcttgggattctgataacaagtccctcatcttcaacattcatccagttcttattgttattggcttactagttcatgggggtgaagctattataagttacaaagcttttcccctaaagaaggaagtgaagaaattgatacaccttgttttccatgccatcgcattaatacttggaatagttggaatttatactgccttcaagtttcacaatgaaagtgggattgccaatctctacagcttgcattcatggcttggaattggggttattgtcctttatggcattcagtggatatatgggtttgtgatctttttcttccctggtgggac

SEQ ID NO: 267224 - DNA, 427 bp, Glycine max
  unsure (1)..(427): unsure at all n locations
gcgggacttcaatctggcaaagcacccagagattgatgtgccgaatctgcaggtgataaagctgatgcanagcttcaaatccagagagtatgtgagggagacatttgcgtggatgcactattactggttcctcaccaacgatggaattgagttcctcaggacatacctcaaccttccttccgaaattgtccctgccactctcaagaagcaggccaagcccgcgggaagaccattcggtggcccacccggtgatcgccccaggggcccacctcgctttgacggagagaggagattcggtggtgaccgtgatggataccgtggaggtccacgcggacctggtggtgatttccgtgacaagggtggagctcctgctgactacaggccttcttttgggggtggtcctggtggaaggcctggttttggtcgt

SEQ ID NO: 267225 - DNA, 450 bp, Glycine max
  unsure (1)..(450): unsure at all n locations
gtcttggaacaaatgacttcctagagaactactacaccatgcctggtagagcatctcaatacacaccccaacaggaccaaatttttctggctggcatagctgagaacttcataaggagcctctatggtcttggtgctaggaagatttcgctaggagggttacctcccatgggatgcttgccacttgaaagaaccacaaatattgttggtgggaatgactgtgttgccagatacaataacatagcattggagttcaatgataagctcaagaatttgaccattaagctaaaccaagagctccctggactcaaattggcgttttctaatccttattacattatgttgaacatcataaaaagacctcaactntatggatttgaatcgacctcagtggcatgttgtgctactggaatgtttgagatgggttatgcatgcaacangggccaaatgt

SEQ ID NO: 267226 - DNA, 439 bp, Glycine max
ctcctcctaggtggaattggaattggggatctactagatgggcctaatcagaagcatgagatcgcggtcacagcgtgtggtgcaggagcaagaagctgctgagtgtgtcggtgtcgtcgtcggcgacagcatgcgacagagttgttgggccaacatgccccaagagcttctccgagaggtcctcctccgaatcgaggcctccgaggacacgtggccgccgcggaagagcgtcgtctcctgcgccggcgtctgccgcagctggagacatatcaccaaagacattgtcaaaacgcccgaactctcctccaagatcaccttccccatttctgttaaacagcctggcccaagggagaatctcctacggtgctttataaagcgcaaccggtccacccaaacatactatttgtttctcagtttaaccagtacgctagctgaagat

SEQ ID NO: 267227 - DNA, 436 bp, Glycine max
aaacatgttggtttaccaggacctccttacaggtgatgagcttctctctgactccttccgttacaaggaaattgagaatggaatgctgtgggaagttgaggggaagtgggttgttaaaggagcagttgatgtagacattggtgcaaacccttctgctgagggtggaggagaagatgagggagttgatgatgcagctgttaaggttgttgacattgttgacacattcagacttcaggagcaacccgcattcgataagaagcagtttgttaccttcatgaagaggtttatcaagaatttgactcccaagctcgatgcagagcaacaggagttgtttaagaagcacatcgagggagcaactaaatacctgctctctaagattaaagatttccaattttttgttggtgagagcatgggtgatgatgcttgcttggtcttt

SEQ ID NO: 267228 - DNA, 432 bp, Glycine max
aaacaatagtgcatagcgtttttcattgtgcattattcaatggccaccacagcagctctatccggaaccatggtgagcacctccttcatgaggaagcaacctatgacgaccaagagcctaaagacattccccaacgctctttttggtctgaaaggtggacgaggtggtcgtgtaacttgcatggcctcgtacaaggtgaagctcataaccccagaaggagaagtggagtttgaatgcccagatgatgttttcattgttgacaaggctgaggaagaaggcattgaacttccctactcgtgcagggctggttcttgcgtttcatgtgttgggaaaattgtgaaaggtgacgtggaccagtcagatggtagcttccttgatgatgaacaaatagaaagtggatgggttctcacctgtgttgctctacctaggtca

SEQ ID NO: 267229 - DNA, 442 bp, Glycine max
  unsure (1)..(442): unsure at all n locations
caggcaagccccactcaaccaccacacctctcctcgttcacgctacccctttctgctcttgttctacctttcaagttttaaaagtataaagatggcagagacattcctatttacctcagagtcggtgaacgagggacaccctgacaagctctgcgaccaaatctccgatgctgtcctcgacgcttgcctcgagcaggacccagacagcaaagttgcctgcgaaacatgcaccaaaaccaacttggtcatggtcttcggagaaatcacgaccaaggccaacgttgactacgagaagatagtgcgtgacacctgcaggaacatcggcttcgtctcaaatgatgtgggactggatgccgacaactgcaaggtcctcgtcaacattgagcagcagagccctgatattgctcanggtgtacacggccaccttaccaaaaaacctgaa

SEQ ID NO: 267230 - DNA, 329 bp, Glycine max
attcgggttactcagtccacagcaaactttttcataagtgaagctaggaaatccacaaacacacctgatgctcaaaaagtgcgagataatctcatctacaattacaaacctacttttggtggaacggctgggaaaggatatgatcaagtgtatctctttgaataattctatctgtaggaggtgtccttgaatttgattttatgcacaataaattatgaactggggatgtagtttgaagaaataaaaatttgtgcacagtgatgtttgtaagatgcttaatttcagggcaatgctctgcttatcaatgtgttatatcttgttattgcccc

SEQ ID NO: 267231 - DNA, 450 bp, Glycine max
ttcatttcttccctcgccgctttgtgctgctgctgctgcaaaacctacggttgagccttttgctcacgttgtcagcgcttctttcttacaatggttctacagaacgatattgatttgctgaatcctccagctgagttggagaagagaaagcacaagctcaagcgtcttgtgcagtcaccaaactctttcttcatggatgttaagtgccagggctgcttcaacataacaactgtgtttagccactctcagactgttgtggtttgcggaaactgccagactgtgttgtgccaaccaacaggcggacgggcaaggttaaccgaagggtgctcttttaggaagaagggagattgaatggtttgttaaccagacttttctttgtcaatgattgaaaattttcggttgttaggtttttgaaatggaatccatttccggtatgggatattaattttg

SEQ ID NO: 267232 - DNA, 387 bp, Glycine max
ggagtattcaaaatatgcagacgttgcggggactcctactcctggttgtacggaaataccgacttgtacggtttggcttgagaggttggacccatatacgagggggattctcacaacactttgcgaccactcatttgattgaccttgtgtgtcaaaggggacgtatttatcttgccaggtttgtagattctggcagcaacacgatgagaagccaacctgatttatttgcggaacattagatgatctctgggtttgtatgatttgtggatctgatggatgtggaagatataaagaacgacatgctatgtaagcttggagagatactcagcgttgctattatcttgattataaaacacatctaatttgggattatgtgggtgacaatta

SEQ ID NO: 267233 - DNA, 449 bp, Glycine max
cccacgcgtccgcccacgcgtccgcccacgcgtccggtggaatccgacaactgaagatcaagctattgatcgagctcacagaattgggcaaactcgtcctgttactgtgacacgaatcactataaaagatacagttgaagataggatactggctcttcaggacgacaagagaaaaatggttgcatctgcttttggggaagaccatgctggcgcgtctggaactcgccttacagtagatgatctgaagtatcttttcatggtgtagactctagaccactccttgcttgttcttcccatgatggatgatttgaagttttgttttgggtggtttggcatggagttaggatggttcttaaggaggagggtatgactgttttttgagtacctgctgacatcggttgcacaagttggcaggcaaggcgaggcttggttgatccaagtggtaactt

SEQ ID NO: 267234 - DNA, 441 bp, Glycine max
gaaaatgaacagtttatcaatggcacttctccacccaaatcttcttcccactttcaattccaacactcttacctgttccttccatcaaactcaaaccctcactctcgcacgtgccttctccaacccccacacgcttcagtctctctgtttccgcggcggaaaccaccgcttttgccgcccctcccactccccaacctgagaagcttggagttgtagttaagccaacggagaagccgagacttgtgttgaagttcatatggatggagaagaacattggaattgcgcttgaccagatggtaccgggccatggcaccattcctctgagcccatattacttttggccccgaaaagatgcctgggaagagctcaaggagttgcttgagaacaagccttgcatctctcagaagcagatgattattcttctcaatcaggccactgata

SEQ ID NO: 267235 - DNA, 432 bp, Glycine max
gggaagtcactcatgaagaaactggtcatgtgctcaaagttccctttcgtcgagttcacctgtctggggaagcaggacactttgatacctatgacactagcggtccccaaaatgtaaacccaaggacaggactcccaaaattgcgcggagggtgggttgataggagggagaaactgggttatccaagattcactcagatgtactacgctaagcaaggaatcatcactgaggagatgctttactgtgccactcgtgagaaccttgacccagagtttgtgaggtcagaagttgctcgtggacgtgctatcatcccttcgaacaagaaacacttggagttagagcccatgatagttggaagaaactttttggtaaaagtaaatgccaacattgggaattctgccgttgctagctctatagaagaggaagtttaca

SEQ ID NO: 267236 - DNA, 294 bp, Glycine max
  unsure (1)..(294): unsure at all n locations
gcgggctgtataagttatctggcaaagattgtggcaatcattgtaaacatgtacgatgacatactttagtgaaaatacaaacttataaactgaagatattgcagccccacctcccatctctcttttgtactggtctggccctgcaggctgtataagttatctggcaaagattgtggcaatcattgtaaacatgtacgatgacatactttagtggaaaaaaaaaaaaaaaaaaaaaaaaaaaaaaaaaaaaaaaaaaaaaaaaaaaaaaaaaaaaaaaannnnaaaaaaataaaa

SEQ ID NO: 267237 - DNA, 346 bp, Glycine max
cccacgcgtccgcccacgcgtgcgcccacgcgtgcgcccacgcgtccgattggagaccaatggagcgatctgcttggagaccacagaggcgaaagcaggacctttaagcttcctaatcccatgtactacattgagtagtaccttcacctctctcaacaatctagctagagtttgctcctatctatatgtaataagggatgctgatatgcactattcaaataggagcattagctatgtttggtaatgtcactttatgttatgtgggtaagtcacctaagacactccacgtacctacgttgttgtctcttaccggctttaataaatcttctgcccttgttccatattt

SEQ ID NO: 267238 - DNA, 457 bp, Glycine max
gagggagagactgatgcattggaagagtgttcagaatggttgaaagcacatggggccagcggaattactgataacaatggagatatgctgctagatacaaaagtttcatcatctaatctgtttgtgccagagccagaggatgctgttgcccacggagatgccaatcttgctggtgatgactttttagcacgagcacctttatagccaagtttgttgtttttgaagcgcatagtgagatgtcattcaggaaagtagcagaaaatatgccgcagccttcatgtgcttatattgcaagcaggctagaaaaaggctgtgatggtgattagtaaactggaatatacaatattgaaaggaaaaaaaaagccgcctaacgttctctaatgaaacggggcttataaaaacattgggtgcttgcttgctagcttacaccattctttcctggggaaggacaggacta

SEQ ID NO: 267239 - DNA, 447 bp, Glycine max
cccacgcgtccggaagcattagcactaggagcagcaacaactagtctcagctgaaatgggctcttcagtgatggcatctgtggccctcaaacctgcccctttcactgttgagaagtcctcagtgagaggccttccctctctctcaaggaactcttcttcattcagagttgtggccagtggcaagaagatcaagactgacaaaccttatggaattaatggtggcatggctttgagggatggaactgatgcatctggcaggaaaggaaagggaaagggtgtttaccagtttgtagacaaatacggtgctaatgtcgatggttacaggcctatctacgacaccaaggactggtctccaaccggtgatgtctacgctggcggtacgactggcttggctatctgggctgtgactctacttggtcttttagctggtggtgcacttcttgtcta

SEQ ID NO: 267240 - DNA, 407 bp, Glycine max
  unsure (1)..(407): unsure at all n locations
gtttgttgtgagctataanctagtttatcgtgaggagaatatgaagttgtttgttttctgtgttgctncgggaggtttgggagcatggccatnccatggcgcangctaccaaaggttccctctccgaatgaaaactggctatggtgagcgttcttcggaggtaaaatgcgcaagttttaggcttgctgtggaagcacacaacatccgagcctttaaaaccattcctgaagagtgcgttgaaccaacaaaggactacattaatggcgaacaatttacatcagactctaaaacagttaaccaacaagctttcttttatgctagtgaacgcgaagtccatcacaacgacatatttatattcggcatagataacactcggctctctaatatgccatactatggaaaacatg

SEQ ID NO: 267241 - DNA, 442 bp, Glycine max
  unsure (1)..(442): unsure at all n locations
gcatttgttgctgcggatgctgatgggagtgttccctttgtctggggaactgatgctgatggaaatctcgttttctcagatgagacagacatcgtaactaagagctgtgggaaatcttacgcaccattccccaaaggatttttcttttcaacatccggaggtttgagcagttttgagcatccactgaatgaggtgaagcctgtaccaagggttgacagttccggacaggtgtgtggtgcaactttcaaggtggatgctgaggctaanaaagaagcaactggcatgccaagggttgggagtgctgctaactggtcaaataatatctgattgcgactctattctgtttgaattatgggcttttattttatcatagctgcactcggctgcaagttctggacctgttcctatattatgataactttgaggctttgcttatcatatt

SEQ ID NO: 267242 - DNA, 444 bp, Glycine max
ctctctttgatacccttttgttctttttggtgctttaatttgcactagcaagggggttggttttatttctgtttgcttgcaacaatggctgtggctaataagttactttctgttttgatcattgccctcattgccatttccatgcttcaaacagtggttatggcatctcatggacatggaggccaccactacaatgacaagaaaaaatatggacctggcagtctcaaaagcttccaatgcccatcacaatgctcaaggaggtgtggcaagacccagtaccacaagccctgcatgtttttctgtcagaagtgttgtaagaagtgcctatgtgtgccaccggggtattatgggaacaaagcagtgtgcccttgctacaacaactggaagaccaaggaaggaggacccaaatgcccttaataaccttatgctatgttcttcatcaaa

SEQ ID NO: 267243 - DNA, 434 bp, Glycine max
gtcttggaacaaatgacttcctagagaactactacaccatgcctggtagagcatctcaatacacaccccaacagtaccaaatttttctggctggcatagctgagaacttcataaggagcctctatggtcttggtgctaggaagatttcgctaggagggttacctcccatgggatgcttgccacttgaaagaaccacaaatattgttggtgggaatgactgtgttgccagatacaataacatagcattggagttcaatgataagctcaagaatttgaccattaagctaaaccaagagctccctggactcaaattggtgttttctaatccttattacattatgttgaacatcataaaaagacctcaactttatggatttgaatcgacctcagtggcatgttgtgctactggaatgtttgagatgggttatgcatgc

SEQ ID NO: 267244 - DNA, 455 bp, Glycine max
  unsure (1)..(455): unsure at all n locations
gccgccacgcgtnccggaagaaagagggaaggagaacccaacactacccaactccgaaataggagggggagaaattttgtatgcggtggatttcgtacatctgaataaatgacaaatgtatcattcaaagaatgttcctagtgcaagtttaattggtggtaattcattaagtcatggtcagcacatagattgtggtggcagcacaatggatcctggcagtggaggaaatggtcttagcaacaactctaatctcacctcaaaacaacgtttacggtggacacatgaattgcatgagcgctttgttgatgctgtggctcaacttggtgggccagatcgtgccacacccaaaggcgtgctcagagttatgggtgtacaaggcttgaccatttaccatgtcaaaagtcatttacagaaataccgacttgcaaaatatttacctgactcctcatctgatg

SEQ ID NO: 267245 - DNA, 459 bp, Glycine max
  unsure (1)..(459): unsure at all n locations
gcgcccacgcgtncgnggacgcgtgggcggacgcgtgggcgaagcaggaactaaatatggctgagttgttggaatggtgaaagcgggataagaaacgaatgcttcatgtcgtctaccgtgttggtgaccttgatcgcaccatcaaattttacacagaatgtttaggaatgaagcttttgaggcaaagagatatcccagaggagaaatatgctaatgcttttcttggatttggccctgaagaatcccattttgttgttgaattaacatataattatggggttacctcgtatgacattggcgatggctttggacattttgcaattgcaactcaggacatttataaattggttgagcacatcagggccaagggtggaaacatcacaagggaacctggtccagttcaaggtggaactactgttatcgcctttgttaaggatcctgatggttatacttttggac

SEQ ID NO: 267246 - DNA, 451 bp, Glycine max
  unsure (1)..(451): unsure at all n locations
gcgcccacgcgtncgcccacgcgtccgcaaaaggaaagaatatcaacaaggtaaagtagattccttactanacatggcgttgaaggacacattctacatatctcatggatcaccaactttgtccatagatgaatccattctggccaggaagttccttcagtcatggaagaaggacgtgtttcctcaaagaccctcttcaattcttggcatctctggtcattgggaaaccgcagttcccacggtcaacgtcgttgactccatcaacgacaccatctacgatttctatggcttccccaaacaaatgtaccagcttaaatatcctgcacctggagctccacaattggcaaggagggtgaaggaactactcaagaaatctggtttcagccatgttgatgaagatacaaagcgaggacttgaccatggtgcttgggttcctctctttttgatggat

SEQ ID NO: 267247 - DNA, 435 bp, Glycine max
gcgcgttgctgggctttgtatctgcattataaagcatctaatctagtagctcatgtccattgggggaactgcgggacaacactcatgtgtcctgatggagctccatcagtcaaatgtgctctttgtcactttattactaatacgaacaatggaaggcttccgatccctgtccatagacccaatgggacaaccaatgctggaacattacctactacttcaacatcaatgccccaatctcaaagtcaaacagtagtggtagaaaatccaatgtctgttgattcaagtgggaaattggtgagcaatgttgttgttggggttacaacagataagaaataacgccatcacatatagaaggtacagttcacgtctggacgcattaccacagttgctgtcacaggaagatattggttgcgtatatgaatatatatgatattg

SEQ ID NO: 267248 - DNA, 445 bp, Glycine max
cgactaaaaaatgaaatgaatcatttcatattgatagtattgctatgcttagtgtgcgactcgttagttttttagaacggttccaatttaacaaatttataaaccggttcatcgtataaatgaattaaaaaagaactaataaccaacgcatcgcttcggattatctagatctaaagaactagtcaaaacaaaaaaaaatataaaaaaagatatattatagcaactgaactattgtgaagcataaaagaacaaaaatcttatttagttgtaaagcaataaaaatatacagataaatgaagaggtgaaagaaagagagaaaaaaaatcaatgatatagaattctaatatgtaaaggtctatgggttatctcataaaaggtagtgtaataaagcatcaatctaaatcaattcatatctatttatatatgaattaatttataacgtaaa

SEQ ID NO: 267249 - DNA, 442 bp, Glycine max
gaaaattctctttagagagatagagagaggaagaaagaatggcagcttgcactgtctactcaacacaatctctgagcacaaattgctccatctcaaccccatcaaagacgcaactcagttttttccaccaaaagcaggtagttttctggaggaacagcaagaagggcagctgcagcagcagaagaagctatgtgataacatgtgcagcaggtgactcacagacagtggtgattggcctggctgcagactcagggtgtgggaagagcaccttcatgaggaggctgaccagtgtgtttggaggagcagcagagccaccaaagggtggcaaccctgactccaacactctcatcagtgacaccaccactgtcatatgcttggatgattaccactctttggacagaactggaagaaaggagaagggtgtcactgcccttgaccctag

SEQ ID NO: 267250 - DNA, 439 bp, Glycine max
  unsure (1)..(439): unsure at all n locations
gcgccgcggaatttctcgcgactttgctagcttctgctgtcgtcaaagcctcgcttttggccccggatctctaccggctgctattgatcaacacgcctactgccaaaggagagagcaaaattcagagtgaagacaagcaacgtgatgcagagggagaagatggtaacgatgatgaaggcgacgatgacgacgatggagatggtggatttggggagggtgaagaggagttgtcatctgaagatggaggtggatatggcaacaattccaacaacaagagcaactcaaagaaggcacccgaaggtggcgcangaggggcagaagagaatggggaagaggatgaagatgaagatggtgatgatcaagatgacgacgatgaggatgacgatgatgatgacgaagaggacgaggcaagtgaagaagaggatgaagatggtgctga

SEQ ID NO: 267251 - DNA, 416 bp, Glycine max
  unsure (1)..(416): unsure at all n locations
gcgcccacgcgtncggtaactttgcacaagtgtggaagatgggaggctcgaatgggccaatttgggggcaaaaagtatggttatctgggtctgtttgacaccgaaattgaagctgcaagggcatatgataaagcagcaataaaatgtaatggcaaggaggctgtcaccaattttgatcctagcatctatgatagtgagcttaattctgaatcctcaggaggtgtagctgcacatcacaatttggatttgagtttgggcaattccagctctaaacataacaatagtcaaacatcggggaatcacttcgcaaattctgcaaccgatcagcatatgccacctgaatctaattggcggaatgggggaagcaagcctaagctggtaaatatacttccaaaaccatgtggtagaagcaacat

SEQ ID NO: 267252 - DNA, 446 bp, Glycine max
cattctctttgcgcagttccctacctctcctttcaagatgcagatcttcgtcaagaccctgaccggaaagaccatcacccttgaggtggaaagctctgacaccatcgacaacgtcaaggccaagatccaggacaaggaaggaattcccccggatcagcaacgtctcatcttcgccggaaagcagctcgaggacggccgtaccctcgccgactacaacatccagaaggagtcaacccttcaccttgtccttcgtctccgtggtggcatgcacatcttcgtcaagactctcactggcaaaaccataaccctagaggtcgaaagctctgacaccattgacaacgtcaaggccaagatccaggacaaggagggaatccccccagaccagcaacgtctcatcttcgccggaaagcaacttgaggacgggcgcaccctcgccgactacaaca

SEQ ID NO: 267253 - DNA, 434 bp, Glycine max
gcgatttgggccaataatgccaatcgtcactgtagacaatatagaagattgctacagtataataaaatcaaagccaaaacctcttgctgcatatctcttcacaaacaatgagcagctgaagaaagattatgtggataaaatattctcttggagggatgctcatcaatgacgccgtcatccatgttgcaactcgggggttgccttttggaggagttgaaaagagtggaatgggttgttaccatggaaaattctcttttgatagtttcagccacaggaagtcagttctctatagaagttttgatgcagattctaccattaggtaccctccgtatacacctcagaaggaaaaattattgaaggcccttattagtggcaatattgttcaaattattctttctcttttggggtggtcttaaggatgataaggtcccttt

SEQ ID NO: 267254 - DNA, 365 bp, Glycine max
gcggaaaaaaaaaacccttagccaacacaaccattatggccacctctgctattcagcaatcaggattcactgggcaaactgctctgaagcaggtcaatgagttcttccgcaagacccgtggcgccggcaaacgtcgcactaacatgcgccgcaccgtcaagagtgctcctcaaagcatttggtatggccctgaccgtcccaagtacttgggtccattctcggagcaaattccatcatacctgaccggagaattccctggtgactacggatgggacactgctggattatcagctgacccggaaaccttctccaggaaccgggagctggaagtgattcacagcagatgggcaatgcttggtgccctt

SEQ ID NO: 267255 - DNA, 448 bp, Glycine max
ccgtttttgtctatcggcgtgaacaatggcgacttacgctgcgatgaagcccacaaagcccggcttggaggagccccaggagcagatccacaagataaggatcaccctttcctccaagcacgtcaaaaacctcgagaaggtttgtgcggacttggttcgcggtgcaaaggacaagcgcctcagggttaagggacctgtcaggatgcccactaaggttcttctcatcactaccaggaagtccccttgtggtgaaggtaccaacacatgggacagatttgaacttcgtgtgcacaagagagtgattgacctctacagttccccagatgtagttaagcagattacctctatcacgattgaacctggtgtggaggttgaggttaccattgcagatgcttgatctggattcaaattttaactgttatgcttcccagttttttccctctctttt

SEQ ID NO: 267256 - DNA, 270 bp, Glycine max
cctaaaccctactcattctccatacctcaacgaagaggttaaagagacgggaacactttgctgtccgccttgaccgagcagagcttcgacttggccctcgattttgccctaaagtactctcagtcacaacagacaccgtcgtcgtcgtcgtcgtcatcaatggcaccgaagcagaccaaggctgagaagaagatcgcttacgatgcgaagctgtgcgacctaatggaggagtacggccagatcctcgttgtgaactccgataacggggga

SEQ ID NO: 267257 - DNA, 451 bp, Glycine max
gttgatcgagataactagaaacagtgggatgaaaatgaaggtgcttggtttcttcgttgctacaattttggtagcatggcaatgccatgcgtacgatatgttccctctccgaatgaacactggctatggtgcccgtactccggaggtgaaatgcgcaagttggaggcttgctgtggaagcacacaacatctttggctttgagaccattcctgaagagtgcgttgaagcaacaaaggaatacatccatggcgaacaatatagatcagactccaaaacagttaaccaacaagcttacttttatgccagagacctcgaagtccattccaaggacacatttgtgttcagtatagatggcaccggactctctaatattccatactacaaaaaacatggatatggggtggagaaatttaactcgaccttgtatgatgaatgggttaacaagggcaat

SEQ ID NO: 267258 - DNA, 380 bp, Glycine max
  unsure (1)..(380): unsure at all n locations
ntccggaaaaagaaaagcattttacgttcgaagtcgagtcgaagagttntgggagccaaatgggtcttctgagcatcataaggaaaatcaagcggaaagagaaggaaatgcgaattctaatggtcggattggacaattctgggaaaaccacaatcgttctaaagataaacggagaggacacaagcgtcatcagtcccacgctcggcttcaacatcaaaaccataacttaccaaaagtataccctaaatatatgggatgttgggggccagaaaacaataagatcttactggagaaactactttgagcaaacagatggtttggtttgggtggttgacagttcacatctcagaaggttggatgattgcaaattcgagctcgat

SEQ ID NO: 267259 - DNA, 440 bp, Glycine max
cccacgcgtccgctctaatagtaacagtaatagtaatatacataacataaccaatggaagcgcgtgcaggagccaatcaacggattgcaagaatctctgctcatcttcagccttcaaatttccaggaagggagtgatgttcttcttaagagaggtgagtgcagagcaaaaggtggggcacctggattcaaagttgcaattttgggggctgctggaggaattggtcaatccctttctttgctgatgaagatgaacccattggtttcagttcttcatctttatgatgttgtcaacacccctggtgtcacagctgatgttagccacatggacactggtgctgtggttcgtggctttctggggcagcaacaacttgagagtgcactcactggcatggacttggtaatcatacctgctggggtgccaaggaaacctgggatgaca

SEQ ID NO: 267260 - DNA, 445 bp, Glycine max
  unsure (1)..(445): unsure at all n locations
gctagtttatcgtgaggagaatatgaagttgtttgttttctttgttgctgcagtagttttggtagcatggccatgccatggcgcangctaccaaaggttccctctccgaatgaaaactggctatggtgagcgttcttcggaggtaaaatgcgcaagttttaggcttgctgtggaagcacacaacatccgagcctttaaaaccattcctgaagagtgcgttgaaccaacaaaggactacattaatggcgaacaatttacatcagactctaaaacagttaaccaacaagctttcttttatgctagtgaacgcgaagtccatcacaacgacatatttatattcggcatagataacaccgtactctctaatatcccatactatgaaaaacatggatatggggtggaggaatttaatgaaaccttatatgatgaatgggttaacaagggc

SEQ ID NO: 267261 - DNA, 398 bp, Glycine max
cacgaaggggcaaaagtgattgagaagcatgctgcacaactctgtgttctagcagaagactgtgaccagcctgactatgttaaactggttaaggccctttgtgcagagcacaatgttagcctgctgacagttccgagtgcaaagacccttggagaatgggctggtttgtgcaagattgattccgaaggaaaagctaggaaagttactggttgctcctgtgtgggtgtgaaggattttggtgaggagcatgaagcctataacgtcgttctgcagcatgtgaaatctcaatgagttgcaagattcatagattttatgcatttcattttgggttattccatgagaatgaattttgccttgtagctggattatatctaccttgggtttgattgtttaatatg

SEQ ID NO: 267262 - DNA, 377 bp, Glycine max
attattcacaccaccaagccaacagaagatgtttctccacattgttttcctcctttccctggtctcatccactttccatgccactgtccaagacttttgtgtggaataccttaagggtgcacacaccccttcaggctacccctgcaagccacctgcaaatgtaacttcagatgactttgtgtacacatgcttagctgaagctgcaaatgtcacaaacataatcaatgctgttgtgaccgcagcttttgctgctcaatttccaggtctcaatggacttgacctctgtgcagcaagattagaccttggacctgagggtggtattccactccacactcaacctggtgccaatgaactactcattgatctacaaagtgaca

SEQ ID NO: 267263 - DNA, 355 bp, Glycine max
  unsure (1)..(355): unsure at all n locations
cccacgcgtncggaacgctgctgccgaaacccttccggaaccctaaggtaagtgagtaatcagtggttgagaatggtggagaaggcgaagggtagaaaggaggaggtggttacccgtgagtacaccattaacctccacaagcgcctccatggctgcacatttaagaagaaagctcctaaagctattaaggagataaggaaatttgcccaaaaggccatggggaccaatgatgtgagggtggatgtgaagttgaacaagtttgtctggagccagggaatcaggagtgttccaaggaggattagagtaagaattgctcgcaagagaaatgatgatgaagatgccaaggaagagctgt

SEQ ID NO: 267264 - DNA, 362 bp, Glycine max
gcaaattagctactgatttcactgctgacacattgggtttcaagacctatgctccagcatatcttagcccacatgcatcagggaaaaacctccttattggagcaaactttgcttcagctgcatctggttatgatgaaaatgctgctactttgaatcacgcgattccgttgtcccaacagttgagttatttcaaggaataccaaggcaagctggccaaggtagctggcagtaaaaaagcagcctcaatcatcaaggatgcgttgtatgtgctcagtgctggaagcagtgactttgtgcaaaattattatgtcaatccttggatcaacaaagtctacactcctgatcagtattcgtcctactta

SEQ ID NO: 267265 - DNA, 408 bp, Glycine max
cccacgcgtccgcgagaaaaccctaattcgctcgcagtcacccaagaggcgaatccttaccattgctcgagatgggtgaagaagtgaaggccgtggttccagagtctgttttgaagaagcagaagagagaggaggaatgggcgttggccaagaagcaagacctcgaggctgcgaagaagaagagagccgagagccgcaaactcatctacaacagagctaagcagtacgctaaggagtacgatcaccaggagaaggaattgattcggttgaaacgcgaggccaagctgaaaggtggattctatgtccatccagaggctaagctcttgtttattgttcgcattcgtggtattaatgccatggatcccaaatcaaggaagatcctgcagctgttgcgattgagacagattt

SEQ ID NO: 267266 - DNA, 438 bp, Glycine max
  unsure (1)..(438): unsure at all n locations
gctataagctagtttatcgtgaggagaatatgaagttgtttgttttctttgttgctgcagtagttttggtagcatggccatgccatggcgcangctaccaaaggttccctctccgaatgaaaactggctatggtgagcgttcttcggaggtaaaatgcgcaagttttaggcttgctgtggaagcacacaacatccgagcctttaaaaccattcctgaagagtgcgttgaaccaacaaaggactacattaatggcgaacaatttagatcagactctaaaacagttaaccaacaagctttcttttatgctagtgaacgcgaagtccatcacaacgacatatttatattcggcatagataacaccgtactctctaatatcccatactatgaaaaacatggatatggggtggaggaatttaatgaaaccttatatgatgaat

SEQ ID NO: 267267 - DNA, 423 bp, Glycine max
cccacgcgttcgcccacgcgttcggcgattgctagaatggaatttcgatgctcagtcatgggttttaccattctcttctctcttgctcttgcaggagagagccatgtccatgcatcgctacctgaggaagattattgggaagctgtttggccaaacactcccattcccactgcactgcgagagcttctaaagcctctccctgcaggtgttgaaatcgatgaactccctaagcaaattgatgatacacagtacccaaaaacattcttctataaagaagaccttcatccaggcaaaacaatgaaagtacaattcaccaagcgtgcctatgcacaaccttatggtgtatatacatgggtaacggatattaaagacacctctaaagaaggatatagttttgaagagatatgcatcaagaaagaagcg

SEQ ID NO: 267268 - DNA, 152 bp, Glycine max
  unsure (1)..(152): unsure at all n locations
aaaaaaaaaaaaaaaaaaaaaaaaaagggaagaaaaaagaaaaaaaaaaaaaaaaaaaaaagaagaaaanaaaaagaaaaaaaaaaaaaaaagaaaaaaagaaaaaaaaaaaaaaaaaaaaaaaaaaaaaaaaaaaaaggggggggggaggg

SEQ ID NO: 267269 - DNA, 428 bp, Glycine max
ccggaccggaatcgccgggccgacgaagcgtacatggacaccagcggaggcgatgaggggcagaacaaccctgccctcgacccggatttggatgctccggatgacccggatcacgagttcgctgagttcgggtcgggttgcttctggggtgctgagttggcctttcagcgagttgtgggtgtggtgaagactgaggttggttacactcagggtcacactccggatccgaattacaaactggtttgcaccggaaccactaaccacgttgaagtggttcgggtccagttcgacccgaaggtttgcccctacaatgatctactcgctctcttttggtctcggcatgaccccacttccatcaaccgtcagggcaatgatgtgggtgcacagtatagatcaggaatatactactacaacgatacccaagctcg

SEQ ID NO: 267270 - DNA, 290 bp, Glycine max
caaccctgggctcgacccggattagggtgctcttaatgacccgtatcacgatttcgctgagtacgggtcgggttgcttctggggtgctgagttggcctttaagcgagttgtgggtgtggtgaacactgaggttggttacacttagggtcacactccggatccgaattacaaactggtttgcaccgcaaccactaaccacgttgatgtggttcgggttcatttcgacccgaaggtttgcccctacaatgatctagtcgctctatttttgggctcgggatgacccccacttt

SEQ ID NO: 267271 - DNA, 410 bp, Glycine max
  unsure (1)..(410): unsure at all n locations
gacccacgcgnncgctcaatnnggctcataacaagctctctggggagttatcagatgtggtgtgctctttgagaagccttgcaaatctaacggttgcttacaatatcttttctgggttcagccacgaatgctcaaggcttttctttaggaatgttggttttgatttctcactaaactgcattcctgatagggacatgcagagacctccacctgagtgctctggcataccaggtggaagtcttagttgtctcagaatccccacaccaaggcctcttgtttgtggttcaatggctgtaagtaagtctaagaacattattgatcccacttcatcatctcctccttgatgatggttattattagttacattacattacattacaagttggtcatagctgttccattaattactg

SEQ ID NO: 267272 - DNA, 341 bp, Glycine max
  unsure (1)..(341): unsure at all n locations
aaaaaaaaaaaaaaaaaaaaaaaaaaaataaaaaaaaaaaaaaaaaaataaaaaaaaaaggggaaaaaaaaaaaaaaggggagaaaaaaaaaaaaaaaaaaaaaaaaaaaaaaaaaaaaaaaaaaaaaaaaaaaaaaaaaaggggggggccggaaaaagggaacaaagggaaaggccccgggcggccaacggaaaaacccnccaaggggggcccaaaaaaaaaaaaaaggggccggggggaaacaacgggggaacgggaaaaccccggggggccccaaacaaaaaggccgggaagaaaaccccccnngcccaggggggggaaaaaggaaaggggcccgccc

SEQ ID NO: 267273 - DNA, 226 bp, Glycine max
  unsure (1)..(226): unsure at all n locations
ggaagacaacncgacaaaaaggccgnaacagaagcaaaccnaaagaaggcnggcgnccacacangggagcagnnaanncncaagganccacancnnancacnccaaangcaccnncanacaaancagcaangagagagaancngnngaggcaggganacagaanngnnggaancannggagaccaanggagcgancngcnnggagaccacagaggcgaaagcagga

SEQ ID NO: 267274 - DNA, 268 bp, Glycine max
aggcacacgtacggaggcgagaaacagacagaacaaccatgcgctcgaacgggataaaggtggaaacggaaaaccaaaaacaatgcctccagcaagtgtaatgacgaggcttattttgatcatggtgtggaggaaacatatcagaaaccccaacacctacaccagcctaagcggcctaacttggtcactcatttcattcaggtcttttacttcttctgacttcgagagctcgagctggagtattattattcaacattcttttcttttt

SEQ ID NO: 267275 - DNA, 403 bp, Glycine max
atcagtctctaatatttttctcactgtcttgtctctccagagaactgtatagagagagatggcagctgcaacatctggtgctgtgttaaatgggttgggatcttccttcttgagtggaggaaacaggagccaaacccttctggccactgctattggaggcaaagttggtgctgctgctgttactgttagtcctagaagactcattgtggtagctgctgctgcaccaaagaagtcatggctccctggtgtcagaggtggtggcaacctcgtcgacccagaatggcttgatggatcgctaccaggtgactatggctttgacccactaggccttgggaaggacccagcattcctcaaatggtacagagaagctgagctgattcatgggagatgggcaatggctgca

SEQ ID NO: 267276 - DNA, 413 bp, Glycine max
  unsure (1)..(413): unsure at all n locations
gnncgnnacaangacaaanactangncgatgcactcgcttccggtgaatttaccaaactagcttactatagtgatatttgtgttggagcaattgcatgccggctggagaagaaggaaggtggggggcaagttcgggtttacatcatgacgttaggtgttttggcaccttaccgtggacttggtattggaacaaagttattgaatcatgttcttgatctttgctccaagcaaaacatttctgaggtttacttgcatgtgcagacaaacaatgaagatgccataaacttctacaagaaatttgggtttgaaattacagaaacaatccagaactattatacgaacattacaccgncagactgctatgttctcacgaggtatacggcaagcacaacggaaaaataacatttcagcca

SEQ ID NO: 267277 - DNA, 437 bp, Glycine max
  unsure (1)..(437): unsure at all n locations
cgacccacgcgaacgcccacgcgtccgagaggnnggngngagctataagctagnnnatcgngaggagaatatgaagttgtttgttttctttggtgctgcagtagttttggtagcatggccatgccatggcgcaagctaccaaaggttccctctccgaatgaaaactggctatggtgagcgttcttcggaggtaaaatgcgcaagttttaggcttgctgtggaagcacacaacatccgagcctttaaaaccattcctgaagagtgcgttgaaccaacaaaggactacattaatggcgaacaatttagatcagactctaaaacagttaaccaacaagctttcttttatgctagtgaacgcgaagtccatcacaacgacatatttatattcggcatagataacaccgtactctctaatatcccatactatgaaaaacatg

SEQ ID NO: 267278 - DNA, 404 bp, Glycine max
taactagaaacagtgtgatgaaaatgaaggtccttgttttcttcgttgctacaattttggtagcatggcaatgccatgcgtacgatatgttccctctccgaatgaacactggctatggtgcccgtactccggaggtgaaatgcgcaagttggaggcttgctgtggaagcacacaacatctttggctttgagaccattcctgaagagtgcgttgaagcaacaaaggaatacatccatggcgaacaatatagatcagactccaaaacagttaaccaacaagcttacttttatgccagagacctcgaagtccattccaaggacacatttgtgttcagtatagatggcaccgtactctctaatattccatactacaaaaaacatggatatggggtggagaaatttaac

SEQ ID NO: 267279 - DNA, 408 bp, Glycine max
  unsure (1)..(408): unsure at all n locations
gacccacgcgnncgnccacgcgtccggctattccttcctcgttatggagtcgcgagtgctgtcacgcgccggaaccttgtcctccctccctgacctccgcaagccgccgcgggaggccgtctccagcgcctccctcgtcgccgtgaaggccgtgggctccgtcgcggacggcggcggcggcggcggcggcggcggcggtggtgaggtggaaactccaagggccactgggaagagagggttctctgagactgttgatctgaaacttaatcttcattccaaggaagatctgaatgagaatctgaagaatgtctcaaaggagaagaccctccttaaggatcctgccaagccaccggctaaggctcaagtggttggttggccaccagtgaggtcatacaggaagaacatgat

SEQ ID NO: 267280 - DNA, 393 bp, Glycine max
  unsure (1)..(393): unsure at all n locations
nnatccctctaancactctagctgttgcaaatttctactatttttcaatggcttctgcagatgttgagttccgttgctttgttggtgggcttgcttgggtcaccggcaacgatgccctcgagaaagccttttcaatctacggcgacatcgttgaatcgaaggttatcaacgaccgtgagactggaaggtccagaggattcggatttgtgaccttcgcctcagagcagtcaatgaaagatgcgatcgcaggaatgaacggccaggaccttgacggccgtaacatcactgtcaacgaagctcagacccgcgccagccgtggtggtggtggaggcggtggtttcggaagtggtggtggatacaaccgcggtagcgggggatatggtggtggtggtg

SEQ ID NO: 267281 - DNA, 410 bp, Glycine max
  unsure (1)..(410): unsure at all n locations
actncccctncnncgaanccccggcaggccactcaccaaccaacaccaancannccctggcaagacccgccgcaaagccacgacggcgaaggcggagctcgggacggcggtggcgcggacgggcggagccggttaccaatctccgtccgtcgacgttcccacgcataaggtcacagtccacgacagacaacgaaatcgttcacgagttcgtcgtgcctgaggaccagtatatattacatactgctgaggcccagaatattacccttccattcgcctgcaggcatggttgttgtactagctgtgctgtacgtataaagaagggacaaattaggcaaccagaggcacttgggatatctgccgaattgagagacaagggttatgcacttcttgtgtgggctttccgacctctg

SEQ ID NO: 267282 - DNA, 410 bp, Glycine max
agaaaggctaccccgaaaataaggcgccttccttggagcacaatggcaaggcgtagggagaaagccttgacttgaacaaatatgtgaatgcaaactttgaacggacacctttgtttcccagtgatcctgccaagaaagagtgtcgggagacacagatatcccaagttatatacattcagaaaaaacctgtgcgggtcattgaaaggggatgctgtacaagaagccagacccgctttggaatactaggagattgctcttggacaattcaaagatgacccattcttgcacagacaaactagattggcggatattgcttatactgcatgtgttgaaagaaaacaaaatgaatgcgctgaggagttcaaacatgacatcacataacgaacgtctaaacttgcaacacggattga

SEQ ID NO: 267283 - DNA, 426 bp, Glycine max
  unsure (1)..(426): unsure at all n locations
cacgcgtncgaaaaaaaaaaaaaaaattaaaaaaaaaaaaaaaaaataaaaaaaaaagggggaaaaaaaaaaaaaggggaaaaaaaaaaaaaaaaaaaaaaaaaaaaaaaaaaaaaaaaaaaaaaaaaaaaaaaaaaaaaaaagggggggcggcnaaaaagaaaaaaagcnaacaaaccggggaaggggaaaaaaaacccctnaaaagggggcaccaaaaaaaaancaaggggccgggggnnaaaaacgggggaacgggaaaaaccggggggaaaccaaaaaaaaaggccggggaaaaaaacccccnncgccaggggggggaaaaaaaaaaaaggcccgaacgaaaggcccncccaaaaaggggcccaaccaaaagggaaaaggggaccccccccggaagggccaaaaaagggggggggggggggg

SEQ ID NO: 267284 - DNA, 350 bp, Glycine max
gtcaggaagatatcttgacaaaatggccgtaacagaagcaaacctaaagaaggctggcttgcacacatgggagcaggtaattctcaaggatccacatcttatcactccaaatgcactttcatacaaatcagcaatgagagagaatctgttgaggcagggatacagaattgttggaatcattggagaccaatggagcgatctgcttggagaccacagaggcgaaagcaggacctttaagcttcctaatcccatgtactacattgagtagtaccttcacctctctcaacaatctagctagagtttgctcctatctatatgtaataaggtatgcatatatgcactattcaaat

SEQ ID NO: 267285 - DNA, 410 bp, Glycine max
  unsure (1)..(410): unsure at all n locations
gacccacgcgnncgannangnggcactctatggcctcagagacagaagctgctcttgctgccactccctctgatggtcccaccgtatttggcaagatcatcaataaggaaattccttctactgtggtctatgaggatgataaggtccttgcctttagggacatagatccacaagctcctacccatattctaatcattcctaaagttagggatgggttaactggtctgaccaaggctgaggagaggcactgtgagattctaggtcgacttttgtgcactgctaagctggttgcaaagcaagaaggtcttgatgatggcttcaggattgtaattaatgatggacgagacgggggccaatcagtttaccacattcatgtgcacctcattgggggacgacagatgggctggccc

SEQ ID NO: 267286 - DNA, 358 bp, Glycine max
  unsure (1)..(358): unsure at all n locations
gacccacgcgnncggccacgcggccgcccacgcgnacgcngaagggnanagccgaaaacctttcagaagaagaaaggaacggcncgaaagagagggncaaanccanggacacagacaacagnggaacaancacaancgaagaggggaaagccggncgcccaaaanngggaacgaaacnanccgaagcagaagcaaggcaganganggaagcggccgacgcaganggaaacggaaccanngaanacanggaaggaagaaccgcgaccacgcacangaanagaanggaaagagaggancaccgananaaagccnnngaacangncgacaanngaaagagcggggacancacaaaggaaga

SEQ ID NO: 267287 - DNA, 298 bp, Glycine max
  unsure (1)..(298): unsure at all n locations
cccacgcgtccgagngattatagactatctttatataataagataaataagaataaaagggtaaaaaaaaaaaaaagaatctatataaatataaaaataatatatataaggtacaaatagtaaatcgaggtacccattttatgataaactttccttccatttttgttcctctagtaggcctagtatttccggcaatggcaatggcttccttatttctttatgttcaaaaaaacaagattttttagatacagaaaacaaagtgaaattctggggttgtttaatccccaattataatact

SEQ ID NO: 267288 - DNA, 416 bp, Glycine max
  unsure (1)..(416): unsure at all n locations
actnngngnngccaactataanannaaacggcggnggaanagaanangccacatnnggaaaggaaacccgcccngncactggngcgcaancncgcgancagnnctgcaagggctttccgataaccatttcatccccagcccgaatccgtcacatcagcgaaggccttagtttgaacattgggttcactttcgcatccccgtgttcccccgcttctgagtggaccattgtgaaggatcaaccagaaggactcgctgttaaactcactgggtttaaaaatacagtgcccggtgtgtttacattgaagagagttcccgccgatgaaattatcggctacaacatcttgttctgtcctcttgataataacccatgtgggtatgttgcggttcatttcgaccaattccgaaacaagcgtttg

SEQ ID NO: 267289 - DNA, 396 bp, Glycine max
cccacgcgtccggagtgagagtgttcttcgtttgctaccttctctcagaaatggttacgttcaggtttcaccagtaccaggtggtcgggagggctctcccaacggaagcagatcagcatccgaagatctaccgaatgaagctctgggccaccaacgaggttcgcgccaagtctaagttctggtattttttgaggaagctgaagaaggtaaagaagagcaatggtcaagttcttgctatcaacgagatttttgagaagaacccaaccaagattaagaactacgggatatggttgcggtatcagagtaggactggttaccacaacatgtacaaggagtaccgtgacaccactctaaacggttcagttgaggcaatgtacaatgagatggcttttcgcc

SEQ ID NO: 267290 - DNA, 427 bp, Glycine max
gctttctgctgacccagagacttttgccaaaaaccgtgaactggaagtcatccactccagatgggccatgttgggagccttgggctgtgttttccctgaactcttgtcccgcaacggagtcaagtttggcgaggccgtgtggttcaaggccgggtctcagatattcagtgagggtgggcttgactacttgggcaacccaagcctgatccatgcacaaagcattcttgccatctgggccacccaagttatcttgatgggtgccgttgagggttaccgtattgctggtgggcctcttggtgaggtgactgacccaatctatccaggtggcagctttgacccattgggccttgctgatgacccagaggcttttgctgagttgaaggtgaaagagctcaaaaatggtaggttggccatgttctccatgttt

SEQ ID NO: 267291 - DNA, 430 bp, Glycine max
aaaaaaaagaatctatataaatataaaaataatatatataaggtacaaatagtaaatcgaggtacccattttatgataaactttccttccatttttgttcctctagtaggcctagtatttccggcaattgcaatggcttctttatttctttatgttcaaaaaaacaagattttttagatacagaaaacaaagtaaaattctggggttttttattccccaattataatactaaattcaaaaaaaggagagtaatgagtataatctttcgctcagacgatgtactgatatattctatggcggaggttcgaagaacaagcaatttattttgggccgttttcactttgttaggttcattggggttattgttccgtgcaatttccagttatcttggtatggatttgttctttatttctgagaaaattagtgattt

SEQ ID NO: 267292 - DNA, 407 bp, Glycine max
gaagggcgtaggagaagagggtttcgttccgtttcaatggggagcgaagagcagaacggcgaattctacctgcgttactacgtcggtcacaagggcaagtttggtcacgagttcctggagttcgagttccgcccagacggcaagctccgctacgccaacaactccaactacaaaaacgacaccatcatccgcaaggaggtttacctaacccccgccgttctccgcgagtgccgtcgcatcatcgccgagagcgagattatgaaggaagatgataacaactggcccgaaccggatcgggtggggcggcaggagctcgagattgttatggggaacgagcacatttcgttcaccacgtcgaagattgggtctcttgttgatgttcagagcagtgctgaccccgagggtct

SEQ ID NO: 267293 - DNA, 411 bp, Glycine max
cccacgcgttcgcccacgcgtccgggttctcttaaaacaaaggcccctcaaaccactttccccacactcttttagtgtgtcgtattttttcctctctttctccacaattaggtcttggaccgacccttttgtgtaagtgcaatggccatggctaagcttgtatgtgttctgcttctggcattccttggcatttccatgatcacaactcaagttatggcaacagattctgcctatcacttggatggaaggagttatggacctgggagtctaaagacctcacagtgcccttctgaatgcacaagaagatgtagccagacacagtaccacaagccgtgcatgtttttctgccaaaaatgctgcaaagcgtgcctttgtgttcctcctggctactatggcaacaagtctgtgtgc

SEQ ID NO: 267294 - DNA, 415 bp, Glycine max
cccacgcgttcgcccacgcgtccggttgatcgagataactagaaacagtgtgatgaaaatgaaggtccttgttttcttcgttgctacaattttggtagcatggcaatgccatgcgtacgatatgttccctctccgaatgaacactggctatggtgcccgtactccggaggtgaaatgcgcaagttggaggcttgctgtggaagcacacaacatctttggctttgagaccattcctgaagagtgcgttgaagcaacaaaggaatacatccatggcgaacaatatagatcagactccaaaacagttaaccaacaagcttacttttatgccagagacctcgaagtccatcccaaggacacatttgtgttcagtatagatggcaccgtactctctaatattccatactacaaaaaacat

SEQ ID NO: 267295 - DNA, 414 bp, Glycine max
gtcgcgttgtgttgcgtcgtgtcgtgcgctgttcctctgtctgtcgtttttgttttcagaccaaaccctagctccgcatcgcaaccatgtcgaccaagcaaggtggaaaagctaagcctttgaagaaacccaagtctgataagaaggattacgacgaggttgacatggctaacattcagaagaaaaaggaagaggagaaggcgctaaaggagttgaaagccaaggcgcaacagaagggaagctttggaggttctgggctcaagaaaagtggaaagaaataagggctctttatcatgattgtatacatccaatattgagccctgtagtttattaccatgataacttctgtcttattgtggccttctttattgctctaatgttagtactgaactgaggtatttcgtgatgtaagct

SEQ ID NO: 267296 - DNA, 409 bp, Glycine max
cccacgcgtccggtaagcactatagaaaaaaaaggacattcattcatctatggctacccttattgctcccagcaaccactctccccaagaagatgctgaagctctcagaaaggcttttgaaggatggggaactgatgagaacactgtcatagtaattttgggtcatagaactgtgtatcagaggcagcaaatcagaagagtttatgaggaaatttaccaggaggatcttgtgaagcgcctagagtctgagatcaaaggagactttgagaaagccgtgtaccgatggatactggaacctgcagatcgtgatgctgttttggccaatgttgccatcaagagtggcaaaaactacaatgtcattgtggaaattgccactatcctctccccggaagagcttttggcggttaga

SEQ ID NO: 267297 - DNA, 408 bp, Glycine max
cccacgcgttcggtttgttgatcgagattactagaaacagtgtgatgaaaatgaaggtgcttgttttcttcgttgctacaattttggtagcatggcaatgccatgcgtacgatatgttccctctccgaatgaacactggctatggtgcccgtactccggaggtgaaatgcgcaagttggaggcttgctgtggaagcacacaacatctttggctttgagaccattcctgaagagtgcgttgaagcaacaaaggaatacatccatggcgaacaatatagatcagactccaaaacagttaaccaacaagcttacttttatgccagagacctcgaagtccatcccaaggacacatttgtgttcagtatagatggcaccgtactctctaatattccatactacaaaaaacatg

SEQ ID NO: 267298 - DNA, 407 bp, Glycine max
gacaaaactactcacagagaaagacactcggagaccttgcaagacttcatcaatggctgtcaaagtttatattgtgtactactccatgtatgggcatgttgagaaactagcagaagaaataaagaaaggggcttcctctgtggaaggtgttgaggccaaattatggcaggtacctgagacgctgcaggatgaggtgctcggtaagatgagtgcaccacccaagagcgatgtaccagtcattaccccgaatgaactatccgaggctgatggctttgtattcggcttcccaacaaggtttggaatgatggctgctcagtttaaagcttttctagatgctactggaggcttatggagagcacaacagcttgcaggcaagcctgctggcatcttctacagcactggttcac

SEQ ID NO: 267299 - DNA, 415 bp, Glycine max
cccacgcgtccggacagtgatacctgtgatgcttgttcattactattcaactcaccctgtggcacagtatcagtggtggaggtcgaggatcgtaacgttgttgacttgggcgtggagtgttaggctgatccacaactacttcaggcgagaaaagtggcagtggggtgccagggaggattggcgtttcactgatttgagccatcgctatggaaggcattggtggtgggcttctttcttcgccatctacgtccctcagcaggtgtttctgattggattgtctcttccgttctatgtcatccactcggtgaaccagcctctgagcatgtgggacttggtagccatagttgtgtgtgtatctggcattgtcacggcatacattgctgatactcagctttacaactttgggagtagaaag

SEQ ID NO: 267300 - DNA, 411 bp, Glycine max
  unsure (1)..(411): unsure at all n locations
ctcaagaggctgggaactaccnngcatgcttctgggtggatagccctagtcaaggagttggtgaggttaatgtaaaccttgattggaaaattggaattgcagctaaggattgggattcagttgctagaaaagagaagattgagggagttgagcttgagctgagaaagctagagggagcagtagaggccatccatgagaatttgctctatcttaagggcagggaagctgagatgaggattgtgagtgaaaaaacaaatggcagagtggcatggtttagcattatgtccttggctatgtgcattgcagtttctggtttgcaattgtggtatttgaagcggtacttccagaagaagaagcttatatagattaagtaaattaatttgattagtgatactgcaaacatataataac

SEQ ID NO: 267301 - DNA, 396 bp, Glycine max
cccacgcgtccggcaaatgctaaaggaagtctatttcaaagatttccttcagatttgttgacacagctgaagacagattgtctcgtcctgcacaatcatcgttatgccatatccccacgcaagcttcaatataataccaagttatctgacttttttgagattctggcaacatctgaggatagagatggaaagactttcgtttccacagcacgtggtaggaaatatcccgtgactgtcaacctatggcaaccagagaaaaatgcttttgaatgggctacatctttgaaagcccctcacacagaggatgcaattcgggttactcagtccacagcaaactttttcataagtgaagctaggaaatccacaaacacacctgatgctcaaaaagtgcgagat

SEQ ID NO: 267302 - DNA, 202 bp, Glycine max
  unsure (1)..(202): unsure at all n locations
gacccacgcgnncgggncgangagaagatncgngaggctgacgncgatggagaaggccaaataaactacgaggaggncgnnaaggggangagggccaagngagggancatcacattatggccacaagaacctaaatgaagaagcgtggattaaaaggaaatgaccaaaaaaacagaggtaaggggaaggacaagggtttggg

SEQ ID NO: 267303 - DNA, 390 bp, Glycine max
gccaccaacacacacacttagatcaactttcctcgtcccttgctttccactccaccaaggtaccaaccaacctaccaaatggcagcaaagccagctgaagaagctcctcaaggagaaaccctcaagtaccagtcgtgggttttgaaagtattgatccactgcgatggctgcaaaaggagagtcaagaaaattcttcagggaattgatggggtttatacaacagaggttgattctctgcagcacaaggttactgtcactggtaacgtggacgctgagactctcatcaagaggctttcaagatcagggagggtagtggagctttggccagaaaaaccacctgagaagaaagataatcagaagtctgggaaatccaataaggggggtggtgat

SEQ ID NO: 267304 - DNA, 382 bp, Glycine max
  unsure (1)..(382): unsure at all n locations
ccgacccagcgncgcccagcgtccgagcatcagggctacagcctgcatgcttcacgggctgcagccggcccgcaaccgcccgcaaaggcttggcctttccggaaccgtccgcattcccggcgacaagtcgatctcccaccggtccttcatgttcggcggtctcgcgagcggtgaaacgcgcatcaccggccttctggaaggcgaggacgtcatcaatacgggcaaggccatgcaggccatgggcgccaggatccgtaaggaaggcgacacctggatcatcgatggcgtcggcaatggcggcctcctggcgcctgaggcgccgctcgatttcggcaatgccgccacgggctgccggctgaccatgggcctcgtcggggtctac

SEQ ID NO: 267305 - DNA, 248 bp, Glycine max
  unsure (1)..(248): unsure at all n locations
nccacgcgtncgggaaggatacaaaggaagccatcttagtgctgcttcttgcagcccttatcctcatgcctcaagggcttgctacttactacaaaccaattaagaagccaccagtgtacaagcctccagtgtacaagccaccagtgtacaaaccaccggtttataagccaaaaccaccggtttacaagccgaaaccaccggtttacaagccaccacataagaagccaccatacaagaaaccaccttat

SEQ ID NO: 267306 - DNA, 435 bp, Glycine max
cttagaattgcgaagccacagcattttctacccatacatggagaactcttgttcttgaaggagcacgaattacttggaaaatcaactggcattcggcacacaactgttattaagaatggagagatgcttggagtttctcatttgagaaatagaagagtcctttctaatggttttatttcacttggaaaagagaatttgcagttgatgtatagtgatggcgagaaagcgtttggtacatcaagtgacctctttattgatgaaagattgaaaattgcattagatggcatcatagtggttaacatggaaatatttcgccctcaaaatttagacagtccagttgagaacaccttaaaaggaaaaataagaattaccaccagatgcctgtggcttgacaaggggaagcttgtggatgctctccataaagctgctcatgct

SEQ ID NO: 267307 - DNA, 395 bp, Glycine max
cgagcaactaccatggctaccgctccttcgcttctacactcatctgggtcctcttttttgtctcaatttcgtgcctttcaattctcttcttcttcgctgtttcctcatggaaacaggcatgggaatgccgtggtctctgtgaaggcctctgcttctggggttgtgttggtggagaagtctgaggcagagaaggccaataggctcaaaacagcttacactgagaaaattattcccttgctcatggaagagttctcttacaccaacaaacaccaggtgcctaaaattgagaagattgtggtgaactgtggtattggagatgctgcgcaaaatgcaaagggtttggacgcggcaataagtgatctagcactgatcacagggcaaagacctattaagac

SEQ ID NO: 267308 - DNA, 306 bp, Glycine max
  unsure (1)..(306): unsure at all n locations
ccggccggaatcccggtcgcccacgcgtncgccagcgtccggngagaactaagaagagaagcaaaggcgnccncaagancncgggccagctgttaccactgtcaaccgtgccggtgccggcatggttgctccattcactggcctcaagtccatggctggcttccccaccagaaagaccaacaatgacattacctccattgctagcaacggtggaagagtgcaatgcatgcaagtgtggccaccagttggcaagaagaagtttgagactctttcctacctgccagaccttgatgatgcacaattggc

SEQ ID NO: 267309 - DNA, 321 bp, Glycine max
  unsure (1)..(321): unsure at all n locations
gacccatgcgnncgnccacgcgtgcggataactagaaacagtgtgatgaaaatgaaggtcctcgttttcttcggtgctacaattttggtaggatggcaatgccatgcgtacgatatgttccctctccgaatgaacactggctatggtgcccggactccggaggcgaaatgcgcaagttggaggcttgctgtggaagcacacaccatctttggctttgaaaccattcctgaagagggcgttgaagcaacaaacgaatacattcatggcgaacaatataaatcagactccaaaacagttaaccaacaagcttactttttatgc

SEQ ID NO: 267310 - DNA, 406 bp, Glycine max
  unsure (1)..(406): unsure at all n locations
gacccactcgnccgactatnnccacccacaccacaagctccttatcgtgtttgcattgcagatgtgagagagaatggcgaccacacccggttggtgtggcagtgtgttgttgagcacctcgttcctgaggaagcaggcaatggcatcagtgaacatgagaatgctgaaggctaatgctggtgtttttggcttaaagggagggcgtggagggcgtgtgagtgcgatggcaagttacaatgtgaagctgataaccccagaaggagaacaagaatttgaatgcccagatgatgttttcattcttgaaaaggctgaggaatttggcattgaccttccctactcatgcaaggctggtgcttgctctttctgtgccggcaaagttgtttctggcaaagtcgaccaatctgat

SEQ ID NO: 267311 - DNA, 381 bp, Glycine max
  unsure (1)..(381): unsure at all n locations
gacccacgcgnncgagnagggctaagngctaacaccngcagngaacaanggccncngcatcagcatcnctgctcaaggctncacttgttcttgacaagtctgagtgggtgaagggacaaacccttcgccaaccttctgcatcagttgtgagatgcaaccccaccaccccatcaggcctcaccatcagagctggttcctatgctgatgagctcgttaagaccgcgaaaacagtggcttcaccagggaggggtattttggccatggatgagtccaatgctacctgtgggaagcgtttggcttcaattgggctagagaacactgaagctaaccgccaggcataccgtacccttctcgtgacagttccaggccttggtcagtaca

SEQ ID NO: 267312 - DNA, 383 bp, Glycine max
  unsure (1)..(383): unsure at all n locations
atgactgggataagcatngcatggnggaaggggactcacaangctcaccacatctcatgcaatagtcttgactatgatcctgatctccagcacatacctgtctttgccgtgtcgacacggttcttcaattcaatcaaatcttgtttctatggaaggaaattggtgtttgattcattatcaaggtttctcatcagctaccagcacttcacattctacccagttttgtgctttgcaagggtcaatttgtacctccagactttgttgctgttgttctctaggagaaaggtgccagatagagcctttaacataatggggatccttgtgttttgggtttggttccctctgttgatctcttcactaccaaaatggggagaaagggtcat

SEQ ID NO: 267313 - DNA, 404 bp, Glycine max
cgaaacgcacatttcactattcattctcgtttccctttcgactgtgattgtttgttaactgaacttttcgagcaaaatgtctggacgtggaaaggggggcaagggtttgggaaagggaggagcgaaacgacaccgtaaggtgttgcgcgataacattcagggaatcaccaagcctgcgattcggcgtttggctcgcaggggtggtgtgaagcgtatcagtggtctcatctacgaggagacacgtggcgtgctcaagatctttctggagaacgtgattcgtgacgccgttacctacactgagcacgctaggagaaagaccgttacggcaatggatgtggtttatgctctcaagagacaaggaagaaccctctacggatttggaggctagtttgtttttttttttt

SEQ ID NO: 267314 - DNA, 201 bp, Glycine max
  unsure (1)..(201): unsure at all n locations
agcgtcgntaagncttgtttttgtatgaatttgtaaaatatgagtattaggtggagcagtgtcgcgtcatgggccaatgtatcctctgcttttaagttggaagaggcccaactcatgtgtgatgtacggctgtgattgtgtaatttaatttgcaaaatcaaaaataacaccagagtcatatatatgcatctctttattttc

SEQ ID NO: 267315 - DNA, 156 bp, Glycine max
cgcacgaatatcttgttgtttggagcgatccgagaaaaactctgtaaacatgttggtttacgaggacctccttacaggtgatgagcttctctctgactccttccgttacaaggaaattgagaatggaatgctgtgggaagttgatggggaagtggg

SEQ ID NO: 267316 - DNA, 450 bp, Glycine max
gtcatcatccgcagctgctgttattcgcaccgcaaacaaacagtgagccatggccgtcggaaagaacaagcgcatctccaaagggaaaaagggtggcaagaagaaggcagctgatccctttgccaagaaggattggtatgacattaaggccccttctctttttcaagtgaaaaatgttggcaaaaccctcgtctctcgtacgcagggtaccaagattgcttctgaaggacttaaacatagagtgtttgaggtctccttggctgatcttcaaggggatgaggatcatgcattcaagaagattaggttgagagctgaagatgtgcaagggaagaatgtcctgacaaatttctggggaatggatttcacaactgacaagctgaggtcattggtgcgaaaatggcaaactctaattgaaacccatgtggatgtgaagacaactgataactacac

SEQ ID NO: 267317 - DNA, 433 bp, Glycine max
tctagacccacgcgtccgagaacaagtagttgagaactaagaaggagaagcaaatggcttcctcaatgatctcttccccagctgttaccactgtcaaccgtgccggtgccggcatggttgctccattcactggcctcaagtccatggctggcttccccaccaggaagaccaacaatgacattacctccattgctagcaacggtggaagagtgcaatgcatgcaggtgtggccaccagttggcaagaagaagtttgagactctttcctacctgccagaccttgatgatgcacaattggcaaaggaagtagaataccttcttaggaagggatggattccttgcttggaattcgagttggagcacggtttcgtgtaccgtgagcacaacaggtcaccaggatactacgatggacgctactggaccatgtggaagct

SEQ ID NO: 267318 - DNA, 423 bp, Glycine max
gaaattttgaattgcatcaaaaaaaatgttttttttgttttatttagtatggataaaagatcttcctatgttatactatttaattctcgacgatgagtcgatttgataactaagatattgttattcgtgatattgatccaatttgatatcatcgaaatccaatttataccattgttgaattaattatcgatgaaagatttatcatctctatgggattaaatcccgaattttttattggaaatttaagagaaataaaacataataaagattatggaagtaaatattcttgcatttattgctactgcactgtttattctagttcctactgcttttttacttataatttacgtaaaaacggtaagtcaaagtgactaatttcactgaaatctgacttcttcatttttatcaatgtaatcaatgatt

SEQ ID NO: 267319 - DNA, 371 bp, Glycine max
ggttgccgtcagcttgcgtgggtgacatggttatggccaccgtcaagaagggaaagcctgatctccgtaaaaaggtgctccccgctgtcatcgtccgtcagcgcaagccgtggcgccgaaaggacggtgtttacatgtacttcgaagataatgctggggtcatagtgaatcccaagggtgaaatgaaaggttctgctatcactggtcctattgggaaggagtgtgctgatctgtggcccaggattgcaagtgctgcaaatgctattgtttaagctggggttttagtttatgtaatggttctgcttcttgaaagtggttcagatattggtttaaggttgaaattgcagacaatattggccatttgcacatat

SEQ ID NO: 267320 - DNA, 298 bp, Glycine max
cccacgcgttcgtccacgcgtccgctcagatctcatctcttatccacaaaaccatggctgaaaaggtgaccatcatgaaactcaaggttgatcttgagtgtgagaaatgctacaagaaggttaagaaacttctcggcaagtaccctcaaattcgggaccagaagttcgatgagaaggaaaacattgtgttcatcacagtggtgtgttgcagcccagagaagattagagacaagctttgctacaaaagtggaggctcaatcaaaagcattgagatactggaaaccgccaagcccaagcc

SEQ ID NO: 267321 - DNA, 246 bp, Glycine max
ctcaagcgtacgtgcacgcgtacgaaaacacaagccaagtgtaagtgagaaaagataaagggaaagagcacgatggtgaacacagtagtgagtacaaaggagagcatcatggtgaacacaaagctggagagtaccatggtgagcacaagccagagcacaaagaggggttcctagacaaagtcaaggacaagatccatggtgagggcggcgccgtcgagggcgagaaaaataaaaaaataaaaatat

SEQ ID NO: 267322 - DNA, 448 bp, Glycine max
  unsure (1)..(448): unsure at all n locations
cccacgcgtccgcacacatagaaacccaacaacaagaatgatgaagatgattctaaccctcggcttcaatagcattttatctctcctctccctctcccacgcctccgtggtggatttctgcgtagcagactacacaggccccaatggccccgcagggtactcatgcaagagcccagcaaaggtcacggtggacgacttcgtctactccggccttggcaccgncggcaacacctcaaacatcatcaaagccgcggtgacgccggcgttcgacgcgcaattccccggcgtcaacgggcttggaatctccattgcacgcctagacctagcagccggtggagtcatccctcttcacacgcaccctggtgcctcagagctgctggtggttgtgcagggaacaatctgcaccggcttcgttgcttcggacaacactgtgtacctcaaaacccta

SEQ ID NO: 267323 - DNA, 409 bp, Glycine max
gcatgaaccgcagggactggctttctctggttgctgtgcacagtgattcgtggttgctctctgtggccttctatcttggagctcgtcttaaccgcaacgaaaggaaacgtttatttagcttgatcaatgatcttcctactgtttttgaagttgtgactgagaggaagccagtaaaggacaagcccactgcagacagtggaagcaagtctagaggcagcaccaagagatcaagtgatgggcaagttaagagcaacccaaagtttgcagatgatggttatgaagacgaggatgatgagcacagtgaaaccctttgtgggagctgtagcggaaattacaatgcagatgaattttggattggctgcgatatatgtgagaggtggttccatgggaaatgtgtgaagatcacttc

SEQ ID NO: 267324 - DNA, 401 bp, Glycine max
ggtttgaggaaactgagttaaggcttggactgcctggaaacggaggcactgaagaagtgctcatcaggaagaggggtttctctgagactgaaactggtcatgaagatgagtctgccaccactgtggatttgatgcttaatctttcttctaaggaggccgcaaccactgctgctgctgctgcagatccaactgataagcacaagactttgcctaaggagaagacccttctgccagcagatcctgctaagcctccagccaagacgcaggtggtgggttggccacctgtgcggtccttccggaagaacatgttggctgtgcaaaagagcgttggagaagagagcgagaagaacagcagccctaatgcaagctttgtcaaagttagcatggatggagcaccttac

SEQ ID NO: 267325 - DNA, 287 bp, Glycine max
  unsure (1)..(287): unsure at all n locations
agcggcggagaaggcacccggcggagaagaagcccgaaggctggagaagaagatctcgaaggaaaggagggagccgagaagaagaagaaagcgcaccgaagaagagccgtggagacctacaacgatctacatncttcaagggtcctcaagcanggttcaaccccgacatttggtatttccagcaagggccatgggcatcatgnaactagcttcatcnaacgaccatcttcgagaaaagctcgcccaggaaaagcgtcgcgtttgggcttcgctaccaacaaggaagc

SEQ ID NO: 267326 - DNA, 446 bp, Glycine max
cccacgcgtccggaggaaagctaattataccgatatggttaataaatactacgatcttgttaccagcttttatgagtttggctggggggaatctttccattttgcacccagatggaaaggggaatctcttcgagagagcatcaagcgacatgaacacttccttcctttacaacttggactgaagccagggcagaaggttttggatgttggatgtggaattgggggaccattaagagaaatttctcgatttagctcaacttcaattaccgggttgaataacaatgagtaccagataacaagaggaaaggaactcaatcgcattgctggagtggacaagacttgcaattttgtcaaggctgacttcatgaaaatgccattcccagacaacagttttgatgcagtgtatgcgattgaagccacttgccatgcaccggatgcttatggat

SEQ ID NO: 267327 - DNA, 473 bp, Glycine max
gaacgagtcaaattgcttatccaaaatcaggatgtaatgatcaaaagtggtcggttatctgagccatacaagggaattggtgattgttttgctcgaaccatgaaggatgagggtgtgattgctctttggaggggcaatactgctaatgttatcagatatttccctactcaggctctgaactttgcctttaaggattacttcaagagacttttcaattttaaaaaggacaaagatggctactggaagtggtttgctgggaatttggcatctggtggggctgctggggcttcttacctcttatttgactattctttggattatgcccggactcgtttagcaaacgatgcaaagtgccgacagaagggtggtgagaggcagtttaatggcttggatgatgtttacaggaaaaccatcaagtctgatggtgttgctggcctttatcgtgggttcaacatatcatgtgttggaattat

SEQ ID NO: 267328 - DNA, 453 bp, Glycine max
cccacgcgtccgcaccgattgctagaatggaatttcgatgctcagtcatctcttttaccatgctcttctctcttgctcttgcaggagagagccatgtccatgcatcgctacctgaggaagattattgggaagctgtttggccaaacactcccattcccactgcactgcgagagcttctaaagcctctccctgcaggtgttgaaatcgatgaactccctaagcaaattgatgatacacagtacccaaaaacattcttctataaagaagaccttcatccaggcaaaacaatgaaagtacaattcaccaagcgtccctatgcacaaccttatggtgtatatacatggttaacggatattaaagacacctctaaagaaggatatagttttgaagagatatgcatcaagaaagaagcgtttgagggagaagagaagttttgtgcaaaatccttgggaa

SEQ ID NO: 267329 - DNA, 274 bp, Glycine max
caatatcgaacgagttaaaaaaaaaaaaattataaaaaaatctcaaaaaaaaatataaccatggtataataatggagctattgcaggaacgaaccaaagaccatgcataactaccatgaggaagaacatcgtgaagctgacaggacaaacactcccattccaactgaactgctagagcttttaaagcctatccctgcaaaacgctaaaatcaatgaactctctaagcaaatggatgatacacagtacccaaaaacattcttatataatgaaaac

SEQ ID NO: 267330 - DNA, 335 bp, Glycine max
ggttgctgtaggagataagattgcagtagtgctaagtgctaacacctgcagtgaacaatggcctctgcatcagcatctctgctcaagtcttcacttgttcttgacaagtctgagtgggtgaagggacaaacccttcgccaaccttctgcatcagttgtgagatgcaaccccaccaccccatcaggcctcaccatcagagctggttcctatgctgatgagctcgttaagaccgcgaaaacagtggcttcaccagggaggggtattttggccatggatgagtccaatgctacctgtgggaagcgtttggcttcaattgggctagagaacactgaagc

SEQ ID NO: 267331 - DNA, 407 bp, Glycine max
ctcagggcaggatgctaccaaggttgataggcggggtgcctacattgagaggcaagctggggagagcattggagcaaatggacttgctaggagggcaattgtgcaagttgactatgccattggtgtgcctgagccctcgactgcatttgctgacacttatggcactgggaagagccatgacaaggaaatccttagcattcagaaggagagacttgacttcaggcctggcatgatctccatcaacctagatgttaataggtgtggaaatggcacgttcttgaagactgatgcatatggacactatcggagagaataccctgacttcacatgggaagtgtgtaagcacactcatggtggtaaaggtacctgcttaactaaaaggtattccaacactcttggcaagggac

SEQ ID NO: 267332 - DNA, 276 bp, Glycine max
cccacgcgaccgcccacgcgtccgaaaaataaaaaaaaaaataaaaaaaaaaaaaaaaaaaggaaaaaaaaaagaaaaaaaaaaaaagaaaaaaaaaaaaaaaaaaaaagaaaagtatgaaaaaaaaaaagacaaagccaacaaacaacagaagcaaaaaactaaaacaaaggaacaaagaaaaaaatacagaaaaaagaaaaccattaaaaaacaggacaaatgacaaaaaaaaagggataaccaaaaaaaaacataaagaaaacaacccaaaaa

SEQ ID NO: 267333 - DNA, 450 bp, Glycine max
cgagataactagaaacagtgtgatgaaaatgaaggtccttgttttcttcgttgctacaattgtggtagcatggcaatgccatgcgtacgatatgttccctctccgaatgaacactggctatggtgcccgtactccggaggtgaaatgcgcaagttggaggcttgctgtggaagcacacaacatctttggctttgagaccattcctgaagagtgcgttgaagcaacaaaggaatacatccatggcgaacaatatagatcagactccaaaacagttaaccaacaagcttacttttatgccagagacctcgaagtccatcccaaggacacatttgtgttcagtatagatggcaccggactctctaatattccatactacaaaaaacatggatatggggtggagaaatttaactcgaccttgtatgatgaatggggttacaagggcaatgcacc

SEQ ID NO: 267334 - DNA, 446 bp, Glycine max
  unsure (1)..(446): unsure at all n locations
cccacgcgtccgcccacgcgtncgcccactcgtccgcactaccctaattgccctcttctctcttccttccttccaacgaccacaaatcactgcaattcaaggtttgaacttcccatggcgagcgctgttgatgcttccggaaacccgatcccaacttctgcggtgttgatggcgtcgtcgaagcacattgggataaggtgccactccgagaatttggagtttctgaagtgcaagaagaaggatcagaaccctgaaaagtgcctcgataagggtcgtgatgttacccgttgtgtccttggccttctgaaggatctgcaccaaaagtgcacaaaggagatggatgaatatgttggctgcatgtactaccatacaaatgaatttgacttgtgtcgcaaagagcagcaagcatttgagaaaaagtgctctttggaatgaaattatgcact

SEQ ID NO: 267335 - DNA, 346 bp, Glycine max
ctcactcgctcaaatcctaaaccagcaaattcctctcttcacaaaatggccggcaacaactgggacaaccctcaccctccgcacgctatcttatcctacaccctcctgttcttaccctacgcacctctccgccaaaccctcctccctgcaattccccaatctctcccaccgcgccgccaccacgcgccgccctcgtgtcgtcgtctccgccgttgaggcgccggagcaaatcaccaagctcggcgacgaaatcgccggactcacgctcgaggaggccaagaacctcttcgacttcctccaggacaagctcggcgtgtccgcggcggcgttcgaccctgtggcagtc

SEQ ID NO: 267336 - DNA, 461 bp, Glycine max
cccacgcgtccgcccacgcgttcgcccacgcgtccgcttttctcttaatccaaatatcatcatctgaaacgatggctgccatggcaaccacaaccctctcttcaaacccgaaactctcatttttccacggaaagcccgttacatattcttcccgcgtcgcacccaccaccaagttattctcatccaaacaaggcacaatctccatgtccctaacccaacccccatacgacctccaatccttcaaattccaacccatcaaagaatccatcgtctcacgcgaaatgacgcgccgctacatgaccgacatgataacctacgccgacaccgacgtcgtaatcgtcggagccggctcggcggggctctcctgtgcgtacgagatcagcaagaaccccgccgtgagcgtcgccataatcgagcagtccgtgagccccggcggctgcgcgtggctcggcggacaactc

SEQ ID NO: 267337 - DNA, 325 bp, Glycine max
ggacgagagagcgtgcaactttcggcaactctagaccatgttattcaagcgcatgaatggaggtcgcaacggacactgtcgcggccatgtcaaattcattcgatgctacaactgctgaaaatgctgccccaaggacaaggccatcaagaggtttttggtaaggaacattgttgaacaggctgcattcagagatgcgcaggatgcttgagtctatgaacaatatacactgccaaaactctatgtgaagatgcaatactgtgaattctgtgctatccattctcatgttgtgagggttcgatccaagactcacaggaggaagcgtgag

SEQ ID NO: 267338 - DNA, 319 bp, Glycine max
caaatatttaatgttgttgccaaccccagtatgattgttagatttgcagacgtgcaaagagtacgataaggatgtgattttcgatcaatttgaaagaacttatccatttcttgcaattttagttgtgtacccataactccatgcatgcaactcgttgagctatctcaataaatgccgtttgtatgtgttagtatttaaaaaagacaaataaacttacaaagaaagatgtatagtcgtttttgcgttttcaatgctccatataacagttcatgcaaccttatagctagatttataagtgtcacttaaagataatttactg

SEQ ID NO: 267339 - DNA, 441 bp, Glycine max
cccacgcgtccgcccacgcgtccgcccacgcgtccgcagtcccttaaaggacaagtctctgcaaaccgtggcgattgagttcgatactttctcgaacaaaaaatgggatcctgcaaaccgacacatcggcattgacgtgaactcgatcaagtccgtcaaaacggcatcgtgggggttgtccaatggacaagtggcggagattctcgttacctataatgccgccacgagcctcttggttgcttctctgatccacccttcaaagaaaacaagttacatcctctctgacacagtgaacttgaagagtaatcttcccgaatgggtgagcgttgggttctctgccaccaccgggttgcatgaaggctccgttgaaacccatgatgtgatttcttggtcttttgcttccaagttgtcagatggtagcagcaatgatgctttggatct

SEQ ID NO: 267340 - DNA, 453 bp, Glycine max
cccacgcgtccgtgttcatacaaaaccatgtccaaagtgtcacaaaccagtggagaagaatggtggttgtaacttggttagctgtatctgtggccaagcattttgttggttgtgtggtggagctactggccgagagcatacttggtcaagtatagctggtcatagctgtggtcgatacaaagagcaagaaaagacagctgaacgtgcaaagagggatctatatcgttatatgcattatcataaccgatataaagctcacacagactcctttaagattgaaagtaaactgaaagagactatacaagggaagattgccatttcagaagaaaaagattctacactcagagattatagctgggtaaataatggactctccagacttttcagatctaggcgagtcctatcatattcatatgcatttgcattttataatgttggagatgagctttttaa

SEQ ID NO: 267341 - DNA, 446 bp, Glycine max
ctcttgctcagtagtgcgatcttcgattctcttctctgcaactatgcctaaccctaagggcgttcttcgacatgaccatcggcggtcaacctgccggccgcatcgtgatggagctctatgccgacgtgactcccagcaccgtcgagaacttccgcgcgctctgcaccggcgagaagggcgccgggcggagcggcaagcccctccactacaaaggctcgtccttccaccgcgtgatcccgaacttcatgtgccagggcggcgacttcaccgccggaaacggcaccggaggcgagtcgatctacggcgccaagttcgccgacgagaacttcttgaagaagcacactggtcccggcatcctctacatggcgaacgccggtcccggaaccaacggatctcagttcttcatctgcacgacgaaaactgagtggctcgacggaaagcaacgt

SEQ ID NO: 267342 - DNA, 442 bp, Glycine max
cccagaagttgtgcctggaaccaacttccttcacggtgaaggcagagggtgtggccaagaatgccccgctcgaatttcagaacaccaagctcatgactcgtctgacctacaccctggacgagatcgagggtcccttcgaggtttcatccgatggaacggtgaaattcgaggagaaagacggaattgactatgctgctgtcactgtacagcttccagggggagagcgtgtgccattcctcttcaccattaagcagttggtggcatctgggaaaccagacagcttcagtggggagttcctagtgccgtcttaccgtggttcctctttcttggaccccaagggaaggggtgcctcaactggttatgacaatgctgttgctttgcctgctggtggaagaagagatgaagaggaacttgccaaggagaacaataaaagtgcttcatc

SEQ ID NO: 267343 - DNA, 145 bp, Glycine max
cagatagttgagaacttttaagagaagttttggcttcctcaatgatctgttccccaggtggtaccactgtgaaccgtgcccgtgccggcattgactctccatacactggccttaagtccatggctggctttcctaccagtttgac

SEQ ID NO: 267344 - DNA, 401 bp, Glycine max
ccctaacgcgtgcagagcagagagagacgcatccatggggcgaagacccgcgaggtgttataggcaaattaagaacagaccataccccaagtcacggttttgccgtggtgttcctgatcccaagatcaggatttacgatgttggtatgaagaagaagggtgttgatgaatttcctttctgtgtccatctggttagttgggagaaggaaaacgtttctagtgaggccctggaagctgctcggattgctggcacaagtacatggccaaatttgctggaaaggatgctttccacttgagagtcagggtgcacccattccatgttcttaggatcaacaagatgctttcgtgtgccggaactgataggctccaaactggaatgagaggtgcttttggaaagccaca

SEQ ID NO: 267345 - DNA, 412 bp, Glycine max
tgcttctaacgtgagatctcagattgcaattgcctcttctcttctcccagaatcggtcactaatccgatatcatgaagctcgatacgactagtctcgaatcgtttcccacactgattgcacctcaaaacgacgtcgccggagaactctccgccgctccgttctttgaccttccgaattccaatgacttcgatgggttcttgaaagacgctattcagatggtgaagcccgcgaagggtactacaactcttgcttttatatttaaagagggtgttatggtagctgctgattctcgagctagcatgggaggatatatatcgtcgcagtctgtgaagaaaattatcgaaatcaatccgtatatgcttgggacaatggcttgtggtgctgctgattgcccagtttggcacaagaatc

SEQ ID NO: 267346 - DNA, 347 bp, Glycine max
agtttatctccttgaaattcaccggattcttcgccccggtagattttgggtcttgtctgggccaccgatcaattatgagcgcaggtggcgtggatggaacacaactattgaagcacaaaaatcagattatgagaagttgaaggaattgctgacttcattgtgctttaaaatgtacaagaaaaagggtgacattgctgtatggaggaagtcttcagataacaattgttataataagctggctagagattcctatccacctaaatgcgatgacagccttgaaccagattcagcatggtatactccacttcgtgcctgtattgtagttccagatactaagttttaagaaa

SEQ ID NO: 267347 - DNA, 450 bp, Glycine max
cccacgcgtccgtctgctcgtgcctctagggttatcatatctccatttccatttcctctctgtcagtttccaagaatcttaagctatgggaaagtcttacccaaccgtgagcgctgattaccagaaggccgttgagaaggcgaagaagaagctcagaggcttcatcgctgagaagagatgcgctcctctaatgctccgtttggcatggcactctgctggaacttacgacgtgagctcgaagaccggtggtcccttcggaaccataaagcacccctccgaactcgctcacggcgctaacaacggtcttgacatcgctgttaggcttttggagccactcaaagcggagtttcctattttgagctacgccgatttctaccagttggctggcgttgttgccgttgaggtcaccggtggacctgaagttcccttccatcctggaagagaggacaa

SEQ ID NO: 267348 - DNA, 436 bp, Glycine max
  unsure (1)..(436): unsure at all n locations
tcgnccacgcgttcggccactcgttcgtccacttgtacggccattttttacaccggcaacacaagatgtttctccacattggggtcctccctttacttctctcatacactttccatgccactgtccaagacttctgtgtggcagaccttaaaagtgcagacacccctgcaggctacccctgcaaggcacctgctaatgtcactttagaagactttggggacactggcttagctgaagcttcaaatgtcacaaacataatcaatgctgctgtgaccccagcttttggtgctcaattcccaagtctcaatggccttgaactatctgcagcaagggtggaccttggtcctagtggtggtattccacttcacacttattccggtgccaatgaactacttattgtgctttaaagtcacattcttgctggattcatattttc

SEQ ID NO: 267349 - DNA, 414 bp, Glycine max
tcgtccacgcgtaccgaatcaatcttctgagagtttttggttgaaagtagcaaagatgtttcctggcgggcaaaagggtcaaatgataaaggggactatggtggttatgcagaagaatgtgttggatatcaacagcatcaccagtgttggagggatcgttgaccaaggcttaggcttcataggcagtgcagtcgatgcacttacttttgcagccaccaaaatctccatccagttgattagtgctaccaaggctgatggtgggaaaggaaaaattggaaagagtacaaatttaagaggaaagataacattaccaaccttgggagctggcgaacatgcatacgatgttaattttgaatgggacagtgacttcggaattcccggagcattttaatattagaactttatgcaaaatga

SEQ ID NO: 267350 - DNA, 415 bp, Glycine max
  unsure (1)..(415): unsure at all n locations
cccacgcgtccgcccacgcgttcgcccacgcgtccgtttctctttgtcgcaaagagaagagatctgcctccttttttttatcaaatctatctcttcttcaagaatagttgaaaatggggctgtctttcaccaagttgttcagccgactgtttgccaagaaagagatgcgtatactgatggtgggtctcgatgctgcgggtaagaccaccattctgtacaagctcaagcttggagagattgtcaccaccattcccaccattgggtttaatgtggaaactgtggaatataagaacatcagcttcactgtctgggatgttggaagtcaggacaagatcccgtcctttgtggagacattacttncaaaatacacaaggacttatttttggggttgatagcaatgacagggacccgagtg

SEQ ID NO: 267351 - DNA, 451 bp, Glycine max
gctccatcactgcagcattagggtttatcatctgcttcaatggggaagggaacagggagcttcggtaagaggaggaacaagacccacactctctgtgtgaggtgtggccgccgcagcttccacctccagaagagtcgctgcgccgcttgtgctttccccgctgcacgcacgcggaaatataactggagcgtcaaggcaattcgcagaaagaccaccggaactggcaggatgagatacttgcgtaacgtgcctcgccgtttcaagagtggcttcagagaaggtaccgaagctgcaccaaggaagaagggagcagctaccactgcatagacctttcaaagatcgttctcgttgggtacggatttacaggaatagattgctttttgtgcttttggcaagtattttggaacacttatttttagagtctcattgcttctttatcccccatttaatt

SEQ ID NO: 267352 - DNA, 431 bp, Glycine max
  unsure (1)..(431): unsure at all n locations
accgattgctagaatggaatttcgatgctcagtcatctcttttaccattctcttctctcttgctcttgcaggagagagccatgtccatgcatcgctacctgaggaagattattgggaagctgtttggccaaacactcccattcccactgcactgcgagagcttctaaagcctctccctgcaggtgttgaaatcgatgaactccctaagcaaattgatgatacacagtacccaaaaacattcttctataaagaagaccttcatccaggcaaaacaatgaaagtacaattcaccaagcgtccctatgcacaaccttatggtgtatatacatggttaacggatattaaagacacctctaaagaaggatatagtcttgaagagatatgcatcaagaaagaagcgtttgagggagaagagaagttntgtgcaaaat

SEQ ID NO: 267353 - DNA, 440 bp, Glycine max
cccacgcgtccggctccttcgaactgttgtttggtctcttctctcttatccatggcatcagcgtttctcaccctaccaactcccttcctacacaaaaccaatgccatcagtttctctaacaagagaccctcatttttgcagaggagctctctgaagattcatgcaattaccaaaaaatgggaacccacaaaggttgtgcctcaagctgatagagttcttattcgattggaggagctttcacataaaacagttggtggacgattgctgcctaaatcagctgttaaatttgagcgctatcttgcgggagaaatcctaactggtggtgctgaagctggagaactaaaggctggaacaaaggtactattcactgacatgaatgcttatgaggtggaattggcgactgatgcaaaacactgcttttgtaaagcacgtgacttatt

SEQ ID NO: 267354 - DNA, 449 bp, Glycine max
gctatctccgatggctctctctgcgcatatttgccgtttccccgccacacgcgctgacacttctttgccggagagtctcaccagaatccggtgccggaaacctctctccgtccgatgctccggcgattccacttccggctctgtgggttcggagttcgatccgaaggtgtttcggaagaaccttactcggagtaagaattataaccgcaaaggatttgggtacaaggaagagaccctccaactcatgaatcgcgagtacaccagtgatatcattaagactttgaaggaaaatgggtatgagtatacatggggtactgtcacggtgaagcttgctgaagcctatggattctgttggggagttgagagggctgttcaaattgcttatgaggccagaaaacagcttcctactgagacaatttggcttaccaatgaaatcatccacaacccca

SEQ ID NO: 267355 - DNA, 305 bp, Glycine max
gttccaaagaggctaaccttcgacgaaatccagagcaagacctacttggaagtgaaggggacaggaacagcaaaccagtgcccaacaattgatggtggattggactcatttgccttcaagccggggaaatacaatgccaagaagttatgccttgagccaacttcattcacagtgaaggccgagggtgtggccaagaatgctccccttgagttccaaaacacaaagctcatgacacgtttgacctacactctggatgagattgagggaccctttgaggtgtcttctgatggcactgtcaagtttga

SEQ ID NO: 267356 - DNA, 342 bp, Glycine max
  unsure (1)..(342): unsure at all n locations
gagaaaagttagggttcacaacttttccttttccttttgcttgcgaatctgaatcaaataatcaatgatccattcatgattcatcatgtcgtcggcgaagaaaatcacgctgaagagttcggacggcgaggctttcgaggtggaagaggcggtggcgctggagtcgcagacgataaagcacatgatcgaggacgactgcgccgacagcggcatccctctgccgaacgtgacgagcaagatcctggcgaaggttatcgagtactgcaagaagcacgtcgaggccgcgaatcccgaagacataccctncgaggacgatctcaaggcctgggacgctgaatttcg

SEQ ID NO: 267357 - DNA, 450 bp, Glycine max
aatgggtcacctaatttctttcaattcactttcattatagtatttcctgattttccttcacacgctgctgtgtggtctttcttaatttgcctcttcttttctcttttcttgttgtcgaaccatcttggaaaagaagttggctgatgctgatgtctctgaggaggatcaaaacaacctgcttaaatttttagagaaaaaggaaactgaatatatgcgccttcagaggcataagatgggtgttgatgattttgagttattgacaatgattgggaaaggtgcatttgttgaggtcagagtctgtatggagataactagtgatcatgtatatgcaatgaataagctgaatatattatatatgcttcgtatagtccaggttgtgcatgttaaagctgtaagggtatttcttgcagaggttgactgaaattgctttgtctaagctttattgttctt

SEQ ID NO: 267358 - DNA, 422 bp, Glycine max
gcaacgcgctccagggcttcctcgtcttcaacgccgtcggcggcggcaccggttctggcttgggctcgcttctcttggagcgtctatctcgagactatggaaaaaagtcaaagctcggtttcaccgtgtatacatcccctcaggtttcgacctcagacgcggaaccctacaacagcgtgctttcaacgcaatgtttcctctaacacaccgatgttgctgagcttatcgacagcgatgcaatatacgacatttgcaggagacctcttgacatcgaacgccctacctacaccaagctgaaccgtgtcagtacccaggtgatatgatgcctcagtgactcaacgaagtgtgatggaacacggcatgttgatgtgactgaatttcaaaccaacttggttccttacccgaggatccaattcatgctg

SEQ ID NO: 267359 - DNA, 450 bp, Glycine max
ggcaacagaaacaaaagtgcaagaattaggtggcatcaccgatgtgcatggagctgccaacagcgtcgagatcaacaatctcgctcgctttgctgtagaggaacaaaacaaaagagagaattcagttctggagtttgtgagggtgattagtgcaaagcagcacgtggttgctggagtgaattactacataacattggaagcaaaagatggtttgattaaaaatgagtatgaagcgaaggtttgggtgagggaatggttgaactccaaagagttgctagaattcaagccagtcaatgtttctagcacaccaataggtggcattaccgatgtgactgcgaatagcctcgagatcgacattctcgctcgttttgctgttgatcaacacaacagataagagaatgcaaatctggagtttgtgggggtgattagggcaaagcatcaggtggtgga

SEQ ID NO: 267360 - DNA, 427 bp, Glycine max
caagaccaatacactgtggaaggagtgcagaatcttggagacaaagcattgatgtgtcataggctgaatttcagaagtgcagtattttactgccatgaagttcgtgaaacatcagctttcatggttccattggtggctgttgttggaaccaaaactcaggcacttgctatttgccacttaaatacttttgaaatgatttttaaatggtttttttacttattggttttgtatcctgaactatccctgttttaccttttcctatgatttttgttttttatattttcctttttttttttgggtgattttcttatattttttatatttttttctttttcttgtttttattttttttgttttttattattttattttgttttatatattatattatttttgtttttttttttttttatattctatacttttt

SEQ ID NO: 267361 - DNA, 262 bp, Glycine max
gggcggacgcgtggggtttgggtttgtgaccatgtcttccgttgaggaagctttagcggctgctaagcagttcaatggctatgaacttgatggaagatcattgagagtgaattctggaccaccttctgctcggaatgagagtgctcctcggtttagaggtggatcttctttcggttccagaggtggtggtcctttagatagtgaaaaccgagttcatgtaggtaatcttgctcggggtgttgtctatgtaccacttgcgtct

SEQ ID NO: 267362 - DNA, 450 bp, Glycine max
  unsure (1)..(450): unsure at all n locations
aaacccactaagatggcttcctttgtatccttcctagtgctgcttcttgcagcccttatcgtcatgcctcaagggcttgctacttactacaaaccaattaagaagccaccagtgtacaagccttcagtgtacaagccaccagtgtacaaaccaccggtttataagccaaaaccaccggtttacaagccgaaaccaccggtttacaagccaccatataagaagccaccatacaagaaaccaccttatggaaagtaccctncagtagaggacaacacccatgcctaaagcaagcaatgaggtctattatctacttaataaataagaggaactgctttgtgttttctagcattgtgatttacaacttcgtagcaatgcatnatctngactcttgcatgcacttcaatccttcgtagcattaatgatgtggccaagtcatcatgagcatcatac

SEQ ID NO: 267363 - DNA, 342 bp, Glycine max
gtcccttgctctgtgtcgccgtaacacaaattgggaagagagagaaagaaccaccccacccggcaacagcttttgttcttcacaagacatagcttcgtgtgtgtgtttcttttcttccttccagcttggaaagactgaagtctctgtctttttcaggttttgggggtgttgttgaagatgttggtagctaatagctttgatctatggcgaaaggacggttttttctcttcggcagaggacgtgcaggaatcagctgatataatggaatctgcatacagggcatggttgagagagaagagagaaaggtcaactcctgaggaattaaatgaactatgcagagag

SEQ ID NO: 267364 - DNA, 455 bp, Glycine max
cccacgcgttcgaccaaacaccaaagaaagaggtgaagtcaaatggtccttagttctgggagtgttgatgcttgagtcttgacggaacgaacggaaaaggggatctcaatggacaacaccaagccccttatcgaactggaactcgacgatgatggcagaatcagaagaaccgggaatgtgtggactgctagcatacacattataacagtggttgtaggggcaggggtgctgtctttggcatgggttatggcacaactaggatgggtagctggcataacccgtatcattaccttttcagctgtctccattttcacttacaatcttgtagctgattgttacagatatccagaccctgtcactggcaagagaaattatacttatatgcaagctgtcaaggcttacttaggtggaacaatgcatgttgtttgtggaatggttcaatataccaagctcgc

SEQ ID NO: 267365 - DNA, 333 bp, Glycine max
aaaaaaaaaaaaaaaaaaaaaaaaaaaaaaattaaaaaaaaaaaaaaaaaaaaaagaaaaaaggaaaaaaaaaaaaaaaaaaaaaaaaaaaaaaaaaaaaaaaaaaaaaaaaaaaaaaaaaaaaaaaaaaaaaataaaaaaaaggggagatcgttttaatgataaaaactttgaatacgtgtaactgttaatataaacattttaaaaggggaagcaaaatcaaaattaattggcctggtatttaaaaattgtaaatttgaaaaactttgttgtaaaaaaattaattatattttaataaatttattttttaaaaatttgggtattttttaaaaa

SEQ ID NO: 267366 - DNA, 317 bp, Glycine max
  unsure (1)..(317): unsure at all n locations
cggacgcgtgggcggacgcgtgggtttgactctcacaaaccttgcatccatccacacatggctggcatgaactctagcgtattggcctgtagctatgccatatctggtgcagcatgctccgagctcaatgggaaggtcacttccgtggcctctgttgcatcctctggctacaagttgccattgatcaaatgtgaggccagagttcccaaagccaaagaatctgaaagaaggagaggtgcccttgttctcttggcagctaccctnttcatctctgcagcctncaattcttctgccaatgctgngatcatngatgatta

SEQ ID NO: 267367 - DNA, 329 bp, Glycine max
gttttatagacgggaagcttattttggttggtaacaggaagttgatggaggaaaatggcatagatatttcaacagaagtggaaaattttgtggtagagctggaagaaagtgcgaagacagggatactggttgcatataatgatatattaactggagtcttggggattgcagacccactaaagagagaggcttctgtagtcatagagggcctccagaaaatgggtgtcacacctgttatggttacaggagataactggagaacagctcgtgctgttgccaaggaggttggcatccaagatgttagggcagaggtcatgccagcgggaaaa

SEQ ID NO: 267368 - DNA, 254 bp, Glycine max
gttatatagacgggaagcttattgtgggtgttaacatgtagttgatggaggaaaatgacatggataggtgaacataagtggaaaattaggtggtagagctggaagaaagtgcgaagacaggtatactggttgcatataatgatatattaactggagtcttgtggattgcagacccactaaagagagaggcttttgtagtcatagagggccttcagaaaatgggtgtcacacctgttatggttacaggagataac

SEQ ID NO: 267369 - DNA, 370 bp, Glycine max
cccacgcgtccgaaacgaccaatgaagggaatgcttactggccctgttactattctgaactggtcctttgttagagatgaccaaccaagatttgaaacatgttaccagattgctttggctatcaaggatgaggttgaggatcttgagaaagctggtattactgtcatccagattgatgaggctgctctaagagaaggtttacctctgaggaagtctgaggaggctttctatctaaactgggctgttcacttcattaggattaccaactgtggtgtggaggacactactcatattcacactcacatgtgctactccaacttcaatgacatcattcactcaatcttagacatggatgctgatgtgatcacct

SEQ ID NO: 267370 - DNA, 460 bp, Glycine max
  unsure (1)..(460): unsure at all n locations
cccacgcgtccggcaatcgcgttacgtgaagctgactaaggacaatgtttctatggaagatgtcacgcctggtgaactcaatcagccaattgaggttcctcagttggctgttcacaagtgcatggaatgtgggcagccattacctggaagctatacacctgctgctgatgaaccttggatgactgggatctttggatgcactgaagatagggaaaattggctgttttgtccttgggtattatttgggcgcaatgtagaaacctttcatgaagaaactccttggactggaccatgcatttgtcatgccatntatggagagggtggcattgctctggcaactgcaaccgcaatctctaatggcttcattgtcccagggacatcatgtctcatttttgagggcttattctttacttggtggatgtgtggaatctatactgggcaggtttgacaaaacttacat

SEQ ID NO: 267371 - DNA, 457 bp, Glycine max
ctcttccataaacgggtggtgcctctcttccatctccccagccaaaacctctctcaggaaggccacattacgcccttccgtcttcgcaacccttaacactccttcttctccttcctcttcatcttccttcccctctctcattcaagacaggcctgtttttgctgcccctgcccccatcatcaccccaactgtgagagaggatatggcaaaggaatacgagaaagctattgaagaacttcagacattgttgagggagaagagtgaactcaaagcgacagctgctgaaaaaagtgagcagataacagcttctctagggacatcatcatctgatggcatcccatcatcagaagcctcagacaggatcaaagctggtttcattcacttcaagaaggagaaatacgacaagaatccagctttgtatggtgaacttgccaaaggccagagccccaagttcatg

SEQ ID NO: 267372 - DNA, 229 bp, Glycine max
attcaagtagttttttctcggctttatattgttcttaagcctacgctttcttgaatccaattgtggatattatgccagtaatacccttactcttttttcttttagcttttgtttggcaagctgctgtaagtttcttatgatatctgttattcgtgttatgttttttaatcttacaattaatcatttattattaacaacttttcatattcctaatatactttatatttta

SEQ ID NO: 267373 - DNA, 256 bp, Glycine max
attatgctttctttcttaaaaaatttaaaattatatataataacatattaattggaaataagtactataatcaaaaataataaaaaaaaattatatttactaatatatataaaataaaataattaatttcatttttcaatatataaaaatatcaattattataattaaatctaaattaatattactatattttttttgttttttttataaatttaattttcatttctatctttaattaattaatctattttaatat

SEQ ID NO: 267374 - DNA, 451 bp, Glycine max
  unsure (1)..(451): unsure at all n locations
cccacgcgtccgcccacgcgtccgcccacgcgtccgtttttttttttttgccttcttttcagtcctttcttttcttcaaatcaaggaactcagctatgactaccagagaaatccttcaaaagatgaaggtaaaagttggtttgggttcatcagaccctgactcagggaaaggaaagagcaagatgtcaaagaacataactcatggttatcatttggtgaaaggaaaatcatatcatgacatggaggattacgttgtggctcaatttaagcaaatagataacaatgaattgggtttggttgcaatattcgacggccatgcgggtcagaacgtacctaattacttgcggtcccatttgtttgataatatcttacatgagcctgacttctggaaaagacctgcagatgctgtgaagagagcatacagtaaaactgattctaatnatttagatat

SEQ ID NO: 267375 - DNA, 412 bp, Glycine max
cccacgcgtccgtgatgaatgaaattgaggctgatcagtcaggaacaatagctgaggtattagctgaggatgggaaaccagtcagtgtagacatgcctctttttgtaatagttccatgagtaccggaagggaccttacttcaaagttgatatgaaatctccctagcttgttggatagcagcatggtatttgatgtcagattttctgttcagaaatttcttgagtgataatgtttgtctcattttaagaaatccttgtcttctttagcccccacccctcctcttaatttatcgagatattttggacataaaagtccccagcatatcagaatgaatattggacatttcagttctaagcagatttgacatttgtagtagtatttatgttttctgtttatgaaaaaaactataaat

SEQ ID NO: 267376 - DNA, 64 bp, Glycine max
aaaaaaaaaaaaaaaaaaaaaaaaaaaaaaataaaaaaataaaaaaaaaaaaaaaaaaaaaagg

SEQ ID NO: 267377 - DNA, 387 bp, Glycine max
cggacgcgtgggcgaaaccctcttcatcttattctatctgtgacgagcatcatggcctcaagagcagtgttattgttggctatgtgtgtgcttccggcgatggttgtggccattcgcccagcaaagaaccctttttgcgtgaagggtcgtgtctactgtgacccttgccgtgctggttttgagacctcagctaccacctacattgctggtgctgagattatgttgcaatgcaagagcagggttagcaacgaggttgtgtacacgaagaaggggtacaccgacttaaccggagcatacacaatgtacgtggatgaggatcacgcagatcagatctgcagtgccaagcttgtaagcagccctcaccctcaatgcaaggaagtcacccca

SEQ ID NO: 267378 - DNA, 463 bp, Glycine max
cccacgcgtccgatgattcataccttgacagctatatcagtaccattggagtggactttaaaatccgcactgtggagcaggatgggaagactattaaacttcaaatttgggacactgcgggtcaggaacgtttccggacaatcactagcagctactatcgtggggctcatggcattattgttgtttatgatgtcactgaccaagagagcttcaacaatgttaagcagtggctgaatgaaattgaccgttatgcaagtgaaaatgttaacaagcttctagttggaaacaagtgtgatcttacggcaaataaagttgtgtcctctgagacagcaaaggcatttgctgatgaaattggaattcctttcatggaaactagtgctaaaaatgccaccaatgttgaacaggctttcatggccatggctgctgaaattaaaaacagaatggcaagccaaccagtgaacaa

SEQ ID NO: 267379 - DNA, 334 bp, Glycine max
gtttatcaatggcacttctccacccaaatcttcttcccactttcaattccaacactcttacgtttccttccatcaaactcaaaccctcactctcgcacgtgccttctccaacccccacacgcttcagtctctctgtttccgcggcggaaaccaccgcttttgccgcccctcccactccccaacctgagaagcttggagttgtagttaagccaacggagaagccgagacttgtgttgaagttcatatggatggagaagaacattggaattgcgcttgaccagatggtaccgggccatggcaccatccctctgagcccatattacttttggccccg

SEQ ID NO: 267380 - DNA, 424 bp, Glycine max
gtccttggggacagaaggcattctcaaattatcttggtgacaataaatctgagtgggaggattacgatgccactcgtttggtaacaaagtttcccaatgtttcttccaccattttgattgatcagggagaagatgacaaatttttgcctgatcaactgttgcctcacaagtttgaagaggcttgtaaaaaggccaacgttcccctactgttacgtttccaacctggttatgaccacctttactactttatagccacattcatagatgatcacatccgacatcatgctcaagctcttagacttaattaagttatgtgcactctgattatctataactattttgtcaactcttctaactttactaagctgttcatttgctcgtggtaccatgggttgtacttgagtatggtatggaacttctttct

SEQ ID NO: 267381 - DNA, 311 bp, Glycine max
gcaagcaatgttatggcaatggctaccaccagagaggcacccgcagcagaagttgccacgaccgagctctctgttgccgagacgccagagattgtgaagactattcaagaagcttgggacaaagttgaagacaaatatgcagtgagttcacttgccgtagccggtgtggttgcattggttggctcagctggcatgatctcagcaattgataggcttcctttaattcctggggttcttgaggtcgtaggcattggctacagtgggtggtttgcttacaagaacctatttttcaagcctgacagggaagcttt

SEQ ID NO: 267382 - DNA, 358 bp, Glycine max
cccacgcgtccggccatatctccgtacactgctacaccaagcattgtacaagctatcactgcgctatggacccttgatccacgtcatgatcggctcgaagcacgtggtggtggcgtcgactgctgagacggccaagcatatcctgaaaacctcggaggaggcattctgcaaccgtgccttaatgatagcgagcgagagcctaacctacggcgcggcggactacttcttcatcccctacggcacatactggcggttcctgaagaagctctgcatgacggagcttctgagcgggaagaccctggagcatttcgtgagaatccgcgagagcgacgtggatgcgttcctcatgagaatgatg

SEQ ID NO: 267383 - DNA, 452 bp, Glycine max
cccacgcgtccgtccacttcgaaagggttaggtttacgaagaaacaccaatcctgtccgagaaatcaacgatgcctcgctatgatgataaatatggtaatacccgcctctatgttggacgcttgtcttcgaggacacgttcccgtgacctggagcgtgtcttcagcagatatggaagaattcgaggtgtagatatgaagaatgattttgcctttgttgaatttagcgatcctcgggatgctgatgatgctagatatagcttggatggtcgtgatgttgaaggaagtcgtatcattgtggaatttgccaaggggggtcctcgtggttcccgggaaaacttgggtcggggtctacctcctggatctggacgatgctttaactgtggcattgatggtcattgggcccgagattgcaaagctggggattggaagaacaagtgttaccgttgtgggg

SEQ ID NO: 267384 - DNA, 424 bp, Glycine max
ctataagctagtttatcgtgaggagaatatgaagttgtttgttttctttgttgctgcagtagttttggtagcatggccatgccatggcgcaggctaccaaaggttccctctccgaatgaaaactggctatggtgagcgttcttcggaggtaaaatgcgcaagttttaggcttgctgtggaagcacacaacatccgagcctttaaaaccattcctgaagagtgcgttgaaccaacaaaggactacattaatggcgaacaatttagatcagactctaaaacagttaaccaacaagctttcttttatgctagtgaacgcgaagtccatcacaacgacatatttatattcggcatagataacaccgtactctctaatatcccatactatgaaaaacatggatatggggtggaggaatttaatgaaacc

SEQ ID NO: 267385 - DNA, 246 bp, Glycine max
gaagcattagcaaaagcaagaagaactagtctaagcataaatggcctcttcagtgatggcatctgtggccctcaaacctgcccctttaactgttgagaagtctcaattagaagcctttccttccttttaagggacttctcttcattcaaagttgttgccagtggtggcaagaagatcaagactgacaagccttatggaattaatggtggcatggctttgagggaaggagttgatgcatctggcacg

SEQ ID NO: 267386 - DNA, 315 bp, Glycine max
aacaaaaacaaagaaaaaaaaaacccttagccaacacaaccatcatggccacctctgctattcagcaatcagcattcactggtcaaactgctctgaagcagctcaatgagttcgtccgcaagaccggtggcgccggcaaaggtcgcactaacatgcgccgcaccgtcaagagtgctcctcagagcatttggtatggccctgaccgtcccaagtacttgggtccattctcggagcagattccatcatacctgaccggagaattccctggtgactacggatgggacactgctggattatcagctgacccggaaacct

SEQ ID NO: 267387 - DNA, 423 bp, Glycine max
ctaattctgctaggtgagtgaaaatggcggtacccttgctctccaagaagatcgtgaagaagcgcgtcaagaagtttatacgcccccagagtgatcgcaagatctccgtcaagccaagctggcgcagacccaagggtattgattctcgtgtcaggagaaagttcaaaggatgcactttgatgcccaacattggttatggctcagacaagaaaacccgccattatctaccaaatggtttcaagaaatttgtcgtgcacaatgtgaaagacctggaacttctcatgatgcataacaggacatattgtgctgagattgctcacaatgtatccacaaggaagaggaaggacatagttgagagagctgctcagcttgatgtggtcttgacgaacaagacggccagactacgtagccaggaggatgagt

SEQ ID NO: 267388 - DNA, 336 bp, Glycine max
cgcacgcgtgggcggacgcgtgggttgagatctaagaaggcgaagcaaatggcttcctcagggatctcttccccagctgttaccactgtcaaccgtgccggtgccggcatggttgctccattcactggcctcaagtccatggctggcttccccaccaggaagaccaacaatgacattacctccattgctagcaacggcggaagagtgcaatgcatgcaggtgtggccaccagttggcaagaagaagtttgagactctttcctacctgccagaccttgatgatgcacaattggcaaaagaagtagaataccttcttaggaagggatggattccttgc

SEQ ID NO: 267389 - DNA, 379 bp, Glycine max
ttcacctcttcagcagtcgttacagagacttcataacccgaaaatgcctttcaagaggtacgttgagattggaagggttgctcagatcaactatggcaaagagtatgggaggctcgtggttattgtcgatgtcattgaccagaatagggctcttgttgatgctcctgacatggtgaggtcccaagtgaacttcaagaggctatcactcactgacatcaagatcgatattaagaggatccccaagaagaaggatctcattcaagccatggaggctgctgatgttaagaacagatggtagaagagttcttggtgcagaaaactgattgtgcagaacaagagggcatcccttaatgactctgataggttcaagatattgttg

SEQ ID NO: 267390 - DNA, 442 bp, Glycine max
  unsure (1)..(442): unsure at all n locations
cccacgcgtccgctgggctgcttaaacttccaacagacaaggctttattggaggatgctgaatttcgccgttatgttgagctatatgcaaaggacgaggatgcattttttcgagattatgctgaatcacataagaaactttcagagctaggctttgtgccaagttcaaagccgatttctattaaggatgggaccatactggcacaaggtgctgtaggagttgtagttactgccgcagtggtgatcatcagttacttgtatgaagttcgcaaaagagggaagtaaactggacttgttcatttcacttggctgttacgtntgcgtgaccctgacccataatgtgaaaacagggttcattttgcagcttcagattctgttacttagtacccaataagataatgcacaagccttcagactttttttatatgaatagactaaactat

SEQ ID NO: 267391 - DNA, 437 bp, Glycine max
  unsure (1)..(437): unsure at all n locations
ctgatgtgcccccatctatgactcaaaacggtaggtcaagcagatattcctttggctcaagcaatggcaatggtgatacccctgcacaaaatggctctgctgttatcaatgttgatgattatgatagtgatagctccaattttgcaccatccacgccatcaactatgtcaatggctgttccagcagaactaggtggagctgtacccttgatcaacagattccaggtggatggatttttaaaattaatgcagaaacaaattcaatctgctgggaaacatggatttttttctaaaagatctgtangtccccaagttcgagaaaaagttacatttgaggacatgttgagttttcaaaaggatccaattccaacatcattgctcaagttaaatgttgattttgtaagtagggcaacaaaattattccaaataattttgaaa

SEQ ID NO: 267392 - DNA, 307 bp, Glycine max
cccacgcgtccgcccacgcgtccggtggttttgaagctggtatttctaaggatggacagacccgtgagcatgctcttcttgctttcaccctaggtgtgaagcagatgatctgttgctgtaacaagatggatgccactacccccaagtactctaaggctaggtatgatgaaatcgtgaaggaagtctcttcttacttgaagaaggttggttacaacccagacaagattccctttgttcccatctctctttttgagggtgacaacatgattgagaggtccaccaaccttgactggtacaagggaccaac

SEQ ID NO: 267393 - DNA, 340 bp, Glycine max
aatacctctttcttcctcttcctcagtagtgcgattttcgattctcttctctgcaactatgcctaaccctaaggtcttcttcgacatgaccatcggcggtcaacctgccggccgcatcgtgatggagctctatgccgacgtgactcccagcaccgccgagaacttccgcgcgctctgcaccggcgagaagggcgccgggcggagcggcaagcccctccactacaaaggctcgtccttccaccgcgtgatcccgaacttcatgtgccagggcggcgacttcaccgccggaaacggcaccggaggcgagtcgatctacggcgccaagttcgccgacgagaac

SEQ ID NO: 267394 - DNA, 452 bp, Glycine max
aaattactgatacaggaacagctagcagagaaacaaagttacaagtaaagtaaattaagaagatcattaatggcttctcttgcaaccttagctgctgttcaaccagctgcgctcaatggccttgctggaagttccctctctggaactaagctctctttcaagccctctcgccacactgtcaaatccaagaacttcaggagtggtgccgtggtagcaaagtatggtgacaagagtgtgtactttgatttggaggatctgggcaacactacggggcagtgggacttgtatggctcagatgcaccttcaccctacaaccctcttcagagcaagttcttcgagacatttgctgctccattcacaaaggaggggattgttactcaagtttctgatattgggaggtggttccacccttgcatacttcagtgcaacagccttaggtgacattctaccaa

SEQ ID NO: 267395 - DNA, 452 bp, Glycine max
gaagaaataggtttggtttctgagaggaagtttgtggaatctagtgagagggtagagaaagatgttgagtgcgacggccatcggcgcgttgttgggtttgggaacccagatgtactccaatgctctccgcaaactcccctacatgcgccatccgtgggagcacgtggtcggaatggggttgggagcggtatttgtgaaccagcttctcaaatgggaggcccaagtggagcaagacctcgacaagatgctcgaaaaggccaaagccgccaacgaaagacgttacatagatggagatgatgattaatgcctgtcttcaaggattgtagcatttggtgaaaataatcatgaaatatgttgaacttgttgcctttgttttctgatttcatagtgctatgtttgtaaggctgttaatcagactattttgtgcacatgcttttgaaagcagtgaaatt

SEQ ID NO: 267396 - DNA, 440 bp, Glycine max
  unsure (1)..(440): unsure at all n locations
ggattccgtagtcctaaagtagtggcggattttcgtggctacgcaaacttctgcttcaagacctttggagacagagtcaaatattgggtcactttgaatgaacccttatcatttagtcttaatggctacaatggtggcacctttgcaccaggtagatgttctaaatacgttgccaattgtagtgctggcgattcatccactgaaccctatatcgttggacactacttattacttgctcatgaatctgctgccacattatacaagacaaaatatcaggctcgtcaaaaaggacanattgggatcactaatccaacacactancttttgccaaaatctcaaagtgctgcagattacaaggcagcaagtagagctctggacttcttctttggttggtattctgatccggttttctatggtgactatccggagagtatgaaatc

SEQ ID NO: 267397 - DNA, 242 bp, Glycine max
gactcttgcatgcacttcaatccttcgtagcattaatgttgtggccaagtcatcatgagcgtcatacgtatttctttgtgaatgtaaatcaaaattataagagagaaaatggtgcttttgtactacagattactataaataaaaaacttttatggttttcaaaaaaaatataattaaaaaattaataaaaaatatattaaaaaattttataattattatattttaaaatttttaaataattt

SEQ ID NO: 267398 - DNA, 360 bp, Glycine max
cccacgcgtccgcccacgcgtccgatcgagataactagaaacagtgtgatgaaaatgaaggtccttgttttcttcgttgctacaattttggtagcatggcaatgccatgcgtacgatatgttccctctccgaatgaacactggctatggtgcccgtactccggaggtgaaatgcgcaagttggaggcttgctgtggaagcacacaacatctttggctttgagaccattcctgaagagtgcgttgaagcaacaaaggaatacatccatggcgaacaatatagatcagactccaaaacagttaaccaacaagcttacttttatgccagagacctcgaagtccatcccaaggacacatttgtg

SEQ ID NO: 267399 - DNA, 386 bp, Glycine max
aaaagagttctttcaaaatgcaaacagccttaaccttcgctgcccccaacgttgtgccattggcacccacaaagagtgtctcccatattaccatctttcccaccaaattgaaagccccgcgctcctcacctcgttactctccgattagggttgcaaccgtggagcccgacacttcaactgtcgactacaactctgcgttctcagtgtttcctgcagaagcatgcgaaactgtaggaggggaagcctgcatggcggagatgtaccctgaaacgaagctacagccagaggctaagactccacgagtcgttacagagaacgttgagagagagtatcttgaatacgatgatcctaaaacggtatttcgaggagaggcttgtgatgatctt

SEQ ID NO: 267400 - DNA, 187 bp, Glycine max
cccacgcgtccgcccacgcgtccgagcaagctcatcctagagttttaaaaatggcagcagccgcctccatggctctctcttccccatccttggctggcaaggccgtgaagctgggcccatcagcccccgaagtcgggagggtcagcatgaggaagaccgtgaccaagcaagccttcttcggaagccc

SEQ ID NO: 267401 - DNA, 317 bp, Glycine max
cggacgcgtgggcggacgcgtgggttcgagaagctcgcccaggaagcgtcgcgtttggctcgctacaacaagaagcccaccatcacctcgagggagatccagaccgccgtgcgtctcgtgctccctggtgaattggccaaacacgccgtttctgaagggaccaaggcggttaccaagtttaccagctcttgaattagggtttgttaggcggttgtgttgcagatctagggttttctgtggatttcttttcttaaaaattagtttgtagatgtaatgatctgaacagttgttaatggaaggtttcgtttgaataaaaa

SEQ ID NO: 267402 - DNA, 243 bp, Glycine max
ctcacgcgtccgcgcttctcctctcttccaagtaaagaatcatcaatggcgattgaacacgaagacgatgtcaaagacgagaagaaccctcgacctctcgacgaggatgacatcgccctcctcaagacctacggtttgggaccttactccacaagcataaaaaaggcggagaaggaaatcaaagatatggccaagaaagtgaatgacttatgtggtataaaggagtctgatacttgtttagct

SEQ ID NO: 267403 - DNA, 354 bp, Glycine max
cccacgcgtccgcccacgcgtccgcccacgcgtccggaaatcctcaagcttcaatttgctttgtgctcactcatctatctattataaccaaacactcttcttcatattcttcttcttcttgttcttgttctatctgtgacgagcatcatggcctcgagagcagtgctattgttggctatgtgtgtgcttccggccatggttgtggccattcgcccagcaaagaaccctttttgcgtgaagggtcgcgtctactgtgacccttgccgtgctggttttgagacctcagcaaccacctacattgccggtgctgagattatgttgcaatgcaagagcatggttagcaacgaggttgtg

SEQ ID NO: 267404 - DNA, 319 bp, Glycine max
  unsure (1)..(319): unsure at all n locations
ggaaagaacgggtcggaccaacccgtccgaggaacgcagaccgaggcgtttccagttctgtagggaaatgaaagtgtctttgttggtgaagggtatgtgagagaaacgaaaggggtgtgtgttgggttgaataggtatagataggatcaatgagcaacaacaacgcangaaaggtggtgtgtgtgacgggtgcttctggtttcatagcttcatggatcgtcaaattccttctccaacgtggttacactgtcaaggccaccgttcgctacccaagtaatctgaaaaaagtagatcacttggttaaacttgagggcgcaaa

SEQ ID NO: 267405 - DNA, 370 bp, Glycine max
  unsure (1)..(370): unsure at all n locations
cccacgcgtncgcccacgcgtncgcccacgcgtccggtttgttgtgagctataagctagtttatcgtgaggagaatatgaagttgtttgttttctttgttgctgcagtagttttggtagcatggccatgccatggcgcaggctaccaaaggttccctctccgaatgaaaactggctatggtgagcgttcttcggaggtaaaatgcgcaagttttaggcttgctgtggaagcacacaacatccgagcctttaaaaccattcctgaagagtgcgttgaaccaacaaaggactacattaatggcgaacaatttagatcagactctaaaacaggtaaccaacaagcttcttttatgctagtgaacgcgaagtca

SEQ ID NO: 267406 - DNA, 280 bp, Glycine max
ccttgtgtttttcctttcgggattgttttctatggcttctgaagtaatagagtgcgcgtgctttgtcggtgggcttgcttgggccaccgacagcgatgctctcgagaaagccttctctcattatggtgagatcgtcgaatcgaatgttatcatcgatcgtgaaactggaagatcgagagggtgtggatttgggaccttcgcctcggagcaagcgatgaaagacgcaatcgaaggaatgaacgggcaagaacctcgacggtcgtaagtattacagtgaacg

SEQ ID NO: 267407 - DNA, 291 bp, Glycine max
cccacgcgtccggaggaacaccacttttagtcaaaggctgatgctggggcatcaaagacatttccccagcaagctggaaccatccgcaaaaatggttacattgtcatcaagaacaggccatgcaaggttgtggaggtttccacttccaaaactggcaagcatggacacgcaaagtgtcactttgttggaattgacatattcactgggaaaaagcttgaggatattgtcccatcttcccataactgtgatgttcctcatgttaatcgcattgactaccagctcatcgacatc

SEQ ID NO: 267408 - DNA, 358 bp, Glycine max
  unsure (1)..(358): unsure at all n locations
gccacgcgtccgccctgttggatctgtatattatctgacgtggtgaagatgaatgatgcactctagaagaaggaccagaactcaaccttatcacttgtttggatgcggggtcatcatccgataatgcaaattcttcatcagaaacaacaacaacaacaacaacaaaccctcttggtaattctgatgctactgagcctagagtgttctcttgcaactactgccacagaaagttctacagttcacaagcactaggtggccaccaaaatgcacacangagagagaggtcaattgcaaagagaggacacaagttttggatctcagattatggcctttggccttccccttttgcattataaca

SEQ ID NO: 267409 - DNA, 340 bp, Glycine max
ggcaggttgcttctttgctttgaaggtctggaatgcccagaaggctggtgcttctgctgttcttgttgccgatgatgttgaggagcccttaattactatggacacccctgaagaggatggctcttctgccaagtacgttgagaacattactataccctctgctcttgttggaaaaagttttgctcaaaaactaaaggatgccattattgttggcgatatggtcaacgtaaacctcgattggcgagaggctgttcctcacccagatgatcgcgtcgagtatgagttgtggaccaacagcaatgatgagtgtggtcttaagtgtgatatgctcatgcaattt

SEQ ID NO: 267410 - DNA, 152 bp, Glycine max
gtccgtcgttgtgtaatgtgggatgtgttcccaaaacatttgaagaactgtgatgttaaatgggtctgtaataaatgtccccttgaaaataacgttcggtttgtggttgaactcacattgtgtcccattaataatgagtactctaatatccc

SEQ ID NO: 267411 - DNA, 323 bp, Glycine max
gttcgggtgtgagagcgagaatcattttatgaagaaggaagacacagtgaagctgatgggtgccgaaggttttgaatttgtggtcgacaaagaagctgcaatggtttcacagaccatacataacatgcttacttctccagggagtttcgctgagaggcagcacggcgaagttacctttcctgagatcagcaccaccattctcgagaagatttgccagtacttttattggcatctccaattcgccagggggaaggagacggaatttcccattgaacctggattaactctggagctaatgatggctggcaattaccttcatacat

SEQ ID NO: 267412 - DNA, 301 bp, Glycine max
ctttttggcatttggcatttgtcaccaaacaattgttgttagctctcacaagcaagcttcagcaacgacaatgaagaaagtagtcttacagttggacttacatggtgatagaatcaagcaaaaagctatgaaaacagcatctggcctttcaggggttgaatcagtttctgttgatatgaaagacatgaaaatgatcgtgttgggggacattgatccagtgagtgcagtgtcgaagctacgaaagtgttgtcacactgaaatagtttcagttggaccagcaaaaagatgagaagaaggagat

SEQ ID NO: 267413 - DNA, 405 bp, Glycine max
gttttgggctggtgtttttgtgatttttgagatcaggaattaatttcagtggtgcagggaatggcaacggattcttcaaatggtaatggacatcaccagacaacaacaaagcagccttttgccatctcccctgcgcttttccaaattttttcagtccaacatgagaatcttggttactggaggagctggattcattgggtctcacttagttgacagattgatggaaaatgaaaaaaatgaggtcattgttgctgacaactacttcactggatccaaggataacctcaaaaagtggattggtcatccaaagattgagcttatccgtcatgatgtcacggagcctttattgatcgagggtgaacagatctaccatcttgcatgccctgcctttcctattttctacaa

SEQ ID NO: 267414 - DNA, 364 bp, Glycine max
cggacgcgtggggcctaacttaggtggtctcactgttgagcaggctatccaaaacaagaagttgttcatcttagatcaccatgactatctcattccatatttgaggaaaataaatgcaaataccacaaagacttatgctacaagaaccatatttttcttgaaaaatgatggaactttgacgccattggccattgagttaagtaagccacatcctcaaggtgaagcatatggtcctgttagtgaagtctacgtgccttcgagtgaaagagttgaagcttacatttggttactggcaaaagcttacgttgttgtgaatgatgcttgctaccatcaaatcattagccattggctaaacactcatgcg

SEQ ID NO: 267415 - DNA, 374 bp, Glycine max
  unsure (1)..(374): unsure at all n locations
ctcacgcgtncgccaaaacactatagtaatagaaacatttgcttttgaaaaaccccgcagtcttcatcactacactagctagccacatacaatgtcgaccaaatttaaggtgtttcgtgaattcacaagcgatgactcattcctaaaccaagttatccctgaaaacatcaccgaattccaagtgactctgtccctcgctagagactacgatggcaacaactcaaccaacggaaagttcattccttactgggacactgaaaaggtcactcccgaagtgataaaaaaattcaagaaaaaatacgaacccaccgcactgagggttaaagttcttgtcagcattggaaacaaaaacaaacaatttcctttcaccattg

SEQ ID NO: 267416 - DNA, 302 bp, Glycine max
cttttgcgttttgagtttcaatcaagccatcatcatgtctaccgcatcgcaacccaaggccaagaaaacggcgtcgtccaagaagcccctctcccaccctcccttcgccgtgatgatagcagaggcgattgcgagtctgaaagagagaaccggttcgagccaatacgcgataaccaaatacatcgaagggaagcacaaggagttgcctgcaacctacaagaagcttgtcctcgttcatctcaagaaatcttgtgctgctggcaagcttgttaaagtgaaaaactcctttaagctcgcaccga

SEQ ID NO: 267417 - DNA, 327 bp, Glycine max
  unsure (1)..(327): unsure at all n locations
cccacgcgtccgatagactatcttatanaataatataaataagaataaaaaaatagggaaaaaaaaagaatctatataaatataaaaataatatatataaggtacaaatagtaaatcgaggtacccattttatgataaactttccttccatttttgttcttctagtaggcctagtatttccggcaattgcaatggcttctttatttctttatgttcaaaaaaacaagattttttagattcagaaaacaaaggtaaattctggggttttttatttcccaattattatactaaattcaaaaaaagggggaggatggggtttaatttttt

SEQ ID NO: 267418 - DNA, 351 bp, Glycine max
agagccctttggacacaccctctaaaccaatctatcaagtcctgaatctggtgagcaaatatggagctttgttggcaaacatccatccatggttcttgaagaagcatggagataaaggggtgtgagagggtcctcaccactcacactcctccacttaaaacagtttgttttggcttagctttggcttctctaatcaacaagggatgtgttctaacattctctcttgagtggcagaagcagatatgcattctccaaaggaggagaggctttggctacagccttgcaaaccggcaagtcacgaaaaggcaatggactccattggggtctctatggctatctattgctcatcta

SEQ ID NO: 267419 - DNA, 401 bp, Glycine max
  unsure (1)..(401): unsure at all n locations
cccacgcgtccgcccacgcgtccgttataaacagtgtgatgaaaatgaaggtccttgttttcttcgttgctacaattttggtagcatggcaatgccatgcgtacgatatgttccctctccgaatgaacactggctatggtgcccgtactccggaggtgaaatgcgcaagttggaggcttgctgtggaagcacacaacatctttggctttgagaccattcctgaagagtgcgttgaagcaacaaaagaatacatccatggcgaacaatatagatcagactccaaaacagttaaccaacaagcttacttttatgccagagacctcgaagttcatcccaaggacacatttgtgttcagtatagatggcaccgnactctctaatattccatactacaaaaaacat

SEQ ID NO: 267420 - DNA, 340 bp, Glycine max
attaagaaaccttccaaaggcaaaagtgtcactcacggctgcaagaacagctgcgggggctatttatgtgcccccagctcaacaaggtgccatagatctgcagagtggaatacttcatgctgaagaaaaggattataaaactgcttatagttatttctttgaagcttttgaatcattcaatgctcttgatgaccccaaggctgtttttagcctgaaatatatgttgctgtgtaagatcatggtgaatcaagctgatgacgtaggaagaattatttcttctaaagcaagcctgcaataaattggcccttgacttggatgcttttaaaactgattgctgatg

SEQ ID NO: 267421 - DNA, 373 bp, Glycine max
ggaaaaaccggggcgacccacgcctccggttcctttcaatttccctcactttgtctgttcccaaacgcccctctctcttctccaatggccgaccagctcaccgacgaccagatcgccgagttcaaagaggccttcagcctcttcgacaaggacggcgatggttgcattactaccaaggaacttgggactgttatgaggtcacttggtcaaaacccaactgaggcagaactgcaggatatgataaacgaggttgatgctgatggcaacggaaccatcgatttcccagagttcctcaacctgatggctcgcaagatgaaagacaccgactcagaggaggagcttaaagaggctttccgtgtgtttgacaaggatc

SEQ ID NO: 267422 - DNA, 368 bp, Glycine max
agcacttgttctactctttgcatttctcttcctcaggtgtgtgtatgcacaagacacaacaacccttgtgcctgcaatcataacttttggtgattctgctgtggatgtagggaacaatgactatcttcccacccttttcaaggctgattaccctccttatgggagggactttgttaaccaccaacctactgggaggttttgcaatggcaaattagctactgatttcactgctgacacattgggtttcaagacctatgctccagcatatcttagcccacatgcatcagggaaaaacctgcttattggagcaaactttgcttcagctgcatctgggtatgatgaaaatgctgctactttgaatcacgcga

SEQ ID NO: 267423 - DNA, 344 bp, Glycine max
ggttgatatggctgacggtaggaggctactgggaccgaatatagctgtccaggggaacgtcgaccctggtgttctttttggttcaaaagagttcatcactgatcggataactgatactgtgagaaaagcaggtagagggaaacatatcttgaatcttggacatggcattaaagtaggtacgcctgaggagaatgttgcacatttttttgaggttgctaaatcaatcagatactaagaagctaattatgattaattaattcttttgtttgaaaaaaaaatttataaaaattaaattatgggggggttgtatatattattaatatattttggtgtaaatttatatt

SEQ ID NO: 267424 - DNA, 368 bp, Glycine max
caaaatttagaaacaaaaacatgttggtgaaggtgtacggtccaacctatggagcccgcaagagggtgctggtgtgtctgattgagaaggaaattgagtttgaaacagtacatattgatctcttcaagggagagaataaggaacctgagttcctaaagctgcagccatttggatcacttcctgttattcaagatggtgattatactctctatgaatctcgtgcaataatcagatactttgcagagaagtataaagaccaagggacagacttgttgggaaagacaatagaagaaaaaggtctagtggaacaatggcttgaagtagaagctcataactttcacccaccactctacaatttgggtattaat

SEQ ID NO: 267425 - DNA, 307 bp, Glycine max
ctctaagaaacatggctgaagagggtcaggttgtcggcgtccacaccgttgatgcgtggaaccagcaactgcagaatggaaaagactcccaaaaattgattgtggtggattttactgcttcctggtgtggtccatgccgttttattgccccagttctggcagagattgctaggcatactcctcaagtgatcttcctcaaggtggatgtggatgaagtgaggcctgttgctgaggaatattccattgaggccatgccaaccttcctcttcttgaaagatggcaagatcgtggataaggttgttggtgc

SEQ ID NO: 267426 - DNA, 363 bp, Glycine max
gcggcgtgttcaacaatcggcggcgaaaatgccttcccacaagacgttcagaatcaagaagaagctcgcgaagaagatgaggcagaacagacccatcccttattggatccgcatgagaaccgacaacactatcaggtacaatgctaagcgcaggcactggcgccgcaccaagctcggattttaaggtccatgtcaacctccgactcgagatttttatattgtttttgttattctagaatgttactagcaatgtgtaaactggaaaggttttagcttttggtcatgtggtcacacagagggatcattggtgagccgttccatatctctattttgtttttgtaccttttttggatattaatctga

SEQ ID NO: 267427 - DNA, 306 bp, Glycine max
gccacgcgtacgctcactctgcactcattattggcacacttcaatcgcactaatggctggcgaccttctcagatctacacaccgaagagggcatcaaatccctcgatcaattcctttctgggaaaacctatatttctggggatcagttgacaaaggatgatattaaagtgtatgcagctgttgttgaaaagccaggggacacttttcctaatgctgccaagtggtacgatgctgtctcttctcaacttgctccaagctttcctggccacgctcaaggggtaagattcagtggcgctgctgctccag

SEQ ID NO: 267428 - DNA, 331 bp, Glycine max
gcgtcccttcaaacatcgtttctgactctggatgaggccatcaagaccacgaatgcgggggttaacgctctggaaaacgtggtgaagccgcggttggagaacacgattagttacatcaagggagagctggacgagctggagagggaggatttcttcaggctgaagaagattcaggggtataagaagagggagattgagaggcagatgctgcagcagaacaactccaagcttgacactaatctccctttgcgcaaaggtctttcctacaattctgctcacaacttgttgtctgtgggtgacaaagatgaggatatcattttctgaatgtgct

SEQ ID NO: 267429 - DNA, 389 bp, Glycine max
cccacgcgtccgggtaggtgaggaaaactttggacaaaaaatggagtgctacacaaggccaaacaggagtgacatccacctctcagcagaggaagaagccaccatagaggcaaagaccagagagtactttgatggggtcgcaccacaacgccacacaaagcctcaacgaagtgactattcagctcaatatgtcgatgctttctccaatgcccatcactcttctttaactataccagaattaacacaattccaactcctccagaacgatccccaagagaagaaattggtgtacaatggaagtcaagtaccggaagaatttgtggaaacagagtattaccaagatctcaacagcgtggacaaacaccaccatacgactggaacaggattta

SEQ ID NO: 267430 - DNA, 349 bp, Glycine max
aaaattctcacgttgaattgaaatttggaaatcgtgacaccaaccctacaccaccatggcctccgtagacaaattttgggcttttgccctcgctcttctcctccttgcctcccctctcctccaagttgctaggtgtcagtcagactccgaagatgtagtggaggctgctgaagaatcaagtgatatcggcattgttggtgatgatgtccaagactttggtgatgggaccttcccttctgctccaagaattgaaacaataagtgtttttccaaaaaatagtgcgagattgataacagctggagaagagacagagctgcttgttggtgttaaaaatgatggggattcaagc

SEQ ID NO: 267431 - DNA, 309 bp, Glycine max
taaaggaacggggagtttcggtaagaagaggaacaagacccacaccctctgtgtgaggtgtggccgccgcagcttccacctccagaagagtccgtgctctgcgtgcgcttaccccgctgcgcgcaccaggaaatataactggagcgtgaaggccattaagagaaagaccaccggaactggaaagatgaggtacttgcgtaacgtgcctcgcagattcaagagcggcttcagagaaggtaccgaagctgcacccaggaagagaagagctgctggctctgcctaagctttgaatgaatgacaacaattttt

SEQ ID NO: 267432 - DNA, 377 bp, Glycine max
aagcaaatggcttcctcaatgatctcttccccagctgtgaccactgtcaaccgtgccggtgccggcatggttgctccattcactggcctcaagtccatggctggcttccccaccagaaagaccaacaatgacattacctccattgctagcaacggtggaagagtgcaatgcatgcaggtgtggccaccagttggcaagaagaagtttgagactctttcctacctgccagaccttgatgatgcacaattggcaaaggaagtagaataccttcttaagaagggatggattccttgcttggaattcgagttggagcacggtttcgtgtaccgtgagcacaacaggtcaccaggatactacgatggacgctactggaccat

SEQ ID NO: 267433 - DNA, 274 bp, Glycine max
cccacgcgtccgctccgccacttctgtttctattgaatcaacaatcatgtcggacgaggagcaccatttcgagtccaaggccgacgccggagcctccaaaacctaccctcagcaagccggtaccatccgcaagaacggctacatcgtcatcaaaggccgcccctgcaaggttgtggaagtttcgacttccaaaactggaaagcacggtcacgctaagtgtcactttgttggaattgatattttcactgccaagaaacttggggatattgtgccc

SEQ ID NO: 267434 - DNA, 262 bp, Glycine max
  unsure (1)..(262): unsure at all n locations
ttcaaacagttccttttttctcacacacttcctttgttcgacaccgcagtttcagggggagatccaacattgttcaatccaaattcaacgcattccatggngaatcctgcatccggacgattctatgctcttgttctgctacatcgtttgctagggcccatcgtgcacggatgtggaagttccgactttcaaaactggaaagcacgggcacgctaagtgtcactttcgtggaattgatattttcactgccaagaaaccttgg

SEQ ID NO: 267435 - DNA, 347 bp, Glycine max
ggtgaaatggcaatgtgcacaaattttttgcagggtcaagcctctgaatgggcattggtaagacgtcattcatctgaagatttatttggtgtacaaatctgtggggcatatcctgatactgtggcacgaacagttgaactaatagagcaagagtgtacaatagattttattgatataaatatgggttgtcctattgacattgttgtgaataagggtgctggatcagctcttctaacaaaaccaatgcggatgaaaagtattgtagaagttgcttcatgcacagcggaaaaaccaataactatcaagggacggactggttattttgaaagggagaatcgcattgattc

SEQ ID NO: 267436 - DNA, 348 bp, Glycine max
gccaggtttacaaggtgtccatcgtagcagcttgtgggctttcatggcccagtgaccgtctcgttatccaagtcctggacgattcaactgacactgtcattaaggaaatggtggagcaagaatgtttgagatgggcaagtaaaggcatcaacataacgtaccaaataagggagaacagaacgggttacaaagctggtgcgttgaaagaaggcctcaagcgaagctatgtggagcattgcgagtacgtggcaatattcgacgcggatttcaagccagagccagactttctcaggcgagcgattccattcttggtggggaaccctgagattgccctggttcaaagctcgt

SEQ ID NO: 267437 - DNA, 357 bp, Glycine max
aacaaatcaaagccatggccaccttcaacttctctattgttctctccgtctccctagcgcttctttttggtgctacttaccaaggcacactcgaccgataccgtttctttcaccttcaacaagttcaacccagtccaaccaaacattatgctccaaaaagatgctagtatttcatcctctggggtgttacaactcaccaaagttggcagcaacggcgtgcccacctcgggatctctcggtcgtgccctttacgctgccccaatccagatttgggacagcgaaaccggcaaggtagccagctgggctacatcctttaaaatcaacattttcgcacccaacaaatcaaactcagctgac

SEQ ID NO: 267438 - DNA, 459 bp, Glycine max
cacgccgtctcggctctatggcctacctctctaacttcttcttatttgttctctcacgatctccactagcccttctcttgttggtgcttttacttaccaaggcgactgactcgactcgatactcgtttcgtttcaaccttcaacaaagttcaacctcagtctcaactcaaaccattatgcgtccaaaaaggatgcttagtatttcatacctctggggtgttacaacctcaccaaagttggcagcaacggcgtgcccacctcgggatctctcggtcgtgccctttacgctgccccaatccagatttgggacagcgaaaccggcaaggtagccagctgggctacatcctttaaattcaacattttcgcacccaacaaatcaaaacggcatcgtggtggttgtccaatggacaagtggcggagattctcgttacctataatgcccgcacgagcctcttggtt

SEQ ID NO: 267439 - DNA, 446 bp, Glycine max
aagttatcctaatgggtgctgttgagggttatcgtattgctggtgggcccctcggtgaggtcactgacccaatctaccctggtggcagctttgacccattgggccttgctgatgacccagaggcttttgctgagcttaaggtgaaggaactcaagaacgggagattggccatgttctctatgtttgggttctttgttcaggccattgtcaccggtaagggtccattggagaaccttgctgatcaccttgcggacccagtcaacaaccaatgcctgggcctacgccaccaacttcgtccccgcaagtgagcattgaagaaaagattgactggtgaccttttagaagttttaagattggggttggtggaatatattgtattggaatggacttcaaaatatggtgattatcctggggatcccaattcaacttaatggtacttgcctttt

SEQ ID NO: 267440 - DNA, 426 bp, Glycine max
acaaaatccaaattcgcgtgtcacagtggcgctgggtgtaagaatgggaaatcgacgcttgactcaggtcgcaaccagcgaagatgaggacgaagcaccgacggctactcctcctcccaagcagcaatcgtcggtcagtgcccccgaagagaaccgttcgaagcagcagcagcgcaagaggaagagaatgaagcttcaagaagaagaggaagaggaagaggagaaagaggaagagaagaagaagaagaagagaaagatcaaagacaagcaagaagagagatcgaacgaagaagaggaaccgccgcatgaagacgcaaagcccattggcgaaccggttaggttatccggaaagggaaggggccgcaaaaagcattacgaatccttcgagtacgacggaaaccaatacatgctggaggaccctatact

SEQ ID NO: 267441 - DNA, 454 bp, Glycine max
  unsure (1)..(454): unsure at all n locations
gaaacagtgtgatgaaaatgaaggtccttgttttcttcgttgctacaattttggtagcatggcaatgccatgcgtacgatatgttccctctgcgaatgaacactggctatggtgcccgtactccggaggtgaaatgcgcaagttggaggcttgctgtggaagcacacaacatctttggctttgagaccattcctgaagagtgcgttgaagcaacaaaggaatacattcatggcgaacaatatagatcagactccaaaacagttaaccaacaagcttacttttatgccagagacctcgaagtccatcccaaggacacatttgtgttcagtatagatggcaccgtactctctaatattccatactacaaaaaacatggatatggggtggagaaatttaactcgacctngtatgatgaatgggttaacaagggcaatgcaccggcactgcccgagac

SEQ ID NO: 267442 - DNA, 432 bp, Glycine max
cccacgcgtccgctgtaacccagagctccttcgcctcatcgatagtttcaagtctcgttttgacaatggtgagggttagtgtgttgaatgatgctctgaagagcatgtacaacgccgagaagcgcgggaagcgccaggtcatgattaggccatcctccaaggtcatcataaaattcctattggtcatgcagaagcacgggtacattggtgagttcgagtatgttgatgaccacagggctgggaaaatcgtggttgaattgaatgggcggctgaataagtgtggggttattagccctcgctttgatgttggtgtcaaagagattgaaggttggactgcaagactactaccctcaagacagtttgggtatattgtcttgacaacctctgctggtatcatggatcatgaagaggctaggaaaaagaatgttggtg

SEQ ID NO: 267443 - DNA, 420 bp, Glycine max
ctgaaaggcaagagtgagagagaaatggagaatgcggaggagatgatgcagcaaaacgacgaggttttgtcggttgaacttccagctccttccggttggaataaactgtttttccctaagaaactgggaacaccaagaaaaagtgagattgtattcattgctccaactggagaggagatcagtaccaaaaaacaattggagcagtacctaaaggcacatcctggcaatcctgtcatttcagagtttgactggggaactggtgagacccctaggcgatcagcaaggatcagtgagaaggtcaagtcaactccaccagcagatagtgatactccaaagaaacgagctcggaaatcatcaggatcaaagaaggattacaaagaaactgaatctgcatcagaggaaggcaaggcaaagtctgat

SEQ ID NO: 267444 - DNA, 476 bp, Glycine max
  unsure (1)..(476): unsure at all n locations
cttgagcaaagattttgataacatagtggagcttcaactaggtgctccgtggcccctaccaccccttgaagcgactgccacattagctcacaaatttgaactcataggatcttcaaagataaagatagtatttgagaaaaccactgtgaagacagctgggaatttgtcacagttgccaccattggaggtgcctcggattcccgatgcattgaggcctccatctaatacgggaagcggtgaatttgaagttacatatcttgactcggatactcgcatcacaagaggagacagaggcgagctaagggtctttgtgattgcttgagttcctggtgaatgcaactatgcactatgcattttctctggtggacttaaaaaaaaaaaggtttcaacaccttgtgccatcattttgtttagtnttttcctcctgatggtatttgttctaaggttctcaataatgtatacatgatggaattaaa

SEQ ID NO: 267445 - DNA, 425 bp, Glycine max
agataacctatccatagcagtcatagaaattcagagtaccttgttcgccctgtgtctactgggtgccctcacctcttacctaccttcagacaccggtggagatgtggtctacactgatggtaatcctgttgaaaatggaggcacatactttgcgttgccaactataatattaaacggaggtggaatagaatatgccacatttggaaatgtaacttgccctgtcaatgttgcacaatcttgtgatcagttctgcaaggtctttccgataaccatttcatccgcagaccgcatccgtgacatcagcgaatgccttaattcgaacattggggtcactttcgcatacacatgatgcctcgcttctgagtggaccattgtgaaggatcaaccataatgactcgctgttaaactgactggggtttaaaata

SEQ ID NO: 267446 - DNA, 456 bp, Glycine max
cccacgcgtccggacgcagaaggttcatccaatctccgaatcctttaatcgcattgcaaccatgtcgaggagaaaggtcagagagccaaaggaggaaaacgtgactcttggcccagctgttagagatggcgaacatgtctttggcgtcgctcgcatatttgcctcctttaatgataccttcattcatgtcactgatctgtctgggagggaaacgcttgtccgcatcactggtggaatgaaggttaaggctgacagagatgaatcatctccttatgctgctatgcttgcagctcaagatgttgctgccagatgcaaggaacttggcattactgctcttcatatcaagctccgtgccacgggtgggaacatgacaaaaactccgggtcctggtgctcaatcagctcttcgtgcccttgctcgttcaggaatgaaaattggtcgtatagaggatgtgac

SEQ ID NO: 267447 - DNA, 289 bp, Glycine max
gcaaattccaattcccaattcccaattcccaattcgaaacccttattcctttcaaagaaccaaattgagtgatcgtgatggcaccaaaggcagagaagaagccagcggagaagaagcccgcggaggagaagaagtccacggtgggagacaaggctccggcggagaagaagccaaaggccggaaagaagcttccgaaggagggaggcgccggcggagaagggaagaagaagaagagaaacaagaagagcgtggagacatacaagatctacatcttcaaggttctgaagca

SEQ ID NO: 267448 - DNA, 363 bp, Glycine max
ttttgttgttgtggtgtttcatttgtgaaactaacaacaacacaaggccatcatcatggcagctgcttgcccaatggcaagccaactcaagtccaccttcactaggactcttgtagctcccaagggcctctctgcctcttcaccacttcacctcgtgccttctagaaggcaatttagcttcactgttaaggccatccaatcagagaagccaacctatcaagtgattcagccaatcaacggtgacccattcattggaagcctggaaaccccagttacatccagccctttgatcgcatggtacttgtccaacctgcccgcatacggaaccgcattgagcccactactaaaaggaatcaaggtggc

SEQ ID NO: 267449 - DNA, 397 bp, Glycine max
gatttctcagttctcacactcattccgtgctctaaatctcaaattctagggttagggttcccaatttctccgccaatcagaagatgagttccaccggtggttctaccaagggcggaaggggcaagcccaaagcctccaaatccgtttcaagatcgcagaaagctggtctccaattccccgttggaagaatcgctcgattccttaaggctgggaaatacgctgagcgtgttggtgctggtgctcctgtgtacctctctgcagtgctcgagtatctcgctgctgaggttttggaattggctgggaatgctgctagggataacaagaagaatcgtattgttcctaggcacattcagcttgctgtgaggaacgatgaggagctgagcaagcttttgggatc

SEQ ID NO: 267450 - DNA, 210 bp, Glycine max
aaaaaaaaaaaaaaaaaaaaaaaaaaaaaaaaaaaaaaaaaaaaaaaaaaaaaaaaaaaaaggaaaaaaaaggaaaaaaaaaaaaaaaaaaaaaaaaaaaaaaaaaaaaaaaaaaaaaaaaaaaaaaaaaaaaaaaaagaaaaaaaaaaaaaaaaaaaaaaaaaaaaaaaaaagaaaaaaaaaaaatgaagagaaagaaaaaaaaagaaa

SEQ ID NO: 267451 - DNA, 460 bp, Glycine max
  unsure (1)..(460): unsure at all n locations
gtgatcatgggcttgatgtaatggatgtgctaaagaagaatgcctctttagctttgccagtcatattaactcgcttgaagcagaaacaggatgagtgggcaaggtgtcgtgctgattttaataaagtttgggctgaaatatatgcaaagaattatcacaaatcacttgatcaccgtagtttctactttaagcagcaggatacaaaaagcttgagcactaaagtcttactggcagaaatcaaagaaattagtgagaagaaacgaaaagaagatgatgttcttcttgcaattgctgctggatacagacagccttttattcctcacttggaatttgtgtattctgatccagagattcatgaagatctgtatcaactcataaaatattcatgtggagaaatgtgtacaactgaacagntggataaagctatgaagatttggacaacatttttagaacccatgct

SEQ ID NO: 267452 - DNA, 360 bp, Glycine max
cccacgcgtccgcaaagcctctgatggaatcagggaatattgctgagctagctgatccaagattggaaggcaagtatgatggagagcaactctatagggtagtgctaacggcttcatactgtgtgagacaaactgccacgtggcgtcccccaatgagtgaggtattagagctgctaactagtggccaagagagtgaggttggaaagagctggaggatcccaaagttcacttctgatgaattggatgattactccatggttttcggatatgatgtaccctcagacgtatctttggaggattatctgtgagaatgaaatgtatggttcaggttcaaattttcttttcatactcaatatctaa

SEQ ID NO: 267453 - DNA, 475 bp, Glycine max
accacgcgtccgcccactcgtccgtccactcgtccgctcatcaatcgcacggatgacactgcgttgcttgctgatgtccctttctgttctctacactcttggtcttgcgagagaaagccatgccatacacgaacatttttggcatgctgattggccaaacactcccattccaagttcattgcgagatcttctaaagcctggccctgcaagtgttgaaatcgatgatcaccctatgcaaattgaagaaacacagtacccgaaaaccttcttctataaagaagaccttcatccagtcaaaacaatgaaagtacaattcagcaagcctccctttcaacaaccatggcgtgttggtacatggttaaaggaaattaaagacactactaaagaaggatatagatctgaagagctatgcatcaagaaagatgccattgagggagaatagacgtcttgtgcaaaatccttgggaacagttatt

SEQ ID NO: 267454 - DNA, 368 bp, Glycine max
  unsure (1)..(368): unsure at all n locations
cccacgcgtccgcccacgcgtccggaaagcaagctcatcctagagttttaaaaatggcagcagcctcctccatggctctctcttccccatccttggctggcaaggccgtgaagctgggcccatcagcccccgaagtcgggagggtcagcatgaggaagaccgtcaccaagcaggcctcctccggaagcccatggtacggcccagaccgcgtcaagtacttgggcccattctctggcgagcccccgtcctacctcactggcgagttcccaggtgactacggctgggacactgctgggctntcggccgacccagataccttcgccagaaaccgtgagctcgaaatgatccactccaggtgggccatgctc

SEQ ID NO: 267455 - DNA, 374 bp, Glycine max
  unsure (1)..(374): unsure at all n locations
cccacgcgtccggggtttttcttcttctcttctcactgcatcgcttcaggttcttctgaagagatgtctcgcgtgtatgttggtaacttggattcacgagtcactgagagagatctcgaagacgaattccgcgttttcggagttattcggagtgtttgggttgcacgtagaccacctggttatgcttttattgactttgatgaccgcagagacgcacaggatgctatccgtgaattggatggcaagaatggttggagggttgagctttctcacaactctagaggtggaggtggtggtcgtggtggtcgctctggtgagtctgatttgaaatgttacgagtgtggtgaacctggtcatttngctcgtgaatgccg

SEQ ID NO: 267456 - DNA, 408 bp, Glycine max
cccacgcgtccgcccacgcgtccggagagaggtctcgtagagaatcattagaaagcaagaaagaatatgggagtggagaagcagttgtagaggcctggcaccggtcctaagccatttcccggtcagaacgtcaccgttcactgcactggtttcgggaagaacggttacctttctcagaaattctggagcaccaaggatcctggacagtaccctttcactttcaaaatcggctcaaggttctgttatcaaatgatgggatgaaggtgtgcttggcatgcaaattggtgaacttgctcgtcttcggtgctctccggattatgcttatggagctggtggctctacttcttgcaggatacagcccaactgtgtcttggcatttgcaatcgaagtctcgagtgcacaatgaaa

SEQ ID NO: 267457 - DNA, 289 bp, Glycine max
cccacgcgtccgcagcattgcgaattgatgtggacaagaatactaagaaatcgcttactcgtgtcgttgttactcgagctgatattgatatgaaagacataaaggcagagtaccataatctatatggggtttctttaccccagaaagttgaagaggttgctagagggagctacaaggatttcttgctaaacttgattgttagaggaggctaattgaagaaattgaaaagagaacaaaaacttggaagatcaaataaaaaaggaaaattttttcctcccagttttccttg

SEQ ID NO: 267458 - DNA, 338 bp, Glycine max
gggcgccgtacgaagaaaggtcggcggcccaaagaagaagccggtttcaaggtccgtcaaggccgttctgcaattccccgtcggaagaattggccgttatttgaagaaaggaaggtacgcccagcgtgtcggtaccggtgctcccgtttacttggccgcagttctcgagtacctagctgctgaggtgcttgagttggctgtgaatgctgcacgtgacatcaagaagaacaggattattccgagacatgtgctattggctgtgaggaacgatgaagagttggggaaattgcttgctggtgtcaccattgctcatggtggcgttcttccgaacattaacc

SEQ ID NO: 267459 - DNA, 409 bp, Glycine max
cccacgcgtccgaaagaagcgaaactaaagtcagcattcgaaaaagatgagtagcatcggtacaggttacgatctatcggtcaccactttctcccctgatggccgcgttttccagatcgagtatgccgctaaagccgtcgacaacagcgggactgttattgggatcaagtgcaaagatggggttgtgttgggcgttgagaagcttattccgtcgaaaatgatgcttccgggttccaatagaagaatacactccgttcatcgtcactctgggatggctgtagcaggattagcagctgatggcagacatattgttgccagggctaagtctgaagctactaactatgacagcgtatatggcgaaccaatttctgttaaaggaacttgctgaccgtgtggctagttatgtgca

SEQ ID NO: 267460 - DNA, 465 bp, Glycine max
gccatggccacctccaacttctctattgttctctccgtctccctagccttctttttggtgctacttaccaaggcacactcgaccgataccgattctttcaccttcaacaagttcaacccagtccaaccaaacattatgctccaaaaagatgctagtatttcatcctctggggtgttacaactcaccaaagttggcagcaacggcgtgcccacctcgggatctctcggtcgtgccctttacgctgccccaatccagatttgggacagcgaaaccggcaaggtagccagctgggctacatcctttaaattcaacattttcgcacccaacaaatcaaactcagctgacgggcttgccttcttcttggcacccgtcgggtctcagccccaatccgacgatggatttcttggtcttttcaacagtcccttaaaggacaagtctctccaaaccgtggcgattgagttcgat

SEQ ID NO: 267461 - DNA, 282 bp, Glycine max
gttcgcacacctgattgatgtgtttatccattcattactgtatcttatgcttggaaatcttattaaatatatgtaagaataaaatatgatatcctgataaaaaaaaaaagcataaaaaaaacaaaaaataaaaacaaaaaaaaaaaaaataataaaaaaactacacaaaaaagaaaatagagaaaaaaataaaaagaagtacaaaaggtgtcaacattttagggtatcaatctttcattacattgctttagaaacgtataccttttgaaaagggtgcccaaa

SEQ ID NO: 267462 - DNA, 282 bp, Glycine max
tccacgcgtccggccactcgtgcgtacacgtttacgaagcaatcaaagacggcaagcacagcggagcattcaatgactcatagatagcaaaatacagtcgtcatcattcgtcctggaaaggcgaaaacgcgttaccgtcgctacatatcacgccgtgtaccaatcatcgtgtacagaacggaaggagccaaagccgttaaggcctttcgaaacatcccgggcatagaagttgataacgtcgctaggcttaaccttctgaaacttgctccaggacgacacctc

SEQ ID NO: 267463 - DNA, 463 bp, Glycine max
  unsure (1)..(463): unsure at all n locations
cccacgcgtccgaattcaaccatggttgcgagactcgcggtaacagcgctggtgctgatagctttggcaacaatttctctccaatcttcagcttcagcttcatcagtgggtaaattcgtcgacgaaaccatcacttcccacaagatcgtcattttttccaagacctattgcccgtactgtagaagagcaaaagctgttttcaaagagttgaaccaagttccacatgttgttgagctcgacgagagagaggatggttcaaagattcaggatatcatggttaatattgttgggaggcgtactgtgccacaagttttcatcaatggaaaacaccttggaggctcagatgatactgttgaagcttacgagagcgggcacctgcataaacttctaggaatcgagaaaaaggatcatgatgatcatgatgatctctgaataaggttgtaattanggtaaactatgtcgc

SEQ ID NO: 267464 - DNA, 357 bp, Glycine max
cccacgcgtccgattctcccctttcgtcaccatgccaccgacactctcactctcactagtgttggtggtgctgtttttcgccgccgtggacgcgcattttccggcgaccggcgagcttccaacgttccgcgaggcgccggcattccgcaacggaagagaatgccgcaaccgcccgcgaagcgactccgtgatccacatcgcgatgacgcttgacgcgacctaccttcgaggctccgtcgccggagtgttctccgtgctgcagcacgcgtcgtgtccggagaacgtcgtgttccacttcatagccaccacgcaccgtcggacggagctccgtcgcatcatcaccgcgacgttcccgta

SEQ ID NO: 267465 - DNA, 485 bp, Glycine max
  unsure (1)..(485): unsure at all n locations
accaaatcatattaagccatggccacctccaacttctcaattgttctctctctctccctagccttctttctagtgctactcaccaaggcaaactcaaccaacaccgtttctttcaccgtcagcaagttttccccacgccaacaaaaccttatcttccaaggagatgctgctatctcaccctccggggtgttacgactcaccaaggttgacagcatcgacgtgccaacgacgggatccctaggacgtgccctttatgctaccccaatccagatttgggacagtgaaacaggcaaggtagctagctgggctacatncgttaaattcaaagttttctcgcccaacaagacggccgacgggcttgccttcttcttggcgcccgtcgggtccaagccccaatccaaaggagggttccttgggtctttcaatagtgactcaaagaacatgtcagtccaaaccgttgcngttgagttcgatacttattataa

SEQ ID NO: 267466 - DNA, 448 bp, Glycine max
cccacgcgtccgggagccagggaagccaagtccttgcactgatattgtgagcttctcaaacccaactccaaagtgcttggaacttcctccaaggttgctacttgattcccaaaacaacaacaaaagcaacaaactttcatcacccaccactgttttggagggaccatacccttatgtggctaccaccaacacttgcaactctccttcttttagaatgaatgaagacttgtacggttcttttgggtctgaaagagggaaacttgggaccatggttttgaaccaaggagtggggatcaaggaggaggagaaggagaaagggtggtttggttcatggagggaaaaggccttgaaaagagaggctagtggtggtgggggtaagtatgtctttccatcttctgttgaaaaagatcctgaatgtgttggcactcacaagaaggtgaggagtatg

SEQ ID NO: 267467 - DNA, 232 bp, Glycine max
gccactgaccctaagaggaacgctagggatttccatgtttctgtactggcgccacttcctagtggatttgccgtgttcatggttcacttggctacaatcccaattactggtactggcattaacccagcatggagtttcggagcagctgtaatctacaacgaagacaaaatctgggatgatcagtggatattctgggttggaccaatcgttggagcagcagttgctgcatttt

SEQ ID NO: 267468 - DNA, 409 bp, Glycine max
ctcttgcgatgctgtaccggtgcggagtacccaggcgtgcgcccacgcgtccgagactcttccttttctcttctctgtctaaggggtgccctgagatcacattgaacaatggtgaaggctgtggccgttcttggcagcagtgagggtgtcactggaactattcacttcgttcaggagggaagtggtccaaccaccgtaactggatctcttgctggtcttaagcctggtctccatggtttccatgtccatgccttgggggacactaccaatggttgcctctcaactggatcacatttcaatcctaataacaaggagcatggtgcccctgaggatgagaatcgtcatgctggtgatcttgggaatgttaatgtccgtgatgatggtactgtcagcttcactattactgaca

SEQ ID NO: 267469 - DNA, 436 bp, Glycine max
tctggaattgcgtaggcacgcaaggagagttcatcccacttctcgtccctctaacattgatcctacaagagaaagagcttggcgacattttgaggaccaaagagaatatggtgatattgtgagtgctattcagtctgccgtgcctggagctgtgctagttggggactatgttcttgagaatggagacggtattggtaggttaccagacgaacgtgctgaaggcaacattggcaacgccaatggaccatggttaaccaccactatcttgtttcagatgatggatagcaccgttgaaattggtaggaaccaagagcacattcgagtgcctggacaaggcaaccgcgttcagatgaacgtcggcgctatctgtggggtgagaatttattgggtcttcatgataatgacattgaggatgatctgcgtatatttagggatt

SEQ ID NO: 267470 - DNA, 372 bp, Glycine max
ggcagccatagttctaacaaccctgttgattcgaaccgctacagttccactcttaataaatcaacttaaggccacttctaaacttacgttaatgaggcctcatttggaagagataaagcaacaaatggagggactgactatggatcccgtagctgttgctaaaggtcagcagcagatgaagaaactatttaaggagtaagtggtttcttaatttgcttgtaaaagatatccttgacattattcttgtggtctcttttaatctattctttatctgctgatactcattttttatcctctcaatctgatgtaattactatttactacatttatatttagtgatataatatacgatgcattagtggagcaatcttt

SEQ ID NO: 267471 - DNA, 390 bp, Glycine max
cggacgcgtgggaaaaggagcatcgagtttgtttcctactcccttctcatcgttggcaagatgagtgccatgaaattttgccgtgaatgcaataacattctgtaccctaaggaagacagagaccagaaagttcttctcttcgcttgccgcaactgcgaccatcaggaggttgctgataacttctgtgtgtataggaatgagatacatcactctgttggagagcgcactcaggtgttgcaggatgtcgctgcagatccaacgcttcctcgaaccaagtctgttcactgcagtcaatgcaatcatggtgaagctgtcttttttcaggcaactggcagaggggaagaaggaatgacactttttttcgcatgcttgaacccaaactgtggacac

SEQ ID NO: 267472 - DNA, 392 bp, Glycine max
cccacgcgtccgagaaaaccctagcccaaccggatcttcacgactaggagatggcaaaggcgaagaaccacaccgctcacaaccagtcctacaaggcccataagaatggcatcaaaaagccaaagaggcatcgccacacttccaccaaagggatggatccaaagtttctgaggaaccagaggtacgcgaggaagcataacaagaagagcggtgaaacagccaccgaagaagagtaaagtgccactctcaaatgggcctattaggatttgatttgttatttaagccccatatgttttgtgtcgaatctatctttagtagtatagtcatttttatgagttaacttaatccagagagaatgcagtacttactcttatagcatcgttggtggtttt

SEQ ID NO: 267473 - DNA, 406 bp, Glycine max
cccacgcgtccgcccacgcgtccgcagaatcaaaagtgcaagaattaggtggcatcaccgatgtgcatggagctgccaacagcgtcgagatcaacaatctcgctcgctttgctgtagaggaacaaaacaaaagagagaattcagttctggagtttgtgagggtgattagtgcaaagcagcaagtggttgctggagtgaattactacataacattggaagcaaaagatggtttgattaaaaatgagtatgaagcgaaggtttgggtgagggaatggttgaactccaaagagttgctagaattcaagccagtcaatgtttctagcacaccaataggtggcattaccgatgtgactgcgaatagcctcgagatcgacattctcgctcgttttgctggtgatcaacacaa

SEQ ID NO: 267474 - DNA, 295 bp, Glycine max
caagtagttgagaactaagaaggagaattttatggcttcctcaatgatctcttccgcagctgttaccactgtcaaccgtgccggtgccggcatggttgctccattcactggcctcaagtccatggctggcttccccaccagaaagaccaacaatgacattacctccattgctagcaacggtggaagagtgcaatgcatgcaggtgtggccaccagttggcaagaagaagtttgagactcttttctacctgccataccttgatgatgcacaattggctaatgaagtagtatacctt

SEQ ID NO: 267475 - DNA, 451 bp, Glycine max
gcaatgagagagaatctgttgaggcagggatacagaattgttggaatcattggagaccaatggagcgatctgcttggagaccacagaggcgaaagcaggacctttaagcttcctaatcccatgtactacattgagtagtaccttcacctctctcaacaatctagctagagtttgctcctatctatatgtaataaggtatgctgatatgcactattcaaataggagcattagctatgtttgttaatgtcactttatgttatgtgggtaagtcacctaagacactccacgtacctacgttgttgtctcttaccggctttaataaatcttctgcccttgttccatatttactaaaaaaaaaaaaaatataaacataaaaaaaaaaaaaataaaaaaaaaaaaaaaaataaataatttattaatataaaataatattaaaaaaaaaaaagggcgg

SEQ ID NO: 267476 - DNA, 267 bp, Glycine max
gtaatgacagacaatctgttaagttctctttacataatcacacacataattttagactaagctacctatctattggcacactacaaatgataatgcttgacactcaaacttactaataccctttactatagtaatttatatctaaaatcttctcaatcatctatctataactacatcctatctatatctaataacgaatgcacttatgcattatctacatataaccatatgctttcctcaacaaagtcactctaacaaatgcttaca

SEQ ID NO: 267477 - DNA, 171 bp, Glycine max
ctccgtctccgtggggggttttaagctcgttgtgtaatgttggatgtgttcccaaaacatttgaagaactttgatgtttaatgggtctgtaataatgtcccttgaaaataagttcggtttgtgttgaactcaattgtgtcccattaataatagtactctaatatcccacct

SEQ ID NO: 267478 - DNA, 356 bp, Glycine max
cggacgcgtgggcggacgcgtgggtttcccgagaaaaaaataacacttttcactttctgcactacgttctcacttcgatatggctcgtacgaagcaaaccgctcgcaagtccaccggtggcaaggcgccacgtaagcagctcgccaccaaggccgctcggaagtccgctccggcgaccggaggagtgaagaagccccaccgcttcaggccgggaaccgtggcgctgagggaaatcagaaagtaccagaagagcaccgagcttctcatcaggaagcttccatttcagaggctcgtgagagaaatcgcgcaggatttcaagaccgatttgcgtttccagagcagcgctgtttccgcgc

SEQ ID NO: 267479 - DNA, 337 bp, Glycine max
cttcttcttcttcttcttgttcctgcaacgcactgaattcgatcaatcaatccatcttgaatggctttgtttcgatcggaggaaaatggccgatcagttatcgaagggagaggaattcgagaaaaaggctgagaagaagctcagcggttggggcttgtttggctccaagtatgaagatgccgccgatctcttcgataaagccgccaattgcttcaagctcgccaaatcatggcacaaggctgaagcgacatacctgaagttggcacgttgacatttgaagttggaaagcacgcatgaatctgcacaggcccatgtcgatgctgcacattgctacaaa

SEQ ID NO: 267480 - DNA, 296 bp, Glycine max
cctacgcgtccggttctttatcctctttttttaatgttggatgtgttcccaaaacgggggatgaactttgatgtttaatgggtctgtaataatgtcccttgaaaataatttcggtttgtgttgaactcaattgtgtcccattaataatagtactctaatatcccacctatatatatattcattatattatttttatattatatatatattattaaaaagtgtctccgttctatatgatccaagctaacgtactcttgtatgcgacttcttaacttttttatagtgacacctaaatt

SEQ ID NO: 267481 - DNA, 360 bp, Glycine max
cccacgcgtccgaaaaacaagtagttgagaactaagaagaaggaaatggcttcctcaatgatctcctccccagctgttaccaccgtcaaccgtgccggtgccggcatggttgctccattcaccggcctcaaatgcatggctggcttccccacgaggaagaccaacaatgacattacctccattgctagcaacggtggaagagtacaatgcatgcaggtgtggccaccaattggcaagaagaagttcgagactctttcctacttgccagacctcgatgatgcccaattggcaaaggaagtcgaataccttctaaggaaaggatggattccttgcttggaattcgagttggagcacgggttc

SEQ ID NO: 267482 - DNA, 451 bp, Glycine max
ggcagctgctactccccctgtcatgcaaggatcagacagacctttgtggtttgcatcaaagcaaagtctttcctacttggatggcagccttccgggtgactatggatttgaccctctgggactttcggaccctgaaggaacaggagggttcattgagccgaaatggctagcatatggtgagataatcaatggtcgttatgcaatgttgggtgcagttggtgcaatagcacctgaaattctaggcaaggctggtctgatccctcaggagacagcactcccatggttcagaaccggtgtgttcccacctgcaggaacctacaactactgggcagactcctacacactgttcgtgtttgagatggcactgatgggatttgcagagcacagaagattccaagactgggccaaaccaggctctatgggcaaacaatacttcctaggactagagaag

SEQ ID NO: 267483 - DNA, 364 bp, Glycine max
gagagagagcaagtgacaagagtggagtgtgagatagtgactgcaaaaccgctccagccttgtttcttctcagatcttcttccatggaacagtacgagaaggtggagaagataggcgagggaacatacggcgtcgtttacaaggctcgcgaccgcgtcaccaatgagaccatcgctctcaagaagattcgcctcgagcaggaggacgaaggcgttcccagcaccgccattcgcgagatttctctcctcaaagagatgcagcataggaacattgttaggttgcaggatgtagtacacagtgagaagcgattgtatctggtttttgagtatctggacttggatctaaagaaacatatggattcatc

SEQ ID NO: 267484 - DNA, 401 bp, Glycine max
caaaaatattattaagatgatcaacattattggagcacttgttctactctttgcatttctcttcctcagttgtgtgtatgcacaagacacaacaacccttgtgcctgcaatcataacttttggtgattctgctgtggatgtagggaacaatgactatcttcccacccttttcaaggctgattaccctccttatgggagggactttgttaaccaccaacctactgggaggttttgcaatggcaaattagctactgatttcactgctgacacattgggtttcaagacctatgctccagcatatcttagcccacatgcatcagggaaaaacctccttattggagcaaactttgcttcagctgcatctggttatgatgaaaatgctgctactttgaatcacgcga

SEQ ID NO: 267485 - DNA, 396 bp, Glycine max
cccacgcgtccgcttttacttctcagcagcttcggctagggttcagaaacgaaaaagggttcggtgttctgttcgcgatgagagccaagtggaagaagaagcgtatgaggaggttgaagaggaagcgccgaaagatgagacagagatccaagtagtgcgttaaacctagtttgtttctgttgcttttacaattgcttatgttgtcgaatgggacacccagttgttagtggcactggtttctcctttttgatgtttgatacattttgatggattcaagtagtttatgttcgtcttatgttattagctcaaaacaatgttgttactgcttttgctaatcaacatgatctcctatgtgcatctctgattttcttagggttattataatttgacattata

SEQ ID NO: 267486 - DNA, 431 bp, Glycine max
ctccttactattacaagtctccaccatcttcctctccaactccgtactactataagtgggctcctccgccgccaccttattactacaagtctccacccccaccatccccagctccttactactacaagtctccacccgcaccaccaccttattactacaagtctcctccctcaccaccttacacgaagccttacatctatgcatcacctacccctacttaccactattagcatacctcttatcgatatgaagaatatgtgcaacgaataaaagaaagcgatggaaagcgcttcgcgatgcacgaaagagaagaaatggaagcaaagtttccgcgttttgtctatcataaaaaaaatgttaaattattattatctatgatacgattggtttcttgtctatcttctctagcttaagaatttccgtgtatttta

SEQ ID NO: 267487 - DNA, 422 bp, Glycine max
gtgggttgttcttggacattctgagcgattacatattattggagaaaatgatgagtttataggaaagaaagctgcctatgctttgagccaaggtcttggagtgattgcatgcattggagaattgttagaagaaagggaagctggaaaaacttttgatgtttgttttcagcaattgaaggcttatgcagatgcagttcctagctgggacaacattgttattgcatatgaacctgtatgggctattggaacgggcaaagtggccactccccagcaagctcaggaagtacatgtagctgttcgagattggctaaaaaagaatgtccctgatgaagttgcatctaaaacgcgaattatttatggagggtctgtaaatggaaggaacagtgctgagctagcaaagcaagaagatattgatggatttc

SEQ ID NO: 267488 - DNA, 381 bp, Glycine max
gatgtatcagatctggagcaggagaatagcgttgggagcgttcgcgtttgttctgcttttcctatcggcctcagcagacgacgtcgttgtgctctctgaagataacttcgagaaggaagttggtcaggacagaggagctctcgttgagttctatgctccttggtgtggacactgcaaaaagcttgctccagaatatgaaaagcttggtagcagcttcaagaaagccaaatctgttttaatcggcaaggttgactgtgatgagcacaagagtttgtgcagcaaatatggagtctctgggtacccaacaattcagtggtttccaaaaggatctcttgaacccaaaaagtatgaagggccacgcactgctgattcacttgctga

SEQ ID NO: 267489 - DNA, 403 bp, Glycine max
ctcttctcacccccacactcccatctcacacacccctcgcatccaacaatgtctctcaccattccctccaacctctccaagcccgccgccctccgccccaaactaagcccaaagctaaggtccgccgccacaaccaccatcgtctgcagcaccaccaacaacaacaacaacaacaacgtgtcctccgacctgaaggcgttctccgccgcgctggccctctcctccatcctcctctccgcccctctccccgccggcgccgacatctcggggctcaccccatgcaaggagtcgaagcacttcgcgaagcgtgagaagcagtcgataaagaagctggagtcgtcgctgaagctctacgaggcgggcagcgcccccgcactgggcattaaagcgagcgtggagaaaa

SEQ ID NO: 267490 - DNA, 368 bp, Glycine max
cccacgcgtccggaaagtgagaggagagagaaagtagcagatcctccatggcctccaccaaggaacgtgaaaacttcgtctacgtcgccaagctcgccgaacaagccgaacgctatgaagaaatggtggaagcaatgaagaatgtggcgaagctaaacgtggaattgacggtagaggagcggaaccttctgtcggttgggtacaagaacgtggtgggtgctcgtagggcttcgtggaggattctttcctcgattgaacagaaagaagaagctaaagggaacgatgtgagcgtgaagaggataaaggagtataggctgaacgtggagtctgagtttgccaatatctgcagtgatatcatgactggtatt

SEQ ID NO: 267491 - DNA, 356 bp, Glycine max
  unsure (1)..(356): unsure at all n locations
cgccgctcgatttcggcaatgccgccacgggctgccgcctgaccatgggcctcgtcggggtctacgatttcgacagcaccttcatcggcgacgcctcgctcacaaagcgcccgatgggccgcgtgttgaacccgctgcgcgaaatgggcgtgcaggtgaaatcggaagacggtgaccgtcttcccgttaccttgcgcgggccgaagacgccgacgccgatcacctaccgcgtgccgatggcctccgcacaggtgaagtccgccgtgctgctcgccggcctcaacacgcccggcatcacgacggtcatcgagccgatcatgacgcgcgatcatacggaaaagatgctgcanggcttt

SEQ ID NO: 267492 - DNA, 417 bp, Glycine max
ctttttctcaacaaaaaggggttcaattctagctagttctattacgtcgtccgcgaccatgaacatggcgatcgcgcttctgttcatggttttcgcagtttcatcagctttagacatgtcaataatatcacacgacaacgctcatgcggatagggccacgaggcgcaccgacgaggaggtgatgtcaatgttcgaggagtggctggtgaaacacgacaaggtgtacaacgcgctcggtgagaaggagaagaggtttcaaatcttcaagcacaatctgcgcattatcgatgaacgaaactctctgaaccgaacctacaagttgggactcaacgtgttcgctgatctcaccaatgcggagtacagagccatgtacctgcgaaccttggacgagggtccgaggttgggcttggatacgcc

SEQ ID NO: 267493 - DNA, 314 bp, Glycine max
cttcctttgcaaggttcatactttcgtttccccttctcatcgaatcgaagcgccgcaccgtgtttcttctctgcctgaataacgcaaagaaaattgaagcatcctaagggttgtttctaagggataccgggttgggagagaagatgaagcaggtggtgggaacggtggtttcaaataagatgcagaaatcagtggtggtggcagtggatagactattctaccacaaattgtacgaccgatatgtcaagcgcacgtctaagtttatggctcatgatgagcacaatcattgtaacatcggtgaccgagttcggctg

SEQ ID NO: 267494 - DNA, 338 bp, Glycine max
cacttgctaatttgggctatgatgttacatttatacaaggttctcttagtaatggagagagagacaaagttgtcaaggagtttaaagatggtttgactcaagatcttatatcaacagatattcttgctcgtggctttgatcagcaccaggttaattttgtcattaattattaccttccaaataaacacaatttaccggatgaaccaaactatgaattgaatttacacacagttatcagtgctggtcgcagtggatacactattgtaccatataatgtactatcgatttgtcaagcgcacgtgtaattttatggctcatgatgagcacattcattgtat

SEQ ID NO: 267495 - DNA, 296 bp, Glycine max
aaacaacaatatggctcatgttattgaattataaaattataaattaataatatggctggctcctgctaaaaatgccatcatctgataaatccatttcccacacaatacacaactaacttttaagcacttttatcaagaacaacataacaaactccatttggaataggaggggaaatagcttttttattttcactagatttaatggtaaataattagaccccgaactttaaaatacacaggctacatccgtgagcaataataataatttaagtgtatactactactaggcactacta

SEQ ID NO: 267496 - DNA, 343 bp, Glycine max
tgagaagatcatttcagacgcggttcacagagcttccacatttgatccaaaagttccagctaggatcttaaggatgttcttccatgactgtttcattaggggatgtgatgcatcaatattgctggactcaacacccaaaaacctggcagagaaagatggccctcctaatctctctgttcatgcattctatgttattgatgaagccaaggccaagcttgagaaagcttgcccacacactgtttcctgtgctgatataatagccattgcggctagggatgtggtagcattgtctggaggaccatactggaatgtgctcaaaggaaagaaagatggaagagtctca

SEQ ID NO: 267497 - DNA, 400 bp, Glycine max
ctctctcttacacacccaagcactactactactactttctttctagatatgggttctggtgctgtgcaactgtttctgatcttggggctcttggctagctcatgcttagcccaagccccaggtgctgcactgtcacaaccacccactacaaccccatcaccaccaccacccagatcagcacctgcaccagcacccaccacaccatcaaccccaccaccagcaaccacaccaccagcagcaactccaccaccagcagcaacttcaccaccagcagcaacaccaacaccagcaccagcaccaccaacggctgcacctacacctgctttctctactgcaacctatcctacttcaccttattctacagtgacactaagcttcacctattctaacactacaccag

SEQ ID NO: 267498 - DNA, 387 bp, Glycine max
tccagacgcgttggcaaaggcattcgtggagcactactacagcaccttcgacaccagccggaacggtttagcgaatctgtatcaggagggttccatgctgaccttcgaagggcagaagatccagggcgcttccagcatcgtcgctaagctcacttgcctccctttccagcagtgccaccactccatctccaccgtcgactgccagccctccggtgtcaacgctggcatgcttgtctttgtcagcggcaacctgcagctcgctggcgaacagcacactctcaagttcagccagatgttccatttgataccaacgcctcatggaagctattatgtgtggaatgacatattccggttgaactatgcatgaagatagaccatcatatgacc

SEQ ID NO: 267499 - DNA, 447 bp, Glycine max
gtgagctataagctagtttatcgtgtggagtatatgaagttgtttgttttctttgttgctgcagtagttttggtagcatggccatgccatggcgcaggctaccaaaggttccctctccgaatgaaaactggctatggtgagcgttcttcggaggtaaaatgcgcaagttttaggcttgctgtggaagcacacaacatccgagcctttaaaaccattcctgaagagtgcgttgaaccaacaaaggactacattaatggcgaacaatttagatcagactctaaaacagttaaccaacaagctttcttttatgctagtgaacgcgaagtccatcacaacgacatatttatattcggcatagataacaccgtactctctaatatcccatactatgaaaaacatggatatggggtggaggaattaatgaaaccttatatgatgaatgggtta

SEQ ID NO: 267500 - DNA, 426 bp, Glycine max
cccacgcgtccgcccacgcgtccttctagttcacttatcgcaagcggcatagttagtgctggcaaatccaaccagcaccgggttgttaagacccctggagggaagttggtgtaccagaccactaagaagagagcaagtggacctaagtgccctgtcactggcaagaggatccaagggattccacacttgagacctgctgaatacaagaggtctagattgcctcggaaccggaggaccgtaaaccgagcctacggaagtgttttatcaggaggagctgctagagaaaggattattcgtgctttcctggttgaagagcaaaaacattgtgaaaaaggtattgcagatccagatggcaaaagaaaagcaggcatcaaagagttaagctgttgagtgattcatgagtgcataaaatatcttatcgttaaa

SEQ ID NO: 267501 - DNA, 257 bp, Glycine max
tcgcccacgctgttcgaaaaaaaaaaatttaaaataaaaaaaaaaaaaaagaaaaaaaaagaaaaaagaaaaaaaaaaaaaaaaaaaaaaaaaaaaaaaaaaaaaaaaaaaaaaaaggaaaaaaaaaatagtggtaaaaaagattaagtagaaaggcatgtaaggtaaaaaaaaattaaaatgagggggcttaaatagaattcaatggtgggtgttttacaacgtagattattgtaaatttcttggggtgaccaaaa

SEQ ID NO: 267502 - DNA, 437 bp, Glycine max
cggacgcgtgggttcaattctgttcatcctttgcttcccaaagaaagagaaaataaaaagcaatgggtagccttgaagcggaaagaacaacagtaggattggcagcaagagacccttcagggattctctccccatacacctacaatctaagaaacacaggccctgatgatgtttacataaaagttcactactgtggaatttgccattctgatctccaccagattaaaaatgatcttggcatgtccaactatcccatggtcccaggacatgaagtggttggtgaggtactggaggtggggtcagacgttagcaggttcagagtgggagagttggtgggagttggactcctcgtaggttgctgcaaaaactgccagccatgccaacaagacattgagaattactgcagcaaggaagatctggtcttacaatgatggtta

SEQ ID NO: 267503 - DNA, 492 bp, Glycine max
attcccgtggtcgactccacgcccgtccggaatgcaacgaaagggaatactatccgatggcgaactaatatacgatcgagacgtccgaaaacgagttaggcgcgaacaagctttacgttttgatgcgcgagagactcttcgaagtcgcatgcccgaaggacacgatttgtcgttcaagtattatatggcactcgtacttctctaatatgtgcatacttacaagaaaacatgtgatatgtgggtggagaacatttaacgtcgactcttgtattgatgaatgggttaacgaagggcgaatgcactcggcacttgcgccgagacttcttatagaattacaacgaagctggtgtgctcttggctttaacgtttgcgttctgttactggcctgtttgtcccagtgttcttcctgacaaggaatatgaatcttgaaaggttctacgatctgcgagcgtgccgctctaggaggatccaaagcttactgtactgcgtgca

SEQ ID NO: 267504 - DNA, 398 bp, Glycine max
ctcaagcaaccatggcaatggcaacccatgcctctctcttaaccccacccctctccgggctcaaagccagcgaccgcgcctccgtgccatggaagcaaaactccagcctctccttctccagcccgaagcccctcaagttctccagaacaatcagagcagcagccgccgacgagaccacagaggcaccagcaaaagtagaggctgcaccggtcgggttcaccccaccagaacttgacccaaacaccccttccccgatcttcgggggcagcaccggcgggctcctgcgcaaggcacaggtggaggagttttatgtcattacgtgggactcacccaaagaacagatctttgaaatgcccactggcggcgccgctatcatgagggagggtcctaaccttctc

SEQ ID NO: 267505 - DNA, 338 bp, Glycine max
tcctgaagcggcaaaagaatacattcatcgcgatttttatacatcagactcaaaacagtgaggtaaatcttacttctatgcgagagacctcgaaatccatcccaaggacacatttgtgttcagtatagatggcaccgtactctctaatattccatactacaaaaaacatgcatatccactggagaaatttaactcgaccttgtatgatcaatgggttaacaagggctaatcaccgtcactgccctaaactcttaagaattacaacaagcttctgtctctttgctttacatttgcatctgttacagccttattttacaacgtttttccttactagaata

SEQ ID NO: 267506 - DNA, 357 bp, Glycine max
cggacgcgtgggatgaagacaaaactgtcttggttacggtgaatggagagatctacggggatgaagaactcaggaaacagttgcctaatcacaccttccgtacaggaagtgactgtgatgttattgctcacctgtatgaggagcacggagaaaactttgtggacatgcttgatggtatattttcgtttgttctgctagatactcgtgacaacagctttatagtggcacgagatgcaattggggtcacttccttgtacattggttggggtctagatggctccgactggatttcatcagaattgaaggggttgaatgatgattgcgaacattttgagtcttttccacctggtcacttgt

SEQ ID NO: 267507 - DNA, 446 bp, Glycine max
gcgcgcagatggaactcgatacgatagtttgaagatggctcagtgtgtgtgcaacacagggctgcaaggtgaacacgtcctgcagcggcagcaactgccactgcagaagctcctagagcggctgaaaccgctgcggaggctgcgagatgtacccagacttgagctacactgagtcaaccaccaccgacaccttggtcatgggagtggcacctgctaaggctcaatttgagggtgctgaaatgggtgtgcccgctgagaacgatggctgcaaatgtggaccaaactgctcctgcaacccctgcacttgcaagtgaggtgatgggagagcaagctttaagcagagatagcccttaattaggaataatgataaactattaatgtgtagctaaaaacttatggataatgtctgtgatgggtttcgtgcactctggtgttttggggtaaac

SEQ ID NO: 267508 - DNA, 428 bp, Glycine max
accgctttcgccaaggatttgcttcctaaatatttcaagcacaacaacttctccagcttcgttcgccaactcaacacttatggattcagaaaagttgtacctgaccgctgggagttctcgaacgagtatttccgaagagacgagaagcggctcctctgcgaaatacagcgacggaagatcctcccggcaacgccgccgacccgagcgactgcgaccgcggcggttctatctccgctgccgctatctacgattccgccggcgaagctgatcgtgtcgccgtcgaactcagcggaggagcaggtgatttcgtctaactcgtcgccggcggagctgttggatgagaacgaccggctgaggaaggagaacattctgttaacgaaggaattggaagagatgagatcgctcttgaacaatatattcaatctcat

SEQ ID NO: 267509 - DNA, 372 bp, Glycine max
ccggctgcataggcatagactagagagagagttgcaatggccgtttctttggcagggaaccgtcctctgcttggtcttcacgagaatgtaccattagctgttgctcatccccaattcctcccgttcaaatggccacccaagtccaaactcccctccgtcgtcggaattcgatgctcctcctcccctttcaacgacaaaaccctcatttccatcacacctaacacttcccacctcaatcccaaccctctcgcttgtcgctttcacgcttcccagtttggagaacaggagagcaacaaatacgtggaagcctatgctgtaggacgaaatattcgtatgtctgctaataaagctcggaaagtgatcgatcagatt

SEQ ID NO: 267510 - DNA, 216 bp, Glycine max
cccacgcgtccgattgttcgttgttgtaactcgttcttcttcttttgatgttctgtgtgtgtgtttgttttttctctaacctaaaaatgcttgttgcggtggtaactgtggttgcggaagctcctgcaagtgcggaaacggttgcgaaggctgcaggatgtacccagacttgagctacattgattcaaccaccaccgtgaccttggtcatggaagt

SEQ ID NO: 267511 - DNA, 398 bp, Glycine max
  unsure (1)..(398): unsure at all n locations
ctcgaactgttgtttggtctcttctctcttatccatggcatcaacgtttctcaccctaccaactcccttcctacacaaaaccaatgccatcagtttctctaacaagagaccctcatttttgcagaggagctctctgaagattcatgcaattaccaaaaaatgggaacccacaaaggttgtgcctcaggctgatagagttcttattcgtttggaggagctttcagataaaacagttggtggagttttgctgcctaaatcagctgttaaatttgagcgctatcttgtgggagaaatcctaactgttggtgctgaggctggagaactaaaggctggaacaaaggtactattcactgacatgaatgcttatgaggtggatttggggactgatgcanaacact

SEQ ID NO: 267512 - DNA, 404 bp, Glycine max
cccacgcgtccggtcgcttcttcgtaggtgcagctgcaatggtgaagggacgccaaggagaacgtgtcagactctacgtgaggggtacaatccttggatacaaaaggtccaagtcaaaccagtatccaaatacatccctgatccaaattgagggtgtgaatgccaaagaagaagtagcatggtatgctggcaagaaaatggcctatatctacaaggctaaggtgaagaagaatggaagccattaccgctgcatatggggcaaggttacaaggcctcatggtaacagtggtattgtccgtgcaaaattcaagtcgaaccttccacccaaatcaatgggagcccgagtaagagtattcatgtatccaagcaacatatgagattcacgtgataaaacgctcagtaga

SEQ ID NO: 267513 - DNA, 234 bp, Glycine max
cccacgcgtccgcgcgtctctccttaccagtttcaccgcacgaatatcttgttggttggagcgatccgtgaaaaactctgtagacatgttggtttaccaggacctccttacaggtgatgagcttctctctgactccttatgttacaaggaaattgagaatgtaatgctgtggtaagttgaagagaagtgcgctggactacgaacttcgtctgttacactcatgtaaactttttt

SEQ ID NO: 267514 - DNA, 461 bp, Glycine max
cccacgcgtccgggaaagttcgttcctttccgtgaagaaaaggtggtgcaaggtaaaacctttgtgcctttaaatcctcaatgtccaagtcttgcaaagggttgcccatggagctagtcaagtgtctcagtgaatctgattgtgttaaggttgagaagagatcatataaggaatgtgttggagagaagagtccatgtataccaagtgagtgtgttggactcagggaaacctatttcaattgcaagagaggccaggttgacatgagagctaggattcgtggaaacaagggctattaatgatctcatcatacatttgaaaactctgaagttgttctgtccagttgaggttctttcaatttttagctcaagacgaagtcaacaaaagtaagagatgagggtgaatcagagaaatgggaggccttgttagttgtttgatttgatggcattgtaagctacacatgc

SEQ ID NO: 267515 - DNA, 309 bp, Glycine max
gataaagcattccatagcctcccataaaaatgaagaatactatcttctctgctctctttctactttgtgccttcaccacctcatacctaccttcaaccaccgcggtggtcgataccgacggtgatattcttcagaatcctggcacatactttatcttgtccgtttttcgacccggcggcggagtagaattcgccgccactggaaacgaaacttgccctctcactgtcgtgcagactctcttcgggaggggctttccagcaatattatcgtgccggttacgaatccctttcatcggcgaacgacaactct

SEQ ID NO: 267516 - DNA, 396 bp, Glycine max
cccacgcgtccgaacaaaaccctagcacacttttatcgcttagtggcagcagcagtggcggcaagcaactccatcctcaatgggaatcgatttgaaggcaggaggtccgtccaagatgaccaagcgatccgcccccaaatccgatgatatctacctcaagcttatcgtcaagctgtaccgttttcttgttcggaggactgggagtaacttcaatgctgttgtccttaagcgccttttcatgagcaaggtcaacaagccctcgctatccgtctctagattgatccgatacacgaagggaaaggtggattagatagctgtggttgttggtgccgagaccgatgacattagggtttatgaagtccctgctctgaatgtaactgacttgaggttcactga

SEQ ID NO: 267517 - DNA, 308 bp, Glycine max
aagtcgcctagaactacgaagatggaaatgttttcttcaatgatctccttcccagctgttgccaccgtcaaccgtgccggtgccggcatggttgctccattcaccggcctcaaatccatggctggcttccgcacgaggaagacctactatgtcattacctccattgctagcgtcggagtaagagtacaatgcatgcacgtgtggccactaattggctggaagacgttcgcgacttttcactacttgccagaccttgacgatgctctatttgcataggtagtcgcgttcctcgtaaggaaaggatggtt

SEQ ID NO: 267518 - DNA, 445 bp, Glycine max
cttgtattcacatttcaacaactataaccattgctttctcctcctccaaggcagttttccgtgcctgctctttttgcctatttgcatctttggctgttgctggcgatttctccattgtgggctattcatcagaggacttaaagtccatggataagctcattgaactctttgagtcatggatgtcaagacatggcaagatttaccaaagcattgaggagaagctgcacaggttcgatattttcaaggacaacctaatgcacattgttgtgtgaaacatggtttttagcatcatactgtctgtcttgattgattttaattattttagcctctatttgtccattttcattttttttttactatagttttattattttatattgagttggttttttattttttgctttttatatatttttattcctttttttatttttttttttttttt

SEQ ID NO: 267519 - DNA, 345 bp, Glycine max
aaagaacccaatcatggatgacctcatgattcgtgcttttgcaaacaagaatgacatatgggcatagggccctgttatgaggctatgggagactgctcgtctcactactggttcagcctaaaccagcccatcaattttaaaaacaggatcgacacaatgtagaatctacgactgagcattgacaaggctacaacctaagcttatgctgaaatggccataattgtagaagcctatgctgatactctgggctgcagcattggggacttttatttaaatcaaataatttgcaaatcttgaaagtagcgtctctaatgccttgattgaatattgacgtctcttacatgc

SEQ ID NO: 267520 - DNA, 307 bp, Glycine max
gctgcagttgtaacacctaccatttatggtttctggtgtttggactgatgatagtaacctgcatctcgaggcgacgactcagttccggaagctgctttcgattgaacgtagtccgcctattgaggaggttatacagactggtgtggtttctcgctttgttgagtttctcatgagggaagactttccacagttgcagtttgatgcatcctgtgctttgacaaatatagcttttgggacgtctgaaaacaccaaggttgtcattgatcacggggctgtcccaattttcgtgaatctacttgcttattct

SEQ ID NO: 267521 - DNA, 374 bp, Glycine max
gctgcagttggaacacctaccatctatggttactggtgtttggactgatgataataacctgcagctcgaggcgacgacgcagttccggaagctgctttcgattgaacgtagtccgccgattgaggaggttatacagactggtgtggtttctcgctttgttgagtttctcatgagggaagactttccacagttgcagtttgaggcagcctgggctttgacaaatatagcttctgggacgtctgaaaacaccaaggttgtcattgatcacggggctgtcccaattttcgtgaagctacttgcttctcctagtgatgatgtccgtgaacaggcagtgtgggcattaggcaatgtcgcgggggattcacctagatgtc

SEQ ID NO: 267522 - DNA, 457 bp, Glycine max
cccacgcgtccgtggtcttagaaatggttttaagaagaaaaaacattaaggctgaagtagacaactcgagtgaaatatattttcctcattggatttacaatcgtcttgaatcaaatcaagagcttggtttacaaaatataaaaaatgaaggtgatgaccaaatggtgggaaagatgacaatagttggcttgtggtgcatacaaacccacccttcagctcgaccagccattagtaaagtgatggaaatgttagaaagtaaaatggagttattgcaaattcctcctaaaccttttctgtcttctccttcaacctctccggttcatttatcatgtgagacactatagtttagaagaatatatactaagatgtagcctttgttgtagtacattgcacttattactatttttcttcttcttttagtttggctttatacattgatgagtaagtgcagcgttaa

SEQ ID NO: 267523 - DNA, 340 bp, Glycine max
  unsure (1)..(340): unsure at all n locations
ggagaggatgagaagagagtgaagtttgtgttagagattgcactcgtaacatcatacccagccatcggtgangggcctctgttcgccgaagttgacatgggttccgacttcaacgccccaacggttcgagctaccgttgttcaagcctgcaccatcttctacgacacaccagccaccttagataaggctgagaggttgttggctgaagctactagctatgggtcccagcttgtggtgtttccagaagcctttgtgggtggctacccgcgtggttcagctattggtctttcgatcggaaatcgcactgttaaggtagagaggagtttcgcaagtatcattc

SEQ ID NO: 267524 - DNA, 374 bp, Glycine max
cttttcaacagtgccttaaaggacatgtctttccaaaccgtggcgattgagttcgatactggctcgaacaaaaaatgggatcctgcaaaccgacacatcggcattgacgtgaactcgatcaagcacgtgaaaacggcatcgtgggtggttgtgcaatggacaagtgacacgtgattatcgatacctataatgccgtcacgagcctataggctgatgttaggatccaacctatatagaaaacaagttacatcctctgtgacacagcgaactagaagagttatcactgcgaatggttgagcgttgagtactctggcactaccagcttgcatgaatgctgacgttgaaacccatgatgtgaatacttggtcttaagc

SEQ ID NO: 267525 - DNA, 384 bp, Glycine max
cccacgcgtccggtagttgagaactaagattgagaagcaaatggcttcctcaatgatctcggccccagctgttaccactgtcaaccgtgccggtgccggcatggttgctccattcactggcctcaagtccatggctggcttccccaccaggaagaccaacaatgacattacctccattgctagcaacggtggaagagtgcaatgcatgcaggtgtggccaccagttggcaagaagaagtttgagactctttcctacctgccagaccttgatgatgtacaattggcaaaggaagtagaataccttcttaggaagggatggattccttgcttggaattcgagttggagcacggtttcgtgtaccgtgagcacaacaggtcaccagg

SEQ ID NO: 267526 - DNA, 282 bp, Glycine max
cccacgcgtccgcgccgtgcgcctcagaattgttctcttcgcctccggagttgcgtccaggggaagctgtcaagagcttatcttctaagggaaggctacagtgaatggtaccttgtgtaatacgcctcagactaaagttcatcctgcgaaggatgttatctatgtgaactggtacaggctatcttagaggcaatcttataatgattatctttgcattgaacaaactcaaagggtttatatgttcatctgcttagaacatagttaaatttttgattagattat

SEQ ID NO: 267527 - DNA, 443 bp, Glycine max
agaaaatgttgaggaaggaggagtggaggttaacggatctgctgggtgggactagataaagtgaagcaagctgacaagactaagggaagattggatggtggaaatggaatcggcagctgaaaaccctaattacccggcggtggactacaagcgaccttccatcttgtcatttcctcggaggcccgccctcagagttacatccgagttcgatagtgaaagcgcagtcttcttccataagatttcctgcaagttgttggacagccttgccaagttcaagttttcgttcaaccacagcggtaagggcggcgacatctccgaactctaattcagctttgtctccaagcaccttagccttcactacgacctctaagaccataatgctcttggtaagacctacaacgatcttgcttccaacttgcaactcactgcttcttatgatctta

SEQ ID NO: 267528 - DNA, 445 bp, Glycine max
caccactctatcccctacaaccccttctcagctatgctcaggaaagagtgggattttcaggccctcacaggcacttcttgtgaagccagtgaagaggcagatgatggggaagagcaagggaatgagaattgcatgccaagccaccagcattcctgctgatagagtccctgacatgggcaaaagacagctcatgaatctgcttcttcttggtgccatttcactcccctctgctggaatgcttattccctacacctacttttttgtccctccaggttcaggttcttcagctggtggtactgttgccaaggatgctgttggaaatgatgtaattgcagagaattggctcaaggcacatggacctggtgaccgaacccttgcacaaggattgaagggagatcctacctatcttgttgtggagaaagacagaacccttgcaacatatgca

SEQ ID NO: 267529 - DNA, 410 bp, Glycine max
gatcgagataactagaaacagtgtgatgaaaatgaaggtcctcgttttcttcgttgctacaattttggtagcatggcaatgccatgcgtacgatatgttccctctccgaatgaacactggctatggtgcccgtactccggaggtgaaatgcgcaagttggaggcttgctgtggaagcacacaacatctttggctttgagaccattcctgaagagtgcgttgaagcaacaaaggaatacatgcatggcgaacaatatagatcagactccaaaacagttaaccaacaagcttacttttatgccagagacctcgaagtccatgccaaggacacatttgtgttcagtataaatggcaccgtactctctaatattccatactacaaaaaacatggatatggggtggagaaattta

SEQ ID NO: 267530 - DNA, 444 bp, Glycine max
cccacgcgtccgatggcttgcatgcaattgtgggcttcaagagctgcctcttacctgaggatctctgtgtttcacagaggcttttctaatgttattaaagatttcaagtatgttgattctcatgagtgggtgaaagttgatggaaattacgcaaccatcggcataactgatcatgcccaagatcatttgggtgatgttgtatatgttgaattgccagaagtgggagcagctgtgacacaaggaggtagttttggtgcagttgaaagtgtgaaggctactagtgatattaactctcctatttcaggaaaagttgttgaagtcaatgaagcgcttaacagctctcctgctttggtcaattcaagcccttataaagatggatggataattaaagttgaaataaatgacagtggtgaactaaacaacttgatggattcagaacaatac

SEQ ID NO: 267531 - DNA, 360 bp, Glycine max
tggaagtcacactttcagcgtgcaagtccattagctcgccttctgttcccgtcgcagcttgatttgcggggaaagcaggaactaagagttcgcaatgcagttttttagctggagcaaacaaagtgaggtttcctaggcaagtcggtcaagttagccacgttcgcaaacagcgccaaacgcgtcactgtggtgctctccacgcgacttgcagcggtgacaagatcctgatcgcgaatagaggcgagattgcggttcgcgttattcgaaccgctcatgaattggggattccgtgtgtggctgtgtactccaccattgataaggacgcccttcatgtcaaactggctgatgaagctgtatgca

SEQ ID NO: 267532 - DNA, 188 bp, Glycine max
cagacgcgttccatcgcttgctttcacatttttgctccaagagctgcctcttggctgattgtctctgtgttacagacaggcttttctaatgttattaaagatttcaagtatgttcattctcatgagtgggtgaaagtcgattgaaattactcaaccatcttcataactgatcatgcacacgatcattt

SEQ ID NO: 267533 - DNA, 440 bp, Glycine max
aaggcagaaagcaagctcatcctagagttttaaaaatggcagcagcctcctccatggctcgctcttccccatccttggctggcaaggccgtgaagctgggcccatcagcccccgaagtcgggagggtcagcatgaggaagaccgtcaccaagcaggcctcctccggaagcccatggtacggcccagaccgcgtcaagtacttgggcccattctctggcgagcccccgtcctacctcactggcgagttcccaggtgactacggctgggacactgctgggctttcggccgacccagaaaccttcgccagaaaccgtgagctcgaagtgatccactccaggtgggccatgctcggggccttgggctgcgtcttccccgaactattgtcccgcaacggggtcaaagttggagaaacttggtggttcaaggcccggtcccaaatc

SEQ ID NO: 267534 - DNA, 340 bp, Glycine max
cgcacgcgttcgtggatttgagccatcacttttccgaactggacagatggttgggattgggaatcagtatagctagatcttcattatgagaaagaacgacaagcaatgaacgttgacaaggcacacatccactcattcagcattgctaaagtcacagatagaacccgggaccacatacatgcaaaatcaggatactagcaatatgacgagcacactgcacaatccaggaaccataaaatcgtcaaactagcgtactgagatcaccgaatattcaagagcaaattaaactactcgttgcaatataccatcaattgcactaccacaatatgtaatagaaaag

SEQ ID NO: 267535 - DNA, 423 bp, Glycine max
cccacgcgtccgcccacgcgtccgcccacgcttccggaaaattttaaataggacttgttatgacaaaatacaattgcattgctccttcggcgaattggcactggtctctttgccgaacttcagcgttttggtttgggagggaaaattctaaaacctaaaaaatttcaatctcaatcaactcaacgtctgtgatcccaatcgatcacatttaataccacccttcaggattaggtagtaattccgttcccttgaataaataacatgagcaccacagtgcaaagaactccaagatccagcaggcattctttatttttccaggatttggcttcacctgtttctgcccgtagaggaaaattttcgagtccaggtcaagcagctgcagtatcttcactatggcgtgagaactttggtagttcagacctt

SEQ ID NO: 267536 - DNA, 314 bp, Glycine max
gtgagctataagctagtttatcgtgaggagtatatgaagttgtttgttttctttgttgctgcagtagttttggtagcatggccatgccatggcgcaggctaccaaaggttccctctccgaatgaaaactggctatggtgagcgttcttcggaggtaaaatgcgcaagttttaggcttgctgtggaagcacacaacatccgagcctttaaaaccattcctgaagagtgcgttgaaccaacaaaggactacattaatggcgaacaatttacatcagactctaaaacagttaaccaacaagctttcttttatgctag

SEQ ID NO: 267537 - DNA, 431 bp, Glycine max
gtagttgagaactaagaaggagaagcaaatggcttcctcaatgatctcttccccagctgtggccactgtcaaccgtgccggtgccggcatggttgctccattcactggcctcaagtccatggctggcttccccaccagaaagaccaacaatgacattacctccattgctagcaacggtggaagagtgcaatgcatgcaggtgtggccaccagttggcaagaagaagtttgagactctttcctacctgccagaccttgatgatgcacaattggcaaaggaggtagaataccttcttaggaagggatggattccttgcttggaattcgagttggagcacgggttcgtgtaccgtgagcacaacaagtcaccaggatactacgatggacgctactggaccatgtggaagctgcctatgtttggttgcactgatg

SEQ ID NO: 267538 - DNA, 447 bp, Glycine max
cccacgcgtccgcccacgcgtccgtacagtttcggagtgttgctcttggagctgctcacaggaaaggctcctacacatgccctcttgaatgaggaaggagtggaccttccaagatgggtgcaatcagttgttagagaagagtggagttctgaggtgtttgatattgaactccttaggtatcagaattctgaagaggagatggttcagttgttgcaacttgcagtggattgtgttgttccataccctgataaccgtccttcaatgtctcaagtgattcaacgcatacaagagttacgtaggcctagcatgaaagaggctactcaagaccaaatccaacaacttgatttgatcaatgatatagatgatgcgtcttctagatgagtttgttatgggtttgtgtacaaggataaacttctacatggtcattattgtcttggacaatctcta

SEQ ID NO: 267539 - DNA, 302 bp, Glycine max
accacgcgtccgagtgatttcagtgcgcgtttggtgttcacttgatctcatcataatcgtgagcatcgattgaataacatgccgatcagaaacatcgccgtcggatggcctgaagaggctacttaccctgacacgttgaatgccgctctggctgagttcatctcaaccttcatcttcgtgttcgccggctcaggctccggcatcgcctacaacaagctcaccgacaacggcgctgccacccctgccggcctcatcttcgccttcatcgtccatgcattcgccctcttcgtcgcctacttcgt

SEQ ID NO: 267540 - DNA, 426 bp, Glycine max
cccacgcgtccgagtgatttcagtgagtgatcggtgttcacttgatctcatcataatcgtgagcgtcaattgaagaagatgccgatcagaaacatcgccgtcggaaggcctgaagaggcgactcaccccgacacgttgaaggcggctttggctgagttcatctcaaccttcatcttcgtgttcgccggctcaggctccggcatcgcctacaacaagctcaccgacaacggcgctgccacccctgccggcctcatctccgcctccatcgcccatgcattcgccctcttcgtcgccgtctccgtcggcgccaacatctccggcggccacgtcaaccccgccgtcaccttcggcgccttcgtcggcggcaacatcaccttcctccgcggcatcgtctacgtcatcgcccagctcctcggctccatcgtc

SEQ ID NO: 267541 - DNA, 437 bp, Glycine max
attgtttgttgttgtaactcgagcttctgctttcggtgctctgtgtttgtgcttgattttggtctcacctgaaaatgtattgctgcggaggtaactgtggttgcggaagctcctgcaagtgccgcaacggctgcggaggctgcaagatgtacccagacttgagctacactgagtcaaccaccaccgataccttgttcatgggagtggcacctgttaaggctcaatttgagggtgctgaaatgggtgtgcccgctgagaacgattgctgcaaatgtggaccaaactgctcctgcaacccctgcacttgcaagtgacgtgtcgggagagcaagcttcaagcagagatagcccttaattatgaataatgataaactattaatgtgtagctaaaaacttatgtattatgtctgcgatggttttagtgcactctggtgatta

SEQ ID NO: 267542 - DNA, 422 bp, Glycine max
gtccctttctgttctcttcactcttggtcttgcgagagaaagccatgccagagacgaagagttttggcatgctgtttggccaaacactcccattccaagttcattgcgagatcttctaaagcctggccctgcaagtgttgaaatcgatgatcaccctatgcaaattgaagaaacacagtacccgaaaaccttcttctataaagaagaccttcatccaggcaaaacaatgaaagtacaattcagcaagcctccctttcaacaaccatggggtgttggtacatggttaaaggaaattaaagacactactaaagaaggatatagttttgaagagctatgcatcaagaaagaagccattgagggagaagagaagttttgtgcaaaatccttgggaacagtaattggttttgccatttcaaagctgg

SEQ ID NO: 267543 - DNA, 396 bp, Glycine max
cccacgcgtccggattcttcctgcccagagacgaaaccataatccgtagagcattaataaacatttcccatttgtttggttgctccgaaaacagaggaccaaacaagcccttatcacaactctatctaacaaattacataggacaggcccaaaaccaaaaaaagcttctttgtctctcgtgccgattctccaccactattcccttcaccccaatcacactttccggtagttgttgctattagtgtagaagatgagtacgctggatgcagcaagggctgaacttggtcttcttgttttatatttgggcaaggctgaagcaagggacaaaatatgcagggcaatacaatatggttccaaatttttgagtaatggggaacctggtactgctcagaatgt

SEQ ID NO: 267544 - DNA, 445 bp, Glycine max
cccacgcgtccggaaattcattcccacatttcactttgatctgatctcatttccattcatggattcgttgttcttctttccaccaacaagaaagaaaacagagagaaactttcatttcatagattttcatcatctcagcaaaggaatcaatcaatcaagccatggcaggcttcagtggcgacgaaaccgctcctttcttcggcttcctcggtgccgctgcggccctcgtcttctcctgtatgggagcggcgtatggaacggcgaagagttggcgtggggtggcgtcgatgggagtgatgaggccggagctggtgatgaagtcgatcgtgccggtggttattggcggagtgttggggatttacgggttgattattgccgttattatcagcactgggataaacccaaaggctaagtcttactatctctttgatggatatgctcattt

SEQ ID NO: 267545 - DNA, 442 bp, Glycine max
ctcagtccatcctgtaataatctccgttttaacaccaaacaccaagcgaaacgggaattgagcctcttcttcttcatcgaatcgaaacaacctcgtccgtgctaaggaaactcaacgacagagactgcaacaatgtacgtagatcacgcgttctcgatttcggacgaggatatcatgatgggaacctcgtacaccgtcaacaacaaaccccccatcaaggagattgccctcgccgtttccctcctcgtttgcggcgtcctcggcatcgtcatcggttctctcatggcctacaaccacgtcggcggcgacactgctcacgggatcttctttgcagtactgggatttatcttgttcataccgggtttctactacacgcggattgcgtattatgcttacaagggatacaaagggttctctttctcaaacataccacccgtgtagc

SEQ ID NO: 267546 - DNA, 452 bp, Glycine max
tagcttccaaaccctaacacttctcttccttttcgatcatcacctctccacaatgccgccgaagttcgacccctcccagatagtcgacgtcttcgtccgcgttaccggcggcgaagtcggcgcggcgagttccctggccccgaagatcggtcccctcggtctctcccccaagaagatcggagaagacatcgccaaagaaaccgccaaggactggaagggcctccgcgtcaccgtcaagctcaccgttcagaatcgtcaggcgaaggtcacggtggtccccttcgtcgccgccctcgttatcaaggccctcaaggagcccgagcgcgaccgcaagaagaccaagaacatcaagcacaacggcaacatctcgctcgatgacgtcatcgagatcgctagggttatgaggccgaggtccatggccaaggacctcaacggctccattaaagagattc

SEQ ID NO: 267547 - DNA, 453 bp, Glycine max
atattgcattctctctgtgtatttccctacttatcccttcaagatgcagatcttcgtcaagaccctcaccggcaagaccatcacccttgaggtggaaagctctgacaccatcgacaacgtcaaggccaagatccaggacaaggaaggaatccccccggaccagcaacgtctcattttcgccggaaagcaacttgaggacggccgtacccttgctgactacaacattcagaaggagagtactcttcacctcgtactgcgtctccgaggtggcatgcagatcttcgttaagacactcaccggcaagaccataaccctagaagttgaaagctccgacaccatcgataacgtcaaggccaagatccaggacaaggagggtatccccccggaccagcaacgtctcatcttcgccggaaagcagcttgaggactgtcgtaccctcgccgactacaacat

SEQ ID NO: 267548 - DNA, 446 bp, Glycine max
gaaatcttaaatcatttgatccagaacaagtatgaatactgtatggaggtgactgccaaagcattggctgatgtaaagggtggcactttgatttcttacgaaggaagggttcagcttttggaaattgcacaagtcccagatgaacatgtcaatgagttcaagtcaatagagaagttcaaaattttcaacacaaataatttgtgggtgaacttaaatgcagtttaaaggcttgttgaagctgatgctcttaagatggaaattattcccaatccaaaggaagttgatggaataaaagttcttcagctggaaactgcagctggtgctgcaataaggttctttgacatggctattgggattaatgttccttgatcacgattccttcctgtgaaggcaacttcagatttgctttttgtccagtctgacttttacactttggaagatggatt

SEQ ID NO: 267549 - DNA, 445 bp, Glycine max
cccacgcgtccggtggaaactttggaaagagatcttaagaacacgaggaaatactacgggagtggaaaaacaaaggaagcaccatggagagaatcacagcttaaagggttgcacaattttctcgtggaaaaagaggaagaaattgtgacggccctcaagcatgatttggggaagcattacgtggaggcttttagagacgagcttggaacattaatgaagaccttaaacttggcaaccaagtctttgaaaaattggatggcggggaaagaggcaaagctgccacgaatagcactgctctcaagtgcagaaatagttcctgagccacttggtcttgttctcataatctcatcatggaactttccctttggactttccttggagccactgatcggagcagtagctgctgggaacagtgtggttctaaagccttcagagttgtccccta

SEQ ID NO: 267550 - DNA, 372 bp, Glycine max
gtttaatttttatgtttcttaggtgaattactcaagagggctcgacaatcccacaaagtagaaaaagaggttatgttatagcgggcaaaggtgttagttcggtggctaaggcggtagcagaatatcagtatccttggcgtgagaagttggggaaatataaggatgagcttgccaagggtgtgtggggatactgggagctgggggcatggaagccgctgagtatcagtgctcggcatcgtgctagaattcgcaaggaagtcctccttgctggggaagattggccctacgatcctgaaaggaaggagatgaagaccaggaggaaaggacacaaatgtgaataggattttgtccaaaaagcgcgcaaacacagcg

SEQ ID NO: 267551 - DNA, 441 bp, Glycine max
cccacgcgtccgatatagcccatgccctattcaaccaaaccctaacacacacgcatttgatgtcagtttccatggctagcctcaaggttgcatttttggctgcagtgctctgcatggttgtggtgagtgcacccatggcacatgcagctatcacgtgcgggcaggtgacgagtagcctggccaattgcatcggttacctccagaagggaggaacgccgtcatcgggatgctgcaacggagtgaagagcctcaatgccgccgccaagaccaccgacgaccgccagactgcgtgcaactgcttcatgtcggccgccagccaaatctgcggcttcaacgccgacaacgccggctagctctccggcaaatgctgagtctgcataccttacaagatcagcacctgcaccaactgcgctaccatcaaggttttgaagagaaagtcat

SEQ ID NO: 267552 - DNA, 439 bp, Glycine max
  unsure (1)..(439): unsure at all n locations
ctcacgcgtacgcattaacagctagaatggctcttaggcgcttgctgacgtccatttactggctctacactcatggtctggcgagagaaaggcatgccagagactaagattttacggcatgctagctgcccaaacaactgtattccaagatcattgcaagatcatctaaagcctgacccttcaagtgatgaaatcgatgatcaccctatgctgattgtagaaacacagtgctgcgtaacctgcttgtataaagaataccgttattcangcataacattgaacgtacaattcagcaagactctctttcaacaaccatggggtgtcggtacatggttaaaggaaattaatgacactactaacgaaggatatactttcgaagacctatgcatcaagaacgaagcccttgagggagaaagaaacgtttcggcataatccttgg

SEQ ID NO: 267553 - DNA, 446 bp, Glycine max
gtgactcaggaggattttgagatggctgtttccaaggtgatgaaaaaggagactgaaaaagacatgtcattgcggaagttgtggaagtgatttttatttcatgtttgtggtgcacattattatcctgcgaagatgggcagcgaacacaccttagggttatttcaatttacagtggcattggatttcattttgcttaagtttaccaagttatgtaccgaatcatatgattctttctttgagtttttccttgtctgtgtcttcggacggcacactacatttatagagtatttttaaaagatttatattcaagaccaaataataaaaaactcatatattatattttttataattttttatctattcttttatcttatacattctattcaatatatttcctttatttttttttttcattttactatatataatttttatttttttataat

SEQ ID NO: 267554 - DNA, 321 bp, Glycine max
cccacgcgtccgcccactcgttctaaaaaattaaaaaaaaaaaaaaaaaaaaaagaaaaaagaaaaaatacaaaaaaaaaaaaaaaaaaaaaaaaaaaaaaaaaaaaaaaaaaaaaaaaaaaaaagggactgccacttaaaagaatcaaagctaacgtacacgtgcatgcaacgtaaaaccacttctatagtgaaacctaaattaaattcactggccgtcatttaaaaacatctggactggaaaaaccttgacattaccaaactaaatcgacttgcataaaaatccccttaagcaaattgtcttaatagcaaaaaggccca

SEQ ID NO: 267555 - DNA, 383 bp, Glycine max
gaccaccttccctctcttctgttaccaatgttctccctcatcaaactacatttctttccttgtcctcaccacccttttgtttgctcttcaaatcagtgcaagagacagccagttcttcagcaaagtcacccattttgacaaaaacagtgtcaaagagacagaacttcccaacaaagaagcaccagaagtgaacaagccagagcaacaaccacctttcattccggagactgaaaacagctatggcctatatggtcatcatgatgagtataaccaagtcccttccaccaccaccaaccccacttcttaccacccctacaagaccgagtttgagaactccaacaacaagtattacaacaatgatgcctataacacaaggttcttcg

SEQ ID NO: 267556 - DNA, 446 bp, Glycine max
gcagaaatggcctcttcagtgatggcatctttggccctcaaacctgcccctttcactgttgagaagtcctcagttagaggccttccctccctctcaaggaactcctcttcattcagagttgtggccagtggtggcaagaagatcaagactgacaagccttatggaattaatggtggcatggctttgagggaaggagttgatgcatctggcaggaaaggaaagggaaagggcgtttaccagtttgtagacaaatacggtgctaatgtcgatggttacagtcctatctacgacaccaaagactggtctccaaccggtgatgtctacgcttgcggtacgactggcttggctatctgggctgtgactctacttggtcttcttgctggtggtgcacttcttgtctacaacacaagtgctttggcgcaataaaccttgcaaatcgatgtttt

SEQ ID NO: 267557 - DNA, 444 bp, Glycine max
cccacgcgtccggtacggactgatgctgttctgttggtgacgattgtatccacattgagaggaaatctgacgatgaaacgtggagcattattgtcagtgcttgcgttcgccttcgcggcggcgatctgggcggcgaacggcaacgacaacctcgtcccgcctaggcgggaagtgtacggcaatggccgaatattcgacatcagtcaccggtaccaacccgagatgccggaatgggaatcgaataacggcattgggcagttcctgtggcttcccaagagcatgaagaacggttcccttgccaacaactccgaaatgaaacttccacacacaccggcacgcatgtcgacgcccccgggcacgtgttcgaccactacttcgatgccggcttcgatgtcgacacccttgacttggacattctcaacggacctgctctattagttgatg

SEQ ID NO: 267558 - DNA, 324 bp, Glycine max
gtcctactgaggtgtgtgtatacaattactttcacatacacacagttgttaaggatgatcggatagtgatgaagaggacgttcatttcggcggttgttttgcgagcatgctaggtgctgggaatatcccaatacgctgatgctagaaacttggctgaaaaatcaaaggacgaggtcaagaagccagaaaattgcttacatagaaggtccatcgttggtgccagaggaattgaagacgttggtgcagctgatgaatacatccatggcgaacaatatagatcagacttcaaaacaggtaaccaacaagcttacttttatgccagag

SEQ ID NO: 267559 - DNA, 320 bp, Glycine max
gaagcagaaagagaagcattagcaaaagctttaagaactagtctaagcagaaatggcctcggcagtgatggcatctgtggccctcaaacctgcccctttcactgttgagaagtcctcagttagaggccttccctccctctcaaggaactcctcttcattcagagttgtggccagtggtggcaagaagatcaagactgacaagccttatggaattaatggtggcatggctttgagggaaggagttgatgcatctggcaagaagatcaagactgacaagccttatggaattaatggtggcatggctttgagggaaggagttg

SEQ ID NO: 267560 - DNA, 451 bp, Glycine max
cccacgcgtccgcaatactcgaagtgtatctccagatgtcctttcaagcatgagagtactgatggctgaggactctaataatgctcagagtgattctttcttgttggatgacagttccagcatccccttctcagtagatgacttctctacatcactgcaagagaaggatttctccgacatgaaaccagcggatgagctgcttgagaatcccgccttccgatttttaaatgagtaggcaagggaagcttagtgtatgtgtttatcatagtcatatagggaagcatcaaaatcagttgttggtccttgtcaaatgggtgtaatccaattttaatttttattccttttcctttctacctaataattttggttttgggtttaccaaccctacatctttgtttggcctaatccttgcatagtcattcgccctgatgtaaaataatttttcaatcct

SEQ ID NO: 267561 - DNA, 393 bp, Glycine max
cccacgcgtccgattccattctctctgtgtatttccctacctctcccttcaagatgcacatcttcgtcaagaccctcaccggcaagaccatcacccttgaggtggaaagctctgacaccatcgacaacgtcaaggccaagatccaggacaaggaaggaatccccccggaccagcaacgtctcattttcgccggaaagcaacttgaggacggccgtacccttgctgactacaacattcagaaggagagtactcttcacctcgtcctccgtctccgtggtggcatgcacatcttcgttaagacactcaccggcaagaccataaccctagaagttgaaagctccgacaccatcgataacgtcaaggccaagatccaggacaaggaggggtatcccc

SEQ ID NO: 267562 - DNA, 462 bp, Glycine max
ctctctctcatcactacctctgcatttttctctcgctctctgccttccatcaccctcgccatttcccttcccaagatagtagaagatggcagacgctgaggatattcaacctcttgtttgtgacaatggaacaggaatggttaaggctggttttgctggagatgatgccccacgtgctgtgtttcccagcattgtaggtcgtcctcgtcacactggtgtgatggttggcatgggccaaaaagatgcatatgttggtgatgaggcacagtctaagaggggtattttgactctcaagtaccccattgaacacggaattgtgagcaattgggatgatatggaaaagatttggcatcataccttctataatgagcttcgtgttgccccagaagagcatccagttctcttaactgaggcccctcttaaccctaaggctaatcgtgagaagatgacccacatcatgtt

SEQ ID NO: 267563 - DNA, 437 bp, Glycine max
  unsure (1)..(437): unsure at all n locations
cggaaccatggtgagcacctccttcatgaggaggcaacctatgaccaccacaagcctaaagacattccccaacgttggtgaagctctttttggtctgaaaagtggacgaggtggtcgtgtcacttgcatggcctcgtacaaggtgaagctcataaccccagaaggagaagtggagtttgaatgcccagatgatgttttcattgttgacaaggcagaggacgaaggcattgaactttcctactcgtgcagggccggttcttgcgtttcctgtgttggcaaaattgtggaaggtaacgtggaccagtcagatggtagcttccttgatgatgagcaaatagatagtggctgggttctcacctgtgttgctcaacctangtcagacgttgtcattgagacacacaaggaggggagagatcgaatgatcaatatatatatat

SEQ ID NO: 267564 - DNA, 341 bp, Glycine max
agttattatgtactatggagagatcatgaatcaaacattatttactgcgtttttgggcctatatgctcgttgactctaacaaactaagctacgagccactttggatacacttaaaaaaaaaaaaaaaaaaaaaaaaaaaaaaaaaaaaaaaaaaaaaaaaaaaaaaaaaaaaaaaaaaaaaaaaagggggggaataaaaaaaaaaaaaaaataaataagaaaaaaatacaaaagaaaaaaaaatggggggggggcgcttaaaaaaaaaaaaatttacgtacccgtatatcgaaatgaaaagtttttttataagggaaccaaaaaaaaaatacggggggggg

SEQ ID NO: 267565 - DNA, 420 bp, Glycine max
cccacgcgtccggccaagtgaaagtgagaaaaaataaaaatcaaagagcataatgtcagggatcattcacaagattggggagacccttcatgtgggagggcacaagaaggaggaggagcataagggtgagcaccatgctggagaatacaaaggggagcaccatggtgaacacagtagtgagtacaaaggagagcatcatggtgaacacaaagctggagagtaccatggtgagcacaagccagagcacaaagaggggttcctagacaaagtcaaggacaagatccatggtgagggcggcgccgccgagggcgagaagaagaagaaggagaagaagaagaaagagcatggccatgagcatggccatgacagcagcagcagcagtgacagtgattaaactgctgcatcacctatatatttaaa

SEQ ID NO: 267566 - DNA, 335 bp, Glycine max
atttcaaataaaaccattactttgactacatttaaaaaaaaaaaaaaaaaaaaatggaaaggggaaaaaaaaaaaaaaaaaaaaaaaaaaaaaaaaaaaaaaataaaaaaaaaaaaaaaaaatataaaataaaaaaaaaaaaaaaaataataaaaataaaaaaataaaaaaaaataaagggggggggtgtttttaaggtaaaaaagttttttacgggggtttggaaaatgaaatattttttttatggtgaatgaaaaaaaaataagtgggtgggggttttaaaatgggggggatggaaaaaagggggggtaccaaaaataattttttttgaaaaa

SEQ ID NO: 267567 - DNA, 323 bp, Glycine max
tccacgcgtccggtttcttacatcaaggtctcgtctggttggaggtgctggcacgggttctgggggcagtggacgtggcaataagcacaccatagttgttgtggtcattgtcataataaccttgcttgtcatttgtggtctggtctttgggggagttagataccacagaagaaagcaaaggttgcccgagtctcctagagatggttcagaagaggacaatttcttggagaatttaactggtatgccaatccgttacagctacaaggaccttgaaactgccactaataacttctctgtcaagcttgggcaagggggtttttggg

SEQ ID NO: 267568 - DNA, 365 bp, Glycine max
cccacgcgtccggttttttatttatagtaatctgtagtacaaaagcaccattttctctcttataattttgatttacattcacaaagaaataagtatgatgctcatgatgacttggccacatcattaatgctacgaaggattgaagtgcatgcaagagtcaagaatatgcattgctacgaagttgtaaatcacaatgctagaaaacacaaagcagttcctcttatttattaagtagataatagacctcattgcttgctttaggcatgggtgttgtcctctactggagggtactttccataaagtggtttcttgtatggtggcttcttatatggtggcttgtaaaccggtggtttcggcttgtaaac

SEQ ID NO: 267569 - DNA, 208 bp, Glycine max
ggtttatacaattttcgatggcttcttcagatgttgagtaccgttgctttgtcggtgggctcgcttgggccactgacgaccaaactctcgagagagccttctctcagtacggcgaaatcgttgaaacgaagattatcaacgatcgtgagactggaagatccactggttttggattagagaccttctcctttgagcaatgcatgaaaga

SEQ ID NO: 267570 - DNA, 415 bp, Glycine max
cccacgcgttcgaccacgcgtccgcccacgcgtccgcccacgcgtccgcattcggtcacctgctcaacctctgcagcgccttcgatccagaaaacatgactaagagaacaaagaaggctggcattgttggaaaatacggtacccgttatggtgccagtctgcgtaagcagattaagaagatggaagttagtcaacacagcaagtttttctgtgaattttgtggaaagtatgctgtgaagaggaaagctgtgggaatatggggatgcaaggactgtggtaaagtgaaagctggcggtgcttacactttgaataccgcaagtgccgtgactgtacggagcaccatcaggaggttgagggagcaaactgagagttaagcttttttcgtgatgctatcaattactattagactttgcat

SEQ ID NO: 267571 - DNA, 445 bp, Glycine max
ggaaaggacaggtcttagaacccttcttttcttcctcgtgtgcgtgaaaacgaagcaacgccacacgatggtgttctacttcaaagcgcgccctgaagccggcgatttcaccatcttcatgggcctcgacaagttcgagaacgaggaactcatcaaatacggttttcccgaagacatctggttccatgttgataaaatgtcttcagcccatgtctatgtcaggctgcacaaaggccagactctcgatgacctgagtgaggctttactggaagattgtgctcagcttgtcaaagcaaattcaattcaaggaaataaagtgaacaatgttgatgttgtttacactccctggtctaatttaaagaaaactgcttcaatggatgttgggcaagttggttttcacaactcaaaaatggttcgaactgtgagagttgagaagcggataaat

SEQ ID NO: 267572 - DNA, 274 bp, Glycine max
gtggattcacagcagatgatgaggaggagtgtttgcacacaagcttctggacaagttttttattgttgcaatattatttttaaatttgattcttgtcaacatattttattttctgttatttatgaaattctacatcttgtatcaaaaaaaaaaaaaaaaaaataaaaaaaaaaaataaaaaaaaaaaaaaaaaaaaaataaaatataaaattaataaataattactatattaaaaaatattatataatttaaaaataaaaaaaaaggggggtcc

SEQ ID NO: 267573 - DNA, 444 bp, Glycine max
atcaaagccatggccacctccaacttctctattgttctctccgtctccctagccttctttttggtgctacttaccaaggcacactcgaccgataccgtttctttcaccttcaacaagttcaacccagtccaaccaaacattatgctccaaaaagatgctagtatttcatcctctggggtgttacaactcaccaaagttggcagcaacggcgtgcccacctcgggatctctcggtcgtgccctttacgctgccccaatccagatttgggacagcgaaaccggcaaggtagccagctgggctacatcctttaaattcaacattttcgcacccaacaaatcaaactcagctgacgggcttgtcttcttcttggcacccgtcgggtctcagccccaatccgacgatggatttcttggtcttttcaacaagcccttaaaggacaagtct

SEQ ID NO: 267574 - DNA, 261 bp, Glycine max
cacgaacaaccccgacgccgacggctccggttccgtttttcgccgacgcctccaactcaggatgtacgggaacatgtaccgtatcatgttctacacggagttcgagggcgaggaggatcccatcttccagaggcttagggccttgaacggacagaggagacgatcggcacatagcttataatataactataacgatttgattacgatcttgagaccctgtttgaagggtaacttggacatttgtaaggaggtgaacgaaac

SEQ ID NO: 267575 - DNA, 421 bp, Glycine max
atcatggcacttgatcttcctcatggtggccatctttctcacggatatcagactgataccaaagagatatctgcagtctcgatattttttgagacaatgccatatcgattgaatgaaagtacaggatacatcgactatgaccagatggagaaatctgctacactcttcaggccaaaattaattgttgctggagctagcgcttatgcacgtctctatgattatgaacgtgtacgcaaggtttgcgataaacagaaagctatactattggcagatatggcacacatcagtggattggttgcagctggtgtcatcccatcacctttttgattatgctgatgtagttactaccacaactcacaagtcacttcgaggaccacgtggagctatgatattctacagaaaaggggttaaagaaattaac

SEQ ID NO: 267576 - DNA, 99 bp, Glycine max
tcgccacgcgtccgtttttggtttctgttttcggacttcaatggaaattaatggatgagaactaatgagataagctattgtgttgtgttgctttgtttc

SEQ ID NO: 267577 - DNA, 423 bp, Glycine max
  unsure (1)..(423): unsure at all n locations
cccacgcgtccggggaagcagaagataatgttcgcaatgacctccatcaagggtattggaaggagattcgccaacatcgcttgcaagaaggctgatgttgacatgaacaaaagggctggtgagttgactgctgctgagttggatagtgtgatgactgtggtggcgaaccctaggcagttcaagatcccagactggtttttgaacagaaagaaggattacaaggatggcaaatactctcaagttgtgtctaatgctcttgatatgaagctcanggatgatcttgagagactcaagaaaatcagaaaccaccgtggtttgaggcattactggggccttcgtgtccgtggtcagcacaccaagactactggccgtaggggaaagactgttggtgtctctaagaagcgttaagctattatgtttggc

SEQ ID NO: 267578 - DNA, 453 bp, Glycine max
ctccaacatgccaaacgacagcgttctgagtcttttcttcttcgttaccctcttgacatgcgttctctctgctacttcccacgatgaccatattttcctaccgagtcaactccatgacgatgactcagtgagttgcactgcaaccgacccaagccttaactacaagccggtgatcggaatcctgacccaccccggcgacggtgcctctggccggctcagcaacgccaccggggtttcttacatcgccgcctcctacgttaaattcgtggagtccggtggtgctagagttattccccttatctacaatgagtcacctgagaaccttaacaagaagctcgatttggtcaatggagtgctcttcactggtgggtgggctgtttctggtccatatttggatactcttggaaacatttttaagaaagctttagagaaaaatgatgctggagaccattt

SEQ ID NO: 267579 - DNA, 378 bp, Glycine max
  unsure (1)..(378): unsure at all n locations
agaaacaaaagtggcagtattaggtggcattaccgaagtgcagggagctgccaacagcgtggagatcaacaatctcgctcgctttgctgtagaggaacaaaacaaaagagagaattcagttctggagtttgtgagggtgattagtgcacagcagcaagtggtttctggagtgaattactacataacattggaagcaaaagatggtgagattaaaaatgagtataaagcgaaggtttgggagagggaatcccaagagttgctagaattcatgccaacattaggtgcaggaggcgagatcgaccatctcgctcgctttgctgtngaggaacaaaacaaaagagagaatgccaatctggagtttgggggggtgattagggc

SEQ ID NO: 267580 - DNA, 282 bp, Glycine max
  unsure (1)..(282): unsure at all n locations
tggatatgttccctctaatacagaaaagtatccccttggaggcatcatctctgccattgagaatgcttttcatgcatctnctcaaatagtttgctcaaaagattccattgaggaactttacctatgcttttataagaactttcagccacgagattgtgctcttggatctgacattaaaatcgacatggttacttcaaaaaaatcttgtcccaaatatgttagcttgccagaatctgtatcagtggggtacaatggacttcaaagtcgggtctctgatgatgt

SEQ ID NO: 267581 - DNA, 382 bp, Glycine max
cccacgcgtccggtttcttacaaggctctactctactgcttcaccttctgctctagaaaattcagtggtgatacatggcttcggctactctctctgtagccaaaccagcccttcaggcaaatgggaaaggcttctctggattctctggccttcgcaacttatcaagcttcctttccttttctagaaaatcttcagaggatttccattctggcattggctttcagacctatgcagttggaagccgtggaggataccagaaaggtgtgacacaagccaaactgaaagttgccataaacggatttggaaagattggaaaggaacttcttgaggtgcttgcaccgtcgcaaagactcccctcttgatgtcattgccattaacgaca

SEQ ID NO: 267582 - DNA, 412 bp, Glycine max
cccacgcgtccgccgggcttgcagagttgaagaatgccattgtggtaccccacattgcatctgcctccaagtggactcgtgagggaatggctacactagcagctctaaacgtgctggggaagatcaaagggtacccagtttggtttgatgccaatagggttgaaccattcctcaatgagaatgctcaaccaccagctgcatccccaagcattgttaatgcaaaagccctgcgtttgccaacttcaaagctataaacatacatggttctatcctacaagggccttcaattgcacaaatgaccaatttttgtctgttgagttgggctctgtggctagtctggtcttttttttgtgtatgtggggtgctgatggcactgtgcatataaagactgtcacgttaataatagcatcat

SEQ ID NO: 267583 - DNA, 301 bp, Glycine max
  unsure (1)..(301): unsure at all n locations
cccacgcgtncgtgcctctagggttatcatttctccatttccattttctctctcacttttgaagaatcgtaagctatgggaaagtcttacccaactgtgagtgctgattaccagaaggccgttgagaaggcgaagaagaagctcagaggcttcatcgctgagaagagatgcgctcctctaatgctccgtttggcatggcactctgctggaacctttgacaagggcacgaagaccggtggacccttcggaaccatcaagcaccctgccgaactggctcacagcgctaacaacggnctgacat

SEQ ID NO: 267584 - DNA, 410 bp, Glycine max
  unsure (1)..(410): unsure at all n locations
cccacgcgtccgcttcacagctattagttgaatttttccaaaagagcaaggaggacccaagccattggaagaaaatatctgatggtggtcttcaaagaatttatgaaaggtacacgtggaagatttattccgaaaggcttatgactttggcgggagtttatagtttctggaaatacgtttccaaattagagaggcgtgaaactcgacgatatcttgagatgttctatatcctcaagttccgtgatttggcaaattctgttccgctagctaaggatgatgcaagttaactagctatataatttcaccaaaggcttggcagcagacataataagagtcatttatgtaaatataatagtctgcttctcgtgttttgaaatctagtgaggcgacctanaggagtttcatggaaa

SEQ ID NO: 267585 - DNA, 361 bp, Glycine max
gccttataataggtaccttagatggagccaatgtggaaatcagggaggagattggtgaggataattttttcctttttggtgccacagcagaagatgtccctcgactgaggaaggaaagagagaatggactgttcaaacccgatcctcgatttgaagaggcaaagaagtttattaggagtggggtgtttggaagctatgactataatccattgcttgagtccttggaaggaaattctggttatggccgtggtgattactttctagttggtcatgactttccaagctacatggatactcaagcaaaagttgatgaagcataccgtgataggaaaagatggctaaaaatgtccatcctaagcac

SEQ ID NO: 267586 - DNA, 453 bp, Glycine max
gttctttcctcacttcaaacttgccaaaaatggcttcagaattggcatcatctgccaattgggtggcaagcgcagccacatgtttggcagcctttgccgccctccttctcctcttcctccgcggtctccgccgccgccgatacaacctccccccaggcccaaagccctggcccatcataggcaacctaaacttaattgggtcccttccacatcggtcgatccacacgcttggcaaaaaatacgggcccatcatgcacgtatggttcgggtcgagctccgtggtggtgggctcgtccgttgaaattgccaaggccgtcctcaaaacccacgacgccaccctcgccggcaggccgaagttcgcggcgggcaaatacacaacctacaactactcggacatcacttggtcccagtacggtccatactggcgccaggcccgtagaatgtgcctaatgg

SEQ ID NO: 267587 - DNA, 284 bp, Glycine max
cttacatcaatgggttctggcagaacctggtccttgaaggcttaaccatttggttgttgcctatgatgattaatcaacttatgccctatggggattttcggttgcagcttgttcaaacacgtggaacctatcacattttgtggaaaaactccgggaaagattgtccctccaagaggccctagtgattttggatgggaccctattttagaccctgagggttatcaccaagcttttccacagatccccaaagaagaaaacaccaaattttaccactgttcaaaatt

SEQ ID NO: 267588 - DNA, 377 bp, Glycine max
gtgttctctatccacattcgttatctagtgagtgtggtggcacttctggtgttgctcaacagtggcgtccgttgcagttatggctacaagcagcgacagcaggtggtctatggcttccttgcgctctgctttgccctctcattctcctcctgtttcctcttcattgcgcttccctgtattgccatcttcaccgtcttcttcttcaacgaaactccgaatttctcgaaccaaacccaaatcccttctcacctctttcaccggcctcgctcctcttaaccccatcttcctctccgctccttcttcagaatataccggctgtgatcactcttttaccattattgacaatggtggtcgagtcactgccatgagacatggga

SEQ ID NO: 267589 - DNA, 419 bp, Glycine max
atttccttatctatcttcacctgcatcttttaacagttcccctcgaaacttctgaagatgggtggcattgcattcggacgcttggatgattctttcagtttaacctcaatcaaggcctatattgctgagttccattcaaccttgctctttgtttttgccggtgttggttcagccatagcctatggtaagttgacatcagatgcagcacttgatcctgctgggttactggcagatgctatttgccacggatttgcactctttgttgcagattctgatggtgccaacatctttggtggccatgtcaaccctgctgtgacttttggattggctcttggtggccacatcaccatgctcactggcttcttctactggattgcacagcttcttggctccatcgtggcattgtttctttctaacta

SEQ ID NO: 267590 - DNA, 431 bp, Glycine max
  unsure (1)..(431): unsure at all n locations
cccacgcgtccgtgaagatgcgattgagcatgctatccaatggctagatggaaaccaacttgctgaggctgacgaatttgaggataagatgaaggagttggagagcatttgtaatcccatcatagcaaagatgtaccagggtgctggtggtgatgcgggtggagccatggatgaggatggtcctgcagctggcagtggaagcggtgctggacccaaaattgaggaagtcgattaagcagaagattctcatgggttgttcttgattttgtcaaagacccttttgaagtttagataacagcgtgtcattatgtttttattgcgattttatttttctcttttttttttaatgtacttttccccgtttctacttgaacaatgatataagtttttgctaaaaaaaaaaannnnnaaaagatataaaaaaanaataa

SEQ ID NO: 267591 - DNA, 449 bp, Glycine max
cccacgcgtccgcaggtatatcccaagtcatggactgctatatatattgcgcttgacaacgtgggaatgtggaacttgaggtctgaattttgggcacggcagtaccttggccaacagttttacatgcgcgtttatacaacatcgacatcaatccgagatgaatatcctgttccaaagaatgcactactttgtggtagggcaagtgggagacacactcgacccctttgagctagctagcaagaaccttgttgagtatgaaaattaaagcagttaacttatctgcttctgattttgaatttatttcttttctgtttcagtaattatgctatgctccgatggacatgtgtgatttaaactacaaatgaccccagctcgaggtcacattcttttccagaaaaaaagaagaaagaaatttactattattacaaaaaaaaaaaaaaagggcgggc

SEQ ID NO: 267592 - DNA, 451 bp, Glycine max
  unsure (1)..(451): unsure at all n locations
ccacgcgtncgcccacgcgtccgcccacgcgtccggggagaacagttgttctctactttgagcaaagccggaggcaaagctttcagtaacatggctgttggttataacaacgtggatgttgatgctgcaaacaagtatggtgttgctgttggaaatactcctggagtgctcactgagacaacagctgagttggcagcttcattgtctttggcagctgctagaaggatagttgaggcagatgagttcatgagggcaggattatatgatggatggctacctcatctatttgttggaaacttgctcaagggacaaactgttggtgtaattggagctggtcgaattggatccgcttatgcaagaatgatggttgaagggttcaagatgaacctaatttactatgatctctaccaagccacacgactagaaaagtttatcacagcctatgctacat

SEQ ID NO: 267593 - DNA, 422 bp, Glycine max
tagaaacagtgtgatgaaaatgtaaggtcctggtttcttcggtggtaccaatgtggtagccttggcattccattcctaccatatggtcccttttcgaatggacacttgctattgtgccccgtactccggaggtgaaatgcgcaagttggaggcttgctgtggaagcacacaacatctttggctttgagaccattcctgaaaagtgcgttgaagcaacaaaggaatacatccatggcgaacaatatagatcagactccaaaacagttaaccaacaagcttacttatatgccagagacctcgaagtccatcccaaggacacattttgtgttcagtataaatggcaccgtactctctaaatatccatactacaaaaaacatggatatggcgtggagaaattaactcgaccttgtatgatgaatgg

SEQ ID NO: 267594 - DNA, 365 bp, Glycine max
ccggtcgcccacgcgtcgctcgacaaacccaccctttgagtcttccagtttcaccatcgaatgggttccgaggatgcagcgtcgtggtcctaggaattcagatattggaagagctgaagaagtagaagggaattggggatggaactgttagctatggaatggatgatgctgatgacatatacatgcaatcttggactgggactatcatcggtccccctagtactgttcatgaaaggcgtatctaccagttgaaattgttttgcagcaaggattatccagacaatccttcatccggtagatttcaaacaaggattaaccatgacattgtgtgcaatcacagaaactggagtggttgaaccacattt

SEQ ID NO: 267595 - DNA, 381 bp, Glycine max
cattttagcatcaaggttgaatctcagagaaaaacaaacatcgacaagcatgtctggaagaggaaagggaggcaagggtctcggaaagggaggagccaaacgacaccgtaaggttctgagggataacattcagggaatcaccaagcccgcgattcgccgtctggccagacgtggtggcgtcaagcgtatcagtggtcttatctatgaagaaactcgcggtgttctcaagatctttctagagaacgtcattcgcgacgctgtcacctacactgaacacgctcgccgcaagaccgtcactgccatggacgttgtttacgccctcaagaagcaagggaggaccctttacggattcggcgggtagacaattggggatttcttgac

SEQ ID NO: 267596 - DNA, 450 bp, Glycine max
cagaaaccacttttttctttcttttttgttcttttttcatttcaggttgttcaccagtttgagttgttggatctcctccactgcttcttctcctgatcctgttctgtttcaaatttcaacccaaggagcttgggaacaaactcctgctccttcttctccttggtcataggcaatgggaggtgcactgggaaagagtgaatcacctagaaagggatcgatgccagaaactaagctcgaggctaaaatggttgaagcaatgcagcggagggaatctcaaggaagttccgtgaaatcattcaacactataatcttgaaattcccaaagattgatgagagccttagaaaatgcaaagccatatttgagcagtttgatgaggattctaatggggcaatagatcaagaagagttgaaaaagtgtttcaatatgctggaaattttttttccgaggag

SEQ ID NO: 267597 - DNA, 387 bp, Glycine max
accaggcgcacgttagcacaaactatcatggccacggcaacagcagctgccacctcgtcctttatggggacgcgtcttctggaggctcactccggagcggcgcgagtgcacgcccgattcggcttcggcaagaaaaaggcttccgtcccaaagaaagcctgcaggggatcgggccgagacaccgacagacccctttggtatccgggcgccaaagcgcacgaatacctcgatgggtgactagcctgagactactggatacatccgagagggctaggcaagcccacctagtacctgaaaggctagctggactcgcttgaccagaaccttgcggaagaacgttgctgaggtcatgattggaaccaggaccggactcgtggacctgaagat

SEQ ID NO: 267598 - DNA, 417 bp, Glycine max
  unsure (1)..(417): unsure at all n locations
ccagcttcttgcacaagtatatcccaaattgcaagatcttcaaaagagagaaggtgaggctggaagaaagaaagntctgcagtacactcgatatgcttcagttggatttgccattgtgcangcaattggccaagttcttttcctacgtccctatgtcaatgacttttctacagagtgggttatttcttctgttatcttattgactcttggctctgtgtttacaatgtacatcggagaacgaattacagacctaaaacttgggaatggcacctctcttttgatattcacaaacattatctcgtacttgccagcttcttttggtaggacaattgctcaagcatttaatgatgcaaactacattggacttggtaccattgttttgccttctttttgtggtagttggaatggttatgttca

SEQ ID NO: 267599 - DNA, 354 bp, Glycine max
cttgctctgattttctccctagttttttgctgcttcgcttgacattattgatattactagtttcttccaaaacaaagggtttggtgaaactaccagcagatgtgtcggttccagcagtgtttgtgtttggagattcggtggtggatacaggcaacaacaacaacagaacaacatcatttgctcgctccaatttcccaccatatgggagagatttccagggtggcatcccaactggtcgatttagcaatggaaaggttccatcagaccttatagttgaagagttgggcattaaggagcttctgccagcatatttgaaacccaatcttcaatctagtgatttgatcacaggggtct

SEQ ID NO: 267600 - DNA, 389 bp, Glycine max
cccacgcgtccgaatgggcaaagtttcaattccagtcccgcaaaacggtttctccatacgcaatttctcaacgtccaaacgctcatgtttcaccccttcaccttcaacgctcagaatttcttgctctggagtagctgagttagatggatctcatgagaataagggaggtttgtttaatttcaatggaatcaagggcgtggcttgtggtattcttgcagcttgtacggttacttctgctgcatttcccgttactgctgctacccagagacttcccccattgtcaactgagccccatcgctgtgagcgtgcatttattggcaacacaattggtcaggcaaatggtgtatatgataaaccattagatctccggcaatgtgatttcacagatg

SEQ ID NO: 267601 - DNA, 373 bp, Glycine max
  unsure (1)..(373): unsure at all n locations
gtgaaggagtgaggtagcaacagcactgccactgccactaccaatagcagaatgggaaccttgtgcagagctttctacgccgtcngattttggatccgcgagaccggccaagccatcgatcgcctcggctctcgtctccaaggcaactacctctntcaagaacagctatctaggcatcgacctctgatgaatctgttcgacaaagctccctcggttcacagggatgcatttgtggcccccagtgcctccctcctcggcgatgtccacgttggcccagcttcctccatttggtatggatgcgttctcagaggtgatgttaacagcattactattggatctggaactaatatacaagacaattctctggttcatg

SEQ ID NO: 267602 - DNA, 149 bp, Glycine max
aaaaaaccctaatttttttaataaaaaaacacttccaaacccctttttttattccaattttggccccaaaccattccaacccttaaccaatccttaatgctttactgtttttcaacgattttttgtaaaaaaaaaaacctttttttttt

SEQ ID NO: 267603 - DNA, 346 bp, Glycine max
cccacgcgtccgcacattttgataattatttttctagttgataagccatggctactcgagggaagcttgaggttgacgttgatctcaagtctaacgcagacaagtactggcaaacccttaggaactccactgaaatattccccaaggccttccccaatgattacaaaagcattgaggttcttgagggtgatggctaatcacctggttctatccgccacataagttatggtgaaggttcaccaacttaggaagtcatcctttgagaagattgaggctgttgatgaagaaaagaaggtattgtcgtacactatcattgatggagaactccttcagcactacaaaacat

SEQ ID NO: 267604 - DNA, 382 bp, Glycine max
atcgtgcattcaatggccaccacagcagctctatccggaaccatggtgagcacctccttcgtgaggaggcaacctatgaccaccacaagcctaaagacattccccaacgttggtgaagctctttttggtctgaaaagtggacgaggtggtcgtgtcacttgcatggcctcgtacaaggtgaagctcataaccccagaaggagaagtggagtttgaatgcccagatgatgttttcattgttgacaaggcagaggacgaaggcattgaacttccctactcgtgcagggccggttcttgcgtttcctgtgttggcaaaattgtggaaggtaacgtggaccagtcagatggtagcttccttgatgatgagcaaatagatagtggct

SEQ ID NO: 267605 - DNA, 444 bp, Glycine max
cccacgcgtccggttttcttctccacttcatatcagcgtctcagtttcaaagcaaacatcgacaacaacaaactagaaagaaagaaaggaacacgaaacctcaaaaaagcagaacaccatgaagtttcggtacgcgatggtgtgttcttcgaaccagaaccgaagcatggaggctcatttcctgctcaagaggcagggcttcgacgtgtcctcgtacggcaccggtgcccacgttaagctccctggtccttccctcagagaacccaatgtctacgacttcggaaccccctacaagcacatgatcgaggacctccgcagaaaagaccccgatctctacaaacgaaacggaatctttccaatgcttaaaagaaattcaacagtcaaattagcaccgcaacggtggcaagaaaatgccgctgatggttcctttgatgtggtaagtac

SEQ ID NO: 267606 - DNA, 344 bp, Glycine max
gcgtccacgcgttcgcccacgcgtccgctcagactcaagggtgtgcccatctcatgtgctagaggtccaaccaggagaggcctttgtggtcataaacgttgctaacattgtaccaccatatgaccagtcaaaatacgctggaactggggcagcagttgagtatgctgatttgcatcttaaggtgtctgagattgtggtcattggacacagtgcttgtggtggtattaaggggcttctgtctttcccatatgatggaacctactctactgattttattgaggagtgggtcaaaattggcttgcctgcaaaggcaaaggtgaagacacaacatggggatgcacctt

SEQ ID NO: 267607 - DNA, 405 bp, Glycine max
gcaaaagcaagaagaactagtctaagcagaaatggcctcttcagtgatggcatctgtggccctcaaacctgcccctttcactgttgagaagtcctcagttagaggccttccctccctctcaaggaactcctcttcattcagagttgtggccagtggtggcaagaagatcaagactgacaagccttatggaattaatggtggcatggctttgagggaaggagttgatgcatctggcaggaaaggaaagggaaagggcgtttaccagtttgtagacaaatacggtgctaatgtcgatggttacagtcctatctacgacaccaaggactggtctccaaccggtgatgtctacgctggcggtacgactggcttggctatctgggctgtgactctacttggtcttcttgc

SEQ ID NO: 267608 - DNA, 179 bp, Glycine max
  unsure (1)..(179): unsure at all n locations
tttcagagactcgtaacaccctcggaactcccaaagacactcccgacctccgcgaaaactccacaagacaagactacatattgngcaattgggtgaaagatacatcagctaaacttaagcaagccagtgacattgatcaccatgctgaagtgaatgcaagcaagaagattgcagatgct

SEQ ID NO: 267609 - DNA, 333 bp, Glycine max
cccacgcgtccgagaagaacaagtagttgagaactaagaaggagaagcaaatggctgcctgaatgatctcttccccagctgttaccactgtcaaccgtgccggtgccggcatggttgctccattcactggcctcaagtccatggctggcttccccaccagaaagaccaacaatgacattacctacattgctagcaacggtggaagagtgcaatgcatgcaggtgtggccaccagttggcatgaagaagtttgagactctttcgtacctgccagaccttgatgatgcacagtttgcaaaggaagttgaatacctttttaggaagggatggattc

SEQ ID NO: 267610 - DNA, 427 bp, Glycine max
cccacgcgtccgcggacgcgtgggcgcccacgcccatggccacgctccttcttcccaaccgtttctccaccaagctccccgcccagcgctactcgcaccggcgcttcacctgctcctccatcaccgcccaatcacgatccgccaaggagcaactcctcgccctcatcgccgaccaggaccgcggcatcaagacccagagcgaccccgcgaagcacgccgcgatcgtcgaagccatcaatgcgatggccgcggcgggcgaaggctccgtgaccaccggggatgcgctgtcggcgacgtggcggctgctgtggacaacggagaaggagcagctcttcatcgtcgagaaggctcccttgttcggaacccaagcgggtgacgtgttgcaggtcatagatgttcggaatcggacgctcaacaacgtcataac

SEQ ID NO: 267611 - DNA, 261 bp, Glycine max
cccacgcgtccgcccacgcgtccgcccacgtgttcgcccacgcgttcgcccacgcgtccgagaaaaaaaaaaaaaaaaaaaaagaaaaaaaaaaaaaaaaaaaaaaaaaaaaaaaaaaaaaaaaaaaaaaaaaaaaaaaaaaaaaaaaaaaaaaaaaaaaaaaaaaaaaaaaaaaaaaaaaaaaagaaaaataaaaaaaacataaggaaaaagggaaagtaaataaaaaaagataagagatataaaagtgaaagatggagg

SEQ ID NO: 267612 - DNA, 404 bp, Glycine max
  unsure (1)..(404): unsure at all n locations
cccacgcgtccgctcagtctccgatccaatatgacggaggaacggaacgtgcggaagacacgtgtggtcgacgtggtcctcgactgcgtcatcccttacatcgacgaccccaaggaccgcgacgccgtttcccaggtgtgtcgacgctggtacgagctcgactcgctcacccgcaagcacgtcaccatcgcgctctgctacaccaccaccccggctcgcctccgccgccgctttccgcacctcgagtcgctcaagctcaagggcaagccccgagccgcaatgttcaacttgatacccgaggattgtggcggacacgtcactccctgggtcaaagagatttctcagtacttcgattgcctcaagagcctncacttncgccgcatgattgtcaaagattccgatct

SEQ ID NO: 267613 - DNA, 434 bp, Glycine max
  unsure (1)..(434): unsure at all n locations
cttggcttgtgaatcagcaccacattcacctgagctttttgtgaggattccaaagcatggcttcccttgcagcatccactgctgctgcttcccttggcatgtcagaaatgcttggaaaccccatcaacctcagtggtgccacaaggccagctccatctgcctctagccctgcctccttcaagactgtggctcttttctccaaaaagaaggctgcacctccaaaaaaagctgcagctgctgctcctgccaatgatgagcttgccaagtggtatggtcctgacagaaggatcttcttgcctgagggtctcttggaccgatctgagatcccagagtacttgaccggagaagtccccggagactatggttatgacccatttggtcttagcaagaagccagaagatttttccaaatatcangcatttgaattgattcac

SEQ ID NO: 267614 - DNA, 434 bp, Glycine max
ctgaagcttacctccaaaatgggaactttgtatgagcagccaaaccctaaatacctgaagaaaacaaagctctttggtaaatacgctttgcctaaatgggagatcaatggtctggttgagtatgtctctgggggtccccaacctggaggcatgttcttcccagtgactcatggaatccatgctgtgaggcttggcaatgatgcctcaatctcccaaagcatcaaggtcaaacccggtcaactgtatgctctaattcttggggcctcaaggacttgtgcgcatgatgaagttttgaggatctctgtgccttcacagactggtgatgttcctttgcagaccctttatagcctcaatggtgacgttattgcttgggggtttaaggccacttctagtgttgtcaaagtgacttttcacaaccctggagttcaggaaga

SEQ ID NO: 267615 - DNA, 456 bp, Glycine max
gatgaaaatgaaggtccttggtttcttcgttgctacaattttggtagcatggcaatgccatgcgtacgatatgttccctatccgaatgaacactggctatggtgcccgtactccggaagtgaaatgcgcaagttggaggcttgctgtggaagcacacaacatctttggctttgagaccattcctgaagagtgcgttgaagcaacaaaggaatacatccatggcgaacaatatagatcagactccaaaacagttaaccaacaagcttacttttatgccagagacctcgaagtccatcccaaggacacatttgcgttcagtatagatggcaccgtactctctaatattccatactacaaaaaacatggatatggcgtggagaaatttaactcgaccttgtatgatgaatgggttaacaagggcaatgcaccggcacttgccgagactcttagaattac

SEQ ID NO: 267616 - DNA, 361 bp, Glycine max
actatttcgaactccgccatggctgccactttcgtcaccgtcacgtcatacttttttggcgcccgcctcaacaacccgacaaccttaaacaacggaagattccacgcgctcctcaacttctgctaaaagaaggcggcggcgccggcaccgaagaaaaaggaagtgaaagtgaaaccctgcggcgaccggctggtgtggtttcctaatgcggagcctgcggagtggctcgacggatgcatgatcggctaccgcaggttctacccgatcggcttcgcgaagcctgtatagttcctgcagttcgacctggacttgcttgaccagaacctcgctaagaacgttgcctgcgatgttatcggaacca

SEQ ID NO: 267617 - DNA, 417 bp, Glycine max
ctcaaatatcaagttatgacgagtttgcactttgcagagatggaaaagaaagagagaaagatcatggtggctgtggatgagagccaagagagcatgcatgcactctcctggtgcatcaccaatcttatttccgaaaccaacaagcttgttctgctttatgtcaggccaccttctgctttctactccttggatgccgcagggtataacttttcctccgatgttgttgatgctatggaaaagtacagtatgcacttggctaattcagtcatggaaagagctgaagctgtttgcagagacttgaacgctactaatatcaatatggagagagtggttggtgtaggacatgccaagaatgtaatatgcagtgctgtcaagaaactagaagctgacaccttggtcatgggaactcatgggcta

SEQ ID NO: 267618 - DNA, 206 bp, Glycine max
gtaaaaaaaaaaaaaaaataaaaaatttttatataaaaaaaaaaaaaaaaaaaaaaaaagaaaaacaaaacaaaaaaaaacataaaaaaaaaactaaaaaaaacataaaaaaaaaaataataaacaataccaacataaatcataacttaaaatgccctcaatactaaaatatcacatcatcatcaacacctaacacatacctaact

SEQ ID NO: 267619 - DNA, 377 bp, Glycine max
ggagagagtgtggtagggacagtgtgctggattccctgactgctgtatctggggccgacatgggcaatctagctcacagcgggcatgttgagtgcaagcatttgcttcgactggaaaatggtgctgagattgtgaggggcaggactgagtggaggcccaaacctgtgaacaactttggtgttgtgaaccaggttccagcagaaagcacctaagattttgaaatggttaacgattggagttgcatcagtctccttgctatgtttagacttattctggtccctggggagagttttgcttgtgtctatccaatcaatctacatgtctttatatatatacaccttctaatttgtgatactttggtgggtaagggggaaaag

SEQ ID NO: 267620 - DNA, 463 bp, Glycine max
cggacgcgtgggcggacgcgtgggcatttgtggcctttctaacccattgtggttggagtggtacacttgaaagtatatctgcaggtgtgcctatgatttgttggcctttctttgccgagcaacaaacaaattgcaagtatgtatgcacaacttggggaatcggaatggaaattaaccatgatgttaggagagaagagatagcaaagcttgtgaaggaaatgatgatgggagaaaagggaatggaaatgagacaaaaatccttagagtggaagaagaaagcaataagagctactgatgttggaggatcatcttacaatgatttctataagttaataaaggaggtttttcattacagtgttctttaagtccttattttataatcaggtgtattaaggtttattagttagataaaaatacctttcttaagttataatgggatgacaaacatgatgcaattggtttg

SEQ ID NO: 267621 - DNA, 429 bp, Glycine max
tacgctctgttctcttttcagctactttagccggttattcatgtatcatggctagggttttggcggcattctattaatagatcatgggctattgtgctgagcataggcatggtcagcaaaaggaatcaggaaaattaaaaagatcgaccaaaatgatgagtgctttacgaacaaatggattaagaatgtcaggtttctcattgcatcgtactttcaatcctttggatactatagtgagacctgtaatttagattcattctaaggtattcattgcaacttctttacttttatcatgatctaccagatgcttgcccaaatccatgtttgatcctttcactgataaagcaatcgtatgtattattctattccatgatgaagcaagacgttttggtcacaatttttttggaacagatcaaattctattgggtc

SEQ ID NO: 267622 - DNA, 383 bp, Glycine max
cttcctctttttctcaacaaaaaggggttcaattctagctagttctattacgtcgtccgcgaccatgaacatggcgatcgcgcttctgttcatggttttcgcagtttcatcagctttagacatgtcaataatatcacacgacaacgctcatgcggatagggccacgaggcgcaccgacgaggaggtgatgtcaatgttcgaggagtggctggtgaaacacgacaaggtgtacaacgcgctcggtgagaaggagaagaggtttcaaatcttcaagcacaatctgcgcattatcgatgaacgaaactctctgaaccgaacctacaagttgggactcaacgtgttcgctgatctcaccaatgcggagtacagagccatgtacctgc

SEQ ID NO: 267623 - DNA, 430 bp, Glycine max
atggctgcctactactcacagccccaaccgtcgggccttctcccttaccagtactaccaacggccgcctccgccacctcctccgccgatgatggcggtagtgccaccgccccccggcgcggttgtcccgccggcgcaccacctgcatccgccttacgtggctcagcatcagcagcaagcggtgttcggttcctacggtgctcctcaatcctccacccacgaggttcgcactctcttcgtcgctggcctccccgaagacgtaaaaccccgcgaaatctacaacctcttccgcgaatttcccggttacgagtcctcgcatcttcggagtccctctaattcgtcgcagccttttgctttcgctgtgttcgcgagtcagaagtcagcaatcttggcaatgcatgctctgaatggactggtgtttgatctcgaaa

SEQ ID NO: 267624 - DNA, 453 bp, Glycine max
aagaacgttgagaagaaggatcctaccggttccaaggtcaccaaggctgcccagaagaagaagtgaatcgtgcgggctggttcatcaggggatgttggttacaataaatgttggtttcttttctgtactcttgtgtcttcttttctaggtagcttgtttttcggacaaagtttgaagtctccaccatcatctcgcaactgttgttcccagaactgggttcttgatcgactgtggcaaaattgcttttatttatctgcgttttaatgtgttgtgtttgtcggaacccctgattacatttttgttaagcgcagcgagtttcaggactttgctgcgttgtgttgctttggtttattaaatgtcaactttctatttgtagtgttcaaaattgaaaatgcatgctctgaatggactggtgcttgatctcaaaaaggggtccactctttatattgatct

SEQ ID NO: 267625 - DNA, 216 bp, Glycine max
attcccgggttcgactccacgtcgtctcgtaaaagaaaaataaaaaacaaaataaaacaattataatttataaaaaaaaaaaaaataaaaataaataaaagaaagaataaaaataaaaataaaaataaaataataaaaaataatatataaaaataaatataaaaaataataaaataaaataattaaaaaaaaaataaaataaatattaaaataaaa

SEQ ID NO: 267626 - DNA, 452 bp, Glycine max
cccacgcgtccgggcattggtttctctctctagcttggacgagtgaattagattcatgatgaagatgtcgtctctgatagcagaagatgtgaagagcagatcagaggtgtaccacggggacgaaatgtgccaagtgaagtccaaggagcttctcaaggaaatcgccctccccaacggccttcttcccctcaaggacatggaggagtgcggctacgacagacaaaccggcttcgtctggctcaaacaaaagaagagttacacccacaagttcgacaagatcggaaagcttgtctcctacgcgcccgaggtaactgctcatgtccaacaaggtaaaattaccaaactcaccggggttaagaccaaggagctcttgctctggatcacgctcagtgatatctatgttgatgacccttccactggcaaaatcaccttcaagacccctggcggcctat

SEQ ID NO: 267627 - DNA, 370 bp, Glycine max
cccacgcgtccgattcgccgaaaagccaaatggagaacagttgaaagctatgaacgttgatactacaattttgggtcttgatgacgagagagcaaaggaattgccttatattgctagcatgcgtatatatgctgttagcaaaaacgtgatgttagacctgctccgtgagaagtttcctggtgcaaatgactttgacagtgaagtgattcctggcgctacttctattggaatgagggtgcaagcttacttgtatgatggctactgggaagacattggtacaattgaggctttttataatggcaatctgggaatcaccaagaagcctgtgcctgacttcagattctatgatcgttcatatccaatctacacc

SEQ ID NO: 267628 - DNA, 422 bp, Glycine max
cccacgcgtccgcccaaacctcttcctccactggccaatcactggacgccacggggcaggcaaagatccgttgggtgcaaaagaattacatgatttacaattattgcactgatatcagacgtttccctcaaggccttcctccagaatgctccattgcatgagaatatttaattcaatgttgcatatcattataaaatgatcctcatgaacgtgacacacatgtgttgcctattacgttaatttactttcttgtgtaaattaatgcaactaaaactgttattattgttggtttgtgctttgttgagcactactccattgtttgtggcgaaagataattatagcgtgcaaaattatattcatggcagtgtatatgtgctgaaattgtaaagtattttcattaataaaattgttggagttttatt

SEQ ID NO: 267629 - DNA, 455 bp, Glycine max
gaacgaatggaatgtataaaaccaaccaatagcttcacaatctttcttgcacgccattggggatcacttccgatagctctcacaatcctatggcggagaacaacaacaaccaccaccttgaaaccgccaccagaaggcttgcctctgtgaccaaccacctcacttccggtgggaacaacagcttccgccgcgtccacggagaagttccatcccacgacgtcgtttggaggatcgtcgcctccgaccacgacaactccggcaaggacttcaccgacattgtctacgagaaggccgtcggggaaggaatagccaagataagtattaataggccagagagaaggaatgcgttccgaccccacacggtgaaggagcttatgcgtgctttcactgatgccagggatgatagctctattggggtcgtcattctcactggcaagggaaccgaagcattttgt

SEQ ID NO: 267630 - DNA, 191 bp, Glycine max
  unsure (1)..(191): unsure at all n locations
cgcccacgcgtccgttcactttaggagtgtgttttcagattttttcaactatagctcgatctggcgtgtatgagtatgtnaatgttaatgcatgttttgaatcaatgttcgtcatttcagtttcgtgatgaagggtatggattagccctgtttaaactttacttttattgcaaagaactcctgaaccccgc

SEQ ID NO: 267631 - DNA, 410 bp, Glycine max
  unsure (1)..(410): unsure at all n locations
tgagaaggagcccaaatttttgaagaatggtgatgcaggtatggttaagatgattcgaacgaagcccatggtggttgaaactttctctgagtatcctccccttggtcgttttgctgtgagggacatgcgtcaaactgtggctgtcggagtcatcaagagtgttgagaagaaagaccccaccggagccaaggtcaccaaggccgctgccaagaagaagtgattgcatttgggcaattttgctagcacatgtgatcatcatcgtggttactcctttatagtagttttatccttgcagagtcttaggtgttttggttaagttatatntttaagtttctgccgatttcatgtagccgtaactttcaaaactaggttcttgatcggccggggtcaattttcattggtgtttgttt

SEQ ID NO: 267632 - DNA, 423 bp, Glycine max
cacacgcgtgcgcataatctatcttacaaaccctaacacttgtctatctcttggatcatgagctgtccacaatgccgccgaagttcgacgcctaccagatagtccacgtcttcgtccgcgttaccggcggcgaaatctgcgcggcgagttacatggccccgaagatcggttccctcggtctgttcggcaagaacatcggcgaagacatcgccaaagactccgacgaggactggaagggcctgcacgtcaccgttaagctcaccgatgagaatgcgaaggcgaacgtcacggtggtccccttcgtcgtcgacgtcgttatcgaggccctgaacgagcccgagcgcgaccggaagatgacccacaacatcaagctcaacgtcgacatcttgatcgatgacgttatggagatcactacggttatga

SEQ ID NO: 267633 - DNA, 455 bp, Glycine max
  unsure (1)..(455): unsure at all n locations
ttttgcttcactctacgcagatcgcagcaaaccagagattgaactccgacgatgcctcccgtcgctcctcgatccggcgatgccatattcgccaacgtcgaacgcgtcaatgcggagctgtttactttgacgtatggcgcaattgtgcgtcaattgctcacggatctggaagaggttgaggaggttaacgagcagcttgatcaaatgggttacaatattggaatccgattgattgatgagtttttagctaagtctaatgtctcaagatgcaacgatttcagagagactactgatgtaattgcaaaggttggttttaaaatgttccttggtgttactgcatctgtgaccaattgggatgctgatggaacatgttgtagtattggtttggaggataatccattggtagaattttgtgagcttnctgacaactgccaaggttgtactattgcaacatc

SEQ ID NO: 267634 - DNA, 428 bp, Glycine max
gtttcagattatattcctttcatgggttggattgataaactcaggggactggatgcacgtcttgaacgcaatttcaaggagatggataagttctaccaagaagccattgatgaacacatgaattctaagaaaaaaactccagaggaagaggatttagttgatgtcttacttcaactgaaagagaacaacacgtttcccatagatctcaccaatgataacatcaaagcagtgctcttgaacttacttgtaggagctacaggtacaactgaagtcacaacaatctgggccatgactgaactaataaaaaatccaagcattatgaagaaagtgcaagaagaaattagaggcttaagtggtaagaaagatttcttggatgaagatgatattcaaaagttttcctacttaagggcaagtgataaagagacact

SEQ ID NO: 267635 - DNA, 375 bp, Glycine max
cccacgcgtccgcccacgcgtccgctcaaatctatattctgacaaccaatcgtccgaacttattacatttcgaagctcttcatcatctacctttgctctgggggtgtctgtcggttacttcattgctgaccttgggatgatattttggtttttttttctcttggtggatatgagtatgtgattcatcatttgctttctttagtagcagtagcattttcaatgctgagcggggagggtcagctatacacatacatggtcctgatctctgagacaacaactcctgggatcaacttgagatggtatcttgatgcagctggaatgaagaagtcaaaagcttatctcatcaatggggttgtgatattcattgcttggctg

SEQ ID NO: 267636 - DNA, 399 bp, Glycine max
aagaaagcaagaaagaaaatgggagtggagaagcagttgttgaggcctggcaccggtgccaagccaattcccggtcagaacgtcaccgttcactgcactggtttcgggaagaacggtgacctttctcagaaattctggagcaccaaggatcctggccaggaccctttcactttcaaaatcggccaaggttctgttatcaaaggatgggatgaaggtgtgcttggcatgcaaattggtgaagttgctcgtctccggtgctctccggattatgcttatggtgctggtggctttccttcttgggggatacagcccaactctgtcttggaatttgaaatcgaagtcttgagtgcacaatgaaaaccttggtagtctgtctctgtcctaagaataaaatcatca

SEQ ID NO: 267637 - DNA, 402 bp, Glycine max
agcaggagcagaaagaaagaaagaacgaaaatggcgagcggcgcctcaccgcaactgcaagtgaggttgaagtcctcttttatcggagatcgtctcttacgctgttcaacttcaaggcaccaacctcttcctcaactattccgttacaaccctggaaccaagcatgtttcgatgcagttatctagaacactttctggcttgaccaatctcttttttaatagaagaaatttggatgaattgcctaacagcaagcgtaaacgtctgagacctgggaaagtttctccgcggcgacaggtgccgaagaatataccgaggccttcgtatgtgaattctatgattcctccagggattgccagtggagctgaagtgcatgacaagaaagggatagaatgcatgagagct

SEQ ID NO: 267638 - DNA, 434 bp, Glycine max
cccacgcgtccggttttatccgaaagcaagcattatcagaagcagaaagaaagaataagaggttgcagcaacaatggcagccatggctgcgcttcagagctcaatggtcggtctctccctctcctccaactctttcttaggccaacgcctttctcccatcaccctcccctctcttcttccgggtaagtcaacagagaagcaatgtcctattgtaatgaggcttaaacgatgggaacggaaggagtgtaaaccaaacagccttcctatcttgcacaaaatgcatgttaaacttggagatacggtgcaagtcatatctggacgtgaaaggggtaaagttggggagattactaaaatcttcaagcataacagcactgttatagtgaaagatttaaatttgaagacaaagcatgtgaagagtagagaagagggggaac

SEQ ID NO: 267639 - DNA, 332 bp, Glycine max
tgaatgtcttacgcttatctctttatatacattatcatcggtgacaccgtagtgtgaaagaggtagcttatacttgaattcacggacaagcgctttcagcccgtccatgacttaaccatcggtgttgaatttggtgccaggatgatcacatttgataacaagccaatcaccttgcaaatatgggatacatttggtcaagaatcattcagatctattacaaggtcttattacatatgtgtctcatgtgcattcgcttgtttatgatatatcctttgagtgtgacatttaatcatttggctatcttgtttgaagatgcaagacagcatgcaaat

SEQ ID NO: 267640 - DNA, 321 bp, Glycine max
gaatgtcttacgcttatgtgtttaaatacattatcatcggtgacaccgtagggggaaaggggtgtcttctacgtgaattcacggacaagcgctttcagcccgtccatgacttaaccatcggtgttgaatttggtgccaggatgatcagctttgataacaagccaatcaagttgcaaatatgggatgctgttggtcaagaatcattcagatctattacaaggtcttattacatatgagctgcaggtgcattgcttgtttatgatataaccattatttatacatttaagcatttggctagctgggtggaagatgcaggacagc

SEQ ID NO: 267641 - DNA, 473 bp, Glycine max
gaaactcacggatgggatcatgatgtgggttatgaagggttgaatgtagagagattgttcgttctcaaggaaaagatacctttatctttctctggtcaggttactaaagataaaaaggatgctaatgttcagatggaaatatccagttcagttaagcatgggaaagggaaagcaacttcattaggttttgatttgcaaactgtggggaaggacttggcttatacattacgcagtgagacaagatttactaattttagaagaaataatgcaaccgctggtctctcatttactttacttggtgatgccttatcatctggattgaagattgaagacaaattggttgctagtaagcgattcaagctggttgtcagtggtggcgcaatgacagggcgtggcgacattgcttatggtggcagtttggaggcccaactgagagataaggattaccctcttggtcgtttcttaaccacact

SEQ ID NO: 267642 - DNA, 337 bp, Glycine max
ctttccttttccagggagctcattgacaatggctgaaacaaagtgggtcatgaaggacaaaagatggtctctccatggaatgacagctctagtcacaggaggcacccgaggcataaggcatgccattgttgaagagttagctgagtttggagcaactgttcatatatgtgcacgtaatcaagatgatattgataaatgtttagaagagtggaaaaacaagggacttaatgtgactggttcagtatgtgatttactatgttctgaccaacgtaaaagattaatggaaattgttggctccatctttcatggaaagctcaatattctagtgaacaatgct

SEQ ID NO: 267643 - DNA, 452 bp, Glycine max
  unsure (1)..(452): unsure at all n locations
cccacgcgtccggatcgagataactagaaacagtgtgatgaaaatgaaggtccttgttttcttcgttgctacaattttggtagcatggcaatgccatgcgtacgatatgttccctctccgaatgaacactggctatggtgcccgtactccggaggtgaaatgcgcaagttggaggcttgctgtggaagcacacaacatctttggctttgagaccattcctgaagagtgcgttgaagcaacaaaggaatacatccatggcgaacaatatagatcagactccaaaacagttaaccaacaagcttacttttatgccagagacctcgaagtccattccaaggacacatttgtgttcagtatagatggcaccgtactctctaatattncatactacaaaaaacatggatatggggtgggagaaaattaactcgaccctgtatgatgaatgggttaac

SEQ ID NO: 267644 - DNA, 351 bp, Glycine max
  unsure (1)..(351): unsure at all n locations
cacgcgtccggnctcgcttggtggcggcacgaggccagcacgtgaccatcattaccacccccgccaacgctgaactcttcgagcagaacatcgacaaggacaccgcctccggccaccacatccgcgtccacatcatcaagttccccaacgcccacgtagggctaccggaaggcatcgagcacctctccgccggcaccaacaatgaaacactctccaccggacgtcttcatccctgacatactcttcacctggaccaaagacttctcccagaaactctncatctcgcggctagtcttcaaccctatatccatcttcgacgtctgcatgatccacgcccttaaaacccaccct

SEQ ID NO: 267645 - DNA, 411 bp, Glycine max
  unsure (1)..(411): unsure at all n locations
cccacgcgtccgattcattctcatctttctctcttctctctccacccaaaccctaacntccgaccctgttcccctctcgaatcctcatgaaagaagaaagccaagacgatctaaagagcgatccaaactgctgtgaataagaagggagccgncaccaaggctaggaaacccgtcgcaaggggaaggcagcgaaagaccctaacaagccaaagaggcctccaagtgctttcttcgttttcaaggaggagttcacgaaggtattcaacaaagaacatcctgaaaacaaagcagtgtctgctgtgggcaaagctgctggagcanaatggaagaccatgtctgatgctgaaaaagcaccttatgtggcaaagtctgagaaaaggaaagtggagtacgagaagaacatgagagcct

SEQ ID NO: 267646 - DNA, 216 bp, Glycine max
atttaaacaagttttacatggacttacacaaacagcacgcacggtacaactgcgcaacttataacgcagaagatggcctactgaacggaggaaagcccaagaccgaatctcatagagcccatcccaaacttggtgagaataagaatggagccaccaccaaagccaggaaaccccccggcaaaggggaaacagtctaagacccttacaaggccaaga

SEQ ID NO: 267647 - DNA, 422 bp, Glycine max
gagaaagagagagagagagtgagaaactgttttaaattcgcaaaccctaagttcggaaaggggggctatggctgtctccaaggatcgcgagaacttcgactacatcgccaagctcgtcgaacaggccgagcgatactaagtgatagtggaatcaatgccgaacgcagcgctactagacgccgcaccaactgtaaagcagcgaaagaccctaacaagccaaagaggcctcctagtgctttcttcgatttcatggatgacttcaagaatgtattcaacatataacatcctgaaaacaaatcatcgtctgctgtgggcaaagctactggagcaaaatgcaagaccatgtctgatgctgaaaaagcaccttatgtggcaaagtctgataaaaggacagtggagcacgagaagatcatgccagccta

SEQ ID NO: 267648 - DNA, 450 bp, Glycine max
gggaggggtcacagtagaagaggcacttagtactcagagattattcatattagattaccaagatgcattcatcccatatttgacgaggataaacagcctacctactgcaaaagcttatgccacaaggacaatcctgttcttgaaagatgatggtactttgaagccacttgctattgaattaagcaaaccacatccagatggagataatttgggtcctgagagtatagtggtgttgcctgcaactgaaggtgttgatagtacaatttggctattggccaaagctcatgttattgtgaatgactctggttatcatcagctcgtgagccattggttaaatactcatgcagtgatggaaccatttgccatagcaaccaataggcatctcagtgtgctccaccctatttataaacttctttatcctcactaccgcgacaccataaatatcaatgg

SEQ ID NO: 267649 - DNA, 429 bp, Glycine max
  unsure (1)..(429): unsure at all n locations
cccacgcgtccgcccacgcgttcgcccactcgttcggtcagtctcgaaaaggattaccctgaccgtggtgatgagggtacatgtgacctaaataagaaaaatgctattgttgctattgatgactacggatggcttcctaccgaaaatgagacaatcttgaaacggagcattgcaagtcggccagtggtcgtaattattgcaacagacgacgatgaatttcaatattatgaatcaggtatattcaaagggaaatgcggtacaaaagtaaatcatgctgtcctgcttgtggggtatggtacagaaaatggtgaagattattggatagcaaagaattcatatagtgataaatggggagataatggctatatcagaatanaaagaanactgagcacttgtaaattggaatcgaggttactatcccatatagag

SEQ ID NO: 267650 - DNA, 429 bp, Glycine max
gattgtcgtgactcgttcttcttcgtcgttatcttcttcttttgttgtttgtgtgtctgggctttctctcacctgaaaatgtcttgctgcggtggtaactgtggttgcggaatcgcctgcacgtgcggcaacggctgccgaggctgcaagatgtacccagacttgagctacaccgagtcaaccaccaccgagaccttggtcatgggagtggcaccagttaaggctcaattcgagagtgctgaaatgggtgttcccgctgagaacgatggctgcaaatgtggagctaactgcacctgccacccctgcacttgcaagtgaggtgttggagagctaaagcttcaagcagagatggcccttataaataatgataaatactatatgtagtttcaaaacttcaaaattatgtaatatgtattatggtgcactctg

SEQ ID NO: 267651 - DNA, 324 bp, Glycine max
  unsure (1)..(324): unsure at all n locations
tcgccacgcgtncgtgtcgatctttgtccgtccgtcaccaacacagcgttgttccatttcgagttctcggctgccattgccattgccattgccgtttcaattgcacgtaagaagaagagcaaaagggggaaaagtggtaatgagcatggaagcaggtattggagtgatgggcaccaagttgggtatgatgagctatttcgaatccgacggagaggttgttcctgtcactgtcgtgggtttcaaagaaggcaacatcgtcacccagatcaaaactgaggccaccgatggatacgacgccgtccaggttggttaccgaagggtcag

SEQ ID NO: 267652 - DNA, 428 bp, Glycine max
tcggagaaaatggcggtacctctgctctcgaagaagatcgtgaagaagagggtgaagaagttcaagaggcctcagagtgacaggaaaatttccgtcaagacaaactggcgtagaccaaagggtatagattcccgtgttaggagaaagttcaagggatgcactttgatgccaaacatcggttatggttctgacaagaagacccgccactatctccctaatggttttaagaaatttgttgttcacaatgtgaaggacttggaactgctcatgatgcacaacaggacttactgtgctgagattgctcacaatatatccacaagaaagagaaaagatatagttgagagagctgcgcaacttgatgttgttgtgacaaacaaaacagccagattacgcaaccaggaggatgaatagtctaaatgacggagtca

SEQ ID NO: 267653 - DNA, 460 bp, Glycine max
cccacgcgtccgaggccatataatttttttttatttgaaataatgtccgggatcatccacaggattgaggagaccctccatgtgggagggcacaagaaagaggagcacaaaggagaacaccatggtgagcacaaaggtgaacacaaaggagaacaccatggtgagcacaaaggtgaacacaaaggagaacaacaccatggggagcacaaggagggacttgtggataagatcaaggacaagatccatggtgatggccatgacaagggtgagaaaaagaagaagaaggacaagaagaagaaggagcatggacatgaccatcatggtcatagcagcagcagtgacagtgattagatcttatatgttaagcaggtgtacggtacgatggtagtgaggagccagaatccctcttcctgctttatgatataatacaaataaaatagcgattccggaaatcatgtct

SEQ ID NO: 267654 - DNA, 452 bp, Glycine max
gaggcaatgacgcggcctttcggtgtgaagggggggaggaagcgaaagcacgcggaacccaggtacgacgcccatgacgaagaagaagaagaagaaacgcaaccaaagaaaactgtggtggaggtggagcacaaccaagaagaagaagaagaaactccagcaccagcaccagaggatgatggattgagcggtatcccaattgcgcccagtgcgaacaacactaacaaacccaacgtcatcttcattcttgaaaaagcttctttggaagtcgccaaagtcggcaagacatatcagctcttaaactccgacgaccatgccaatttcctccgcaaaaataacaagaatcccggagattacaggcctgacattactcatcagtcccttctatcaattttggatagcccactaaataaagctgggagattgcgatcagtatacataaggactgaaaa

SEQ ID NO: 267655 - DNA, 430 bp, Glycine max
aagaaaagaccatcaaagtttcacttcagccttatccggtttagggtttcggtttttgaccgaacctttgacgtatcgaaaccttaagtttcggatcaggtctgagcaatctggttggtagaacctttggtcttagagagtcaagttttatgtctgaattagacgatcaaattcctactgccttcgatccttttgctgatgcaaatgctgatgactcgggtgctgggtcaaaggagtatgtgcatattcgcgtacagcagcgaaatggaaggaaaagcctgacaaccgttcagggattgaaaaaagaattcagctataacaagatacttaaagatgttaagaaagagttctgttgcaatggaacagttgttcaggacccagaactaggacaggttattcaactttcaggtgatcagaagaagaatggttc

SEQ ID NO: 267656 - DNA, 436 bp, Glycine max
gcttcatataaccaaactcttcactctgcttctgcttctttggaaagcacttaaccaaactctctgtttcagcttcctctgttttttgggtacgaacagagtttctctgtttttgacgatggccataaaggcgattgaactgttgaaagggtgcggatcacaagaagaaataatggaagtgcttgctgcggtggcttcggatttgggggatgtgatcgatgatgtgaacaccttgcaggtgattccactgaatggtgcaatgaccaatgaggtttttcagataaactggccaaccaaaaatggtggtgagatcagaaaggttctggttcgtttatatggggaaggtgttgaagttttctttgacagggaagaagaaattcgaaactttgactgtatttcaaagcatggtcagggtccacgccttcttggccgattc

SEQ ID NO: 267657 - DNA, 448 bp, Glycine max
  unsure (1)..(448): unsure at all n locations
cccacgcgtccggctagtttatcgtgaggagaatatgaagttgtttgttttctttgttgctgcagtagttttggtagcatggccatgccatggcgcaggctaccaaaggttccctctccgaatgaaaactggctatggtgagcgttcttcggaggtaaaatgcgcaagttttaggcttgctgtggaagcacacaacatccgagcctttaaaaccattcctgaagagtgcgttgaaccaacaaaggactacattaatggcgaacaatttagatcagactctaaaacagttaaccaacaagctttcttttatgctagtgaacgcgaagtccatcacaacgacatatttatattcggcatagataacaccgtactctctaatatcccatactatgaaaaacatggatatggngtggaggaatttaatgaaaccttatatgatgaatgggtt

SEQ ID NO: 267658 - DNA, 430 bp, Glycine max
cccacgcgtccgcccacgcttccgcaattcttcaaatacctaatatggagtttcacattctgcccatcattacttttctcatgcttgttgtggcaactaatgctgatgctgcattaccttctgcattttactggaagtccaagcttcctaccacaccaatgccgaaagccatcactgatttgctacaacctgattggaaggaagagaaagacacctctgtggatgtagggaaaggtggagtaaatgttggtgtagaaaagggaaaccaaggaccaggagatggcactgatgttaatgttggtggtggagacggtggaatgaatgtgcacacaagaccaaagggtaagccagttcacgttggagtgggcccacattctccatttgattacaactatgcaaccagcgagacccaattcatgatgaccccaat

SEQ ID NO: 267659 - DNA, 463 bp, Glycine max
  unsure (1)..(463): unsure at all n locations
aaaaggggttcaattctagctagttctattacgtcgtccgcgaccatgaacatggcgatggcgcttctgttcatggttttcgcagtttcatcagctttagacatgtcaataatatcacacgacaacgctcatgcggatagggccacgaggcgcaccgacgaggaggtgatgtcaatgttcgaggagtggctggtgaaacacgacaaggtgtacaacgcgctcggtgagaaggagaagaggtttcaaatcttcaagcacaatctgcgcattatcgatgaacgaaactctctgaaccgaacctacaagttgggactcaacgtgttcgctgatctcaccaatgcggagtacagagccatgtacctgcgaaccttggacganggtccgaggttgggcttggatacgccgtcaagaaaccactacgtgccacgtgttggagataacatacccgaatccgttgattgga

SEQ ID NO: 267660 - DNA, 407 bp, Glycine max
  unsure (1)..(407): unsure at all n locations
cccttcacaagattctcacaaacaactcttgagaaagaaagaatggctgccaacacattgaggagttctgccatctcagccttcccatctctcctttcctcctcaaaatccagatttgccgcagcagttcctctttccagctttgttgtcaccaatgcctcttcttctcgcttttccatgagtgctgattggatgcctggccagcctagacccccctaccttgatggttcagcacctggtgactttggattcgaccctcttcgtcttggtgaagtaccagagaatcttgagaggttcaaagagtcagaactcattcactgcagatgggccatgcttgctgttccagggattttggttccagaggcattgggcttaagcaactgggtaaaggctcangaatgggctgc

SEQ ID NO: 267661 - DNA, 455 bp, Glycine max
cccacgcgtccgcccacgcgtccgcccacgcttccgcaattccaatcaccaattcaaaaccggtcttcccttggaacaaattgagagatcgtgatggcaccaaaggcggagaagaagcccgcagaggagaagaagtccacggtgggagacaaggctccggcggagaagaagccaaaggccggaaagaagcttccgaaggagggaggcgccggcggagaagggaagaagaagaagaggaacaagaagagcgtggagacatacaagatctacatcttcaaggttctgaagcaagttcaccctgacattggtatctcaagcaaggccatgggaatcatgaacagcttcatcaacgacatcttcgagaagcttgcccaggaatcttctagacttgcccgctacaacaagaaacccaccatcacttcgagggaaattcagaccgcggtcaggcttgtgct

SEQ ID NO: 267662 - DNA, 454 bp, Glycine max
  unsure (1)..(454): unsure at all n locations
cgcgtttggctttagcatttagcattttctctctctctctctccacgctgttactttatcagataacctgactcaccccacccaatcctattcccatcccatttgaacctctccttctcgcagagtgagcgagcaagcgaatatcccaatcccacaccaatggcatgctcagccacctctgcttccctcttctccgcaaacccaacacccctcttctctcccaaaccctctctctccctccaccttaaccctctccccacgcgcccttctccctccctcacgcgcccttctctctccctcacgcgcccttctcactctcgccgctccttcgntgtcaaagcctcctccagcgagcttccgctggttggtaacaccgcaccggatttcgaagcagaggctgtgtttgaccaggagtttatcaacgtgaaactatctgattacattgggaagaaat

SEQ ID NO: 267663 - DNA, 465 bp, Glycine max
  unsure (1)..(465): unsure at all n locations
tcggagtgcggtgaagcaacaanagggaatacaatccattggcgaacaatatagatcagactccaaaacgattaaccaacaagcttactcttatgccagagacctcgaagtccatcccaaggacacatttgtgttcagtatagatggcaccgtactctctaatattccatactacaaaaaacatggatatggggtggagaaatttaactcgaccttgtatgatgaatgggttaacaagggcaatgcaccggcactgcccgagactcttaagaattacaacaagctggtgtctcttggcttcaagattatattcttgtcaggaagaacactggacaaacaggccgtaacagaagcaaacttaaagaaggctggctaccacacatgggaaaaattaattctcaaggatccacaagatccttccactccaaatgcagtttcatacaaaacagcagcgagagagaaact

SEQ ID NO: 267664 - DNA, 371 bp, Glycine max
aaaaattatttagttattttatataaaaaaaaaaacaaaaaaaaaaaaaaaaataaaaaaaatttataaaacaataaaaactaaaaaaaaatactacaaaaaacaaaaatattaaaaaaaaacaaataaatccacctaatatgatgaattaaaaaacaagaacaatgcacaaaaactgaaaaaaaattttaaaaattacaacaaaaatatattaacttgactagaacaaaatataataaaaaaaaagaacactacacaaaaattccataacaaataaaaacttaaataatttttcaaaaaaaaaaataaaaaaaattaataataaatgatccacaatatccttacactacaaatgaatttttatacaaaac

SEQ ID NO: 267665 - DNA, 324 bp, Glycine max
cccacgcgtccgctcattacaaaattaatatgaatcctttcccttgttttttttaaaaagggaaaaaaaaaaaaaaaaaaaagaaaaaaaaaaaaaaaaaaaaaaaaaaaaaaaaaaaaaaaaaaaaaaaaaaaaaaaaaaaaaaaaaaaaaaaaaaaaaaaaaaaaaaaaaaaaaaaaaaaaaagggggggccatttaaagggaccaaagtttacgtccccagtattgaaaagtaaaagatcttaaatagggccaccaaactcaatttgatgaggcggactttaaaaaggttgtaccgggaaaaacccgggggttacaaattt

SEQ ID NO: 267666 - DNA, 457 bp, Glycine max
  unsure (1)..(457): unsure at all n locations
gttgagaactaagaaggagaagcaaatggcttcctcaatgatctcttccccagctgttaccactgtcaaccgtgccggtgccggcatggttgctccattcactggcctcaagtccatggctggcttccccaccaggaagaccaacaatgacattacctccattgctagcaacggtggaagagtgcaatgcatgcaggtgtggccaccagttggcaagaagaagtttgagactctttcctacctgccagaccttgatgatgcacaattggcaaaggaagtagaataccttcttaggaagggatggattccttgcttggaattcgagttggagcacggtttcgtgtaccgtgagcacaacaggtcaccaggatactacgatggacgctactggaccatgtggaagctgnctatgttgggtgcactgatgcttctcagtgttgaaggagctcaagaggct

SEQ ID NO: 267667 - DNA, 409 bp, Glycine max
gtccatcccaaggacacatttgtgttcagtatagatgggaccgtactctctaatattccatactacaaaaaacatggatatggggtggagaaatttaactcgaccttgtatgatgaatgggttaacaagggcaatgcaccggcacttgccgagactcttaagaattacaacaagctggtgtctcttggcttcaagattatattcttgtcaggaagaacactggacaaacaggccgtaacagaagcaaacttaaagaaggctggctaccacacatgggaaaaattaattctcaaggatccacaagatccttccactccaaatgcagtttcatacaaaacagcagcgagagagaaactgataaggcagggatacaacattgttgggatcattggagaccaatggagcgatc

SEQ ID NO: 267668 - DNA, 380 bp, Glycine max
  unsure (1)..(380): unsure at all n locations
cggacgcgtgggcggacgcgtgggtgaacacacacatagaaacccaacaacaagaatgaagaagatgattctaaccctcttcttcaatatcattttatctctcctctccctctcccacgcctccgtggtggatttctgcgtagcagactacacaggccccaatggccccgcagggtactcatgcaagagcccagcaaaggtcacggtggacgacttcgtctactccggccttggcaccgncggcaacacctcaaacatcatcaaagccgcggtgacgccggcgttcgacgcgcaattccccggcgtcaacgggcttggaatctccattgcacgcctagacctagcagccggtggagtcatccctcttcacacgcaccctg

SEQ ID NO: 267669 - DNA, 361 bp, Glycine max
aagggacaaaggcgccttatttattgaaggccccaaagggaaaaccaccatagtgaaagtctcttaccatgaacttggtgacacacaagctggaaacaacattaaggtgaaagctagtgcccctatttgaacgcatcttattacatatagatagataggagcaagctagattgttgagaggtgaaggaactactgaatgtagtacaggggattaggaagcttaaaggtcctgctttcgcctctgtggccttcgaggagatcggtccattggtctccaatgatcccaacaatgtttgatccctgccttatcagtttctctctcgctgctgctttgtatgaaactgcatttggagtggaagga

SEQ ID NO: 267670 - DNA, 456 bp, Glycine max
gctctgaaagtcattgagtgggcagagaatagtgggaatggaaagagaaaggtgaattacgggttaagggactggctttttgctcggcaacgttactggggtgaacctatccctgtcatcttcttggatgatagtgatgagactgtcccactgtgtgagactgaactgccccttattctacctgaattggatgatttttctcccactggaacaggggagcctcctctgtctaaggcagtgtcttgggtgaagaccacggatagcttatctggaagaccagctacccgtgaaactaataccatgccacagtgggctggttcatgctggtactatttgagatttatggacccacataattccaaggaattggttgataagacaaaagaaaggtattggggccctgttgatgtgtatgttgggggtgctgagcatgcagttctccatttactgtatgct

SEQ ID NO: 267671 - DNA, 410 bp, Glycine max
tcgattttctaaagatgatcgaaagacttacatcgtctacatgggcgattatccgaagggtgtgggattcgcagaatcacttcacactagtatggttgagagtgtcctcggcagaaattttccaccagatgctttgctgcatagctacaagagtttgaatggatttgtggcgaggctaacaaaagaagaagcaaacagaatgagaggaatggatagtgtggtctctgttataccagacagaatccataagccacaaacaacaaggtcttgggactttcttggcttccccgaaaatgttcaaagaaacattatagcagagagcaacacaatcgttggagtgatcgatagcggaatttggcctgaatctgatagctctaatgatgctggatttggtccaccaccaaagaaat

SEQ ID NO: 267672 - DNA, 441 bp, Glycine max
  unsure (1)..(441): unsure at all n locations
catcgctggaacttccatttccggtgaccggaaaaccccatcaccgtcgccgaaatgggaaccgttaacaacaccgtcgacaccgtgaatgctgcggcctccgccatcgtctacgctgaatccagaatccaacccaccaccaccgtcccgaaaaaacgctggggaagctgctggagcttatgttggtgttttggacctcataaaaacagcaagagagtgggcaatgctgtccttgttcctgaacctgttgaacctataggcccagttggatttcatcctgctactgctgcaccaaatccttcaactgctattgtaatgccattcattgtccctccctcttcacctgcatcttttctccaatctgatcctncatctgctactcaatcaccggttggattattctccctcagttctctcactggtaatgcttctggtggacct

SEQ ID NO: 267673 - DNA, 445 bp, Glycine max
caaacccaagagttgaagaagaatcagagttcagaatccatggcaggtgctatagtaaagtacggaatcataggagtaggaatgatgggtagagagcatcttgtgaatttgtaccatcttcgcacccaaggcgtggcagttgttgctattgctgaccctcatcttccctctcaacaactcgctcttgacttagcacactcctttacttggcctctcaaggttttctcaggtcaccaggagctgttggacagtggactatgtgatgttttggtggtatccactcctaacatgacccatcataggattcttatggacattatcaatcattccaaaccccatcatgtactggtagagaagcccttgtgcaccacaatctcacactgcaaagaggttgtcaatgctgctagaaagagacctgatatattggtacaagttggactggaat

SEQ ID NO: 267674 - DNA, 408 bp, Glycine max
cgcacgcgtccgcccacgcgtacgaccaggtttgaacaagcacagacacggagactaatatggtagcatactagaaataacagctttctacatatacatatatgagcgcaaaacaactatgttacatcagctgtagcagataacgaaagctcataaaaggcaaaatatgcaagaaccacaacggcaacatgcatacgtacactatggataaaagaactagtcgatagaggaagcatgcgcaggatccattaacccagctacgaaccgataccatcaaaactgctaacacatactaagatggaaaaggcacgaatccacttatgtaataaactacatcccacaaactcttgagcaccagggacaacattaaagctccaaagatagaaaggctctcctatgacactgtat

SEQ ID NO: 267675 - DNA, 406 bp, Glycine max
  unsure (1)..(406): unsure at all n locations
gaagaagctcttcggtgacctcggtgccaattacaaggccatcgaactcgacactgaatccgatggaaaagagctccaagcagcattagttgagtggacggaccagcgaaccgtgcctaatgtgcttattggtggaaaccacattggtggctgtgactcaacaactgccctgcacactcaggggaagctggttcctctgctgatatctgctggagctgttgccaaatcaactgcttaaaggatctcccatttctaggttatgcagttaaataaaaataaaaacccaagtagttgggtcggttatataattcaggtcccagaaactaatgtgtgtattcctgagtgattctctntaaactacaactctgtcaaacaagtctattgctgaatgaagttatttttggtt

SEQ ID NO: 267676 - DNA, 221 bp, Glycine max
cggcaagtgagcatgaaagaaaaggatgacttgtggacttttgagagtttttagatttgtgtttggtgaagtatatgttattgcaatgtacttcagataatgtgaattatcttgtgtatccgaatccaacttaatgttacttgctttttacgaaaactcaagtgtcaatttgttctctcattttacacttctatgcttatgacaccaaattgaactctaaa

SEQ ID NO: 267677 - DNA, 452 bp, Glycine max
cggacgcgtccgcccacgcgtacgaaaagaatagaacaagcaaatccacaagatactaatataagaaatactagaaataaaggctgtctacatatacatatatcgtccaaaacaacgatttttatcagctgtagcaaagaatgaaacttcatagaagtcaaaatatgaagaaatcaatatgtctagatacccacttttctatggataaaagatctaattgataaaggaagcatcgtaaggatccattaacgcggttttgaaccgatacaataaaaactgcttacttatctcatgatagaaaagtcaggaatccacttatgtaataaagtagatcccccgatattttgagcagcggtgtagtatcaaatcccaaagatagaaagtcttttctctttactgtataaataagaaagaaaagactttttccaagattctatagaaatggatatatt

SEQ ID NO: 267678 - DNA, 401 bp, Glycine max
ggaaatcgtggtggagcttcttggtggagttattggagcgctggaattaccaacaccattggtactgctatgggaactgaaactttgaaggatactaggtaccctgctcaggtgctggctaaggcccttaaaatgatttcagatatgctgatgggtactctggtatatgctataagatacacttttccagactacctttgagcttatcttggtgctggaagggtatcaacatttgcacttacaaagactcgcttaaagactatcagcaagcctgtacatacaaatgctcatcttggatatgggttgggatatctgaaccttgctcttgatggatctaccaatgcaactaacgattctttaaaagcaaggtatacagcaacaagtgcttgggatattatgct

SEQ ID NO: 267679 - DNA, 442 bp, Glycine max
gagagatccatcgatcaattaatttccaatggccgatcagctcaccgacgaacagatctctgagttcaaggaagcctttagcctcttcgacaaggacggcgatggttgtattaccaccaaggaacttgggactgtgatgcggtcgcttgggcagaacccaactgaggctgagctgcaggacatgataaatgaggttgatgctgatgggaatggtaccattgatttcccagaattcctcaatctcatggcgcgcaagatgaaagacactgattcagaggaagagctgaaggaggctttccgtgtgtttgacaaggatcagaatggtttcatctctgcagcagagctccgtcacgtaatgaccaatcttggtgagaagctgaccgatgaggaagtcgacgagatgattcgtgaggctgatgttgatggtaatgggcagatcaac

SEQ ID NO: 267680 - DNA, 197 bp, Glycine max
gaggttaagaggttgaagagtattggcatgattgatagcgttcctggaatgaaggctttggatatgaatgctgcacaggatgctattgtgaggctcacgagggagattgtgcccggcatgattgtcaccggcatggatgcggcagaaattgatggctccccaaggatgggtccgacgtttgatgcgatgatgatatc

SEQ ID NO: 267681 - DNA, 461 bp, Glycine max
ctcgccgactcggttgctatcagcgagtgagagtgagtgagtggttctcttgcagcaacaaggtttagtgacaccaaacagactggaaatgggtcgtggggtcagtgctggtggtggacagagttccttggattatctctttggcagtggggtacctgccagcagtgcaaatggtgctcgcactcaaaatgcaagtgctccttcaccaccggttgataagcaaagtccagcaccagcagcagcagcagcacctgcacctgcagcagcagcagcaccagcacctgcaccagcaccagcaccagcaccagctgataagcaaattccagctggaattcctggaagtctcaaaaacaattaccatcgcgctgatgggcaaaactgtggcaactttctcactgatcggccatctaccaaggttcatgcttgcccgggtggtggatcttccttgcattacctctttg

SEQ ID NO: 267682 - DNA, 464 bp, Glycine max
ctcctcgcacaacacaaccacaatggccgcttagaagaagaatggcggcggaaacggcaacgacaaggagaacgaagacagcaccatcaccgtcgtcttgaaggtcgaaatgcactgcgacggttgcgcttccaaaatcatcaaacacctccgctgtttccaaggtgtggaaacggtgaaggctgatagcgacgccgggaaggtgaccgtgaccggaaaagtggaccccacgaaagtgagggataacctggcggagaagataaggaagaaggtggaactggtgtctccgcagcccaagaaggagcaggagaacgagaaagagaacaaggatgctaaggcaaacaacaaatccgagaataacaaaacccatgacaaaaaaaccaaggacaaagaggtggtaaccaccgctgttctgaagctggcattgcattgccagggttgcctagacaggattggcaaaactg

SEQ ID NO: 267683 - DNA, 390 bp, Glycine max
caagtccattcaccacgccagggttctcatctagcagagacatatcagggttgggaggcaagtggtgaacatgccatctttcttggtgagggttgactcacagaagcacattgacttctcacttacaagtccccttggtggcggacgccctggaagagtgaagagaagaaaccaaagggctgctgctaagaaggccgcaggtggagacggagacgaggaagacgaggattagactgttcattatgtctttctctagtgctattagatcttatgccaccttttactttgcctacctaatcgattttggttgttatacattttcatcctttggttcccttggttgagaaaatattaagtggtgacatattatgtttttgtgaaatttggata

SEQ ID NO: 267684 - DNA, 427 bp, Glycine max
gcattaaaaaaaaaaatcagaaaacaatatatatacgatcttttatcctataattatatcaattatgcacataagaaagactcatatatttatggatatagatccctatttcaagtaaaaaataccaagtgatttcttctaattacaacacgtataaaaaagaattattggatatcatagataatctctttatcaagaattatatatcggaagatgcgattctagatatggaaaaaaatatgtatagaaagtattttgattggatgggaatcaatagagaaatactaaatcagtccatatcgaatccagaattttggttcttttcaaaatttgtgatattttatgacgcatataggggtaactcgcaagttataccaatcaaattactatttttttcttctaatgtaaatcaaaatgttagtgaaaa

SEQ ID NO: 267685 - DNA, 384 bp, Glycine max
tcggccacgcgttcgcccacgcgttcggcttcaacttgctccctcagaagcggagaagaagccacagagaactagtctactacttttacccgcaagaaaaaaatggcatctcacatcgttggatacccccgtatgggtcccaagagagagctcaaggtcgctctcgagtctttctgggatggcaagagcagcgccgaggatttgcagaaggtgtcttctgatctcagggcatccatctggaagcagatggctgatgctgggatcaagtacattcccagcaacactttctctcactatgaccaggttctcgacgccaccggcacccttggtgccgttccaccaaggtacggctggaccggctggtagattgggtttgatacctac

SEQ ID NO: 267686 - DNA, 425 bp, Glycine max
  unsure (1)..(425): unsure at all n locations
gttatagcaaatcattacatgcttcctgatttcttattacttgcagcttgcttcaccactacggtatgcaaatatatattcagagaagattgtacatctaccgcattgctactttgtaaatgattataaacagaaaaatcaggatgtgttagatccaaactgtccacacaaacgatcagattatggtctacctgaggataaatttatatttgcatgcttcaatcaactttacaagatggatcctgaaatatttaatacatggtgtaatattcttaaacgggtacccaacagtgcactctggctcctcagatttcctgcagctggggaaacgagactgagagcatgtatgtgttggcgtttgattatgatttttagactctgatcnggaatatcagggttcatttttatttgttctccaatgggca

SEQ ID NO: 267687 - DNA, 385 bp, Glycine max
aaatcaaagccatggccacctccaacttctctattgttctctccgtctccctagccttctgtttggtgctacttaccaaggcacactcgaccgataccgtttctttcaccttcaacaagttcaacccagtccaaccaaacattatgctccaaaaagatgctagtatttcatcctctggggtgttacaactcaccaaagttggcagcaacggcgtgcccacctcgggatctctcggtcgtgccctttacgctgccccaatccagatttgggacagcgaaaccggcaaggtagccagctgggctacatcctttaaattcaacattttcgcacccaacaaatcaaactcagctgacgggcttgccttcttcttggcacccgtcgggtc

SEQ ID NO: 267688 - DNA, 460 bp, Glycine max
  unsure (1)..(460): unsure at all n locations
ctggtatggcattccgtgttcccaccgtggatgtctctgttgttgacctcacagtgaggctggagaaggaagcctcctacgatgaaattaaaaatgctatcaaggaggaatcagagggcaagttgaagggaattcttggttacactgaagatgatgtggtctccaccgactttgtgggcgatagcagatcaagtatttttgatgcaaaggctggaattgcattgaataagaactttgtgaagcttgtctcttggtatgacaacgagtggggatacagctcacgtgtcattgacctgcttgtattcgttgccaagaagtctttttaaggttgtactgaaaaaaaagtagcttgtctagacattatgtgctggtgtctagctgcgatttagtgtcttcttgctcgggcagaaatgagaagtatgaataaatcggtttcgggaaccggtgttgntaccctgtt

SEQ ID NO: 267689 - DNA, 455 bp, Glycine max
  unsure (1)..(455): unsure at all n locations
gaagcaattgacgtgagcggccatccatggtttcgcttcatccacatacactaacactagcgtgccctttgtccgtttcctcttcatcctcccgttttctcagatgctccgtaaattctgccccgaagcgaagaagaagcagcttcattactgcttcgtggcaagagctcgcgggagttttactattctccgcgattcctttcactgccgtgaaagctatagctaatagtccgctaggggagtcgcttcagaggaaaatggaggagagaaagacatttgctgtagaaaactcgtctacattcaaggccttagccggcaaggcccgaaaggagagcttttggtatggagaagatcggcctcgttggcttggtcctatttcatatgaatacccatcatatcttactggngaactgccccgggattacggctttgacattgctgggcttggccaggat

SEQ ID NO: 267690 - DNA, 434 bp, Glycine max
agtgtacaaaagaaaacaaggagaggctgtccacctcaaaatgcaaatttgtaccagttgaaaacaacggtctacatagttcatgatggtgtttcccttcgtttttacaattccaaaatatcataggagatcaaatggaactctactttccttttcttgcaagtattacaacttcaagaccaagcttaaacttaacttcatacttttgtacccaggaaggactttacgcctgctggagagtttcctggcttagtagtagtagtacttccgaagttgagctttacttttttatcagctggctttaatatttggaaagagcacattagtgtctcatcgacactcatcataacgccagcattgtcaaactttccacaataattaggtgctgaaaatattgttacaagctgccggttagcaaagaactcatacccatc

SEQ ID NO: 267691 - DNA, 336 bp, Glycine max
ccatgaggaagtttggtgcttgaacttgaacccgaacattgcgattcagacatagagaatggccatggcccgaagagtccctcggtatgttttaggatcggtccaaaggaacatgtccttcaaatctttggatcccccttcctgcctcacccacggaatccacgtctttcattgccccgatgcggttggaattgtagccaagctgtccgactgtattgcctctagaggtggaaacattctcgccgctgatgtttttgttcctgaaaataaacaagtcttctactccagaagtgattttggttttgatcctgttaaatggccaccggtgcaaatgga

SEQ ID NO: 267692 - DNA, 448 bp, Glycine max
gaagaacttagctacaagctaaggaaggatcaaagagaatggctcaagcaatggcatcaatgactagcttacgtggttcctctcaggctgtgttggaaggtagccttggctccacacgcttgaatgtggggagtggaagcaaggtggcctcagtcacacgtgcagggttcacagttagagcacagcaacaacaagtgaatggtggtgaggtacaaagtagccgtagggcagtgctttcacttgttgctgctggtttgaccactggctcttttgttcaagctgtgcttgctgatgccaaacctatcaaagttggaccaccttccccaccttctggcggattacctggaacattgaactcagatgaaccaagagaccttaagctgccattgaaagataagttcttccttcaaccattgtctccaactgatgctgcacaaagggcaaagga

SEQ ID NO: 267693 - DNA, 82 bp, Glycine max
aaaaaaaaaaaataaaaaaaaaaaaaaaatttaaaaaaaaaaaaaggaaaaaaaaaaaaaaggaaaaaaaaaaaaaaaagga

SEQ ID NO: 267694 - DNA, 304 bp, Glycine max
tccacgcgtccgtccacgcgtccgggctggcatagcagagtttgtggccactttcttgttgctctacatcacagtgctgactgtgatgggtgtgttcaaatctaagagcaagtgttccactgtgggtatccaaggcattgcttgggcttttgggggaatgatctttgctcttgtttattccactgctggaatctcagggggtcatattaacccagcagtgacgtttgggctgttcttggcacgcaagctctctctgacaagggcaattttttacataatcatgcagtgcttgggagctatatgt

SEQ ID NO: 267695 - DNA, 325 bp, Glycine max
  unsure (1)..(325): unsure at all n locations
cgcgtccgcccacgcgttcgcattttggcatcgagggagtanctcatcggatagagaaaaaccatagcgatttctttaagaggaaagggaggcacccctctaaacaagggaggagcgaaacgacaccgnaaggggctgagggataacattcagggcataacgaagcccgcaattcgccgtctcgcgagacgtggcggcgtgaagcgtatcagtggtctcatctacgaagaaacccgcggcgttctcaagatcatcctcgagaacgtcattcgcgacgctggcacctacactgagcacgctcgccgcaagaccggcactggcatgg

SEQ ID NO: 267696 - DNA, 212 bp, Glycine max
  unsure (1)..(212): unsure at all n locations
taccaaataaacttccttccattaaaccaaaatcccggggcaactttttcaaagggntngaacgagctccccaaaatccacgnaaccgggggnaaggcgccgcggaagcagctggcgactaaggcggctcgcaagtcggctccggcgaccggcggcgggaagaacccgcacagattcaggccgggaaccggggcgctgcgcgagatccggaa

SEQ ID NO: 267697 - DNA, 457 bp, Glycine max
cccacgcgtccgcccacgcgtccgaaatttttcagtctccggaactcgtttctaccttcggttcgcacatctcgaaccctctctttccggcaactaggttaaagttcatcaatggcaggtcgtggcaaaaccctaggatccagcgccgccaagaaggccacctcaaggagcagcaaagccggcctccaattccccgtcggccgtatcgcccgtttcctcaaagccggaaaatacgccgagcgcgtcggcgccggtgctcccgtttacctcgccgctgtcctcgaatatctcgcagccgaggttttggagttggctggaaacgctgcgagagacaataagaagactcgaattgtgccgcgccacattcaattggcggtgaggaacgacgaagaattgagcaagcttcttggtgacgtcaccatcgctaacggtggcgttatgcccaacattcacaatc

SEQ ID NO: 267698 - DNA, 263 bp, Glycine max
  unsure (1)..(263): unsure at all n locations
ggaagcaggggcgcccccaaaccccatgaacttcgtgaacctaatgctcgcttgccaaatggtcgtccatttccccctctatttaacttcaaacaggaattatctggagcatcttccgagcttgttaataagttgatacctgaccatgtgaagcggcaaatggggatacagtttatgcatctgggaggatcgtngacgaaaagcttaggggacatagtgtatactagctgataagttaaaaaaaagtggcaccattatttttt

SEQ ID NO: 267699 - DNA, 248 bp, Glycine max
  unsure (1)..(248): unsure at all n locations
aagaacggcacagnggnncacggcaccannacaggggnnganatcagnatgaatacacattngaaaacagntaaactaactctgaaagggaaaaacccagttactttggatcatctcagtgtgagaggcaacaacattcgatattatatccttcctgacagcttgaatcttgagactttactggttgaagaggctcctaagatcaagcctaagaagccaactgctgggaagcctttggggagagggcg

SEQ ID NO: 267700 - DNA, 217 bp, Glycine max
  unsure (1)..(217): unsure at all n locations
aaagnacaaaatagatttggaaatccaggtacacaccccattctacccatttgccgaggcgagagaatcatatgcccccggaacaaaggagtatgtacatattccaattcaacagaggaatgggaagaagagtcagaccacagaacaagggctaaagaaggagttcagctacaacaaaaacctcaaagaccacaaaaaggagatcagcttcaacgga

SEQ ID NO: 267701 - DNA, 389 bp, Glycine max
  unsure (1)..(389): unsure at all n locations
attgcaggaagctgccaacagcgggaagatcaacaatctcgttcgcttggctctgaaggaccaaaccaaaggagagatttcagttctgaagttggggaggttgataagggcacagcagcaggtggttcctgaagtggaatactacataacatgggaggcaaaagatggtgagataaaaaatgagtataaagcgaaggtttgggagaggaaatcccaagagtggctagaattcatgccaacattangtgcaggaggcgagatcgaccatctngctcgctttgctgtaaaggaacaaaacaaaagagagaatgcaaatctggagtttgtgggggtgattagggcaaagcagcaggtggtggaagggttcatatactacatcactttggaag

SEQ ID NO: 267702 - DNA, 315 bp, Glycine max
  unsure (1)..(315): unsure at all n locations
acatctagagctccagatttgaataggcaaatcctttcaaaggaagtagcaaaaagtatggctgaggatggaggctggccttcatcacctgttgcttctcagtctgcccagggggttaatggccttccagaagtcaagaccaatgaagtgccaaaggaaaacactctggagaagccagaaaagcctgagagcacttcttcacctagagcttcacattcagtaatttcaggtacctgtaggaaacctatncgtgctaaaaaagcagtgaagagtggngggcttggtgctcgtaaactcactaaaaagccaagtgag

SEQ ID NO: 267703 - DNA, 296 bp, Glycine max
  unsure (1)..(296): unsure at all n locations
ttttgccaccggnngggggcgggccccccaaaccaacccaacannaantaatgccaattgcccaccacccactccaactccatctccatctccgaagcccacaccacccacaccaccaactccaaaaccaacacctcccactccaaagcccacgccaccaactccaaaaccaacaccacccacacccacacccacacccacaccacccacaccacccacacccaaggctggttggcctccaccttctcctccttcgccacccaaagcttcatgccccaaggacacattaaagctag

SEQ ID NO: 267704 - DNA, 449 bp, Glycine max
  unsure (1)..(449): unsure at all n locations
tttccgcagaagaacaaggaggttaatctaagaaggagaagcaaatggctngcgctatgatctctgccccagctggggccactgtaaacctctgccggtgccggcatggttgctccattcactggcctcaagtccatggctggcttccccaccaggaagaccaacaatgacattacctccattgctagcaacggtggaagagtgcaatgcatgcaggtgtggccaccagttggcaagaagaagtttgagactctntcctacctgccagaccttgatgatgcacaattggcaaaggaagtagaataccttcttaggaagggatggattccttgcttggaattcgagttggagcacggtttcgtgtaccgtgagcacaacaggtcaccaggatactacgatggacgctactggaccatgtggaagctgcctatgtttgggtgcactgatgc

SEQ ID NO: 267705 - DNA, 201 bp, Glycine max
  unsure (1)..(201): unsure at all n locations
gaaaacaataggaatnaaagnncagttttttaaaaaagaaaaaaaaaaggaacccaaaaaacaaaaaaaaaaaaaaaaaaaaaaaaaaaaaaaaaaaaaaaaaaaaaaaaaaaaaaaaaaaaaangggggggccgcccaaaaggaacaaagcnaacgnacgcgggaaggcaaacgaaaagcccnncaaaaggggaaccaaa

SEQ ID NO: 267706 - DNA, 194 bp, Glycine max
  unsure (1)..(194): unsure at all n locations
tttccccctctattaaacttcaaacaggaattatctggagcatcttncgagcttggtaaaaagttgatacctgaccatgtgaagcggcaaatggggatacagtttatgcatctgggaggatcgtgacgataaagcttaggggacatagtgtatactagctgataagttaaaaaaaagtggcaccattatttttt

SEQ ID NO: 267707 - DNA, 434 bp, Glycine max
cccacgcgtccgcgccgtcgtcgctgtttgtgtgtgtatcaggtgcagctaccaacgatggtgaagggtcgtcaaggagagcgcgtcagactctacgtgaggggtacaatccttggatacaaaaggtccaagtccaaccagtacccaaacacatccctgatccaaattgagggagtgaacaccaaagaagaagtaggatggtatgctggcaagaaaatggcctatatctacaaggctaaggtgaaaaaggatggaagccattaccgctgcatatggggcaaggttacgaggcctcacggcaacagtggtgttgtccgtgcaaaattcaagtcaaaccttccacccagatcgatgggagctcgagtaagagtattcatgtatccaagtaatatatgagattcaggtgataagacgctcagaattcgcaagctaat

SEQ ID NO: 267708 - DNA, 331 bp, Glycine max
attgaattcaaaaactaagttcatttcttgtgctttgctttattcctcaaaaccaaacatgtggaacacatgcggcaactgtgactgcgctgacaagactaactgcaccaagggaaacagctatggtgttatagtagagactgagaagagctacatcgagactgttgacatggatgttccagcagctgagcatgatgggaagtgcaagtgtggcactaactgcacttgcacggactgcacttgtggccattaaggaatatgtatgaaaatgtaattgccatgtgtttggcaatacaaatctccaaataatgtaatcttcgtatgaataaat

SEQ ID NO: 267709 - DNA, 273 bp, Glycine max
  unsure (1)..(273): unsure at all n locations
cggacgcgtgggcggacgcgtgggcggacgcgtgggcggacgcgtgggaaaccctagtctcgatacatcaacttgggaggttaaagagacngcaacgttgtgctgtccgccttgaccgagccaganctttcgtcttggccctcaattttgccctgtaaaactaatcccagtcacaacagaaataatcaatggcaccgaaacagaccaaggctgagaagaagatcgcttacgatgcgaagctgtgcgacctaatggaggagtacggccaaatcc

SEQ ID NO: 267710 - DNA, 408 bp, Glycine max
  unsure (1)..(408): unsure at all n locations
cccacgcgtncgcacagaggcagaagaagcatagagtgagaagtgaagagtgaagaagagtgaggaattgaagagaaaatgggtgctgattggggaccagttattgttgctgtggccttattcatcctcttatctccgggtttgttgttccaatttccctcaaagtatagggtggttgagtttggaaacatgagcactagtgggattgcaattttggttcatgccatcattttcttctgcatacttaccatcttggttgtagcaataggcattcacatacacatcaattgaatcctatgttcaccttataagtcaccacaaatctccatatgtacgtttacaattacttttctttttagctcctttgatgtattaatttcccttttaaaagttttcatcttggttttc

SEQ ID NO: 267711 - DNA, 433 bp, Glycine max
gctgaaggttcctcctttcgtgatgggtcatatggtgaaacacctggcacaccaaagcatttacatcgtggtggggatcaggatcgaacatttattccagattcaatgaatttcggagtggaaagggtaggcaaaaaggaccaaaagcgcatggcacctggagctccatcagctcataaaagacctagaaaactaaaggcctcagatctttagtttctcaggtggcaaccgggaaaggtgtttcaattcacagaattctttcaatcaaaattatgaatgttgtggaaggtgtggctgtgaactcaacacctgaaaattcggattgtggtatatctagtccaactgaaattcggttcacttcggtctaaaattttaaactaatgccactcttggtattcgatgtaaaaagaaaagtgggatccctgagatgagt

SEQ ID NO: 267712 - DNA, 417 bp, Glycine max
cccacgcgtccggaacaagggtttctctttctctttctctgtctgcttcttcactttctcgcgtttcaatcgaaaaaaatcatgggcagaaaattcttcgtcggtggcaactggaaatgcaatgggaccactgaggaggtgaagaagattgttactactttaaatgaagctaaagtccctggagaagatgttgtagaagttgttgtgagccctccttttgtgttccttccttttgtaaaaagtttgctgcgccctgatttccatgtctcggcccaaaattgttgggttcgcaaaggtggtgcttatactggagaggttagtgctgaaatgcttgttaatttgggaattccttgggttattattggtcactctgaacggaggcagcttttgaatgaatcaaatgagtttgtgggagat

SEQ ID NO: 267713 - DNA, 426 bp, Glycine max
cccacgcgtccgcacaattagaaaaaaaaaaaaacaaaaaatgggcgtttctcgttctcaaaagcctcatgttgtttgtgtgccattcccagcacaaggccacgtgaacccttttatgcaactaagcaaactccttctttgcaccggtttccacataacctttgtgaacaccgagttcaaccacaagcgtttggtgaagtctcttggacaagaatttgtcaagggacaacctcattttcgatttgagaccataccagatgggttgcctccatctgacaaagatgcaacacaaagcattgcagcattgtgtgatgcaactagaaaacattgttatgagccactcaaagagcttgtgaagaagctcaatgcttcacatgaagtgcctttggttacctctatcatctatgatgggctaatgggctttgc

SEQ ID NO: 267714 - DNA, 425 bp, Glycine max
gcggtttggtctacgcgttcctctctgcggtgctcacaaacagcagaaacagagtttcagagtttcagaggttagttgaagatggcgtggcgtcggagaatgatggagggtgctgtagagggattgaaaatttggagctttggggtgcagcagtgaagtggggttccgagttcaaattcaacagttctgaagggtgctgcaacgcgtgcaaatccatgtgttctgggaaagatgggccttgtctgtgtgatacttgggtcttttgtggggatcgtaaggcctgtggatccaagttcggtgagtgttggttgaagaaacagaaggacagcttagcacctgaacggcaagaaggagcgcctcagggggaagtgattggttggacttctggtcttatctttgggaaaggagagggtattattggactg

SEQ ID NO: 267715 - DNA, 426 bp, Glycine max
ggcggctctttgatcaattatctccggaaacttctggaacctccttatgttgatacccttgaatggtccaaatggcacgtgttttgggtggatgagagagtcgtgcctaagactcacgaagatagcaactacaagcttgctttagatggacttctctccaaggtgccaattcccccgggcaatgtttatgcaatcaatgatgcgctttcagccgagggagcggcagatgattatgagacgtgtctcagacacttggtcaagaacaatgtgatagcttcatcaccagccaatgaatttccaaaatttgatctcatgctgctgggcatgggccctgatggccacatagcttctctgttcccaggccatcctcttgtggaggagaaacaaagatgggttaccttcattaaggactccccaaaaccacca

SEQ ID NO: 267716 - DNA, 424 bp, Glycine max
cggacgcgtgggcggactcgtgggcggactcgtgggcggacgcgtgggttgatctctgacaaccccaacacttccgaaccttgcattgtatctacccacttctcaaccaacaatggcaatggcaacccaagcctctctcttcaccccacccctctccggtctcaaacccagcgaccgagccaccgcgccatggaaacaatcctccaccctctccttctccacctcgaagcccctcaagttctcgcgaacaatcagagcagcagccaccgaccagaccacagaggcaccggttgggttcaccccaccggaactggacccaaacaccccttccccgatcttcggaggcagcaccggcgggctcctgcgcaaggcccaagtggaggagctttatgtcatcacatgggactccccgaaaagacagatc

SEQ ID NO: 267717 - DNA, 389 bp, Glycine max
cccacgcgtccgcccacgcgtccggttctatctgtgacgagcatcatggcctcaagagcagtgttattgttggctatgtgtgtgcttccggcgatggttgtggccattcgcccagcaaagaaccctttttgcgtgaagggtcgtgtctactgtgacccttgccgtgctggttttgagacctcagctaccacctacattgctggtgctgagattatgttgcaatgcaagagcagggttagcaacgaggttgtgtacacgaagaaggggtacaccgactcaaccggagcatacacaatgtacgtggatgaggatcacgcagatcagatctgcagtgccaagcttgtaagcagccctcaccctcaatgcatggaagtcaccccaggccgcga

SEQ ID NO: 267718 - DNA, 308 bp, Glycine max
  unsure (1)..(308): unsure at all n locations
cgaaaatataacaaataatttgtactttcatcaaaacaaaatcccgttgtatttttctcaaatggctcgaacgaagcaaacggcccgcaagtcaaccggcggcaaggcgccgcggaagcagctggcgactaaggcggctcgcaagtcggctccggcgaccggcggcgtgaagaagccgcacagattcaggccgggaaccgtggcgctgcgcgagatccggaagtaccagaagagcacggagctactcatccggaagctttcgttccagcgcttggtccgagagatcgcgcangacttcaagaccgacc

SEQ ID NO: 267719 - DNA, 433 bp, Glycine max
cccacgcgtccggcactttcttgttttctctctcaccctcatatccatcatcttccacacccatggagcgttctctgagcaatcaataatcaagttacccacagaccaaccaagggtagagaaactgacccacttgcattttttctaccacgacatcttagagggcaagaacatcacggtggtgaaaatcatcgagccatcagcgagcgaggttcgtgaagcaactgggtttggaaccactttcatgatggacaatgttttgaccgagggtccagagctgagctcgaagcacgttgggagggctcaagggctgtttggcttggcctctttggaagaccgtggaatggtgatgctcattaacttggctttcagtgagggtgagtatgctggcagcactctcagcatgcttgggaagaaccctgttcaagacact

SEQ ID NO: 267720 - DNA, 427 bp, Glycine max
acccagccagcgttgttgttttacacacttggtggttgcaaatagcattaccacaaagtggtgacggctccagatccgtgttagtcttgtacgaacgaggatcattggcacgattagtcaatgaagtcccatatccacgttcttgtgaagcacgttttcgagcggttatcaatgccatacttcctagcgactaatgactctaggcacatttttaatatctggcttagactaacggcgtggagaatgatgcaggctaccgtcttgtgattagcctttgagcattctatcatgcgattgatgagccatgcgtgatgccttctaacagccaaatgtgtatggtgcatccatattacaaacgaaaccagtctatctaccttgacaccattaatatggattcacttgcccggaaagccctggtcattgcaga

SEQ ID NO: 267721 - DNA, 390 bp, Glycine max
cccacgcgtccggatggagggggttgagagcaaagaaagagaagtgatggtggcaaaaccagttgcagtagtaggtgtctgtgatttgcttctgaggctgttggccttcacagttactcttgtcgctgctatagtcattgcggtcgataagcagacaaagcttgttcccatccagctttcagattcttttccacctttgaacgttcctcttactgctaagtggcaccaaatgtctgcctttgtgtactttctggtgaccaatgcaatagcatgcacgtatgcagccatgtctctactccttgccctcgtaaacagaggtaaaagcaaaggcttgtggacattgatcgctgttctcgacacattcatggtggctttgctcttttccggcaa

SEQ ID NO: 267722 - DNA, 385 bp, Glycine max
cccacgcgtccgcgacgaattacctgatgtggcgcaggagtttcaggtgcaggcgatgccgactttcgtgttgtggaagaaagggaaggaagtcgacaaggttgtgggcgcaaagaaggacgagctcgagaagaagattgagaaacatcgatcgtgatcttagctctgtaatcctattcattcagctatttatctttctttccaaggtgaaaagaatattaaaacagagtttaaatttgttatatttggctgtagtgttatgatgatgatgatgatgatggatggggttgtaaaattttaaactggttgggttgtttcttcaggaagatggtgtctgtttcatattttagcaaaattgttatatagaaattgaaaatactgtctc

SEQ ID NO: 267723 - DNA, 430 bp, Glycine max
ttcttctcttaaaagagcctttgctttttctttaggcctttccgaattaagtacttgtttcattttctctcgaagcaagaaaaatgttcatcgagagtttcaaggttgagagtcctaacgtgaagtacacagagactgagattcagtccgtgtacaactatgaaaccactgaacttgttcacgagaacaagaatggcacttatcagtgggttgtcaagcccaaaactgtcaaatatgaatttaaaaccaacacccatgtccctaaactaggggtaatgcttgtggggtggggtggaaacaatggctcaaccctcaccggtggtgttattgctaaccgagagggtatttcatgggcaacaaaggacaagattcaacatgccaattactttgggtcgctgacccaggcatcagctattagagttgggtcttt

SEQ ID NO: 267724 - DNA, 253 bp, Glycine max
  unsure (1)..(253): unsure at all n locations
cccacgcgtncgcccacgcgtccgaaatttctcagtcttcggaactcgtttctaccttcactgggcacatctcgaaccctctctttccggcaactaggttaaagttcatcaatggcaggtcgtggcaaaaccctaggatccagcgccgccaagaatgccacctcaaggagcagcaaagccggcctccaattccccgtcggccgtatcgcccgtttcctcaaagccggaaaatacgccgagcgcgtcggcgccg

SEQ ID NO: 267725 - DNA, 434 bp, Glycine max
tcaagaatgagggtattttgattgcaaaacttcagcatcggaaccttgttagactcacgggcgtattgcattgaaggagatgaaaaaatcctactttatgaatacatgccaaacaagagcttggactcatttatatttgacccgacacgaacttcactactggattggccaatacgatttgagataatcgtatgcattgcgcgaggcatgttgtatcttcaccaacactccacattgagagtgattcatagagacctgaaaaccagctacattcttctagatgaggagatgaatccaaagatatgagactttggtctggccaaaatatttgggggaaaagaaactgaagcatgtacagggagagtaatgggaacctttggatacatgggtccagagtatgccttggacagattcttttcaaccaaatacgacgc

SEQ ID NO: 267726 - DNA, 375 bp, Glycine max
  unsure (1)..(375): unsure at all n locations
gcctcgcatagcgtgttttggcacgaaggtggtatggccaaatacgtttacgctgctgagcgtggctccttatctgggaaggactaccaagaccctncaccatcacacactcattgatgctgaggagctcacacacgcgtccttttacaggactctcattgctgaattcattgccactctgctcttcctctacatgactgtgctcacagtcatagggtacaatcaccagactgacctcaaggaaaatggcgaaatctgtggtggtgttggcactcttggcattgcatgtgccattggtggcacgatcttcatacttgcctactgcactgctgggatttcagggggtcacatcaacccagcggtgacatttgagct

SEQ ID NO: 267727 - DNA, 341 bp, Glycine max
cccacgcgtccgttgatcgagagcggacgtacctttatatatatgctttttcctcaatgaggtgtgcttcatgatccatattgtccttgaaagatgatggaactgagacaccattggccactgagttaattaagccacatcctcaaggagaagaatatagtcctgttagcgaagccttcatgcctgccagcgaatgactggaagctcatatttggctactgacaaaggcttatgttctcgagaatgatgcatgcatccatgctattattagccatttggtaagaactcatgcaattgttgagccattcgtcatatcaacaaacaggcatcttagtgtggtt

SEQ ID NO: 267728 - DNA, 370 bp, Glycine max
ctttatcgcatgtgatgtaatctagcctgaaaataaatgtaactcttgtaataaaaaagagaaaaaaaaaaaaaaaaaaaaaaaaaaaaaaaaaaaaaaaaaaaaaaaaaaaaaaaaaaaaaaaaaaaaaaaaaaaaaaaaaaaaaaaaaaaaaaaaaaaaaaaaaaaaaaaaaaaaaaaaaaaaaaaaaaaaaaaaaaaagggggggggccttttaaaaaaaacaaagtttccccggcgggaaaaaaaaaaataaagtccttaaaaaagggcccaaaaagaaaaattgggggggccctaaaaaaaacggttgggggggaaaaacccttgtttaccccaattataacgccgaataaacaaaccccttttt

SEQ ID NO: 267729 - DNA, 443 bp, Glycine max
ccggttggattacgggccgacccagcgtccgtgacttgttggaatggtcaaagcaagattagaacgaatgcttatgtcgctaccggttggtgaccttgatcgcaccatcaaattttcacagaatgtttaggaatgaagcttttgaggcaaagagatatcccagaggagaaatatgctaatgcttttcttggatttggccctgaagaatcccattttgttgttgaattaacatataattatggggttacctcgtatgacattggcgatggctttggacattttgcaattgcaactcaggacatttataaattggttgagcacatcagggccaagggtggaaacatcacaagggaacctggtccagttcaaggtggaactactgttatcgcctttgttaaggatcctgatggttatacttttggacttatccaaagacctacagt

SEQ ID NO: 267730 - DNA, 431 bp, Glycine max
gatattttaggagctcagacggtatttttttaagaagactgtaagaagagaattttaatttctcactttttagaaagaaattgaaattccagatttttagttgtttaaaattctgttttaaaattccaaattttaaattttttataaaaagcatccaaacaataaattctaaattacagaaatttaaattctctgataaattactttcctcaattaaaattctctatccaaacgcactattaatgaaattgtgatgcaatatataccattaggagcaattgaaaattagttcttaccttaatgtggtgcaggtccgtggcctgccctgtgctcacaattttcatgttgaatgcattgatgagtggcttcggcttaatgtgaattgtcctcggtgccgttgctcagtatttcctaaccttgatcttagtgct

SEQ ID NO: 267731 - DNA, 472 bp, Glycine max
  unsure (1)..(472): unsure at all n locations
ggcaaagcaattcttacctcaatgggcaaagtctctcttttcaggtcactacaagtgatggcgggactctcactagcaacaacattgtgcctgctaactggcaatttggacaaacatttgaaggggcacagttctaggaaccataataatttttaagttcacattttgtgtgtaatatatgatggcattgttcacttgtttttgttatagatggaaagggtggggaaagaagaagaaaaggtagattaggaggagtttcaggccaacatggcccctaatgctgtggtggctatatggcacccgctaggactaatataatataacgtctttaattttatatctgtcacattgatcgatgccttttgatgaactaaaaggtgttgatgatctcaattgccttgtatttntatcccccaaatggtacaaaaaccaatttggggggccattgatatcaacttgaatatgctttctg

SEQ ID NO: 267732 - DNA, 431 bp, Glycine max
gaagctattgatcttgcatcccggcttttgcaatactccccaagtctccggtgcactgcgcgggaagcatgtgcacatcctttctttgatgaacttcgtgaacctaatgctcgcttgccaaatggtcgtccatttccccctctatttaacttcaaacaggaattatctggagcatcttccgagcttgttaataagttgatacctgaccatgtgaagcggcaaatggggatacagtttatgcatctgggaggatcgtgacgataaagcttaagggacatagtgtatactagctgataagttaaaaaaaagtggcaccattattttttgtcttaataccatgttctgtgacctggcgaatgtagtttcaagctgaaccgagactgagattcgcgatgccggatggcccgcagtgatccgtcagtatatgtacc

SEQ ID NO: 267733 - DNA, 407 bp, Glycine max
  unsure (1)..(407): unsure at all n locations
cccacgcgtncgctcaaaaccctgccgtcagtcaccgtcttctctgccgccatgaagctcgggggtttctgatgaagctgaacaacgaaaccgtatcaatcgagctcaagaacggcacagttgttcacggcaccattacaggtgttgatatcagtatgaatacacatttgaaaacagttaaactaactctgaaagggaaaaacccagttactttggatcatctcagtgtgagaggcaacaacattcgatattatatccttcctgacagcttgaatcttgagactttactggttgaagaggctcctaagatcaagcctaagaagccaactgctgggaagcctttggggagagggcggggactaagacgtgggcgtggcccgggtcgtggtcgttaagatgcacatcac

SEQ ID NO: 267734 - DNA, 292 bp, Glycine max
  unsure (1)..(292): unsure at all n locations
tccacgcgtncgctcacacgtacggccacgcgtacggataaagcccgtggaacagatgacgtagaagctgacgcgagccctgcttttgagctccttacttcagtaaaaagtctggtgcgccctgatttccacgtctaggccctaaattggggggctcgcgaagggggtgcttatactgcagaagctattgctgaaatgcttggtaattcgggaacaccgtgcgttatgagaggtcactctgaactgatgcagctgttgaatgtatcaaatgagcctgtgggagataaacatg

SEQ ID NO: 267735 - DNA, 380 bp, Glycine max
cccacgcgtacgcccacgcgtccgctcaagtctctcgaagcctctttctctctcttctagaagctatctgtgtttggggttactaaatctccaacaagcaaaatacatggttgatttggaaatccaagtccccaacccattccaaccggttggcgaaggcaaagaaatcggttccccccggggcaaagagtatgtgcttattcgaattcagcagaggaatgggaagaagagtctgaccacagtgcaagggctgaagaatgagttcagctacgagaagatcctcaaggacctcaagaaggagttctgctgcaacggaaccgtggtgcatgacaaggagcttggcaagatcatccaactccaaggcgaccagcgtaagaacg

SEQ ID NO: 267736 - DNA, 429 bp, Glycine max
cagaaacaaaagtggcagtattaggtggcatcaccgaagtgcagggagctgccaacagcgtcgagatcaacaatctcgctcgctttgctgtagaggaacaaaacaaaagagagaattcagttctggagtttgtgagggtgattagtgcacagcagcaagtggtttctggagtgaattactacataacattggaagcaaaagatggtgagattaaaaatgagtataaagcgaaggtttgggagagggaatcccaagagttgctagaattcatgccaacattaggtgcatgaggcgagatcgaccatctcgctcgctttgctgtagaggaacaaaacaaaagagagaatgcaaatctggagtttgtgggggtgattagggcaaagcagcaagtggtggaagggttcatatactacatcactttggaagcaa

SEQ ID NO: 267737 - DNA, 403 bp, Glycine max
cccacgcgtccgtgagaaaggtaaaggtcctttttgttccggtgcgctgctcgaaaatccggtggatgatgtcaattgttccaatcaaccaaagtcacccccaggactctcgggatcaattcatcgattttcctctccctccttccatctacagcttcttccccggcttcgaattcacattccgctcatcggtggataacacacgtgtgtactggagggagactcccatagcccacgtgtggaaggtcgtgcttcctggcttcacaaacgacgacgtgctggttgagctacaagaccagagcgtgctccatgtcatcgtggagagtggcaacttcctgacgaggtttaagatccattacaacggtcaccttgaacaactcacaaccaacatgcgtcacgggat

SEQ ID NO: 267738 - DNA, 475 bp, Glycine max
gtttggcagcaaattatggattcccatgatgaggagcatgctgccaaactacttagagctcaaacccacatatggaatcacatatttagcttcataaactccatgtcccttaaatgtgtggttgacttaggcataccagatatcatacacaactatggccaacccatgccactctcaaacctcattgcttcactaccaatccacccatccaaaacttgctttgtccatcgcttgatgcgaatcatgatccattctggcttcttctctcaacaaaatcatgacatggagaatcagctagatgccaagtatgtgcttaccgatgcatctgtactattgcttaagaaccatccgatgagtgtgacacctttcttgcatgccatgcttgatccaattttgacaaatccatggaatcaattttctacttggttcaaaaatggtgacactacaccatttgaaacggcacatgggatgatgc

SEQ ID NO: 267739 - DNA, 242 bp, Glycine max
cccacgcgtccggcgagagagagagagagattggcatcacttggtggcaatcgtgatgtgggaggaagccagaacagccttgagatcgatggtttagctcgctttgctgttgaagaacacaacaaaaaacagaatgcccttttggagtttgaaaaggtagtaagtgcaaaacagcaagtggtttctggtaccttgtacaccatcactttggaggcaaaagattgttggcaaaagaacgttta

SEQ ID NO: 267740 - DNA, 418 bp, Glycine max
  unsure (1)..(418): unsure at all n locations
acacattgccacttcttaattttcttattttctatggcttccaacaaactccttgccaccggtttggtgctttctctcctcttttactcaacattcactcatgccaattgcccaccacccactccaactccatctccatctccgaagcccacaccacccacaccaccaactccaaaaccaacaccttccactccaaagcccacgccaccaactccaaaaccaacaccacccacacccacacccacacccacaccacccacaccacccacacccaaggctggttgtcctccaccttctcctccttcgccacccaaagcttcatgccccaaggacacattaaagctaggtgtttgtgctgacatcttangacttgttaacgttactgttggaactcctccttcgagcgaatgctgtgcat

SEQ ID NO: 267741 - DNA, 422 bp, Glycine max
ggaggaaacaatcgtgcacatggtttctttaagcaacatggttggactgatggtggtaagggagaggctaaatacacatctagagctgcagatttgtataggcaaattctttcaaaggaagtagcaaaaagtatggctgaggatggaggcttgccttcatcacctgttgcttctcagtctgcccagggggttaatgggcttccagaagtcaagaccaatgaagtgccaaaagaaaacactctggagaagccagaaaagcctgagagcacttcttcacctagagcttcacattcagtaatttcaggtactgttaagaaacctatcggtgctaaaaaagcagtgaagagtggggggcttggtgctcgtaaactcactaaaaagccaagtgagtctctctatgagcagaagcctgaggaaccccc

SEQ ID NO: 267742 - DNA, 432 bp, Glycine max
cttaaaaggatcatgtctttgccagatgatacaagtatttactgtggtcatgaatataccttgaacaattcaaagtttgccttgtctatagaacctgaaaacaaggaacttcaatcctatgctacccatgtatctaaccttagaaataaaggcttgcccacgattccaactacgctgaaagtggaaaaggcttgcaatccattccttcgcacatggagcatagaaatccggcaaaaactaaatattgcagccacggcagatgatgcagaagccctgggtgttatccggcaagcaaaggataatttttagaattttttaattaaaatttaaaattctaaagatacttattctgtatagattaggttaatgaatccatcaaatggaataatatttacttggtgatatcgtaatataatttttcaattttctttg

SEQ ID NO: 267743 - DNA, 428 bp, Glycine max
cccacgcgtccggcagactagtatccgatcctctgtcctctcgaagctttcatcgttcaacagattctcaccatctcagtcatgggcctgctatcttgttttaggtctaccgtcctgagaaaatgttccaaaggaagctctggcatgtcaagattcctgtatacgaacaattttcaacgaaacttgatttcgtctggtggcaatgaatcgtattatgggtattttaacaggagatcatacacttcactttatatgggaactggaactgtgggtgggattacaagtgctagaatcagggtgccaaatgtaggatgtgaaggattcatgtgctcaagtcatctgtcaatcactcaaagaaattcaagattgatccattctactagcaagattgttccaaattctgaaattcagaatataactactgagat

SEQ ID NO: 267744 - DNA, 448 bp, Glycine max
cagaagaacaagtagttgagaactaagaaggagaagcaaatggcttcctcaatgatctcttgcccagctgttaccactgtcaaccgtgccggtgccggcatggttgctccattcactggcctcaagtccatggctggcttccccaccaggaagaccaacaatgacattacctccattgctagcaacggtggaagagtgcaatgcatgcaggtgtggccaccagttggcaagaagaagtttgagactctttcctacctgccagaccttgatgatgcacaattggcaaaggaagtagaataccttcttaggaagggatggattccttgcttggaattcgagttggagcacggtttcgtgtaccgtgagcacaacaggtcaccaggatactacgatggacgctactggaccatgtggaagctgcctatgtttggttgcactgatgcttctc

SEQ ID NO: 267745 - DNA, 379 bp, Glycine max
attaccggcggtcgcacgcgtccggttttttcaaaattcttacagccttttctttttctgcccccaacgttgtgccattgtcagccacattgagtggctcccatattaccatctttcccaccaaattgaaagcccctctctcctcacctctttactctccgattatggttgcaaccgtggagcccgacacttcaactgtctactacaactctgccttctcagtgtttcctgcataagcatgctaaactgtattatgagaagcctgcattgcttatatgtaccctgaaacgaaactacatccataggctaatactccacgaatcgttacagataacgttgaaagagagtatcttgaatacgatcatcctaaaaccgtatt

SEQ ID NO: 267746 - DNA, 402 bp, Glycine max
cccacgcgtccgatggcttccgaaaggcaagcgttaatgcttattctcttaacaacattcgtcgtcaccataaagccttcacaggccagtactactggtggcataacaatctactggggccaaaacattgacgacggcaccttgacttgcacatgcgacactggaaacttctagatcgtcaacctagctttcctcaatgcgtttggttgcggcataactccatcatggaacttcgctggccactgtggggactggaacccttgttccatactagaaccccaaatacaatactgccagcataaaggtgtgaaagccttcctttacctcggtggtgctaaaggaacctactacctctgctcacccgaggacgcaaaagatgttgccaattacctctatcaaaac

SEQ ID NO: 267747 - DNA, 430 bp, Glycine max
gttctttcaaaatgcaaacagccttaaccttcgctgcccccaacgttgtgccattggcacccacaaagagtgtctcccatattaccatctttcccaccaaattgaaagccccgcgctcctcacctcgttactctccgattagggttgcaaccgtggagcccgacacttcaactgtcgactacaactctgcgttctcagtgtttcctgcagaagcatgcgaaactgtaggaggggaagcctgcatggcggagatgtaccctgaaacgaagctacagccagaggctaagactccacgagtcgttacagagaacgttgagagagagtatcttgaatacgatgatcctaaaacggtatttcgaggagaggcttgtgatgatcttggaggaactttctgtgagaccgagtatcagagggtgtctactagagaaat

SEQ ID NO: 267748 - DNA, 425 bp, Glycine max
gttaagggagcgtccattaaggtcattagtgacgccaccgcctcctttcccgccaagtggatccctgaaattttattgttggctgcctctaaatgaatgaggtatgacatgaagggtgaacacgtatctcacaagtgttatgtgatatgtatgatgtgtgaatcttgaaataatatcttaagggcaagaagttattagttaaaattattagaggtagttttatgaatgggtcataataataaatgctagctatatgtaccactatggaataagattgggtcataataataaagctagcttgctagctatatgtactatacgtaactatggaataagacccatactagtgctataggggcttgctatatgtatgtgtttcatctgcaaattaagagctgagacgcttgccatgcaaggcagacaac

SEQ ID NO: 267749 - DNA, 389 bp, Glycine max
aataaaaaaacatacattaaagaaattattttaaaaaaccaaataaaaaaaaaaaaaaggggggacataaaataaaattagaaaggatgcctctaaatgaaatgaaagtatgacatgaaaggtcgtacacgtatctcacaagtgttatgtgatatgtatgatgtgtgaatcttgaaataatatcttaagggcacgaagttattagttaaaattattagaggtagctttatgaatgggtcataataataaatgctagctatatgtaccactatggaataagattgggtcataataataaagctagcttgctagctatatgtactatacgttactatggaataagacccatactagtgctataggggcttgctatatgcatgtgtttcatc

SEQ ID NO: 267750 - DNA, 419 bp, Glycine max
cccacgcgtccggaccaaggtagttcaattgccatggatattggtggtggagtggaagagccagtgagagagttgaggcaatacttcaaaactggaaaaaccaagagtgtaacatggaggaaaaaccagctcacatctctcatagaccttgttcatgagaatgaagatgctatatttaaggccctccataaagatcttgggaagcaccctgttgaggcttaccgtgatgaggttggaggggtagaaaaatcagccagcaaagctttgagctgcgttgagaaatggatggcccctaaaaagagtgatatcccttttcttttcttcccagctaaaggagaagtgttgtcagaaccacttggtgtggttctcataatttcttcttggaacttcccaatcatactggcattggatccaataat

SEQ ID NO: 267751 - DNA, 421 bp, Glycine max
gaagctattgatcttgcatcccggcttttgcaatactccccaagtctccggtgcactgcgcttgaagcatgtgcacatcctttctttgatgaacttcgtgaacctaatgctcgcttgccaaatggtcgtccatttccccctctatttaacttcaaacaggaattatctggagcatcttccgagcttgttaataagttgatacctgaccatgtgaagcggcaaatggggatacagtttatgcatctgggaggatcgtgacgataaagcttaggggacatagtgtatactagctgataagttaaaaaaaagtggcaccattattttttgtcttaataccatgttctgtgacctggcgaatgtagtttcaagctgaaccgagactgagattcgcgatgccggatggccgcagttgatccgtcag

SEQ ID NO: 267752 - DNA, 395 bp, Glycine max
cccacgcgagataactggaaacagtgggatgaaaatgaaggtccttgttttcttcgttgctacaattttggtagcatggcaatgccatgcgtacgatatgttccctctccgaatgaacactggctatggtgcccgtactccggaagtgaaatgcgcaagttggaagcttgctgtggaagcacacaacatctttggctttgagaccattcctgaagagtgcgttgaagcaacaaaggaatacatccatggcgaacaatatagatcagactcaaaacagttaaccaacaagcttacttttatgccagagacctcgaagtccatcccaaggacacatttgtgttcagtatagatggcaccgtactctctaatattccatactacaaaaaacatggata

SEQ ID NO: 267753 - DNA, 392 bp, Glycine max
caagcattgcatccctcttgatttgtagtttgttctgagctttacataaaagttctgccagatcaagaggggttctaagatcatagtgtgtgttttgcaacaatggctaagttctttgctgctatgatcttggcactctttgccatttccatacttcaaacagcggtaatggctgctaatgaacaaggaggccacttgtatgacaacaagagcaaatatggcagtggaagtgtcaagagttaccaatgcccatcacaatgctcgaggagatgtagccagacccaataccacaagccctgcatgtttttctgtcataagtgctgcaagaaatgcctgtgtgtgcccccggggtattatgggaataaagctgtgtgcccttgctacaacaactg

SEQ ID NO: 267754 - DNA, 388 bp, Glycine max
cccacgcgtccgctccaccagatcaacaacagcaccaccctcgtctcctccatgttccaggccaccggctccgcctccggcaccgccggctacgtcaacatcaccaacctcaaggccggcaaggtcggcttcgccgccgaagacaacgacggctccctccactccttctacgtcaaatccgtcaaggaaatgccctactacatctccgtcctccaaatcagcgccgccattagctccgccgacgccgaggcacccaccgccgccccctccgccatcgacctgatctccattatgtccaaacaaggctgcaaggccttcgcggaccttctaagaggctccaaggcccttccatctttcaaggaaaacgttgacggcggcttaacggttt

SEQ ID NO: 267755 - DNA, 452 bp, Glycine max
cccacgcgtccgaccaccttccctctcttctgttaccaatggctccctcatcaaactacatgtctttgcttttcctcaccacccttttgtttgctcttcaaatcagtgcaagagacagccagttcttcagcaaagtcacccattttgacaaaaacagtgtcaaagagacagaacttcccaacaaagaagcaccagaagtgaacaagccagagcaacaaccacctttcattccggagactgaaaacagctatggcctatatggtcatcatgatgagtataaccaagtcccttccaccaccaccaaccccactttttaccacccctacaagaccgagtttgagaactccaacaacaagtattacaacaatgatgcctattacacaaggttctccgaaaccggttacaacaacaacaaggattcttatgagggttaccaatatgagttaagtgac

SEQ ID NO: 267756 - DNA, 243 bp, Glycine max
cccacgcgtccgcccacgcgtccgggcaattggaaaaattgacaaaaaaaaaaagaaaaaagaaaaaaaaaaaaaaaaaaaaaaaaaaaaaaaaaaaaaaaaaaaaaaaaaaaaaaaaaaaaaaaaaaaaaaaaaaaaaaaaaaaaaaaaataaaaaaataaaaaataaaaaaaaaaaaaaaaaaaaaaaaaaaacaacaatgaaaaaaaaaaaaaaaaaaaaaagaaaggtacatataaaat

SEQ ID NO: 267757 - DNA, 447 bp, Glycine max
cagagggttatcaaaatgatcttgccaacccatcactttctataacatccggatgtgcctgtggataaccagcgactgtaatgccaaagtagtcaccatatttagctctgatatgttgcaccaagtcgcgtgcacaggcaaagccgccttcgacctggacgaatttgtcctgaccatgcggtggatcacctcgaagtgcaagcacggggcgatgatgatatcagggcagaaggcggctcatttggcgttgaaggcgttggggaggaacaatgcaattgatggaacgtgtggagttggaagggaagaaccccagcttattttcgcttctgcagacactgaggaaattgttgatgcttaaacttactttcaaattagctagatatatagcttttcttttcttttctttctgtttggtccctacttaattatgattttaattttggaata

SEQ ID NO: 267758 - DNA, 433 bp, Glycine max
gttgagaactaagtttgagaagcaaatggcttcctcaatgatctcttccccagctgttaccactgtcaaccgtgccggtgccggcatggttgctccattcactggcctcaagtccatggctggcttccccaccaggaagaccaacaatgacattacctccattgctagcaacggtggaagagtgcaatgcatgcaggtgtggccaccagttggcaagaagaagtttgagactctttcctacctgccagaccttgatgatgcacaattggcaaaggaagtagaataccttcttaggaagggatggattccttgcttggaattcgagttggagcacggtttcgtgtaccgtgagcacaacaggtcaccaggatactacgatggacgctactggaccatgtggaagctgcctatgtttggttgcactgatgcttct

SEQ ID NO: 267759 - DNA, 454 bp, Glycine max
gtcccttcctaaataaccctcaaacaaaagccaccttaacatctcttctctgaaaattctctttagagagatagagagatagagagagagagagaaagaaattaagaaaaaatggcagcctgcactgtctactcaacacaatctctgagcacaaattgctccatctcaaccccatcaaagacacagctgagtttcttccaccaaaagcaggtagttttctggaggaacagcaacaggggcaacagcagcagcagaagaagctatgtgataacatgtgcagcaggtgactcacagacagtggtgattggtcttgctgcagactcagggtgtgggaagagcaccttcatgaggaggctgacaagtgtgtttggaggagcagcagagccaccgaagggtggcaaccctgactcaaacacactcatcagtgacaccaccactgtcatatgcttggatg

SEQ ID NO: 267760 - DNA, 451 bp, Glycine max
gccatggcaactctaaccccaatgtgttgctcatgttcaacacccagattcagtggtcaagaccatgagcatggctatcaactaaaactaaaaccctcagttttgaatttcagacctcagaagcaaaatagaagcatcagaatccgatcaccctctgcctccaacccgaaccagaatgagtcttcttctcccggattatactctgccaagaaattcgacctcaccgcattcaacgtcgacctcgttctcgacgatgttcgcccttacctcatcgccgacggcggcaacgtggacgtggtgtccgtggaagacggcgtggtatctctccgtctcgaaggagcatgcgagagctgccccagctccaccaccaccatgaccatggggatcgagcgcgttcttaaggaaaaattcggagacgctgttaaggacatacgccaagtctaccttaccg

SEQ ID NO: 267761 - DNA, 419 bp, Glycine max
catagatattccgttttgcgtttctctgcctaaaaggattgaaagatgggtcaagcactaggttgctatcaagttgatcagtcaaatgtggctatcaaggagcattttggaaaatttgatgatgtcctagaacctggatgtcattgcctgccttggtgtcttgggtaccagattgctggtagtttgtcactgcgtgtgcagcaacttgatgttcgatgtgagacgaaaaccaaggacaatgtctttgtcactgtggttgcatctgtgcaataccgagctgtgtctgagaaagcatctgatgcattctataggcttaccaacacaagggagcagatccaatcatatgtttttgatgtcatcagggccagtgtaccaaagttggagttggattctgtctttgagcagaagaatgatatagc

SEQ ID NO: 267762 - DNA, 419 bp, Glycine max
cccacgcgtccgaaatggcttcctcaatgatctcttccccagctgttaccactgtcaaccgggccggtgccggcatggttgctccattcactggcctcaagtccatggctggcttccccaccagaaagaccaacaatgacattacctccattgctagcaacggtggaagagtgcaatgcatgcaggtgtggccaccagttggcaagaagaagtttgagactctttcctacctgccagaccttgatgatgcacaattggcaaaggaagtagaataccttcttaggaagggatggattccttgcttggaattcgagttggagcacggtttcgtgtaccgtgagcacaacatgtcaccaggatactacgatggacgctactggaccatgtggaagctgcctatgtttggttgcactgatgct

SEQ ID NO: 267763 - DNA, 275 bp, Glycine max
cccacgcgttcggaccaatggagcgatctcctcggaggccacagaggcgaaagcaggacctgtaagcttcctaatcgcctgtactacattcagtagttccttcacctctcaacaatctagcttgctcctatctatctatatgtaataagatgcgttcaaataggggcactagcttcactttatgttgcttcagctgtgtgtcaacaagtcatgtaagagacttcactatgttagtttctctttcgtggctttaataaattatgcgcccttgttcc

SEQ ID NO: 267764 - DNA, 398 bp, Glycine max
atggagtcctcaaagatctatgcttacctcttcctttgcatgctcttcctctgcttcgtcgctcccattctcgggtgtggctactgtggcaaaccccccataaagcacaagcctggtaaaacaccaaagacacccacagtacccgttgttaagccaccagtcacaatccctcccattgttaagccaccagtcacaatccctcccattgttaatccaccagtcacaatccctcccattgttaatccaccagtcacaatccctcccattgttaatccaccagtgacagttccacccgttgtgcttccaccaatagtgaagcccccgggttttctccctccaattcttaacccaccaagtacaccaacaccgtcgccggggaagggagggaacactccatg

SEQ ID NO: 267765 - DNA, 278 bp, Glycine max
cccacgcgtccgcccacgcgtccgaaatttgatcaatgtataattcgattctttaaaaaagaaaaaagaaaaaaaaaaaaaaaaaaaaaaaaaaaaaaaaaaaaaaaaaaaaaaaaaaaaaaaaaaaaaaaaaaaaaaaaaaggaaaaccaaactaaaagaaccaaggcttacttcctctatgcataccaagttataattctcttatagggtaaccaaaatttaattcattggccaaccttttacaaaatcccaactggtaaaaccacagcgataccc

SEQ ID NO: 267766 - DNA, 451 bp, Glycine max
cccacgcgtccgcccacgcgtccgattaaatcttaaagcagtaagtcatcatggataaatgagagcggactcaacagcagcagcagcaacaacagcatgtgatgggagttgccgcaggggctagccaaatggcctattcttctcactacccgactgcttccatggtggcttctggcacgcccgctgtaactgctccttccccaactcaggctccagctgccttctctagttctgctcaccagcttgcataccagcaagcacagcatttccaccaccaacagcagcaacaccaacaacagcagcttcaaatgttctggtcaaaccaaatgcaagaaattgagcaaacaattgactttaaaaaccatagccttcctcttgctcggataaaaaagataatgaaagctgatgaagatgtccggatgatttcagcagaagctccggtcatatttgc

SEQ ID NO: 267767 - DNA, 444 bp, Glycine max
cccacgcgtccgcccacgcgtccgcccacgcgtccgctcaggcaagccttctccttcaagagcagctgaaagatctttgcaaaaaccccgtcgacggcttctctgccggtttggtcgatgaaaccaacattttcgaatggagtgtcaccataattggaccgcccgatactctttacgaggggggatttttcaatgctattatgagtttcccatccaattacccaaatagtccaccttcagttaagttcacttcagagatatggcatcccaatgtatatcccgatggccgggtttgcatatcaattcttcatcctcctggtgaggatccaaatggttacgagcttgcgagtgagcgctggacacctgttcatacggtagagagtatagtattgagtatcatatcgatgctttccagccctaatgatgaatctcctgcaaatgttg

SEQ ID NO: 267768 - DNA, 425 bp, Glycine max
actcggtcttgaattcccggacccacgcatccgtaattttttataaaaaaaaaataaaaaaaaaaaattaaaaaaaaaaaaaaaaaaaaaaaagaaaagaaaaaataaaaaaaaaaaaaaaaaaaaaaaaaaaaaaaaaaaaaaaaaaaaaaaaaaaaaaaaaaaaaaaataaaaggggggccctttttaaagattcaaaatttacaactcagtctatcaaattctaaatatcttttaagaataccaaaattttaataactttgccatccttttaaaaaattttaacttggaaaacacttgtgtaatcaaaattaattgcctttaaataaaaaccttttttcgcaagatgcttatatcttaaaaagtccttatcgtatggcctttataaaaattgactcaatttaaactgtaaaggataccccct

SEQ ID NO: 267769 - DNA, 443 bp, Glycine max
cccacgcgtccgcactaggcactctctattcccattcattgcagaagaagatggaggctcggctcctacgtcccacgcgatttgcacttacccggctacgctccctgcttcctttccatgtccaacattctttccgtcttcgcctcctcctcattgctcatcgtcactctcgtctggatcttctctggacgctttaagaaaaccaaagttgatagagtgctgatgtgctggtgggccttcacaggtctcacacacattattcttgagggttattttgttttctctcctgagtttttcaaggataaaactggcttctacctggctgaagtttggaaggaatatagcaaaggggattcaaggtatgcaggaagggatgcaggggtagttactgttgaaggaataacagcggttttggagggtccagctagccttctagcagtata

SEQ ID NO: 267770 - DNA, 351 bp, Glycine max
  unsure (1)..(351): unsure at all n locations
gtgccggcatgggtgctccattcactggcctcaagtccatggctggcttccccaccaggaagaccaacaatgacattacctncattgctagcaacggtggaagagtgcaatgcatgcatgtgtggccaccagttggcaagaagaagtttgagactctntcctacctgccagaccttgatgatgcacaattggcaaaggaagtagaataccttcttaggaagggatggattccttgcttggaattcgagttggagcacggtttcgtgtaccgtgagcacaacaggtcaccaggatactacgatggacgctactggaccatgtggaagctgcctatgtttggttgcactgatg

SEQ ID NO: 267771 - DNA, 414 bp, Glycine max
cccaagccctatacaaccaaaccctatcactcacccatttgattcagtttccatggctagcgctaaggttgcatttgtggctgcagtgctctgcatggttgtggtgagtgcacccatggcacatgcagctatcacgtgcggtcaggtgacgagtagcctggccaattgcatcggttacctccagaagggaggaacgccgtcgtcgggatgctgcaacggagtgaagagcctcaatgccgacgtcaagaccaccgtcgaccgtcagactgcgtgctactgcctcaagtcggccgtcagccaaatctccggcttcaacgccaacaacgccgtctagctccccggcaaatgcggagtctccatcccctacaagatcagcaccttcaccaactgcgctaccatcaaggtctgaagaga

SEQ ID NO: 267772 - DNA, 447 bp, Glycine max
ctttgcttcaacgtttccatcatacacagatcccaatcctctctcaagccctaatttcccctgattgggatggccacagaagagcccactgtcgcggtggaacccgctcccgaacctgcctccgccgatcctcccccggaggagaaggaggagaccaaacctgaagccaaggctaagaaaaccaaggagcccaaacctaaaaaggtttccagacctcgcaaccctgccactcatccttcctacgaagagatggttaaagatgcaattacctcgctgaaggagaaaaccggttcgagccaatacgcgattgcgaagttcatcgaggagaagcacaagcagctttcaccgaacttcaagaagcttcttctctaccatttgaagaagctcgtcgccgccggaaaactcgtcaaagtcaaaggctcgttcaagctcccacctaccagacct

SEQ ID NO: 267773 - DNA, 446 bp, Glycine max
gtttacttccatggcggcgccttcataatctaaacaccgttttctccgaactaccacaacgtcctcgacaacattgtttcaaaggctaatgtgattggtgtttccgtacactacaggagggcaccggagcacccggttcccgtcgcccacgaagattcgtggagtgccctcaaatgggtcgcttctcacgtgggcgaaaacggtgttgaagagtggctgaagaaccatgcagattttgaaaaagtgttcttcgccggcgacagcgccggcgccaacattgcgagctatttgggcattcgggtcgggttagaagggttacccgggttgaagctcgaaggggttgttttggtgcatccttatttctggggtacggagccgctcgagtgtgacgtggagcatgctgaaggcgctgccaaggtgcaccagctgtggcggtttacgtgccc

SEQ ID NO: 267774 - DNA, 450 bp, Glycine max
cccacgcgtccgcccacgcgttcgaaagaattataaatagaaaaaggagcatgttgattatgtataaggtaaagggcaacaatcatttttgtttaccatgggtaaggacaccatcgctgacataataacctatataagaaatgctgacatgaataaaaaaggaatggttcaaataccatttactaacataacagaaaacattgtaaaaatacttttacgcgagggttttgttgaaaacgtcagaaaacatagagaaaacgacaaatattttttagttttaactctacggtatagaagaaatagaaaaggatcatataaaagttttttaaatttaaaacggatcagtacacccggtctacgaatatattctaattatcaacgaatccctcgaattttacggggcatggggattgtaattctttcaacttctagaggtataatgacagatcg

SEQ ID NO: 267775 - DNA, 382 bp, Glycine max
ggaccagaatgggttcatttctgctgctgagctccgccatgtgatgaccaaccttggggggaagctcactgatgaagaggttgatgagatgattcgagaggctgatgtcgatggcgacggccaaataaactacgaggagtttgttaaggtcatgatggccaagtgatggtagtacaccatctacactaaattctgaactgatggaaaaaaatgacaaggttgaacttgtggtatagtacacctagtccttgcctaatgtcattactgtcttatttctagatttttatttgatgtttttgaattcaatctaaacgacatttactggaaagctctgctgctaatggtaattgtggtggaatggtgtctttctaaaaaaccagat

SEQ ID NO: 267776 - DNA, 442 bp, Glycine max
cccacgcgtccgcccacgcgtccttaaagaggcagatagaaaaaaagagcgactgtttgagtgtaaaagatgactaacttcccattgatcaacttggagaagctcagtggtgaggaaagaaacgataccatggaaaaaattaaagatgcttgtgaaaactggggattctttgagctggtgaatcatggcattcctcatgacatattggacactgtggagaggttgaccaaagagcactacaggaaatgcatggaatagaggttcaaggaattagtggcaagcaaaggattagatgctgtccaaactgatgtcaaggatattgactgggagagcaccttccacttgcgtcacctgcctgaatcaaacatctcatagatccctgatctcattgatgagtacatgaaggtgatgaaggattatgctctgaggttagagaaactag

SEQ ID NO: 267777 - DNA, 455 bp, Glycine max
atctgaagcaataggagataccactgatggcgtggcagttactcttggggttgctgcagctgctgctggacttagtctattagctttttctgagatagaatcaatcctccaggttgttggatcagctgcgctcattcagtttgcaagcaagaagcttttgtttgctgaggaccgagagcaaactgtgaaacaacttggtgagttcttgaacaccaaggttgcccccaaagaacttgttgatgaaataaaggatattggaaaggctcttctaccatcctctaccgataataaggctcttcctgctccggcagagaaaagttcagagcttgctacagctgatagcactgtacagagagcagtagctactcccgagtccaaagctgaagcagtagcaactcccgagcccaaagtggatgcagtagctcctgaagtaaactctgtgcccaaactgaagt

SEQ ID NO: 267778 - DNA, 296 bp, Glycine max
  unsure (1)..(296): unsure at all n locations
gtccgatctgaagctctatgagatacgactgagagtgngacaaaaactctttttgcggctgcaccggctgctttacatacgctattatctgaccctgagatggaatcaatcctgcatgtagcttgatcagctgcgctcattcaatttgcaagcaagaagcttttgtttgctgaggaccgagagcaaactgtgaaacaacttggcgagttcttgaacaccaacgttgcccccaaagaactggttgatgaactaaaggacattgaaaaggctcttttaccatcctctaccgataataa

SEQ ID NO: 267779 - DNA, 386 bp, Glycine max
accacgcgtacgcagagataccgctgaagttatacccctccacggctatatatggagactgagccgctatacttaagatcttggcgtcacacacactcgaatcaactctccatggaccaagatcatctacaccaatccaagctagctgccatacactatgacatgctgatgaccgagagcaaacgatgaatcaacttgaagagttcttgaacaccaacgttgcccccaaagaacttgctgatgaaataaaggatattggaaaggctcttctaccatcctctaccgataataaggctctccctgctcctgcagagaaaagttcagagcttgctacagctgatagcactgtacagagagcagtagctactcccgagtccaaagctgaa

SEQ ID NO: 267780 - DNA, 475 bp, Glycine max
  unsure (1)..(475): unsure at all n locations
tcgcccacgcgttcgctcgaatctcttatctgctttgtagattgagtcaaatcaaagtaagcgaagcccagattaagcaccaccgtttctgtcacagtcaagtgtcgtcggtattgcctcctccatctaatttgcaacaccaacagacacagtgtgatccttctcacaccgcagttcccaggaattatattggggaaaatgtatctagaaaagataagaacaaatatctttacactacgcttcttgaactcaacgacagtaaggaggctgtttatggtgctcttgatgcctgggttgcatgggagcaaaacttccccatcgcctcattgaaaacaatattgatttctcttgagaaggaccagcagtggcatanggttgtgcaggtaattaaatggatgctgagcaaaggacaggngatgacaatgggcacatatggtcaactgatacgagccttagatatggaccatagagtcga

SEQ ID NO: 267781 - DNA, 443 bp, Glycine max
cccacgcgtccgcttttgtttgttcttcagtactttagtgtgtgatttaattccaagattgtgagaatgtctagctgtgggtgtggaagtagctgcaactgtggcagcaactgcggttgcaacaagtactcttttgacttgagctatgttgagaagacaaccacagagactcttgttttgggtgttgggtctgtgaaggcccaattggagggtgctgaaatgggtgttgcagctgagaacggtggctgcaactgtggatcaagctgcacctgcgacccatgcaactgcaagtgaggtcaagatttataaccttgaagcagagataactgtaatatatgtatcaacaaataataagaattacgtgttgtgtttaataaagtgatcatggctcgaatttgcaaattcaaatgttctaggatatttgttgcgagtgtttgaagtat

SEQ ID NO: 267782 - DNA, 453 bp, Glycine max
tgaaattttgtgaacaagagaaattcgggaccagaagttcgatgagaaggaaaacattgtgttcatgacagtggtgtgttgtagccccgagaagataagagacaagctttgctacaaaggtggaggctctatcaagagcattgagatactggaactgcccaagcccaaggccgagaagcctaaagcagacccttccaaagctgagaagcccaaggccgagcccgagaaaaagaaggacggtggcggcgagaagcccaaggccgagcccgagaaaaagaaggacggtggcggcgagaaacccaaggccgagcccgagaaaaagaaggatggtggggagaagcccaaaggggatgctccgaaaaaggaagccgagaagcccaagcccgggcccgagaagcccaaggacaagcccgcgccagctcccttacccgtgcagccacatatggctgcacc

SEQ ID NO: 267783 - DNA, 451 bp, Glycine max
cccacgcgtccgcttgggagaagaggtcgagtttcacagcagcaatggtgtacgtcaagggtcagaagatcaaaagcctacttcaagagatatcaagtcaagttcaagagaagaagagagggaaaaaccgattaccgtgccaggattcggttgattaatcaggacaagaacaaatataacactccgaaataccgatttgttgttcgctttagcaacaaggacattgttgcacaaataatatctgctagcattgctggcgatattgttcttgctgcagcatatgcacatgagctgccacgatatggtcttgaagtagggcttacaaattatgctgcagcttattgcactggtctcctgttggcccgaagagtcctcaaaacacttgaaatggatgaggagtatgaaggaaatgttgaggctactggagaggattattccgtggaacctgctg

SEQ ID NO: 267784 - DNA, 444 bp, Glycine max
cccacgcgtccgcccacgcgtccgtccacgcgtccgtgttgttgtaactcgttcttcttcgtttgttgttctgtgtttgtgtttgttttttctctcacctgaaaatgtcttgctgcggtggtaactgtggttgcggaagctcctgcaagtgcggcaacggctgcggaggctgcaagatgtacccagacttgagctacactgagtcaaccaccaccgagaccttggtcatgggagtggcacctgttaaggctcaatttgagggtgctgaaatgggtgtgcccgctgagaacgatggctgcaaatgtggaccaaactgctcctgcaacccctgcacttgcaagtgaggtgttgggagagcaagcttcaagcagagatagcccttaattaggaataatgataaactattaatgtgtagctaaaaacttatgtattatgtctgtgatg

SEQ ID NO: 267785 - DNA, 408 bp, Glycine max
accaggcgtccgacctctcttccttaaagattcagatagaaaaaaagagcgactgttgaggtcaaaatatgactaactttggggtgatcaacttggagaagctcagtggtgaggaaagaaacgataccatgtaagaaattaaagatgcttgtgaaaactggtgattctttgatctggtgaatcatggcattgttcatgacatattggacactgtggagaggttgaccaaagagcactacaggaaatgcatggaacagagtgtcatggaattagtggcaagtataggtctagatgctgtccaaactgatgtcaaggatatggactgggagagcacctttcagttgcgtcacctccctgattcaaacatcttacagatccgtgatctcattgatgagtacaggaaggtga

SEQ ID NO: 267786 - DNA, 441 bp, Glycine max
cacattgcaaagaaaatacacattacattactaagtctttgttcatttgagtagtagtgatggctagcctcaaggttgcatgtgtggttgctgtgatgtgcatggttgtggtggccatgagtgctgcacccatggcacaggccgtaatcacgtgcgggcaggtcgccggcgacatgtctacgtgcttcagttatcttcgaagcggcagaaaaccgtcgcatgcctgctgcaacggagtgaagtccctcagcagcacggctaagaccaccgcggaccgacagggggcgtgcagttgcctgaaaaaccttgccaataatatgggacagagtttgaatgcctgcaacgcaacctctctccctggcaaatgtggcgtcaacatcccttacaagatcagcacctgcaccaactgcgccaccatcaagttctgaagggcaaattttc

SEQ ID NO: 267787 - DNA, 468 bp, Glycine max
  unsure (1)..(468): unsure at all n locations
tccacgcgtgcgcttcctcttcttctcaacttaaaggggttcaattctagctagttctatgacgtcgtccgcgaccatgaacatggcgatcgcgcttctgttcatggttttcgcagtttcatcagctttagacatgtcaataatatcacacgacaacgctcatgcggatagggccacgaggcgcaccgacgaggaggtgatgtcaatgttcgaggagtggctggtgaaacacgacaaggtgtacaacgcgctcggtgagaaggagaagaggtttcaaatcttcaagcacaatctgcgcattatcgatgaacgaaactctctgaaccgaacctacaagttgggactcaacgtgttcgctgatctcaccaatgcggagtacagagccatgtacctgcgaaccttggacgagggtccgagggtgggctttgatacgccgncagaaaccactacgtgccacgtgttggagat

SEQ ID NO: 267788 - DNA, 454 bp, Glycine max
gtttggaaagccaaagacaaacactgactttcttccatacaatggttatggattcaaactgtcaattccctcaaagtggaacccaagcaaagaggttgagtacccaggtcaggttcttagatatgaggacaattttgactcaaccagcaatgttgctgtcatggtcactgcaactgacaagaagtccatcactgactatggttcacctgaggagttcctatctcaggtggattacttgcttggaaaacaagccttctttggccaaactgatgctgaaggtggttttgattccaatgctgtggcaactgcaaacatcttggagagttcaacgcctgtcattgatgggaaacagtactacagtttgactgtgttgacaaggacagctgatggagatgaaggtggcaagcaccagctgattgcagcaactgtgaaagatggcatactatacatttgc

SEQ ID NO: 267789 - DNA, 455 bp, Glycine max
agagaacgaggtctgaaacttatagcactagcacgcataattgttggagctcctaaccagacgggacgtcctccctagctccgtccacgcgccgccgtacgctctgaaatcttccgtcgtctccgccatctccgctgccagcctttcgatctgtcataccaaatggccaacagagttcaaattcctaccaacaattcagccctcattgctatgattgcagatgaggatactgtagttggatttctgttggctggagtgggaaatgttgacatacgtaggaagacaaattacctcattgtggattcaaaaacaactgtcaaacaaattgaggatgcattcaaagaatttacaacaagggaggatgttgcaattgtgctgattagccaatatgttgcaaatatgataaggtttttggttgatagctataacaagcctgttcctgcaatacttgaaat

SEQ ID NO: 267790 - DNA, 450 bp, Glycine max
cccacgcgtccgcccacgcgtccgcccactcgtccgttcacgcgtccgaacaaccgcaaagacaaacgcagacccttcccttgcttcctccctccctcattcccttcttcaatttcatcaacacaaccatcaatttcatcaaccatcgcataataatagtattatcatgatagccgtggcccgaaaggacatggaccggatcaagggcccgtggagcccggaggaggacgaggcccttcagaagcttgtggagcggcacgggcccagaaactggtcgctcatcagcaggtccattccgggccggtctgggaagtcatgcatgcttcggtggtgcaaccagctgtcgccccaggtcgagcaccgggccttcacaccggaagaggacgagaccattattcgggcccatgcccggtttggtaacaagtgggccaccattgcgcgccttctctc

SEQ ID NO: 267791 - DNA, 440 bp, Glycine max
gtttgatttgttctccaagcaacgccttcctctaccttttctttgccgtttaaaccctaggagagggtttaagctcgcgccacacgaagcttctccatgatccatttggaaggcgcattctaagccatggctgcttcaaggttaacctcatgcgtggcggtaacttccgctgcggtggtttccatgtccaccttctccgatcgtgcctacgccgattcttactttcgactcccgttcttctcttctaaatcttccagtgagccctcgccgccgaatcagccctctgactccaattccgagcctccgccgcccgatgaacctaacaaatcgggtttcgacccggaatcgttagaaagaggagccaaagctctccgcgaaatcaatagttctccctactccaagcagctgtttgatttaatgcgaaaacaggaggaaactcg

SEQ ID NO: 267792 - DNA, 445 bp, Glycine max
cccacgcgtccgaagctagtttatcgtgaggagaatatgaagttgtttgttttctttgtggctgcagtagttttggtagcatggccatgccatggcgcaggctaccaaaggttccctctccgaatgaaaactggctatggtgagcgttcttcggaggtaaaatgcgcaagttttaggcttgctgtggaagcacacaacatccgagcctttaaaaccattcctgaagagtgcgttgaaccaacaaaggactacattaatggcgaacaatttagatcagactctaaaacagttaaccaacaagctttcttttatgctagtgaacgcgaagtccatcacaacgacatatttatattcggcatagataacaccgtactctctaatatcccatactatgaaaaacatggatatggggtggaggaatttaatgaaaccttatatgatgaat

SEQ ID NO: 267793 - DNA, 465 bp, Glycine max
  unsure (1)..(465): unsure at all n locations
gagtttgttgtgagctataagctagtttatcgtgaggagaatatgaagttgtttgttttctttgttgctgcagtagttttggtagcatggccatgccatggcgcaggctaccaaaggttccctctccgaatgaaaactggctatggtgagcgttcttcggaggtaaaatgcgcaagttttaggcttgctgtggaagcacacaacatccgagcctttaaaaccattcctgaagagtgcgttgaaccaacaaaggactacattaatggcgaacaatttagatcagactctaaaacagttaaccaacaagctttcttttatgctagtgaacgcgaagtccatcacaacgacatatttatattcggcatagataacaccgtactctctaatatcccatactatgaaaaacatggatatggngtggaggaatttaatgaaaccttatatgatgaatgggttaacaagggc

SEQ ID NO: 267794 - DNA, 412 bp, Glycine max
agaatatgattttttatccccctcgaggctgctacaaaggggttcgtagcatggccataccatgtcgcacgctaccaaaggctccctctccgaatgaaaactggctatgctgatcgttcttcgaaggtaaaatgcgcacgttttacgcttgctgtgaaagcacacaacatccgagcctttaaaaccattcctgaaaagagcgttgaaccaacaaaggactacattaatggcgaacaatttacatcagactctaaaacagttaaccaacaagctttcttttatgctagcgaacgcaaagtccatcacaacgacatatctatattcggcatacataacaccgtactctctaatatcccatactatgcaaaacatggatatggagtggaggaaattaatgaaaccttatatgatg

SEQ ID NO: 267795 - DNA, 410 bp, Glycine max
cttcagataaacacctatattgagacaaccttttacaagaactgtgacttgtaaccccataagagatccattaacgagggagctctatcaagaacatcccctatcccatcataacactcgttacgacttctaagaactacttgctttacctaacacacttcaaagataatacccacacgctgtacgactcctatggaatcacacaacattcgaccctctaaaaccattcctgaatacagcctataacctacaaaagactacattaatggccaacaatttacatcatactctaaaacagataaccaacaagctctcctttatgctagtgaactcaaagtccatcacatcgacatatctatactcagcatactatacacctcactctctaatatcccattctattaaaaaca

SEQ ID NO: 267796 - DNA, 450 bp, Glycine max
cccacgcgtccgcccacgcgtccgctccaaatacctaatatggagtttcacattcttcccgtcattacttttctcatgcttgttgtggcaactaatgctgatgctgcattacctcctgcattttactggaagtccaagcttcctaccacaccaatgccgaaagccatcactgatttgctacaacctgattggaaggaagagaaagacacctctgtggatgtagggaaaggtggagtaaatgttggtgtagaaaagggaaaccaaggaccaggagatggcactgatgttaatgttggtggtggagacggtggagtgaatgtgcacacaggaccaaagggtaagccagttcacgttggagtgggcccacattctccatttgattacaactatgcagccagcgagacccaattacatgatgaccccaatgtggcactcttcttcttggaaaag

SEQ ID NO: 267797 - DNA, 390 bp, Glycine max
ctagctcgcactctctctacgcacgcctcatcatcccttctctgctccattcattatgtcgccgtcgttggatcttccccccaagggtggcttcagttttgatctatgccgaagaaacgcaatgcttcaaaacaagggcctcaaagccccaacctttctcaaaactggcaccactattgtcggtttagttttccaggatggtgtcattcttggggctgatactagggcaactgaaggacctatagtggctgataaaaactgtgagaaaattcattatatggcacccaacatatattgctgtggagcaagctcagctgctgatacagaggctgttacagacatggttagctcacagcttcaactacatctttaccatactggtttgtaatc

SEQ ID NO: 267798 - DNA, 370 bp, Glycine max
agaaatataactaatattctttagtataatcaaaaagaatattaaattcaaatagattttggatagaaaaaagacttaaaaaggaggatttgaaatgcgagatctaaaaacatatctttccgtggcaccagtagtaagtactctatggttcggggctttggcgggtctcttgatagagatcaatcgtttttttccagatgcattgatattcccttttttttcattctagttattgacacggaaaggggtgaagaagattatagatccaattaagtattaaatatatgtaattaatatgtaattaatctcctcttctttatttcgtcttttatttcttcttttttttacaattgtaatagaataagttagg

SEQ ID NO: 267799 - DNA, 440 bp, Glycine max
aatactctcaattagaaaacatccttgatataatagtataattattaaaaaaggtaacaatctttctcctgtttgtgattggataagcaatatatggaatacatgcaagtactattatttatatccacgttggtcggtaacttgtttttcaatttcaggtggtcgtgtggtgcaacgcagtcctttttctatttgtatgtttgtatgagactgagaaagatagagagatagtgtgtgcagaagatgtggctattcggcagaaaaggggcttctgggttttcatcatcatccactgcagagcaagtcactgaaggaattgatggaactggtttcactgccattgtcacaggggcatccagtggtattggcactgagactacgcgtgttcttgctttgcgtggtgtccatgtgattatgggtgtgagaaatatgcttgctgc

SEQ ID NO: 267800 - DNA, 443 bp, Glycine max
ctctaatcactctagctgttgcaaatttctactatttttcaatggcttctgcagatgttgagttccgttgctttgttggtgggcttgcttgggtcaccggcaacgatgccctcgagaaagccttttcaatctacggcgacatcgttgaatcgaaggttatcaacgaccgtgagactggaaggtccagaggattcggatttgtgaccttcgcctcagagcagtcaatgaaagatgcgatcgcaggaatgaacggccaggaccttgacggccgtaacatcactgtcaacgaagctcagacccgcgccagccgtggtggtggtggaggctgtggtttcggaagtggtggtggatacaaccgcggtagcggtggatatggtggtggtggtggcggctgctgatacggtggtcgtcgtgaaggttgatacaaccgtaatggtgggggt

SEQ ID NO: 267801 - DNA, 310 bp, Glycine max
  unsure (1)..(310): unsure at all n locations
ccaaagttatggataccctctctcagcttatccttctttgcctttgcctttccttctttcgccttttcgcttcccgtgctttgctgtttcaggggttcaactgggaatcaagtaagaaaggtggttggtacaactcgctgaagaacactattcctgaccttgcaaatgctggaattacacatgtttggctcccttctncctctcaatctgtttcacctgaaggttatcttccaggaaggctatatgatctngatgcatcaaagtatggaacaaaggatcaattgaagtccttaatgctgctttcatgaca

SEQ ID NO: 267802 - DNA, 435 bp, Glycine max
ttgatcgagataactagaaacagtgtgatgaaaatgaaggtccttgttttcttcgttgctgcaattttggtagcatggcaatgccatgcgtacgatatgttccctctccgaatgaacactggctatggtgcccgtactccggaggtgaaatgcgcaagttggaagcttgctgtggaagcacacaacatctttggctttgagaccattcctgaagagtgcgttgaagcaacaaaggaatacatccatggcgaacaatatagatcagactccaaaacagttaaccaacaagcttacttttatgccagagacctcgaagtccatcccaaggacacatttgtgttcagtatagatggcaccgtactctctaatattccatactacataaaacatggatatggcgtggagaaatttaactcgaccctgtatgatgaatgg

SEQ ID NO: 267803 - DNA, 450 bp, Glycine max
cgatgctattcgtggaaaggttgtccaactaatgaggctagattgcaagcgcgctgttccgttgttaatccagaatagggacttaataagtccacctgaagttgtgaatcaacttctaaatgcagatgataagagtgattgtagatattttttacatttatatctccactcattatttgaagtaaatcctcatgctgggaaagacttccatgatatgcaggtagaactctatgcggactatgatccaaagatgctgctaccttttctccgtagcagtcaacactacacccttgagaaggcttacgaaatttgcattaaaagagacctattgagggagcaagtcttcatcctaggaaggatgggaaactcgaaacaagccctagctgttattataaacaaattgggggatatagaggaggccgtagagtttgtcaccatgcagcatgatga

SEQ ID NO: 267804 - DNA, 441 bp, Glycine max
gcgatttcgatctcgcatagcattctacaatggccactattccagttaaccccaagccttggttgaacaatttgactgggaagcccgtaattgtgaaactcaagtggggaatggagtacaagggctatctcgtttccgttgattcctacatgaacttgcagctggccaacactgaagagtacattgagggacagtttactggaaatttgggagagattttaatcagatgtaacaatgttctctaccttcgaggagtaccggaggatgaggaaatcgaagatgttgcagaagactagatagtgataaaagctgctaatggctatgacataaaatgaactcgaattttctactgtttttgtatcttaacttaaatgtaggtttttttgtagttgtgtagagatttgaaatgatgcactcgcttgtgtatagggtgcctatgtt

SEQ ID NO: 267805 - DNA, 442 bp, Glycine max
cttctcagcagcttcggctagggttcagaaacgaaaaagggttcggtgttctgttcgcgatgagagcgcaagtggaagaagaagcgtatgaggaggttgaagaggaagcgccgaaagatgagacagagatccaagtagtgcgttaaacctagtttgtttctgttgcttttacaattgcttatgttgtcgaatgggacacccagttgttagtggcactggtttctcctttttgatgtttgatacattttgttggattcaagtagtttatgttcgtcttatgttattagctcaaaacaatgttgttactgcttttgctaatcaacatgatctcctatttgcatctctgattttcttagggttattataatttcacattatatctgcttcaattttttatgatctaattgatattcttaattccaaaaaaaaaaataaaagggcg

SEQ ID NO: 267806 - DNA, 446 bp, Glycine max
gtccacgggcggggatgatcttttaccggatgggcccgaagccgccgaagaaggggcagggggagaacgcggtttatgatttcgaggacaagatcaactttgcggtgttcccttcgctgcagggtgggccccacaaccaccagatcggggctcttgccgtggcgctgaagcaggccgcgtcgcccgggtttaaggcctacgccaagcaggttaaggccaacgccgttgcgcttgggaattacttgatggggaaagggtacagtcttgtcactggaggcacggagaaccatcttgtcttgtgggatctcagacctcttggattgactgggaataaggtggagaaactctgtgatctctgcaacattactgttaataagaacgcagtttttggtgatagcagtgccttggcccccggtggagtgcgaattgcggcccctgccatgact

SEQ ID NO: 267807 - DNA, 450 bp, Glycine max
gattgacattatcagggccttaagaactttacaaagtctgcccgggaactcatgacccgggtgcagaagattgatggtgacaattaccctgagactctttgccaaatgtttattataaatgctgggcctggatttaggctgttgtggagcactgtcaagtcttttctcgatcccaaaacaacttctaagattcatgttcttggaaacaagtatcaaagcaaattgcttgaagttatagatgccagtgagttgccagaatttctgggaggtacctgcacttgtgaagatcagggaggttgccttagatctgataaagggccctggaaaaaccctgatatattcaagatggttctcaatggtggagcatggcggtcaaagcaagttgtaaaagttcttaacaatgaaagaaaggttattgtgtatgccaagccaggatacccaacggtaaaa

SEQ ID NO: 267808 - DNA, 446 bp, Glycine max
tgggaatcgatcttaaggctgggggtaagagcaaaaagaccaaaagaacagcaccaaaatgcaatgacatctacctcaaattacttgtcaagctttatcggttccttgttcgaaggactggcagcaatttcaatgctgttatactcaagcgcttgttcatgagcaaggttaacaagcctccaatttctttgtcaaggttaattaagtatacaaaggggaaggaggataaaattgctgtaatagtggggactgtaactgatgatatcagagtatatgaagttccagcattgaaaattacagcactcaagtttactgagagagcacgtgcaagaatagaaaaggctggtggtgaatgcttgacatttgatgagcttgcccttagggctcctttgggacagaatacggtccttcttagaggccccaagaatgctcgggaagctgtgaaa

SEQ ID NO: 267809 - DNA, 452 bp, Glycine max
ataggcccaagagcaaactaagaagattttgagcacaatggcatccacacaatgcttcttgcaccaccatgccctcaccactccaaccagagcttcatcacagcgcttagttgtgagcaccaaaccaaaccacattgtttgcaaggcacaaaagcaggttgtccaagagggtgaggacactactaacattgtctctcgcaggttggccctcactgttctcattggtgctgctgctgttggctctaaggttgcacctgctgatgctgcctatggagaagctgccaatgtgtttggaaagccaaagacaaacactgacttccttccatacaatggggatggattcaaactctcaattccctcaaagtggaacccaagcaaagaggttgagtacccaggtcaggttcttagatatgaggacaattttgactcaaccagcaatgttgctgtcatgg

SEQ ID NO: 267810 - DNA, 406 bp, Glycine max
tcgatttgctcccagtacagagcttaaccgagcttcacaaagatgaatcgggaaaagttgatgaagatggccggttcggttagaactgggggaaagggtaccatgagaagaaagaagaaggctgtccacaagacaacaaccacagatgacaaaaggcttcagagcaccctgaagagaataggggtgaatgccatcccggctattgaggaggtcaatatctttaaggatgacgtagttatccagtttctaaatcccaaagttcaagcatccattgctgctaatacttgggttgtcagtggttctccacaaacaaagaagttgcaagatatactccctagcattatccaccaattaggaccagataacttagaaaacctgaagaagctagccgagcaattccagaagc

SEQ ID NO: 267811 - DNA, 376 bp, Glycine max
  unsure (1)..(376): unsure at all n locations
ctctatgaaactataagggtcaacaactggtttagtggctggaactatctggggtactgtagttgccacctggtatgatgtcccccgtgtcgagagaaatgttgctcttccagggctgattaagactatcaggatgatgggcaactatggtttgacctttgctgccataggaggagtctacataggtgtagagcagttggtgcagaactataggatgaagagggatttagtcaatggagctgttggcggatttgttgcaagtgcaactattctgggttacagaggaaggagcatcaaaactgcactttctgctggatcagcattggcattcacatctgcattccntgatttcngtgatcagacattataacatgat

SEQ ID NO: 267812 - DNA, 417 bp, Glycine max
  unsure (1)..(417): unsure at all n locations
attaatttcaggtcaggatcagtttgtctggatgttatcaatcaaacctggagccccatgttcgatcttgttaatgtgtttgaggtgtttctacctcaacttctgctgtatcccaatccatcagaccccttgaatggagaagctgccgctttaatgatgcgtgaccgaccaagttacgaacaaagggttaaagagtactgtgagaagtatgctaaacccgaagacatatgggaagccacagaagagaaatccagtgatgaggagatgagtgaagatgaatatgattctagtgatgaacagggttgtggtaaagcagacccctagctttcatgcatgntcctgtctaactntgcatttatctgtacatgatgttctctctagttctgtaatcacctaccacatgtgagcttatatgga

SEQ ID NO: 267813 - DNA, 254 bp, Glycine max
gctctgcatggttgtggtgagtgcacccatggcacatgcagctatcacgtgcgggcaggtgacgagtagcctggccaattgcatcggttacctccagaagggaggaacgccgtcgtcgggatgctgcaacggagtgaagagcctcaatgccgccgtcaagaccaccgtcgaccgccagacggcgtgcaactgccttaagtcggccgccagccaaatctccggctttaacgccaacaacgccgccttgctccccg

SEQ ID NO: 267814 - DNA, 230 bp, Glycine max
cccacgcgttcgcacaaacacctcgtccctctcaatgcatctagcaatggcggccaacgctgtcgtttcaccgtcgccgttccgacctcatccctttctccggtcatccttctccggcgtcttcgtcaagctcactccccaatccatatcgctttcacgctccaagcccctcaccgtcttcgccgccaccaataaggccgtctccgtcctcaaggtgacctccgccgtct

SEQ ID NO: 267815 - DNA, 410 bp, Glycine max
cccacgcgtccgatttcagtgagtgatcggtgttcacttgatctcatcataatcgtcggcgtcaattgaagaagatgccgatcagaaacatcgccgtcggaaggcctgaagaggcgactcaccccgacacgttgaaggcggctttggctgagttcatctcaaccttcatcttcgtgttcgccggctcaggctccggcatcgcctacaacaagctcaccgacaacggcgctgccacccctgccggcctcatctccgccttcatcgcccatgcattcgccctcttcgtcgccgtctccgtcggcgccaacatcttcggcggccacgtcaaccccgccgtcaccttcggcgccttcgtcggcggcaacatcaccttcctccgcggcatcgtctacgtcatcggccagctcctc

SEQ ID NO: 267816 - DNA, 257 bp, Glycine max
cccacgcgttcgcccacgcgttcgcactacaataacataacccttcgaagtcgtcgtggatctctcctcgttcgcatcttcaccctttccctgtctctcagaaagatgaaggtggtcgctgcgtatctgctcgccgtcctcggtggcaacaacaccccctccgccgatgacatcaaggaaatcctcggctccgttggaatagaggcagatgaagataggattgaatcgttcttgtctgaagttaagggtaaggatat

SEQ ID NO: 267817 - DNA, 238 bp, Glycine max
acgcgtccggcaaattctatgttggttttgaaaaaagattcaatttttatgcaaaagtgtggttcctttaggatttcagcatcagtggctacagcctgcatgcttcacggtgcaagcagccggtccgcaaccgcccgcaaatgctctggcctttccggaaccgtccgcattcccggcgacaagtcgatctcccaccggtccttcatgttcggcggtctcgcgagcggtgaaacgcgca

SEQ ID NO: 267818 - DNA, 349 bp, Glycine max
cccacgcgtccggcaaattctatgttggttttgaaaaaagattcaatttttatgcaaaagtgttgttcctttaggatttcagcatcagtggctacagcctgcatgcttcacggtgcaagcagccggcccgcaaccgcccgcaaatcctctggcctttccggaaccgtccgcattcccggcgacaagtcgatctcccaccggtccttcatgttcggcggtctcgcgagcggtgaaacgcgcatcaccggccttctggaaggcgaggacgtcatcaatacgggcaaggccatgcaagccatgggcgccaggatccgtaaggaaagcgacacctggatcatcgatggcgtcg

SEQ ID NO: 267819 - DNA, 226 bp, Glycine max
ctcctccgaaacatacaaaaaattctatgttggttttgaaaaaaagaatcaattcttatgcaaaaggggggttcctttaagatttcagcattagtggctacagcctgcatgcttcacggtgcaagcagccggtccgtaaccgtccgcaaatcctctggcctttgcggaaccgttcgcattcccggcgacaagtcgatctcccaccggtccttcatgttcagcggtc

SEQ ID NO: 267820 - DNA, 203 bp, Glycine max
  unsure (1)..(203): unsure at all n locations
ccacgcgtncgtgagctataactagtttttgtgaggagaatatgaaactgtttgttgctttgttgctgcagtagttttggtagcatggccatgccatggcgcatgctaccaaaggttccctctccgaatgaaaactggctatggtgagcgttcttcggaggtaaaatgcgcaagttttatgcttgctgtggaagcacacaaca

SEQ ID NO: 267821 - DNA, 108 bp, Glycine max
  unsure (1)..(108): unsure at all n locations
tcgcccacgcgtncggtgagctataagctagtttatcgtgaggagaatatgaagttgtttgttgtctttgttgctgcagtagttttggtagcatggccatgccatggc

SEQ ID NO: 267822 - DNA, 218 bp, Glycine max
cattattcaatggccaccacagcagctctattcggaaccatggcgagcacctccttcatgaggaagcaacctatgacgaccaagagccttatgacattccccaacgctctttttggtctgaaaggtggacgaggaggccgtgcatcttgcatgggctcgcacaaggtgaacctcataaccccataacgagaactggagtttgcaaacccagatgatgt

SEQ ID NO: 267823 - DNA, 303 bp, Glycine max
gaacaagaacataagggaaccacagcggcgtgttacagaagaacaagcagagaatgggtcgagtgagaacgaagacggtgaagaaatcctctcggcaggtgatagagcgtcactactcgcgcatgaccctggacttccacacgaacaagaagcttctggaggaagtggcgataatcccgtcgaagaggctaaagaacaagatcgcggggttctcgacgcacctgatgaagcgcattcaaaaaggccctgtgcgcggcatctccctcaagctccaagaagaggagcgcgagcgccgcatggact

SEQ ID NO: 267824 - DNA, 224 bp, Glycine max
tcgcccacgcgtccgactctctctcaccaaattcttcctagaacgaaaaaaaaaaaagaagagcggttttccctcaccaaagaagaagatgcaaacaatggccgatcaacttaccgatgaacagatctccgagttcaaggaagccttcagcttgttcgacaaggacggcgatggttgcatcacaaccaaggagcttggaaccggtatgccttcattggggcaaa

SEQ ID NO: 267825 - DNA, 421 bp, Glycine max
ctctgcgcagcaccctacctgtgctttatgatgcatatctccgcatgacccttaccggcctgaccatcacccttgaggtggtaagctctgacaaccatcgacatcgttaaggccaagatccaggacaaggaaggaattccccctgatcagcatcgtctgatcttacgcggaaagcagctcgaggacggccgtaccctcgccgactacaacatccagaaggagtcaacccttcaccttgtccttcgtctgcgttgtggcatgcagatcttcgtcaagactctgactggcaaaaccatatccctagaggtcgaaagctctgacaccattgacaacgtctaggccaagatccacgacaaggagggaatccccccagaccatcaacgtctgatcttcgacggaaagcaacttgaggacggtcgca

SEQ ID NO: 267826 - DNA, 410 bp, Glycine max
cccacgcgtccggccaaagagagtgagtgagtagggtttcaaattccaatcggaagaaatcggaatcggaaaaaatgggaggtggcggcggcgatcacggccatggacacggacacggtgatttcaggaacaaggtctggagtatgagcggtggcccttactgtcgcccaaagcactggaagcgcaacaccgccattgccatgttcggcgttgtcctcatctgcatccccatcgctatgaaatccgctgaactcgagcaacgaccacatcaccctgttcgccccatcccttctcaactctggtgcaagaaccttggaactaaagactataatgataatgatccatgattcatcaattgcatcactggtgttcacatcatgtcaagcaacatttatttgttaaatgctgag

SEQ ID NO: 267827 - DNA, 416 bp, Glycine max
  unsure (1)..(416): unsure at all n locations
cccacgcgtccgttcactttctccttattcttcattagatcctcagtgggatcgaccctcatttctgtgaactgagatggctggaggtgttattcggcagttatttaggaggaaactccaatctcattctcctaattcttcttttaagtcatccattatcacaaagaaagatggtgctgactctactggcagcaactccttaagagtgcttgcttttgttggagctggtgtgtcagggtttttaggttttgcaacaacagcatttgctgatgaagctgagcatggcctggcatgtccaagctatccatggcctcacaagggcatccttagttcatatgatcatgcntcgattcgtcgtggtcatcaagtttatcaagaagtctgtgcctcttgtcattctatggccttgatatcat

SEQ ID NO: 267828 - DNA, 415 bp, Glycine max
ctctgccactgccataactcactcactagcttcttctctgttctcaccaatggcatcaacggtatcagcaatggccatgatcaacgccaaatgcgtcaacccaaagttccccaatcccaccaagctcgcaccatcaaaaccctcccttcagatcaaccttccaaagggcctcatagcctcacccgaaagcactaaactttcccccgcgacagcaatcgcgggagcaatattcacaaccctcggaacctgcgacgccgcattcgctgttcaacaaatagccgacatagcagaaggcgacaaccgcggactggcactgttgctgcccataatcccagcaatagggtgggttctgttcaacattctgcagccggcgctgaaccagctgaaccgaatgcgcagcaccaaaggcgtgatc

SEQ ID NO: 267829 - DNA, 394 bp, Glycine max
accactcgttcgtccacgcgtgcgagctctcaaccaaagatgcagaacgaggaaggacagatcactgagctttacattcctaggaagtgctccgccacaaacagattgattaccgctaaggaccatgcttcggttcacatcaacattgggcatgtggatgagaatggcgtctacaatggccatttctccacttttgccctctgcggattcatccgtgctcagggtgatgctgacagtgctctagaccgcttgtggcagaagaagaaagttgaagttaagcaacagtagacacccatgatagtttggtacttcgttatgtattaatttctactcttgctagagatatttgagtactatgattgtcgctttgagcacaaatactcattctgaattt

SEQ ID NO: 267830 - DNA, 322 bp, Glycine max
caacattaagctctatgtccgccgtgtctttattatggacaactgtgaggagttgattcgtgagtatttgggctttgtcaagggtattgttgattctgaagatctcccactcaacatttcaagagaaatgttgcaacagaacaagatcttgaaggtcatccgtaagaacttggtcaagaagtgccttgagctcttctttgaaattgcagagaacaaggaggattacaacaagttctatgaggctttctctaagaacttaaagcttggtatccatgaggattcccagaacaagggaaagattgctgaattgctcacgtaccac

SEQ ID NO: 267831 - DNA, 419 bp, Glycine max
cttaatccaaatatcatcatctgaaacgatggctgccatggcaaccacaaccctctgtgggaacccgaaactctcatttttccacggaaagcccgttacatattcttcccgcgtcgcacccaccaccaagttattctcatccaaacaaggcacaatctccatgtgcctaacccaacccccatacgacctccaatccttcaaattccaacccatcaaagaatccatcgtctcacgcgaaatgattgtcaccggcatggaggtggcagaaattgatggctccccaaggatgggtccgacgtttggggcgatgatgatatcagggcagaaggcggctcatttggcgttgaaggcgttggggaggaacaatgcaattgatggaacgtgtggagttggaagggaagaaccccaccttattttcg

SEQ ID NO: 267832 - DNA, 306 bp, Glycine max
gctgttcctgcgcgtgaacaagcctcaggtaagccaaagccatggttaagcataacaatgttatccccaacggacacttccgtaagcactggcagaactatgtgaagacctggttcaatcagccagcacggaagacaagaagacggttggctcgtcagaagaaagctgtgaagattttccccagacctacagctggacctcttagacccattgtacatggtcaaactttgaaatacaacatgaaagtgagagctggaaggggattttcccttgaagaactcaaggcagcagggattcccaaaaagc

SEQ ID NO: 267833 - DNA, 408 bp, Glycine max
cctgagaaggagtttttgaagactattactggcaagaaggagaccctcattgaccttacagttatagaaatcttgtcaaggcacgcatctgatgagttctaccttgggcagagagatggtggtgactactggacttctgatgccggtccattagaggcatttaagaggttcggaaagaagcttgaagagattgaaaagaagcttatagagaagaacaaagatgagacattgagaaaccgctatgggccagctaaaatgccttacactctgctctatacttctagtgaggagggattgactttcagaggaattcccaacagtatctctatctaaggaccctatggttgcttaagtactgttcctggttttaaataaatgtgaaattgaaggaaccaaattccttaatca

SEQ ID NO: 267834 - DNA, 363 bp, Glycine max
atgtggatccagatcaaagtaccgagagcttaggtgtattttggtacaacaataagttgtgatgattaatgtagccgaggcttctttgaactttcccttgtgactgtttagtatcatggttgcttattgggaataattttgttgaaccctgatgttggtagtaagtatctagacagttgcatagcggttttgtttacagaataagatatagcctctctgaacagtttgattattgcaccatggtttgcaatcggtgcatgtcgaccaagtttctcaagactgtggagaagcttattcttgttccagttcttgaatccaagttgttaccgtattctgtttttaaaaaaaaaaaaatttttattc

SEQ ID NO: 267835 - DNA, 91 bp, Glycine max
  unsure (1)..(91): unsure at all n locations
naaaaaaaaaaaaaaaaaaaaaaaaaaaaataaaaaaaaaaaaaaaaaaaaaaaaaaaaagggagaaaaaaaaaaaaaaaaaaaaaaaaaa

SEQ ID NO: 267836 - DNA, 412 bp, Glycine max
aaaaggaatggtgggtttatctcttggagaaacgcatttcatccaaggtggcattgctcaagatcttcgttgtgatggtagaaagagattgacatatcgaccaatctctgttgaaactggagtgattccccagaccaatggttcagcaagagtcagaatgggtgccacagatgttattgccagcgttaaggctgaacttggaaagccaagctcgttgcaacctgacaaaggaaaagtctctatatatattgattgcagttcaacagcagagccagcttttgagggtagagggggtgatgagttggcagcagaactgtcaaatgctcttcaacactgtctcttgggtggtaaaagtggagaaggtgctggaattgacctctcatcgcttattgttgtcgaaggaaaaatttgt

SEQ ID NO: 267837 - DNA, 207 bp, Glycine max
cgccgagaaaaccctaattcgctcgcagtcacccaagaggcgaatccttaccattgctcgagatgggtgaagaagtgaaggccgtggttccagagtctgttttgaagaagcagaagagagaggaggaatgggcgttggccaagaagcaagacctcgaggctgcgaagaagaagagagccgagagccgcatactcatctacaacagag

SEQ ID NO: 267838 - DNA, 375 bp, Glycine max
tgcaaccgtgacaaaagttgcgtagcaatagcatactcttactctgattcgttagtgaggaaaaatggcaacaatcatcgccggcaccccaactacatcaatcactcgcacaggtcatgtgctcaaacgacctgctggggcctcattctctaccgttcttggattgccagcaatggccaaggccgagagagtgaggtgctccatggaagaaaagccttcaagcatctcaaacctatggatggtggcatccctgttagcagctgcagctttcgcaaccatgtcaagcccagcagccatggctttggttgatgagagactcaacactgaaggaactggtcttgcctttgggcttagcaacaaccttcttggttggat

SEQ ID NO: 267839 - DNA, 427 bp, Glycine max
tatcgatactccaatatagactacaacataactggcggtagaaggtatcccatacctgacaaatcagcacctatttacataacaatcggagatggaggaaatctagaaggtcttgcctcaagttatttggatccacagccagaatattctgcattcagagaagcgagctatggacacgccacactggagataaaaaacaggacccatgctatctaccactggtatcgcaatgatgacggaaagaaagtcccagctgactctctcgtattgcataaccagtattggggaagcaatggaagaaaacagaatgaggttattgatgaagttgtcaatgttaaatgaagttggagcactctaaatcgtaaatatggtgttttgaaaagaataaaaatgtgcctatatattgtaatgtatgtagttcaatagt

SEQ ID NO: 267840 - DNA, 393 bp, Glycine max
  unsure (1)..(393): unsure at all n locations
cccacgcgtccgcacttttctactttgagtcttcttgatccttctttttctccttgaactcaaacatggcagatgaggtggttctgctagatttctggccaagtccatttgggatgagggtcaggattgcacttgctgaaaagggtatcaaatatgagtacaaagaagaggacttgaggaacaagagtcctcttctcctccaaatgaacccggttcacaagaagattccggttctcatccacaatggcaaacccatttgtgaatccctcattgctgttcagtacattgaggaggtttggaatgacagaaatcccttgttgccttctgacccttaccagagagctcangctagattctgggctgattatgttgataagaagatatatgatcttg

SEQ ID NO: 267841 - DNA, 282 bp, Glycine max
tcgggacaacacccatgcctaaagcaagcaatgaggtctattatctacttaataaataagaggaactgctttgtgttttctagcattgtgatttacaacttcgtagcaatgcatattcttgactcttgcatgcacttcaatccttcgtagcattaatgatgtggccaagtcatcatgagcatcatacttatttctttgtgaatgtaaatcaaaattataagagagaaaatggtgcttttgtactacagattactataaataaaaaacttttatggttttcaa

SEQ ID NO: 267842 - DNA, 414 bp, Glycine max
ctcaaactcactctttctaagttttttctatctctttctctctctctgtctgccatgggtctctccaaaaccacctccgaatccgacgtctctgtccactcaaccttcgcttctcgatatgtcagaacttcgcttcccaggtttaagatgccggaggagtcgataccaaaggaggcagcgtatcaaataataaacgatgagttgatgttggatgggaacccaaggttgaacttggcatcatttgtgacaacctggatggagccagagtgtgataaactcatcatggctgccattaataagaactatgttgacatggacgagtatcctgtcaccactgagttacagaatcgatgtgttaacatgatagctcatcttttcaatgcaccactagaagagactgaggctgcagttggt

SEQ ID NO: 267843 - DNA, 448 bp, Glycine max
  unsure (1)..(448): unsure at all n locations
cttagtgtgcgtccaccccaacgtctatataaaggattacggatgggaaatattgaaactgtcctttccagcagtattgctgctgtcttttttgcagcttttgtcgttgctggaactatgtggtatggttcagcaacaacccctattgaattattcggtcctactcgttatcaatgggatcagggatactttcagcaagaaatatatcgaagagttggtgctggactagccgaaaatcaaagtttatcagaagcttggtctaaaattcccgaaaaattagctttttatgattatatcggaaataatccagcaaaaggggggttatttagagcaggttcaatggacaatggagatggaatagccgtcggttggttaggacatcctgtctttagagatnaagaggggcatgaactttttgtacgtcgtatgcctacttttttttgaaaca

SEQ ID NO: 267844 - DNA, 398 bp, Glycine max
gcgcccacgcgtacgctaacgtgtcttttgatttatacacctacagtcacactctttgtcatggtcaagatgtgaagatgtcgaccctgtcaaggaagagactgatgagggattttaaaagattgcgacaagatcctgctgctggcatcagaggggctccccaagacaataatattatgctttggaatgctgttatctttggaccagatgacaccccttgatatggtggtacgtttaagttgacactttagtttacagaggatgatcctaataaaccacctactgtgcgacatgttattcgaatgtttcatcctagcatttatgctgatggcagtatatgcttggacattttacagaatcaccggagccctatttatgacgtatctgcaattcttacc

SEQ ID NO: 267845 - DNA, 287 bp, Glycine max
aagcatttgaaatacttaaatgtagcttctacttctccctatcatcaatgtagtagaaaggtcattaagatttgttggtccgaagctataccatcgaaagagaaaagggctgggatgaaaactgtggagtacctttactcgtttctttctattgctttctaacttgtacggctcgattaatgaagctacagcagttaagaatttaaaaaaaaaaaaaaaaaaataaataaaaaaaaaaaaaaaaataaaaaaaaaaattaaaagggtggccgttctaaatgaatcca

SEQ ID NO: 267846 - DNA, 410 bp, Glycine max
gtgagctataagctagtttatcgtgaggagaatatgaagttgtttgttttctttggtgctgcagtagttttggtagcatggccatgccatggcgcaggctaccaaaggttccctctccgaatgaaaactggctatggtgagcgttcttcggaggtaaaatgcgcaagttttaggcttgctgtggaagcacacaacatccgagcctttaaaaccattcctgaagagtgcgttgaaccaacaaaggactacattaatggcgaacaatttagatcagactctaaaacagttaaccaacaagctttcttttatgctagtgaacgcgaagtccatcacaacgacatatttatattcggcatagataacaccgtactctctaatatcccatactatgaaaaacatggatatggggt

SEQ ID NO: 267847 - DNA, 369 bp, Glycine max
  unsure (1)..(369): unsure at all n locations
cccacgcgtccgcttttctctcttctgccctctgcacctcccctcacacccttccgcattcgcaggaggtgaagatgtcgaccccggcaaggaagagactgatgagggattttaaaagattgcaacaagatcctcctgctggcatcagtggggctccccaagacaataatattatgctttggaatgctgttatctttggaccagatgacaccccttgggatggaggtacgtttaagttgacacttcagtttacagaggattatcctaataaaccacctactgtgcgttttgtttctcgaatgtntcatcctaacatttatgcggatggcaaaatatgctttgacattttacagaatcagtggagcccta

SEQ ID NO: 267848 - DNA, 422 bp, Glycine max
acgctgtgatattctcagatcttccttcagtattatatgctggctcgaaaaacgcttcactggcaaggtcaacaaatgtgtcaaccacagaacctgttaatcttgatgacaatgacaaactgcttgggggattgttaacttctggatttgatgaagcatcatgcaaaagtaggatgcagtcccatttgtaccgcaaagcttctcctcataaaccttctccatatttgatatctaaactacgtaaatacgaagaaattcatagaaggtgcggaccaaatactaaagattacgacaaaagcatgaaaaagattgtaagctccaagaacaatggtgctgctaccaaatgtaagtacattatctggaatactgccaaatggtttggggaatcaaatgattagcatagctgcaacatttctttatgc

SEQ ID NO: 267849 - DNA, 393 bp, Glycine max
cccacgcgtccgctcgcatcttgttccttttctcaacaactataataacatctttctctcgtccgaacagatcacactatggccacctcaagcgccaaatcagtccatgatttcaccgttaaagatgccaagggaaatgatattaatcttggtgactacaaaggaaaggtccttatcattgtcaatgttgcctcacaatgtggcttgactaattcaaattacactgagctcagtcagttgtatgagaaatacaaacagaaaggtctggaaattctggcatttccatgcaatcagtttggggcacaggagcctggatctaatgaacagatacaagagtttgtttgtactcgcttcaaagctgagtttccccgttttgacaaggttgatgtgaat

SEQ ID NO: 267850 - DNA, 70 bp, Glycine max
aaaaaaaaaaaaaaaaaataaaaaaataaatttaaaaaaaaaaaaaaaaaaaaaaaggaaaagaaaaaaa

SEQ ID NO: 267851 - DNA, 256 bp, Glycine max
cggacgcgtgggcggacgcgtgggtgcacttcatgattgatgagaatgttcacttcagggacactgcaagacttatcaatgcacttgtggcagctggaaaaccgtatgagttaatagttttcccagatgaacgtcacatgccaaggcgtcatagcgatcgagtttacatggaagggaggatgtgggacttcattcagaggaatctgtaaaataacttgttattccatctttggttgaatggccagagtagtttctc

SEQ ID NO: 267852 - DNA, 386 bp, Glycine max
caaatcaaagccatggccacctccaacttctctattgttctctccgtctccctagccttgtttgtggtgctacttaccaaggcacactcgaccgataccgtttctttcaccttcaacaagttcaacccagtccaaccaaacattatgctccaaaaagatgctagtatttcatcctctggggtgttacaactcaccaaagttggcagcaacggcgtgcccacctcgggatctctcggtcgtgccctttacgctgccccaatccagatttgggacagcgaaaccggcaaggtagccagctgggctacatcctttaaattcaacattttcgcacccaacaaatcaaactcagctgacgggcttgccttcttcttggcacccgtcgggtc

SEQ ID NO: 267853 - DNA, 388 bp, Glycine max
gaaaaaaaagattctaaagaaatataactatatattctttagaataatcaaaaagaatatgaaattcaaataaattttagatagaaaaaagacttaaaaaggaggatttgaaatgcgagatctaaaaacatatctttccgtggcaccagtagtaagtactctatggttcggggctttggcgggtctcttgatagagatcaatcgtttttttccagatgcattgatattcccttttttttcattctagttattgacacggaaaggggtgaagaagattatagatccaattaagtattaaatatatgtaattaatatgtaattaatctcctcttctttatttcgtcttttatttcttcttttttttacaattgtaatagaataagttagg

SEQ ID NO: 267854 - DNA, 358 bp, Glycine max
ggtgcttgttttcttcgttgctacaaattttgtagcatggcaatgccatgcgtacgataggttgcctctacgaatgaacactggctatagtgcccgtactccggaggtgaaatgcgcaagttggaggcttgctctggaagcacacaacatctgtgtctttgagaccatgcctgaagagtgcgttgaagcaacaaaggaatacatccatggcgaacaatatatgatcagactccaaaacagttaaccaacaagcttacttttatgccagagacctcgaagtccatcccaaggacacatttgtgttcagtataaatggcaccgtacttcttaataattcatacttcaaaaaacatggata

SEQ ID NO: 267855 - DNA, 382 bp, Glycine max
aaccgtggctataccctgctccaacctatctaactatagaaaccttctgggtcaccgatggagacgcacccggccctcgctgtggccacaccctcaccgccgttgccgccaccaagactcaaggcccccgcttgatcctattcggcggcgcaaccgccattgaaggaggatcttcctctgcccccggcattcggttagcgggagtcactaataccgtccattcctatgacgttcaaagtagaaaatggactagtatcaaacccgccggagagccgccgtctcctcgggctgctcatgctgctgctgcagttggtaccatggttgtttttcagggtgggataagtccagcggggcattctaccgatgatctctatgtgcttga

SEQ ID NO: 267856 - DNA, 356 bp, Glycine max
ctgaaacttgggtgcgattccttcactcacaacaacaacacatcactatggctcttctgagtcgagcctcttcacgcttccctcagctggtttcccctcaaagggtagtttcactccacacaacgctcccatctctgaacgcatccccatccacagccacgcctacaccatatgccccgccaccgcctccgtccgcttcctctcccgccggcgtttcgaaggcggcggagttcgtgatctcgaaggtggacgatctgatgaactgggcccgccgcggctccatctggcccatgaccttcggcctcgcctgctgcgccgtcgaaatgatgcacaccggcgccggccgctaccatctc

SEQ ID NO: 267857 - DNA, 415 bp, Glycine max
ctctctttctccggcgacgatctcagattccggtcactcctctcgccggcgatcccttagtcctccgtcctccgtcgagtcctttccgattcgaatcgttcccagccttgtgccaccatgaatcccgaatacgattatttgttcaagcttttgctgattggagattctggtgtaggcaagtcatgtcttctcctgaggtttgctgatgattcataccttgacagctatatcagtaccattggagtggactttaaaatccgcactgtggagcaggatgggaagactattaaacttcaaattatttttctgcatttttttaccatatagtgggacactgcgggtcaggaacgtttccggacaatcactagcagctactatcgtggggctcatggcattattggtgttatgatgtcac

SEQ ID NO: 267858 - DNA, 380 bp, Glycine max
atttaatgaaaccttatatgatgaatgggttaacatgggcgacgcaccggcattgccagagacgcttaaaaattacaacatgctgcagtctcttggcttcaagattgcatactcgtcaggaagatatcttgacacaatggtcgtcaccgatgcaaacctaaagatggctggattgcacacatgggagcagttaattctcaaggatccacatcttatcactccggacgcactttcatacaaatcagcagtgaaagagaatctgttgctgcagggatacagaagtgttggaatcattggagaccaatggagcgatctgcttggagaccacacatgctaaagccggaccttcaagcttcctaatcccatgtactacattgcgt

SEQ ID NO: 267859 - DNA, 397 bp, Glycine max
cggacgcgtgggcggacgcgtgggtgcacttcatgattgatgagaatgttcactgcagggacactgcaagacttatcaatgcacttgtggcagctggaaaaccgtatgagttaatagttttcccagatgaacgtcacatgccaaggcgtcatagcgatcgagtttacatggaagggaggatgtgggacttcattcagaggaatctgtaaaataacttgttattccatctttggttgaatggccagagtagtttctcaaaaaaaaaagaaaatcataatagatacaattaatataaaaaatatttaacgtttatatttataaaaaattaaaattaaaaaaaaaaagtttgtaattaaaaaaaaaggggcggccgttttagaggttccaagtttacttt

SEQ ID NO: 267860 - DNA, 408 bp, Glycine max
cccacgcgtccggaaggatgttgtatctatactatttgaactttggaatttgatggactgatcaaaagaagagagaaactgttttatgaagattacttctattgttggaacctcagaatcagaaatcactgaacgaggtgttctttcaacagaaatgatagagaaggcttcggcagaagtggacaggcttgccaaactaaaagcaagcagaatgaaagaacttgtttttaagaagaggtcagagttagaggaaatatgtaaattgactcatactgaaccagatacaagtactacagccgagaaagctagtgcattaatagattctggactggtggatccttctgagctattagccaacattgaagcacagattataaaggcaaaagatgaagctttgagcagaaaaga

SEQ ID NO: 267861 - DNA, 388 bp, Glycine max
  unsure (1)..(388): unsure at all n locations
cccacgcgtccgtccacgcgtccgccttgactcgcctttatgcaatgcacatacaacaggagcagatatactatgggcaggtttgccaatggttactctgcctcttgagaaaatggctactagggttgctgggtcactctgtcttgccactggactaggggaggagatgattgttagcagcatggaagagtatgaagatagagcagtctcattggctctgaatcggccgaagcttcaggctcttactaataagcttaaagctgtacgcatgacttgccctctatttgacacggcccgttgggtgaggaatcttgagagatcatattttaaaatgtggaatctgcattgctctggtcaacgtncacagcattttaaggtcacttgaaat

SEQ ID NO: 267862 - DNA, 291 bp, Glycine max
cccacgcgtccgcttgtactttaattgaattctgcattaaaaaaaaaaaaaaaaaaaaagaaaaggaaaaaaaaaaaaaaaaaaaaaaaaaaaaaaaaaaaaaaaaaaaaaaaaaaaaaaaaaaaaaaaaaaaaaacaaaataaaaaatcaaaaaaaaaaaaaatcttacatccaacaaaaaaaatatattataaaggtcacctaaataaaaaaaactaaccctacatataaaaaataataaaactgtaaaaaccatttctaatacctaactaaattaatttaaataaaaa

SEQ ID NO: 267863 - DNA, 379 bp, Glycine max
cccacgcgtccgaaggaataccctttcaaaatggcttcttctgtgtcatccatggtttctaccagcctcctcctaattaccatctgcacactgtcctcacttctgtcagttgcatctgcagcaacagaggagggacgaacaaggccattcaaaagggtctatgcctttggagactctttcacagacactggcaacacccaaaatgcagaaggtccaagtggctttggccatgtttcaaactctccctatggaaccactttctttaaccactccaccaataggtactcagatggtaggcttgtgattgattttgtggctgaagcactttcactgccttacttgcccccctaccgtcatagcaaaggcaatgacacttttg

SEQ ID NO: 267864 - DNA, 372 bp, Glycine max
cccacgcgtccgcccacgcgtccgttggaagcctggaaaccccagttacatccagccctttgatcgcatggtacttgtccaacctgcccgcatacagaaccgcagtgagcccactactaagagggatcgaggtgggcctggcccacggataccttctggtgggcccattcgtgaaggccgggcctcttaggaacaccgagatcgccgggcaagcgggctctctggccgccggtgggcttgtggtgatcctcagcctttgcctcacaatctatgggatttcatccttcaacgaaggagccccatccactgctccgtcgctgaccttgacgggccgcaagaaggagcccgatcagctccaaactgctgatgggt

SEQ ID NO: 267865 - DNA, 421 bp, Glycine max
caacccctctttcttcttcttcttctctctccctctttgcaagaaggaagattcagatgtgagatcactgttttccttcttctccttctttctttctgcaactctattgttattcattcaatcaacacaatatggctgccactaataacattcatgggaacactgaatctgctcaatccaacattgctcctcccactaagcagcctctacatccttctaagactgttgattctcaatctgtactcaaaaggctgcaatctgaattgatggctttgatgatgagtggagattctgggatatctgcgtttcctgaggaggacaacatattcttttggaagggaacaataacatgaagcatagatactgtgtttgaaggcacagagtataagctatcactctcctttcccaatgactacccttt

SEQ ID NO: 267866 - DNA, 413 bp, Glycine max
aatcaaagccatggccacctccaacttctttattgttctctccgtctccctagccgtcggtttggtgctacttaccaaggcacactcgaccgataccgtttctttcaccttccacaagttcaacccagtccaaccaaacattatgctccaaaaagatgctagtatttcatcctctggggtgttacaactcaccaaagttggcagcaacggcgtgcccacctcgggatctctcggtcgtgccctttacgctgccccaatccagatttgggacagcgaaaccggcaaggtagccagctgggctacatcctttaaattcaacattttcgcacccaacaaatcaaactcagctgacgggcttgccttcttcttggcacccgttgggtcttaaccccaattcgaccattgatttcttg

SEQ ID NO: 267867 - DNA, 363 bp, Glycine max
cccacgcgtccgcccacgcgtccgcatgaacggcacgtgtagcggagtactaggccgccgttacacgctactgctgtccgtcgtcaccgtttgaattacccaccgctactttgtcgtcattcttcttcttcttcccttttcattgaccttttccttccttcgtcctccaatggcgactgttccgcacccattatccctcgcaagtgtaggttttgctaaccgaacctcctccatctccagatccactctcaaatgctgcgctcaatctccttctccttcactagttgacaacgcccagaagtttctcgaagcttccaagaaagggaacgtcattcctctcttccgctgcatattttccgatca

SEQ ID NO: 267868 - DNA, 354 bp, Glycine max
atcaccgcaagtccacaacatggctgccactgccgctgcaggcatagcttccttgttttggtcttctattaacagtgtcaaatgtcttcgttcctccaagaactgctccattatagacccccttataaccacagtgccctcaaaccgtggcatgtttgtgtcacacttggtggaacctttgtccattgggggtgccattaattcgcacaagttgtgggggcctagaatttctgctgctgttgcacaagaagaggctgttgttgtggctgatgatgaggtagatgatggtgctggtttagttgaagaagagaaagtggaggagaatgaaagagaagtagttgcagaacaagactc

SEQ ID NO: 267869 - DNA, 448 bp, Glycine max
gcgttgttgcattgtagaaggcgatggccgcgcgagctctgttgaccagaaaaaccctagccaccgtgctccgcaacgacgcgaagcccataatcggagttggcataacagcagcggctactcattcacgcgggttgcacgtgtacacgctacccgatctggattacgactatggcgcactggagccagccatcagcggcgacatcatgcagctgcaccaccagaagcaccaccagacttacatcaccaactacaacaaggccctcgagcagctccaagacgccatcgccaagaaagattcctccgccgtcgttaagctccagggcgccatcaagttcaacggcggaagtcatgtcaaccattctattttctggaaaaatctagctcctgttcgtgaaagacgtggtgaaccacccaagggttcactgggatgggctattgacacaca

SEQ ID NO: 267870 - DNA, 383 bp, Glycine max
cggacgcgtgggcggtctccgacctccgtcgcagcctccaggcgcgtggctccgatctcgtcgtgcgcgtcgggaagcccgagacggtgctggtagagctcgccaaggccgtcggtgccgacgccgtgtacgcccaccgcgaggtctcgcacgacgaggcgaaggcggaggagaaggtggaggcggcgatgaaggaggagaatgtggaggtgaagtacttctggggaagcacgttgtatcacgtggacgatttgccttttcaattggaggacatgccttccaattacggagggtttagggatagggttcagaaattggaggtaaggaagacaattgaagctttagatcatcttaagggaatgccttctcgcggtgaatttgag

SEQ ID NO: 267871 - DNA, 457 bp, Glycine max
  unsure (1)..(457): unsure at all n locations
cccacgcgtccggatggttcatggtgatgtcaagggattggtactacctcctaaagtagcatcagtacaagttattgtgattcctgtgccttacaaagatgccgatactcaaggaatctttgatgcctgttctgcaactgtgaatacattgaatgaagcaggtattcgcgctgagtcagattctagagataattattctcctggatggaagtattccaactgggaaatgaaaggggttcctctaagaattgaaattgggccaaaggatttagcaaataagcaggttcgcgctgttcgacgtgataatggtgcaaagatagacattgctagtgctgatttggttgtggaaataaaaaangtgctcgatactattcaacagaacctgtttgatgttgcaaaacaaaaacgagatgaatgcattcagatcatacacacttgggatgaatttgtgcaagct

SEQ ID NO: 267872 - DNA, 334 bp, Glycine max
accgagataactagaaacagtgtgatgattttgaaggaccttgtatttcttcaatggtacgagtttcttagcatggcaatgccatgcgtacgatatggccaatttcataatgaacacttgctattgaaccctaactccggatgagaaatgctcaagttgcaagcttgctgtggaatcacacaacatcacaggctttgagaccattcctgaatagtgcattgaagcaacaaaggaatacattcatggcgaacaatatatatcagactccaaaacagtttaccaacaagcttacttttatgccagagaccttaaagtccattccaaggacacattt

SEQ ID NO: 267873 - DNA, 458 bp, Glycine max
cccacgcgtccgggccaaagggctagttctgtcatttatgactgacttctttaaggagtatctgattgacaacagccttgatgatcttatttcaattctaaaacggggaaaagtagaggaggatcttttggacattttcccccctacaaaaagatccattgaagctttctctgagcatttcaccttcaacaagttcaacccagtccaaccaaacattatgctccaaaaagatgctagtatttcatcctctggggtgttacaactcaccaaagttggcagcaacggcgtgcccacctcgggatctctcggtcgtgccctttacgctgccccaatccagatttgggacagcgaaaccggcaaggtagccagctgggctacatcctttaaattcaacattttcgcacccaacaaatcaaactcagctgacgggcttgccttcttcttggcacccgtcgggt

SEQ ID NO: 267874 - DNA, 370 bp, Glycine max
gagttccggggtagacgtacgcgtacgcgtacgcgtcacgctgagaggaagtgtagagggtgattctctgactgctaccttgtggcggaaaagtggttacgttcaggtgtgaccagtactacacggtagggagggctcttgcgacgggatctgatcagctccgcaagatctaccgaatgaggctctgtgccactatcaaggattgtgacacgatcacgttctggtatgatgtgaggaaactggactatgtgtagtagagcagtggccaattgcttgacatcaactgagaatggagtgaagatcccaactaactatgaagagctctggtatctggttgcggcatcagagtacgactagatactagaacatg

SEQ ID NO: 267875 - DNA, 426 bp, Glycine max
gttgtgagctataagctagtttatcgtgaggagaatatgaagttgtttgttttctttggggctgcagtagttttggtagcatggccatgccatggcgcaggctaccaaaggttccctctccgaatgaaaactggctatggtgagcgttcttcggaggtaaaatgcgcaagttttaggcttgctgtggaagcacacaacatccgagcctttaaaaccattcctgaagagtgcgttgaaccaacaaaggactacattaatggcgaacaatttagatcagactctaaaacagttaaccaacaagctttcttttatgctagtgaacgcgaagtccatcacaacgacatatttatattcggcatagataacaccgtactctctaatatcccatactatgaaaaacatggatatggggtggaaggatttaat

SEQ ID NO: 267876 - DNA, 395 bp, Glycine max
attcaacactcatatccttatcctgtttctttcaatggaagtcatttctgcttctagcgggaatcccaacgctccgatgttcgtgccactcgcctatcggacggtggaggatttctccgaccagtggtgggacctcgttcactcctccccctggttccgcgactactggctccgcgagtgcttccaagatccccagttccaaaacgacgacgctttcgacttcgactttgacctagatctccaagatgaagatgaaagggaacgaaaggaagggaaggaggtggtgtcgttggggctgctgaaatggcgaagctgtggaggaggatgggcccaggcgccgaggtatgtggaaaaggcccccaagtttgtgaagcccaaggtgagcccacgggcta

SEQ ID NO: 267877 - DNA, 416 bp, Glycine max
tgttgatcgagataactagaaacagtgtgatgaaaatgaaggtccttgttttctgcgttgctacaattttggtagcatggcaatgccatgcgtacgatatgttccctctccgaatgaacactggctatggtgcccgtactccggaggtgaaatgcgcaagttggaggcttgctgtggaagcacacaacatctttggctttgagaccattcctgaagagtgcgttgaagcaacaaaggaatacatccatggcgaacaatatagatcagactccaaaacagttaaccaacaagcttacttttatgccagagacctcgaagtccatcccaaggacacatttgtgttcaagatagatggcaccgtactctctaatattccatactacaaaaaacatggatatggggtggaagaatttaac

SEQ ID NO: 267878 - DNA, 381 bp, Glycine max
ctaaaactaaatacccattggatgagttacatttcttccgaggttgctcctctaatatgcctaatattttctgcaatatcaattgctacattatttctttatgttcaaaaaaacaatattttttacatacaaaaaacataataaaactctagtgttttttattccccaattataattctaaattcaaaaaaaggacactaatgagtataatcttatcatcatactatgtactaatatattccattacatatgttctaataacaagcaatttattttttacacttaacactttatcaagtccattttaattaatgttcatttcaatttccatttttcttattaatacatttgttctttatttttaacaaaattatttatttt

SEQ ID NO: 267879 - DNA, 371 bp, Glycine max
cgagatcactcgaaacatcctttttaaaatgaaggtacttcttaacggccaggttacaaacatggtaggatggcaatgccatgcgtacgatatgttccctctcctaatgaacactgtctattgtgcccgcactcctgaggtgaaatgcgcaagttgtaggcttgctgtggaatcacacaacatctttggtctctataccattcctgaagagtgcgttgtagcaacaaatgtatacatccatttcgaacaatatatatcatactccataacagttaaccaacaagcttactcttatgccagatacctctaatttcattctaatgacacatatttgttcatttaatattcactcttctctttaatattttatt

SEQ ID NO: 267880 - DNA, 472 bp, Glycine max
cagagcgacgcgtcggctcactcctgctgacacacgtacttgaatttcagcccacatagactgacactttggaggcgagttcagcttcctcggtttgactctcgtagacatcacaaaccttccctgcattcatcccacgcatggctgccatgaactctagcgaattggcctgcaactatgccatatcaggtgcaacgtgttcggagctcaatgggaaggtcacttgcgtggcctatgttgcatgctctggctacaagttgccattgatcaaagctgacgccagagttcctaaagccaaagaatctgaaggaggaaggagaggtgcccttgatctcttggcagctacccttttcacctctgcagcttccaattcttctgccaatgctgggatcattgaagattaccttgagaggagcaaggccaacaaggaattgaatgacaagaagaggttagctactactggaacaaactt

SEQ ID NO: 267881 - DNA, 395 bp, Glycine max
cccacgcgtccgcccacgcgtccgtgaattacaacccacaaaacttgggtcttgcggattaagttcattttcctccctttcactctcgtagacatcacaaaccttccctccattcatcccacgcatggctgccatgaactctagcgtattggcctgtagctatgccatatcaggtgcagcgtgttcggagctcaatgggaaggtcacttccgtggcctatgttgcatgctctggctacaagttgccattgatcaaagctgaggccagagttcctaaagccaaagaatctgaaggaggaaggagaggtgcccttgttctcttggcagctacccttttcacctctgcagcttccaattcttctgccaatgctgggatcattggagattaccttgaga

SEQ ID NO: 267882 - DNA, 206 bp, Glycine max
caatttacaagttataatgtcattagagcattctgtttcagatgtaactgaactggttattacaaatcaaagtgccgtttttattcattgccgtcgatcgcaccattttttaaaccctcctaatttgagtactcgttgggagcaagcaacatacaatgtatgaatttcttgattatggtaaaacatcagagttattttttgctgtc

SEQ ID NO: 267883 - DNA, 359 bp, Glycine max
gaattccgggctaggcgtacgcgaggctatgaaggctaatttcaatgacatatatgacgagtacagaaagaaatggggtggtggaagcatgggatccaaatctcaagcgaaaaccagagcaaaggagaagcttcttgccaaggaagctgctcagaggatgaattaggaggagtttcttatatcttgttgctttgcgaatgctattaagtttgttttttaatgtactcttttaattattgtcttcataaaaacatttgttattcacatgagctagagtatttcgctaaaatctcctgccgactgttccaattcctgaacccttggattactttaattttggtagtggacttttttcgggt

SEQ ID NO: 267884 - DNA, 405 bp, Glycine max
  unsure (1)..(405): unsure at all n locations
cccacgcgtncgatcgagataactagaaacagtgtgatgaaaatgaaggtccttgttttcttcgttgctacaattttggtagcatggcaatgccatgcgtacgatatgttccctctccgaatgaacactggctatggtgcccgtactccggaggtgaaatgcgcaagttggaggcttgctgtggaagcacacaacatctttggctttgagaccattcctgaagagtgcgttgaagcaacaaaggaatacatccatggcgaacaatatagatcagactccaaaacagttaaccaacaagcttacttttatgccagagacctcgaagtccatcccaaggacacatttgtgttcagtatagatggcaccgtactctctaatattccatactacaaaaaacatggatat

SEQ ID NO: 267885 - DNA, 336 bp, Glycine max
tatgccatatctggtgcagcatcctccgagctcaatgggaaggtcacttccgtggcctctgttgcatcctctggctacaagttgccattgatcaatgtgaggccagagttcccaaagccaaagaatctgaaggaaggagaggtgcccttgttctcttggcagctacccttttcatctctgcagcctccaattcttctgccaatgctgggatcattgatgattaccttgagaggagcaaggctaacaaggaattgaatgacaagaagaggttagctactactggagcaaactttgcaagagcatacaccgtggaattcggtagttgcaaagtccctg

SEQ ID NO: 267886 - DNA, 326 bp, Glycine max
gccagctgtaccactgtcaaccgtgccggtgccggcatggttgctccattcactggcctcaagtccatggctggcttccccaccagaaagaccaacaatgacattacctccattgctagcaacggtggaagagtgcaatgcatgcaggtgtggccaccagttggcaagaagaagtttgagactctttcctacctgccagaccttgatgatgcacaattggcaaaggaagtagaataccttcttaggaagggatggattccttgcttggaattcgagttggagcacggtttcgtgtaccgtgagcacaacaggtcaccaagatacta

SEQ ID NO: 267887 - DNA, 444 bp, Glycine max
caaaaatggcatcattcaccatgacagcttccatccttggctgcccagccgtcaccaaccggtcggcagcggcgacgcagaggagatcagtggtagtgaatgcagccagcaaatctgttgaaggggaaaaggtcagttatgacaacaatggtagcaatgcaaggaggaacttgatgttcgccacggcggcggctgctgtttgctcttttgctgcagggatggcattggcagatgagcctaaaccaggaacctcagaagccaagaaaaagtatgccccggtttgtgtcaccaatcctacagctaggatttgtcgcaattgaggaacttttttgtttcacttttggaatttggaaatgtacaatgaatttgttgtaaggctttgatgatttcatttcatcctcactgtactagatgttcataaaagtatcgactttgcttcgtcgt

SEQ ID NO: 267888 - DNA, 307 bp, Glycine max
cacctttgttcactcttcttctcttgcggctagggttttagcgcagcttcttctagatggaaggaagatgggtaaggaaaaggttcacatcagtattgtggtcattggccatgtcgactctgggaaatccactaccactggtcacctgatttacaagcttggaggcattgacaagcgtgttattgagaggtttgagaaggaagctgctgagatgaacaagaggtctttcaagtatgcctgggtgctggacaaacttaaggctgagcgtgaaagaggaatcaccattgatattgctttgtggaagttt

SEQ ID NO: 267889 - DNA, 330 bp, Glycine max
cccacgcgtccgcccacgcgtccgcccacgcgttcgtacatatgcaagtggggtgattggatgatgctttgctctacggagggtccaccagtgaacttcaaacatccaataaataaattgaatccagagaaaaatggggtggcaaagggacctactaagttttataacccagagatccatgctgctgcattctgtctgccttcttttgtggacaaggttgattgatccaacagacattcataaatgactcggtagcattaaggaattgctgttagttaccctttgtttttgctgtgtcgttctgcatatttatgatattatccttttatt

SEQ ID NO: 267890 - DNA, 481 bp, Glycine max
ctgcaaccgtgacaaaagttgcgtagcaatagcatcctcttactctgattcgttagtgaagaaaaatggcaacaatcatcgccggcaccccaactacatcaatcactcgcacaggtcatgtgctcaaacgacctgttggggcctcatcctctaccgttcttggattgccagcaatggccaaggcggggagagtgaggtgctccatggaggaaaagccttcaagcagctcaaacctagggatgggggcatccttgttagcagctgcagctgccgcaaccatgtcaagcccagcagccatggctttggttgatgagagactcagcactgaaggaactgggcttccctttgggcttagcaacaaccttcttggttggatcctgtttggtgtctttggtctcatatgggctctcttctttgtctacacttccacccttgaagaggatgaagagtctggattgtccctctaaacccccatgtgatg

SEQ ID NO: 267891 - DNA, 310 bp, Glycine max
tggcttcccttgcagcatccactgctgctgcttcccttggcatgtcagaaatgcttggaaaccccatcaacttcaagggtgccacaaggccagctccatctgcttctagtcctgcctccttcaagactgtggctcttttctccaaaaagaaggctacaccaacacctccaaaaaaagctgctgctgctgctcctgccaatgatgagcttgccaagtggtatggtcctgacagaaggatcttcttgcctgagggtctcttggaccgatccgaaatcccagagtacttgaccggagaagtccctggagacta

SEQ ID NO: 267892 - DNA, 465 bp, Glycine max
ctagcttccaaaccctaacacttctcttcctcttcgatcatcacctctccacaatgccgccgaagttcgacccctcccagatagtcgacgtcttcgtccgcgttaccggcggcgaagtcggcgcggcgagttccctggccccgaagatcggtcccctcggtctctcccccaagaagatcggagaagacatcgccaaagaaaccgccaaggactggaagggcctccgcgtcaccgtcaagctcaccgttcagaatcgtcaggcgaaggtcacggtggtcccctccgccgccgccctcgttatcaaggccctcaaggagcccgagcgcgaccgcaagaagaccaagaacatcaagcacaacggcaacatctcgctcgatgacgtcatcgagatcgctagggttatgaggccgaggtccatggccaaggacctcagcggctccattaaggagattctcggaacatgcg

SEQ ID NO: 267893 - DNA, 475 bp, Glycine max
  unsure (1)..(475): unsure at all n locations
cccacgcgtccgatataactaatattctttagaataatcaaaaagaatattaaattcaaataaattttagatagaaaaaagacttaaaaaggaggatttgaaatgcgagatctaaaaacatatctttccgtggcaccagtagtaagtactctatggttcggggctttggcgggtctcttgatagagatcaatcgtttttttccagatgcattgatattcccttttttttcattctagttattgacacggaaaggggtgaagaagattatagatccaattaagtattaaatatatgtaattaatatgtaattaatctcctcttctttatttcgncttttatttcttcttttttttacaattgtaatagaataagttaggaaagagaaagaataagggttaatttggcctaattgaaattcggagtgaaactcgggatctcgtccaggcttncatggaaatgaataataattcaatt

SEQ ID NO: 267894 - DNA, 443 bp, Glycine max
ggagaggataaggctttgcatttcatttgagagagagagcgtcttacctttccattatcaaaatggctgtttcggctatcacaggagcgaggctaaccctagggatagggttggcgatacctctttcctctcccacgcgctctcgaaccgtcgcaatggccgtatccgtcgaccccaagaccgacaacaaactcactcttaccaagtccgaggaagctttcgctgctgccaaggagctgatgcctggaggtgtcaactccccagttcgtgccttcaaatccgtgggtggtcaaccaattgtgattgattcagtcaaagggtctcgtatgtgggacatcgacggcaatgagtacattgactacgtcggttcttggggtcccgcaatcattggtcacgctgatgatcaagtgctttcagctctggttgaaccatgaagaaaggac

SEQ ID NO: 267895 - DNA, 461 bp, Glycine max
ccggaatccggtcgaccacgcgtccgcccacccgtccgccaacccgtccgcccacgcgttcgcccacgcgtccgcccacgcgtgcgctcattaattgcaagaatggcacttcgttgcttggtgatgtccctttctgttctcttcactcttggtcttgcgagagaaagccatgccagagacgaagatttttggcatgctgtttggccaaacactcccattccaagttcattgcgagatcttctaaagcctggccctgcaagtgttgaaatcgatgatcaccctatgcaaattgaagaaacacagtacccgaaaaccttcttctataaagaagaccttcatccaggcaaaacaatgaaagtacaattcagcaagcctccctttcaacaaccatggggtgttggtacatggttaaaggaaattaaagacactactaaagaaggatatagttttgaagagctatg

SEQ ID NO: 267896 - DNA, 380 bp, Glycine max
  unsure (1)..(380): unsure at all n locations
agggatctctggggccactttccatctgatgttgcnaatggagctcagtaatgtccttaacaatctgaatggtacanaagaatccatcaaaggtgcanaactttggttcatgcagagatctccatttgcaccagccctagcagaggctcttagagatagagtctttgcattggatgaagttgagagacagttacacataatatacctcgccaatgacatactttttgacagcttaaatcgaaggacaagcaatagtgaccttgacaatgaagctcttgcctttaaacctgttttaggctccatgcttgcaagaatttatcataatccacaaagcaatgagggatacaggaaaagaatgcaacaaatggtggaattctggt

SEQ ID NO: 267897 - DNA, 257 bp, Glycine max
  unsure (1)..(257): unsure at all n locations
attaaagcattgattctggttggggggtttggaacaaggctgaggccactgacactcagttttcctaagcctcttgttgattttgctaacaaacctatgattctgcatcagatagaggccctnnnngnncntgngagtactgaggtggtgcttgtcatcaactaccaaccagaggttatgttgaatttcttgaaagattttgaaacaaagctcggcatcaagatcacatgttctcaggaaactgaaccattgggaac

SEQ ID NO: 267898 - DNA, 396 bp, Glycine max
tttaaccttaacctttaagaggtcttacgcttatctcttcaaatacatcatcatcggggacaccggagttggaaagtcttgtcttctacttcaattcacggacaagcgctttcagcccgtccatgacttaaccatcggtgttgaatttggtgccaggatgatcacaattgataacaagccaatcaagttgcaaatatgggatacggctggtcaagaatcattcagatctattacaaggtcttattacagaggggctgcaggtgcattgcttgtttatgatataaccaggagggagacatttaatcatttggctagctggttggaagatgcaagacagcatgcaaatgcaaatatgactattatgctgattggcaacaagtgtgatcttgctcataa

SEQ ID NO: 267899 - DNA, 459 bp, Glycine max
gtgagctataagctagtttatcgtgaggagaatatgaagttgtttgttttctttgttgctgcagtagttttggtagcatggccatgccatggcgcaggctaccaaaggttccctctccgaatgaaaactggctatggtgagcgttcttcggaggtaaaatgcgcaagttttaggcttgctgtggaagcacacaacatccgagcctttaaaaccattcctgaagagtgcgttgaaccaacaaaggactacattaatggcgaacaatttagatcagactctaaaacagttaaccaacaagctttcttttatgctagtgaacgcgaagtccatcacaacgacatatttatattcggcatagataacaccgtactctctaatatcccatactatgaaaaacatggatatggggtggaggaatttaatgaaaccttatatgatgaatgggttaacaagggcgac

SEQ ID NO: 267900 - DNA, 278 bp, Glycine max
cccacgcgtccgaatccatcatcaaaccaagcatggttgaaacaatcactggattcaacagggcaagctaggattcagtgggtccaaaagaactacatgatttacaactactgcactgacactaagcgtttcccacagggccttcctcccgagtgcacaatcgcatgaaaacaaaactatttcatattataaacctctcatacctcatgaattcattttttttttcttgtcttgtgtaaattaataaaaacactatagggctcctcggtttatacttt

SEQ ID NO: 267901 - DNA, 448 bp, Glycine max
  unsure (1)..(448): unsure at all n locations
ctcagttcggtttttcattctctcgcgaatctaatctataggaaaagctaagggcacatcacaatgaaggcattgattctggttggggggtttggaacaaggctgaggccactgacactcagttttcctaagcctcttgttgattttgctaacaaacctatgattctgcatcagatagaggcccttaaggccattggagttactgaggtggtgctagccatcaactaccaaccagaggttatgttgaatttcttgaaggattttgaaacaaagctcggcatcaagatcacatgttctcaggaaactgaaccattgggaacagcaggtcctctggctcttgccagggataagctgatagatgactctggagaacccttttttgttctcaacagtgatgttatcagtgagtatccactcaaagaaatgatngaattccataaaaaccatg

SEQ ID NO: 267902 - DNA, 424 bp, Glycine max
gttattatttgcttcacttcatctggaagtgctgcaagattgattgctaagtacagaccaaccatgcctgtgatatctgttgtcattcctcaattgaagacaaatcaactccgatggacgttcaccggtgcttttgaggctaggcaatctcttattgtgagaggtctttttcctatgctggcagatccacgacacccagctgagtccagaagtggaacaaatgaatcaattttgaaggttgctttagaccatggcaaggcttttggcatcataaagccacatgaccgagttgttgtctgccagaaagtagctgactcgtcagttgtgaagattcttgagctcgaagattgaatgattacaacttatgcgttatttgatgcataataataaagattcttgggcttgtgtttgataatcggagcga

SEQ ID NO: 267903 - DNA, 466 bp, Glycine max
gtcttcgcaccttagaggacctgccaaaaggtgcatttgtgtgcgagtttgttggagaaattttatccatgaaagagttgcatgagaggaacttgaaatgcactgaaaatgggaaatatacatgcccagttttactggatgctaattgggattcaggatatgtgaaggacgaagaagctctatgcttagatgcagcttcctttggcaacactgccaggtttatcaatcacagatgttctgatgcaaacttgattgaaatcccagtcgaagttgaggatcctggtcattattactatcattttgcctttttcacttccagaaaaatatcagcacaggaagagctaacatgggactatggcattgactttgatgaccacgatcatcctgtcaagctgttccagtgcagatgtggcagtaaattctgcaggaacatgaagagatatagcagatctcttagatatgcgtc

SEQ ID NO: 267904 - DNA, 476 bp, Glycine max
cccacgcgtccggaaagggcttcctcaatgatctcctccccagctgttaccaccgtcaaccgtgccggtgccggcatggttgctccattcaccggcctcaaatccatggctggcttccccacgaggaagaccaacaatgacattacctccattgctagcaacggtggaagagtacaatgcatgcaggtgtggccaccaattggcaagaagaagttcgagactctttcctacttgccagacctcgatgatgcccaattggcaaaggaagtcgaataccttctaaggaaaggatggattccttgcttggaattcgagttggagcacggtttcgtgtaccgtgagcacaacaggtcacctggatactatgatggacgctactggaccatgtggaagctgcctatgtttggctgcactgatgcttctcaggtgttgaaggagcttcaagaggctaagactgcataccccaatggcttcat

SEQ ID NO: 267905 - DNA, 457 bp, Glycine max
  unsure (1)..(457): unsure at all n locations
gtccgcccacccgtccgttccttctttccatctttttcccttttaacgtcattatcctaaactggcagattttcacatccaaagcaacatgaaggggaggttcatgtttctgtcggtgctcctttgtgccacctttcatgtctccttctccattactgacggcttagtagcaaacggcaacttcgagctgggtccgaagccctccgccctgaaaggaactgtggtgattggtggcagccactcgatcccagaatgggagatctctggcttcgtggagtacataaagtccggccagaagcagggcgacatgctgctcgtggtccccgagggggcctacgcggtgcgcctcgggaacgaggcctncatcaagcagaggatcaaggtgatcaagggcacgtactactccatcaccttcatggtggcccgcacctgcgcgcaggaggagaggctcaacata

SEQ ID NO: 267906 - DNA, 152 bp, Glycine max
tgaccttcttcgtgtgtggcaaagtttaagtaatcatgggttaagaaaaggttcacattaacattgtcgtcattggacatgtcgactcttggaagtcaactaccactggtcacttgatctacaagcttggaggtatttacaagcgtgtgatt

SEQ ID NO: 267907 - DNA, 364 bp, Glycine max
caagaatggcacaaattaacaacatggcacaagggatacaaacccttaatcccaattccaatttccataaaccccaagttcctaaatcttcaagttttcttgtttttggatctaaaaaactgaaaaattcagcaaattctatgttggttttgaaaaaagattcaatttttatgcaaaagttttgttcctttaggatttcagcatcagtggctacagcctgcatgcttcacggtgcaagcagccggcccgcaaccgccggcaaatcctctggcctttccggaaccgtccgcattcccggcgacaagtcgatctcccaccggtccttcatgttcggcggtctcgcgagcggtgaaacgcgcatcac

SEQ ID NO: 267908 - DNA, 418 bp, Glycine max
cccacgcgtccgcctcgctctatttctcagtctctgtgtttgcggctgaggattccgaacgagtgaccttcttcgtttctcgcaaagtttaagtaatcatgggtaaggaaaaggttcacatcaacattgtcgtcattggacatgtcgactctgggaagtcaactaccactggtcacttgatctacaagcttggaggtattgacaagcgtgtgattgagaggttcgagaaggaggctgccgagatgaacaagaggtcattcaagtatgcctgggtgctcgacaagctcaaagctgagcgtgaaagaggaattaccattgatattgctttgtggaagtttgaaaccaccaagtactactgcacggtcattgatgctcctggacatcgtgactttatcaaagacatgattactggtaccct

SEQ ID NO: 267909 - DNA, 418 bp, Glycine max
gcgacaggagcaataacaatggctgcctcactactttctgcagctaccttcatgcaacccaccggggggggcatggccactcgcaacctcaaatctacacaatgcatttgtaaggcttttggcttggaacccgctgcagctaaactcatttgctcccttaagcccgatctcaaagattttgctcaaaaatgtgtcgacgccaccaaaattgcaggattcgcccttgccacctcagctctcgttgattctggagcgagtgcagaacgtgttacaaagaggctaacctttgacgaaatccagagcaagacatacttggaagtgaaaggaactggaactgctaatcagtgcccaaccattgaaggtggagtggactcatttgccttcaaggcagggaaatacaacgcccaaaagttgtgcc

SEQ ID NO: 267910 - DNA, 402 bp, Glycine max
ctcttttaccattctcttctctcttgctcttgcaggagagagccatgtccatgcatcgctacctgaggaagattattgggaagctgtttggccaaacactcccattcccactgcactgcgagagcttctaaagcctctccctgcaggtgttgaaatcgatgaactccctaagcaaattgatgatacacagtacccaaaaacattcttctataaagaagaccttcatccaggcaaaacaatgaaagtacaattcaccaagcgtccctatgcacaaccttatggtgtatatacatggttaacggatattaaagacacctctaaagaaggatatagttttgaagagatatgcatcaagaaagaagcgtttgaaggagaagagaagttttgtgcaaaatccttggg

SEQ ID NO: 267911 - DNA, 300 bp, Glycine max
tgtttggagggtctcatggtctttgacaggaaacatactggctgtggctgatgggaacaacaatgtgacattgtggaaggaagcagtagacggggaatggcaacaggtgacaacagtggagccttagaatgtgatttgaaaatggttagaattttcgttttgaaatatagttgatatcttgttctttgcatattatacagttgattaattgtgcttcataatgcactagttccttgacgtttgtgatccattaagtattccgtgcttggaagaatgaagttgattagtttgagttgcttt

SEQ ID NO: 267912 - DNA, 422 bp, Glycine max
gaccacacacatagaaccccaccaacaggaatgaagaagatgattctaaccctcttcttcaatatcattttatctttcctctccctttcccccgccttcgtggtggatttctgcgtagcagactacacaggccccaatggccccgcagggtactcatgcaagagcccagcaaaggtcacggtggacgacttcgtctactccggccttggcaccgccggcaacacctcaaacatcatcaaagccgcggtgacgccggcgttcgacgcgcaattccccggcgtcaacgggcttggaatctccattgcacgcctagacctagcagccggtggagtcatccctcttcacacgcaccctggtgcctcagagctgctggtggttgtgcagggaacaatctgcaccggcttcgttgcttcggacaacac

SEQ ID NO: 267913 - DNA, 260 bp, Glycine max
ccgataagtcatacgcagcacaccgcgcgtgtatcaacgtccacgagctcatgccggggacgaggagcggatcattgagatttcctacacgcgccgtcgcgacccggaggggtgaatgctgttctttttctctcttctatatacttttgttctgtttttatttgctgtttttattttagttcttttctttttttatttttttaatttaattattttttgtttttcttatttttttttgttgttttgaatttatatttttt

SEQ ID NO: 267914 - DNA, 461 bp, Glycine max
  unsure (1)..(461): unsure at all n locations
cacacactgtgtttgtgaaactctctctcacacacaagtcacaaaaacaacttgtgttgttccaatggcatcagcaacaccccttttgaaagatgagctcgacatcgtgatccccacgatcaggaatctggatttcttggagatgtggaggccattctttgagccttaccatctcataattgtgcaagatggtgacccttcaaagaccatcaaggtccctgaaggctttgactatgagctctacaaccgcaatgacatcaacaggatccttggccccaaggccaattgcatctccttcaaggactctgcatgccgttgctttggctacatggtctccaaaaagaagtacatctacaccattgatgatgactgctttgttgccactgatccatctggacacaagattaatgcacttaaacagcatatagaaaacctnctctgtccatccacacncttttttt

SEQ ID NO: 267915 - DNA, 233 bp, Glycine max
  unsure (1)..(233): unsure at all n locations
cagcagtaccaggacgccactgctgttgtctaaggggagtacgaggatgaggagggaggcnatggtgaagcagacgaccatatgtgaagagactaaaatgtgaagatgcctgtgtcttacttatgctatgtgatgcgtaagtgtgtttgctctgcactccaacgtgaagaagattgtaattactaatagtgtatgtacggtttgcgggataatacttttgatggtagtgagag

SEQ ID NO: 267916 - DNA, 472 bp, Glycine max
atgaagttgaagcagcagaaaatgagagtagtagtagggtcagtgtggctgtgcctctttctgttggctgtcggggagtcggagggagcggatttggcggcgaagtgcaacctgctggttcagaaagtgctgccgtgcctgaacttcgcgacggggcaggcggcggttccgaccaaggactgctgcgaggcgacgtcggagataaagaagagcgacccggagtgcctgtgctttgcgatccaacagactcacaagggtagtccggaggtgaaaaatatgggcatacaagaggctaggctgcttcagctaccttctgcttgtaacttgaagaatgccagcaccaccaactgtcttaagcttctgggtctatctccaaactccgctgacgctgctatcttcagaaatggttcgttgaaaacgaattcagcttcaacagtctcagaagaaatccacaagggctcttatggaaaca

SEQ ID NO: 267917 - DNA, 478 bp, Glycine max
  unsure (1)..(478): unsure at all n locations
cccacgcgttcgatttgtcggcggtgacgaaaggaaagaagaagaagaagcgttctttcggagagttcgaagatgtcgggcgttaccaacaacaacgaggaagacaagaagccaaccgaacagggagcacacatcaaccttaaggttaaggggcaggatgggaatgaagtttttttcaggatcaagagaagcactcaattgaagaagcttatgaatgcttactgtgaccgacagtcggtggatttcaactccattgcttttctgtttgatggacgccgcctccgagctgagcagactccagatgagttggaaatggaggacggngacgagattgatgccatgcttcaccagacaggaggttctgttgtctgaaggatgtgattactttgctcctcattataagtaggaattagttaacttagagctatgtatggcataagatacaatatttaatatctgctattatatacagcttttg

SEQ ID NO: 267918 - DNA, 282 bp, Glycine max
taagtaaacaatttaattggattggtcgaatggtatcaaaaaaatggagtactaactcccatttcttatttattattgaattaaccgatcaacttgctttgttatcgaacatttctttttgatttcaaaaattttccggaaaaaatttgaatctatttttatatgcgaatcaatcctactacttctggtcctgaggtttctgcgcttgaaaaaaaaaatctgggacgtattggccaaataattggtccggtactagatgtagcttttcccccaagtaagatg

SEQ ID NO: 267919 - DNA, 345 bp, Glycine max
  unsure (1)..(345): unsure at all n locations
acaaaggcttcaagatgtgtcaagagcttggtcttgtggataagattccaaggcttgtttgttgcccaggctgccaatgctgatcctttgtatttgtactttaaatccggctggaaggagtttaagcctgtgaagtcaagcactacctttgcctctgccattcaaattggtgatcctgtttccatcgacagggcggttcacgccctaaagagttgcgatgggatcgtggaggaagccaccgaggaggagttgatggatgctactgcgcaggcagattccactgggatgtttatctgcccacacactggggttgctttgactgctttgtttaagctcangaacagt

SEQ ID NO: 267920 - DNA, 348 bp, Glycine max
cccacgcgtccgcaacgctgcgaaagacattggagctgacaccccagcagctgagcggatacaacggcacggacccatcgaagccgatctacgtggcggtgaagggccgcgtctacgacgtcaccaccggaaaatccttttacggccccggcggcccctacgccatgttcgccggcaaagacgccagcagagccctggcgaagatgagcaagaacgacgacgacatcttcccctccctcgacggcctctccgacaaggagatcggcgttctcaactactgggagaacaaattccaagctaagtaccctgtcgttgctcggggttctaattaatcatatgataacctaa

SEQ ID NO: 267921 - DNA, 374 bp, Glycine max
  unsure (1)..(374): unsure at all n locations
agaaacagtgtgatgtttatgaaggtncttgtttttttagttgctcgacttttggtagcatggcaatgccatgcctacgatatgttccctcttcgaatgaacactggctatggtgcccgtactccggaggtgaaatgcgcaagttggaggcttgctgtggaagcacacaacatctttggctttgagaccattcctgaagagtgcgttgaagcaacaaaggaatacattcatggcgaacaatatacattcagacttcaaaacagttaaccaacaagcttacttttatgccagagacctcgaagttcattccaaggacacatcttgcgttcagtatagatggaaccgtactctctaatattccatactaccaaaaa

SEQ ID NO: 267922 - DNA, 422 bp, Glycine max
cccacgcgtccggagctttttcatttctgtgcaagcattctggaacttgtaatcccagtttacaaaagcaggagggcttatggacagttggctaaatgtcacacattacttaccagtatctatgaatcaattcttgaacaggaatctagtccaattcctttcacagatgcaacttactacagggttggattttatggtgatagatttgggaaacttgataaaaaggagtatgtatatcgtgagcctcgtgatgtacgtctaggtgacataatggaaaaacttagtcacacatatgagtctagaaatggatgacaatcacactttgcatattattccagattctagacaagtgaaggcagaggagttgcagcttggtgtctggtaccttcagattactgccggtgatccagtaatggaagatg

SEQ ID NO: 267923 - DNA, 440 bp, Glycine max
ccaaaccctatcccttattcgcctttgtccaccctcaatggcctctgtttcagccacttctctcaggttccaaccctttctcaagttgtctacaaggactactacccaggggtgttacaaaacttcaagtttgggggcagtttctgtgggatggaataggagaacctttccctctttgagatcctcccgtttacgcatttgtgcagtcaaggcacaaccggagacagtgcagaaggtctgcgatattgtgaggaaacaacttgctctgcctgctgaatctgagcttaccccagacaccaaattttcagcacttggtgctgattcccttgacacggtggaaatagtgatgggtttagaggaagagtttggcataactgttgaggaggatggctctcaaaacatctcaaccgttcaagaagcagctgatttaatagagaaac

SEQ ID NO: 267924 - DNA, 371 bp, Glycine max
gaaaatgaaggtccttgttttcttcgttgctacaattttggtagcatggcaatgccatgcgtacgatatgttccctctccgaatgaacactggctatggtgcccgtactccggaggtgaaatgcgcaagttggaggcttgctgtggaagcacacaacatctttggctttgagaccattcctgaagagtgcgttgaagcaacaaaagaatacatccatggcgaacaatatagatcagactccaaaacagttaaccaacaaggcttacttttatgccagagacctcgaagtccatcccaaggacacatttgtgttcagtatagatggcaccgtactctctaatattccatactacaaaaaacatggatatggg

SEQ ID NO: 267925 - DNA, 408 bp, Glycine max
gaaatggcttcctcaatgatctcctccccagctgttaccaccgtcaaccgtgccggtgccggcatggttgctccattcaccggcctcaaatccatggctggcttccccacgaggaagaccaacaatgacattacctccattgctagcaacggtggaagagtacaatgcatgcaggtgtggccaccaattggcaagaagaagttcgagactctttcctacttgccagacctcgatgatgcccaattggcaaaggaagtcgaataccttctaaggaaaggatggattccttgcttggaattcgagttggagcacggtttcgtgtaccgtgagcacaacaggtcacctggatactatgatggacgctactggaccatgtggaagctgcctatgtttggctgcactgatgct

SEQ ID NO: 267926 - DNA, 454 bp, Glycine max
cccacgcgtccgggacctcaaggcctcggaggagagggaaaaatccgacaagaggttgaaggaagagaaggaacccaaagccgaagacaccagcaaagacgaaagcacctccaaagttccaaacaaaggtaatggcttagatttagataaatactcttggactcaatcacttcaagaggttaatgttaatgttccggtgccaaatggaaccaaatcaagatttgttactgttgagataaagaagaaccatctaaaagttggactcaaaggccagcctccaattattgagggggagttttataagtctgtcaagcctgatgattgctattggagtatagaggatcagaatgcaatttctattcttttgaccaagcatgatcaaatggaatggtggaaatgtctagtgaaaggtgatcctgagattgatacccaaaaggttgaacctgaaaacagc

SEQ ID NO: 267927 - DNA, 460 bp, Glycine max
  unsure (1)..(460): unsure at all n locations
cccacgcgtccgcccacgcgtccgtccaactgcaaaacaacaactcaattaagaaattattctccggagccatggcagatctcaagtctacattcttgaacgtctattccgttctcaaatctgaactcctccacgaccccgccttcgagttctccgatgatgctcgccattgggtcgaccggatgctagactacaatgtgcctggaggaaagttgaaccggggactgtcagtcattgacagctacagattgttgaaagaaggacaggcattaaatgatgacgaaattttccttgctagtgctcttgggtggggtattgaatggcttcaggcatnatttcttggtcttgatgacattatggataactctnacacacgccgngggcaagcatgctggtttagagtgcccaggttggaatgatngcagccaatgatgggagtctactaagaaaccatatttca

SEQ ID NO: 267928 - DNA, 259 bp, Glycine max
aaagaatgctcgtgaagctgtgaagcactttggtcctgctcctggtgtgcctcacagccacaccaagccttatgttcgagcaaagggaaggaagtttgagagggctagaggaaggaggaacagcagaggatttagggtttgatgtgataaatagtgttctattctctgaaattcaaaatttccttatatcttagacggttgaagcagttttcttgttatttgtgttctgataatatgattttcagtttgaagttgtcaa

SEQ ID NO: 267929 - DNA, 387 bp, Glycine max
  unsure (1)..(387): unsure at all n locations
cacgcccgtccgtcaaagtcctcctccacctatctcccacttctcctctctccaccatanccattacacantcaccgacctgngctccttccccagcttcctgcgtcccaagtacatnttaccaaattncacctccacctccggtttatnatctatgcttccccnnacctccacctatctacacagtaagctcaaattgtgaaagcaccattcatgatgaatcattttctagttttcatcgaggaataaaggcaagctctattttgagccaagtgaaacatctatcttcctgtctaagttctttgaataaaagtctgaatgtgtcatctctatgctacaatgtttatgattcacatcaggttgattctatttgtttgatggccatct

SEQ ID NO: 267930 - DNA, 338 bp, Glycine max
  unsure (1)..(338): unsure at all n locations
tcattccacatccaaaaaaggttaacacacgtggngaagatgctttctttgtgagcaactataatgggggagttattgctgttgccgatggtgtctctggttgggctgaagaggacgtggatccttcgttgttccctcgtgaattgcttgctaatgcttccaattttgtaggagatgaggaggtgaactatgatcctcagattcttattaggaaagcacatgccgccactttctccacaggctcagctactgtcatcgttgctatgctggagaagaatggaactctgaagattgctaatgttggagaatgtggataagactcatncgtatggtcatgt

SEQ ID NO: 267931 - DNA, 312 bp, Glycine max
tcagcatcagtggctacagcctgcatgcttcacggtgcaagcagccggcccgcaaccgcccgcagatcctctggcctttccggaaccgtccgcattcccggcgacaagtcgatctcccaccggtccttcatgttcggcggtctcgcgagcggtgaaacgcgcatcaccggccttctggaaggcgaggacgtcatcaatacgggcaaggccatgcaggccatgggcgccaggatccgtaaggaaggcgacacctggatcatcgatggcgtcggcaatggcggcctcctggcgcctgaggcgccgctcgatttc

SEQ ID NO: 267932 - DNA, 382 bp, Glycine max
cggggataagattaaagattcaacaatggcctctgcttctgctactcttctcaagggaggtcctgttcttgacaagtgcgagtgggtcaaaggccagacccttcgccaacctctcgtgagatgtaacccttcctcagcatcagctctcaccatcaaagctgcttcctatgctgacgagctcgtcaaaaccgccaaaacagtggcctcaccggggcgtggtattttggcgatggatgagtcaaatgcaacctgcgggaagcgtttggcatctattgggttagagaacacagaagctaatcggcaggcataccgtaccctacttgtgacagtacctggtcttggtgaatacatctttggtgccattctctttgaggaaaacttt

SEQ ID NO: 267933 - DNA, 259 bp, Glycine max
tcgcccacgcgtcctgtaaaatggaagtaatctgaatatggaggtggacagtctgttgctgggttgatattgcatacggcatcactgaaccatccagcttagctgatatggccgccaatccttcccatgcactggtctatcttgtggttatgctctcagctagagccctgttcacaaacacatggatcgaactctgtggctcatctgctagagatttcgccaagcagcttaaggaacatcatataggcatgcccttaca

SEQ ID NO: 267934 - DNA, 419 bp, Glycine max
  unsure (1)..(419): unsure at all n locations
ggactcgcaagcttaatcaagacgccaatagagagagggtggggtaatgggttgcgctgtttcaactcttcttcttcggtgttgaagggcgtcaccacccccactctgcttcagcccagagtgcttctctacgacgccgtttctcacctctgccaccgaggagtaaaatgggtaatcagagcagacaaggacagaaagatcaaattttgttgcgttcagtctgatactgctgagctctatctgagagcttgtggtcttgaacgagaggatgtcttgcaccgcattctgtttgttgaaggcctgaatgtttactctcagggatccactgctgcattgcgagtactgtcgcacttgccactaccttactctgcttttagtgcgctctgcgtgattccatctncactcagagatggtgtcta

SEQ ID NO: 267935 - DNA, 353 bp, Glycine max
ctggacattaattccgagatatattcgttaaaggttggtcagaagtttgctctggggctggtttcaacacttaatcctgatggaactccagacactggatattatacccagatcagtcgacaatcactggccaacaattttgaatatgtcatgtatgggaagctctacaggataacagagggttcagggcgtgaaaaagcggagatgaatatttcatttggtgggcttctgatgatgctgaagggagatacctctcattgcaacaagtttgagctggatcagaggttgtatcttctgataaggaaagtctgaaaattgtatgtaaaaaataaatatgaagatgtgaaaccttg

SEQ ID NO: 267936 - DNA, 439 bp, Glycine max
gtttggtgggatacctcttataatccaatgtttatcaagcccagttaggaacactgtaaattatgcacttggggcactttattatatctgtaacgaatctaacaaggaggagattttaaggcccgaagttgttgatgtcattaggaggtatgcagccgctgaagaagttagtgtgagcttcagtaatctggctaaagcttttctgagtaaacatctggccgagaactactgagagacacagcttacctttccatactcattataagaccatatgtcttgagtaaggcaacaagtaattagaaagaactattattattgttattattattcttggttgatcaaatattattattcttgttattggtatcacactattcatgtctagaaaggattagaccatacaagatactatttgacaaaaaaaaaatttttattatat

SEQ ID NO: 267937 - DNA, 424 bp, Glycine max
  unsure (1)..(424): unsure at all n locations
cccacgcgtccgcccacgcgtccgagcaagctcatcctagagttttaaaaatggcagcaggctccttcatggctctctcttccccatccttggctggcaaggccgtgaagctgggcccatcagcccccgaagtcgggagggtcagcatgaggaagaccgtcaccaagcaggcctactccggaagcccatggtacggcccagaccgcgtcaagtacttgggcccattctctggcgagcccccgtcctacctcactggcgagttcccaggtgactacggctgggacactgctgggctttcggccgacccagaaaccttcgccagaaaccgtgagctcgaagtgatccactccaggtgggccatgctncgggcccttgggctgcgtcttgcccgaactattgtncccgaacggngtcaagtttggag

SEQ ID NO: 267938 - DNA, 455 bp, Glycine max
  unsure (1)..(455): unsure at all n locations
ggcaagccccactcaaccaccacacctctcctcgttcacgctacccctttctgctgttcttctacctttcaagttttaaaagtataaagatggcagagacattcctatttacctcagagtcggtgaacgagggacaccctgacaagctctgcgaccaaatctccgatgctgtcctcgacgcttgcctcgagcaggacccagacagcaaagttgcctgcgaaacatgcaccaaaaccaacttggtcatggtcttcggagaaatcacgaccaaggccaacgttgactacgagaagatagtgcgtgacacctgcaggaacatncgcttcgtctcaaatgatgtgggactggatgccgacaactgcaaggtcctcgtcaacattgagcagcagagccctgatattgctcanggtgtacacgggcacccttaccaaaaaacctgaagaaattggtgctgg

SEQ ID NO: 267939 - DNA, 450 bp, Glycine max
cccacgcgtccgctaagctttgctttcaatcttctccttacaaaaaaaaatcctggccctctcttgtcccaataattagcagaagaagccaacagaaaactattccatatagctttcaattcaaacttgttttgattttcattttaactcaatggagaacagaacaagctctgtactcccacctggcttcacgtttcatcccactgatgaagaactaattgtttactatctttgcaaccaagccacatcaagaccatgccctgcatcaatcatcccagaagtggatatctataagtttgatccatgggaattacctgaaaaaacagactttggaaaaaaaggacggtacttctttagtccacgagagaggaagtatccaaatggggtgaggcctaatagagcaaccgtgtctgggtattggaaggccactggcacagattaagcaatcta

SEQ ID NO: 267940 - DNA, 425 bp, Glycine max
catggccaccgtcacttctgcagccgttgctattccctcattcactggcctcaaggcaagcgcaggcaaagtgagtgccgcagttaaagtctcagctccccaagccacaaggttgggcatcaaggcttcgctgaaagacgttggagtcgctgttgtggccactgccgcgagtgcagtgctggctagcaacgccatggccattgaagtgttgctgggtggtgatgacgggtctctggctttcgttcccaacaatttctccgtggcctctggggagaagatcgtgttcaagaacaacgcaggtttcccccacaacgttgtgttcgacgaggacgagattcctagcggcgtggatgcagggaaaatcttcatgagcgatgagaactttctcaatgcgcctggtgagacttacagcgttactttggatg

SEQ ID NO: 267941 - DNA, 453 bp, Glycine max
cccaatcgtgcacagaaattttaggatcgtgcaaccatatgtgaagacgtgataagggagactcgactaggttcaaatgaatatgctggttataaaccagtgatgtgtaaacaccacagaccaactcgtcaaggatttagaaaattatgacatatgatttccacataggagacatgccttatgcaaatggatacatctcacaatgggaccaattcacagctcaagtgcaagaaatttcgtcaacagtaccatacatgattgcaagtggaaatcatgaacgtgactggccaaacacaggatcattctatgatactccagattcaagtggagaatgtggagtccctgcagaaaccatgtattattttcctgctgagaatagagccaaattctggtataaagcagattatggccttgttcgcttctgcatagcagatagtgaacatgactggagag

SEQ ID NO: 267942 - DNA, 340 bp, Glycine max
cccacgcgtccggacggccttccagagactccagaagctttgattgaagatgtaattcatgacaaagaagctcaattcagcagcccaaacctgaatattgcttacaaaatgagtgtccgcgagtaccaaaatttgactccctatgccacagcactggaggagaattggggaaaaccccctggcaatctgaatgcagatggagagaatcttttggtatatgggaaacagtatggtaatgtctttataggtgttcagcctacatttggctatgaaggggatccaatgaggctgcttttctccaaatctgccagccctcatcatggatttgcagcatattatt

SEQ ID NO: 267943 - DNA, 454 bp, Glycine max
acgggactactctagaaggagagagtatccctgaagaattcacttacaaagatgttggattgccaaagtcagtggattggagaaagaaaggtgctgtaacccaagtcaagaaccaaggttcatgtcgtagctgctgggcattttctactgttgcagcagttgagggaataaaccagattgtgaccggaaatttaacatcattgtctgagcaagaattgattgactgtgacagaacttacaacaatggttgcaatgggggtctcatggactatgcattctcctttatagtagaaaacgatggactccataaagaggaagactatccttacattatggaggaaggcacctgcgagatggcaaaggaagaaactgaagttgtgactattagcgggtaccatgacgtaccacagaacaatgaacagagcctattgaaagcacttgcaaaccaacccct

SEQ ID NO: 267944 - DNA, 434 bp, Glycine max
ggaacaaacagggaatagaagagaggagaagatgggtttcataatggaatttgcggagaacttggtattaaagttgatggaagatccgaaggaaagggatcggaggttcagggagcacgtttatagagtgaaggacaggtgcgagaagacgaaggagatgtggagctaccctatgcgaccctatgggttttggacattcgaacgccacaattctcagcttgcttgggatgcacagattagccaagtggccgggaggagggacccttatgatgatctcctccaacatttctctaccccacctaagtgagtgttgctgaacttgccacatgcattatcggtgaaaaggatgaatttgtcgtaatttccccttgtaatatcctgtcttgttgcatgttgcagagattacaactggatttgtgctgtatttcaaaaat

SEQ ID NO: 267945 - DNA, 448 bp, Glycine max
acgcccacgcgtacgctgagaggaagtgagagggagattctttgtttgctaccttctgtcggaaaaatggttacgttcaggtttcaccagtaccaggtggttgggagggctcttcccacggaagcagatcagcaccccaagatctaccgaatgaagctctgggccaccaacgaggttcgcgccaagtccaagttctggtattttctgaggaaactgaaaaaggtgaagaagagcaatggccaagtgcttgccatcaacgagatttttgagaagaacccaaccaaaattaagaactatggtatatggttgcggtatcagagtacgactggttaccacaacatgtacaaggagtaccgtgacaccactctaaacggtgcagttgaggcaatgtacaatgaaatggcttctcgtcacagggtcaggagcccttgcatccaaattatcaaga

SEQ ID NO: 267946 - DNA, 438 bp, Glycine max
ataaatctaacaataatatatataaggtacaaatagtaaatcgaggtacccattgtatgagaaactttccttccatttttgttcctctagtaggcctagtatttccggcaattgcaatggcttctttatttctttatgttcaaaaaaacaagattttttagatacagaaaacatagtacaattctggggttctttattccccaattataatactaaattcaaaaaaaggacagtaatgagtataatctttcgctcagacgatgtactgatatattctatggcggaggttcgaagaacaagcaattcattttgagccgatttcactttgctaggttcattgcagttattgctcgttgcactttccagtcatctcggtatggatttggtctttatttctgagaaaattagtgattgttcttttattccggactctattta

SEQ ID NO: 267947 - DNA, 441 bp, Glycine max
gcaccacgtacgaatagttgcagagctataatctaacatatcgtgaggagaatgtggactggttagaaatctttagggctgcagtagtcttgatggcatggccatgccatggcgcatgctaccaaaggttacctctccgaatgaaaactggctatggtgagccttcttcagaggtaaaatgcgcaaggtttaggcttgctgtggacgcacacaacatccgagcctttaaaaccattcctgaagagtgcgatgaaccaaccaaggactacattgatggcgaacaatttagatcagactctaagaccgttaaccaacaagctctcttctatgctagtgaacgctaaggccatcacagcgacatctgtatattcgacatcgataacagcgtactctctaatgtccgatactatgcataacacggatatggagaggaggaattta

SEQ ID NO: 267948 - DNA, 457 bp, Glycine max
cccacgcgtccggttgatcgagattactataaacagcgtgatgaaaatgaaggtgcttgggttcttcgttgctacaattttggtagcatggcaatgccatgcgtacgatatgttccctctccgaatgaacactggctatggtgcccgtactccggaggtgaaatgcgcaagttggaggcttgctgtggaagcacacaacatctttggctttgagaccattcctgaagagtgcgttgaagcaacaaaggaatacatccatggcgaacaatatagatcagactccaaaacagttaaccaacaagcttacttttatgccagagacctcgaagtccatcccaaggacacatttgcgttcagtatagatggcaccgtactctctaatattccatactacaaaaaacatggatatggagtggagaaatctaactcgaccttgtatgatgaatgggttaacaag

SEQ ID NO: 267949 - DNA, 404 bp, Glycine max
agtggctataacactacttgcattcagttagactttgatagtgagattagctctaataagggtaaggaccagagagagaaagagaaataggaagaaaaacacaagatgggttattggaagtctaaggttctttccaagatcaagaaggttttcgagaagaatagcaccaagaaagctgctgctgctgatgccaccaagtcctttgatgagtcaaaggaggaatacaacaaagcctttgaagaaaagaagactgaacttcaaaccaaagttgttgaaatatatgaggcttcatcaacagaaatcaagagtttggttaaagaacccaaggaagctggcttgaagactaactccacagaagtccagacgttcctagaagagctagttaaaattgatttcccttgatc

SEQ ID NO: 267950 - DNA, 192 bp, Glycine max
cgaatcagtttcattggaccaattagcagaattgggtgtgttatactggaagctcaatccaactatctatgagaacgatcaagagttgaccaagattagacaagataggggatacaactacatggacctgcttgatttatgcccagaaaaggtggaaaattatgaacagaagttgaaggaacttctacactg

SEQ ID NO: 267951 - DNA, 278 bp, Glycine max
  unsure (1)..(278): unsure at all n locations
cccacgcgtccggattgtgcgtgacacatgcaggaacattggttttgtctctgatgatgttggtcttgatgctgacaactgcaaggtcctcgtcaacattgagcaacagagtcctgatattgctcaaggtgtgcacggccacctcacanagaggcctgaggagattggtgctggtgaccaaggtcatatgttcggctatgccactaacgagactcccgagctcatgcccttgagccatgtccttgccacgaagcttcgtgccaagctcaccgaggttc

SEQ ID NO: 267952 - DNA, 402 bp, Glycine max
cttttattgttgcttcattgatcatgaaaacgagggggctagattactactgaactacgggttcatgcagctggtgatgccatgcttaccatatgtgccctctacgaacgaacactgactatggtgcccgtactccggaggtgaaatgcgcacgttggaggcttgctggggaagcacacaacatctttggctttgagaccattcctgaagagtgcgttgaagcaacaaaggaatacatccatggcgaacaatatagatcagactccaaaacagttaaccaacaagcttacttttatgccagagacctcgaagtccatcccaaggacacatttgtgttcagtatagatggcaccgtactctctaatattccatactacaaaaaacatggatatggggtggaga

SEQ ID NO: 267953 - DNA, 394 bp, Glycine max
attttgataattatttttctagttgataagccatggctactcgaggaaagcttgagggtgacgttgatctcaagtctaacgcagacaagtactggcaaacccttaggaactccactgaaatattccccaaggccttccccaatgattacaaaagcattgaggttcttgagggtgatggcaaatcacctggttctatccgccacataagttatggtgaaggttcaccacttgtgaagtcatcctttgagaagattgaggctgttgatgaagaaaagaaggtagtgtcgtacactatcattgatggagaactcctccagcactacaaaacattcaagggagacatttctgtgactccagttggcgatggatgcgacgtgaagtggagtgctgtgta

SEQ ID NO: 267954 - DNA, 367 bp, Glycine max
cccacgcgtccgcccacgcgtccggccgatcagttatcgaagggagaggaattcgagaaaaaggctgagaagaagctcagcggttggggcttgtttggctccaagtatgaagatgccgccgatctcttcgataaagccgccaattgcttcaagctcgccaaatcatgggacaaggctggagcgacatacctgaagttggcaagttgtcatttgaagttggaaagcaagcatgaagctgcacaggcccatgtcgatgctgcacattgctacaaaaagactaatataaacgagtctggatcttgcttagaccgagctcggaatcttttctgtgacattggaagactctctatggctgctagatatttaa

SEQ ID NO: 267955 - DNA, 404 bp, Glycine max
cttttattgtttctttcttgatcatgtcgcttgttggtaaaattagtactgaaattggggttcatgcaactgctgcaaagtggttcaacctctttgcaacgcagctccatcatgttcaaaaccttactgatagagtgcatgaaaccaagctgcatcatggtgatgactggcatcacaacgagtcgatcaaacactggacttgtacaatagatggtaagattacaacatgtctggagagtattgaatccgttgatgaaccgaacaaaacaatcacctacaagctcttcggaggagatattggtcataagtataaagtctttaagctcatttttcaagctattgacaccgatcatgggggtgttattatcaaatggaccgttgaatatgagaagattgatgagaat

SEQ ID NO: 267956 - DNA, 421 bp, Glycine max
cttaaaagtagacgagcttcccctcttgctttactctgtttctcttcacttcttttggtaatcattctatagcgtgtgtgttgtgagcacatgaagattctctcaagggctcaagctctgaagtttcggtctcttcccaatcttacatcctacaatattttaattgacatgctttgtaaggcaggagaacttgaagctgctctgaaagttcaggactccatgaaagaggctggcttattccctaatatcattaccgtaaatattatgatcgatcgactgtgtaaagctcaaagacttgatgaagcttgctccatatttttaggattggatcataaagtttgcacccctgactcagtaacattttgttcactcattgatggcttgggcagacacggcaaggtgaatgatgcctatatgcttt

SEQ ID NO: 267957 - DNA, 419 bp, Glycine max
cagaaatcaagcattgggtcgaactcttctttgatgtcaaagtaatagctatgaatagtcatcgactcccggtaaagggtagaagagtacgacctattatgggacatacaatgcattacagacgtatgattattacgcttcaaccgggttattctattccacctcttagaaagaaaaaaacttaaatcaaaatacttaatagcatggcgatacatttatacaaaacttctaccccaagcacacgcaatggagccgtagacagtcaagtaaaatccaatccacgaaatcatttgatctatggacagcatcgttgtggtaaaggccgtaatgccagaggaatcattaccgcagggcatagagggggaggtcataagcgtctataccgtaaaattgattttcgacggaatgaaaaaaacata

SEQ ID NO: 267958 - DNA, 419 bp, Glycine max
cgtttcttagagccaacttctcagctcctgacaaggccagtcttagacagccatgggtgggatcatgattgtggttatgatggtgtaaacattgaacagagtctagccatcatcaataaattcccagcagctgttactgttcacgtaacaaaggataagaaagacttcagcatgcacttggattcctcagttgctgcaaaacttggagagaacggatcagccatggcaggctttgacattcaaaacattggaaagcagctagcttacattgttagaggagagaccaaattaaaaaatttcaaaagaaataaaacttctgctggtgtgtctgtgacattttttggtgaaaatgtgtctactgggctgaaagttgaggatcagattgctgttgggaaacgcgtggtattagtaggtagcac

SEQ ID NO: 267959 - DNA, 417 bp, Glycine max
  unsure (1)..(417): unsure at all n locations
cccacgcgtccgggaagagaacgggttttgaagaagaagcagttcaattgatcaactcagatttcagggacctaagtctagctgctaatagactcgcccatcatgccatcaaacttggtggcattggctttggagcctcttttttcggattgtttgctgccattgctgctatttatctgttgattttggatcgtacaaactggaaaacaaatattctcacagcactactcattccatacattttcttcagcttgccttcattaattttcgacgtcttcaggggagagcttggaaaatggattgctgcagttgctgttgtattacgccttttccttccaagacacttccctgattggctggaattgcctggtgctctgattcttcttatcgntgtagctccttctctaattgcaagca

SEQ ID NO: 267960 - DNA, 392 bp, Glycine max
  unsure (1)..(392): unsure at all n locations
cccacgcgtccgcccacgcgtccgtatttagggtttttgtcgtagcangaagaagcagcaatggcgccgaagataacacgcaaggtcagcagaaaccccgaattgataaggggaatcggaaagtactcgaggtcgcagatgtaccacaagaggggcatttgggctatcaaggccaaaaacggtggcgttttacctcgccacgaccccaaacccaaacctgaaactcccactgaaaaaccacccaaattttaccccgctgatgatgtcaagaaaccccttgtcaacaagcacaaacccaaaccagctaagctcaaggctagcattacccccggaacagtgttgattcttcttgctggtagatttaagggaaagagggtagtgtttttgaagca

SEQ ID NO: 267961 - DNA, 410 bp, Glycine max
cgacccttggctttatatttctgtacatttatattctcactggggaggaactcacaaagctagctagagactatatcaagtatctatttgggggaagccagagtgtccgactgaaaaatgccatgtatcaatggggacaactctatgaaagcatgacagctcagaaagaagaggaagacgagtattggttgcagaaggccattctggatacaccaacttggtggcacgaccctgctgattaccgtgaagcccttaaaaactacttgctatcacgtacagatgaggccattgccgccaggaattacttagaattagattcagatgcagacgttaggtatggctgggactcatgtgccgaaaaatatgaagatgaagatcaatatcaatataaagatgattatgaagaaaag

SEQ ID NO: 267962 - DNA, 409 bp, Glycine max
cccacgcgtccgcccacgcgtccggtttgaagaaaaatgaatctaaaggattcaaaggtgatttgctctttcatactgcttaattttcttttcttcagttgttttgcagctgataatctcccgtgccctccaaaatctactatcccaccttcctcttcaccgcagaaatgccccaaagacacgctcaagtttggtgtgtgtggaagttggttaggcttggttaaagaagtaattgggacaaaaccaagtgaagagtgctgcatccttttgaaaggtctcgctgatcttgaagcagcactgtgtttgtgcacagctattaaagccaatgtgttgggagctgtcaaggtcaaagtgcatgttgctgttagtttgcttgttaatgcttgtggaaagaaggttccatctggat

SEQ ID NO: 267963 - DNA, 380 bp, Glycine max
ctcctcaatcatccatagacatggccaccgacacttctgcagcagcttctattccctcattcactggcctaaaggcaggcgcaagcgaagggagtgccgacgcaagtaacgtctcagctccccaagccacaaggttctgcggaatgaaggcttgcctcaaagacgttggaatcgatgttgtggccactgctgcgagcgcagttctaactagcaacgccatggccatcgacgtgttactggacactgatgacgggactgtggatttctctcccaactctttttccaaggcccctggggaaaacatcgtggtcaagaacaacgcaagtttccaccacaacgttgcgttcgacgaggacgacattcctaacgacatggatgca

SEQ ID NO: 267964 - DNA, 82 bp, Glycine max
aaaaaaaaaaaaaaaaaaaaaaaaaaaaaaaaaaaaaaaaaaaaaaaaaaaaaaaaaaagaaaaaaaaaaaaaaaaaaaaaa

SEQ ID NO: 267965 - DNA, 417 bp, Glycine max
cccacgcgtccgcacatcctaatcacaaaagcggtgaccatggcaaacatgattatggcttccacaaaacctctggttccagtctgcaccagttcccgttcccccacaccaaaactccccattctccaaatttcactccccaaagccccaaccttgaaactgaaactcccaatttcaaagccccagatgctgtccctcctgggagggatagcaccactggtcttggccagaccctccctagcagaagaatttgagaaagcagcactctttgacttcaacctcaccctgcccataataatggtggagtttctgctgctgatggttgccttggacaagatatggttcaccccacttgggaaattcatggacgagagggacgcggcgatcagggagaagctgagcagcgtgaaggacacg

SEQ ID NO: 267966 - DNA, 418 bp, Glycine max
ctcttactctgattcgttagtgaagaaaaatggcaacaatcatcgccggcaccccaactacatcaatcactcgcacaggtcatgtgctcaaacgacctgttggggcctcatcctctaccgttcttggattgccagcaatggccaaggcggggagagtgaggtgctccatggaggaaaagccttcaagcagctcaaacctagggatgggggcatccttgttagcagctgcagctgccgcaaccatgtcaagcccagcagccatggctttggttgatgagagactcagcactgaaggaactgggcttccctttgggcttagcaacaaccttcttggttggatcctgtttggtgtctttggtctcatatgggctctcttctttgtctacacttccacccttgaagaggatgaagagtctgg

SEQ ID NO: 267967 - DNA, 219 bp, Glycine max
gtttcgtgtaccgtgagcacaacaggtcaccaggatactacgatggacgctactggaccatgtggaagctgcctatgtttggttgcactgatgcttctcaggtgttgaaggagcttcaagaggctaagactgcataccccaccggcttcatccgtataatcggattcgacaacgttggcaagggccagggattaaccttattggcttcacaaccccaag

SEQ ID NO: 267968 - DNA, 416 bp, Glycine max
gaagcaaatggcttcctcaatgatctcttccccagctgttaccactgtcaaccgtgccggtgccggcatggttgctccattcactggcctcaagtccatggctggcttccccaccaggaagaccaacaatgacattacctccattgctagcaacggtggaagagtgcaatgcatgcaggtgtggccaccagttggcaagaagaagtttgagactctttcctacctgccagaccttgatgatgcacaattggcaaaggaagtagaataccttcttaggaagggatggattccttgcttggaattcgagttggagcacggtttcgtgtaccgtgagcacaacaggtcaccaggatactacgatggacgctactggaccatgtggaagctgcctatgtttggttgcactgatgcttctc

SEQ ID NO: 267969 - DNA, 359 bp, Glycine max
atatatctgccactacaatgttcacagcatagacaatgaacttgaggactcctcacagatgcgaggggtagtacaaaccgcccttgttctatgctcttcagtgtacgtaatgataagcttctttgggttcctcctatttggcgaaggaactcttgatgatgtgctggccaatttcgataccaatcttggaattcctttcggttctgtgctcaatgatgctgttcgtataagctacgccgcacacctgatgcttgtatttccagttgtcttctttccattgcgtctcaacatagatggcctcctcttctctaaatcaaggcctctggttctggataacttcagatttgcatcactcacta

SEQ ID NO: 267970 - DNA, 426 bp, Glycine max
cccacgcgtccggctgaaagagactcctactcgtcaatcattgtgaagaaaagaagtgagcactgactctgttattggtctgaatttcctcaccctatacaactagttttaacgaacatggaaactgaaaagtctaatgtttcaaaggctgaagaatttaaactccttgccaatgaagcattcaatgctcgaaaattctcccaagccattgatctatatacacaagcaattgagctgaacagtcaaaatgcagcttacttttctaatcgtgcctttgcccatcttcggcttgaggaatatggtagcgcaatacaagatgccacaaaggctattgaaattgatcctaaatattcaaagggttattacaggcgaggtgctgctcatcttgggctggggaaattcaaggaagctctgaaagattttcag

SEQ ID NO: 267971 - DNA, 365 bp, Glycine max
cccactcgttcgcccacgcgtccgtaaattaaggtttttgccgttgcaggaataagcaggaatggcgtcgaagataacacgcttggtcaacaaaaaccccgaattgataaggggaatcggaaagtactcgacgtcgcagatgtaccacaagaggggcatttgggctatcaaggtcaaaaacggtggcgttttacctcgccacgaccccgaacccaaacctgaaactgccactgaaaaaccacccttattttaccccgctgatgatgtcaagaaaccccttgtgaacaagcacaaacccaaaccatctaagctcagggctagcattacccccggaacagtgttgattcttcttgctggtagattta

SEQ ID NO: 267972 - DNA, 415 bp, Glycine max
catttcgaaacccctggttccagtaccctaaccgaaacccctagcgctgctgctgctggtcacgtccccaattctaaaagccagggattcttcccgagggaattgaacttttcgaattcattgaaacctgaatccggtgaaattctgagctttggggagagcaagaagagctcttacaatggggctttctttcccggtgttgttgcggttgaggagaacaacaacaataacaagaacaagaagaagaggtccccggtggtttctcggagcagcattgacgatggaatgctttccttcacttccctgccggctgcaaatataaaatcagttaacggtgcttgtgtcggtgccggtgattcggatcactcggatctggaagcttccgtggcgaaacaggtgggggagcccgagaaac

SEQ ID NO: 267973 - DNA, 410 bp, Glycine max
gtgatttcagtgagtgatcggtgttcacttgatctcatcataatcgtcagcgtcaattgaagaagatgccgatcagaaacatcgccgtcggaaggcctgaagaggcgactcaccccgacacgttgaaggcggctttggctgagttcatctcaaccttcatcttcgtgttcgccggctcaggctccggcatcgcctacaacaagctcaccgacaacggcgctgccacccctgccggcctcatctccgcctccatcgcccatgcattcgccctcttcgtcgccgtctccgtcggcgccaacatctccggcggccacgtcaaccccgccgtcaccttcggcgccttcgtcggcggcaacatcaccttcctccgcggcatcgtctacgtcatcgcccagctcctcggctccatc

SEQ ID NO: 267974 - DNA, 421 bp, Glycine max
cggtggaccacgcgtccgttagcttccaaccctacactttttttctttttcgatattaacctttccacatggccggcgaagttcgaccccttcccagatagtcgacgtcttcgtccgcgttaccggcggcgaagtcggcgcggcgagttccctggccccgaagatcggtcccctcggtctctcccccaagaagatcggagaagacatcgccaaagaaaccgccaaggactggaagggcctccgcgtcaccgtcaagctcaccgttcagaatcgtcaggcgaaggtcacggtggtcccctccgccgccgccctcgttatcaaggccctcaaggagcccgagcgcgaccgcaagaagaccaagaacatcaagcacaacggcaacatctcgctcgatgacgtcatcgagatcgctagggttatg

SEQ ID NO: 267975 - DNA, 399 bp, Glycine max
cattgttgttatattgtattgtagccggagaagaagagaagagatagcggcgaagaaagaaagatgacggaggcatatataaggaagaagcccgggatggcgagcgtgaaggacatgccggttctccaggacggtccaccaccaggcgggttcgctccggtccggttcgcccggcgcatccccaacaagggccccagcgccgttgccatcttcctcactgctttcggcgctttctcttggggcatgtaccacgtcggccagggcaacaagatccgaagggcactgaaggaagaaaagtatgctgcccgccgatccatactgcctgtgctacaggctgaagaggatgagagatttgttaaagagtggcataaatatctcgagtatgaggcagaagtgatg

SEQ ID NO: 267976 - DNA, 423 bp, Glycine max
tggaaacgaaggacgacagtgctgaaaaagattaagcttggtcttctcatgaagacgaaattcttttgaactatgttcaagtccgtggagaaggaaattggagaaaccttcctaaaagagctggcttgaaacgatgtggtgagagttgcaaacaacgatggttgaactatcttaagccaaccatatctagaggaaacatttctttagatgaacatgaactcataatcagactgcataagctcttggggaatagatggtctatcattgctggacgattaccaggacgcaccgaagaagagatcaagaactactggaatacctatttgagaaaggaggcagaagagaaccaaaacaataagaacgaatttccaagcacaagtatgacaacaactagcatgtctagtgttcaatctccatggtact

SEQ ID NO: 267977 - DNA, 387 bp, Glycine max
ccgcagtttcactgattccatcttcttctgcttcttcactctctcgctctcagagtctcagactacttttctgaaagcatttcaaatggttgatagcaatccttcctctggatcacctgaagaaacacaaaatcccaacccagatgggaatgcacctgttgaaagtgatcttgcattggagaatctagcccaaaaagttcaagaatctctctctctggaaaaaagacacaaattctgggaaacccaacctgttgggcagttcaaggatataggggactccagtttgccagaaggcccgattgaacttccaatccccttatctgaggtcaaacaagaaccatacaaccttcctgaccactatgaatgggttacttgtgacatcaactc

SEQ ID NO: 267978 - DNA, 384 bp, Glycine max
gcaagcgcttctcctctttgtgttctggctatgcttcttggcaagagttagatcggacgaggattgcgtgtacacggtgtacgttcggacgggttcgatcatcaagggaggcaccgattcagtaattggtctgaagctatacgacaagtccggctacggcatatacatcaccaacctcgaggcatggggcgggttaatggatccgggtcacaactactacgagcggggcaacctcgacatattcagtggtagaggcccttgcttggaagcacccgtttgcgaggccaacctaacttctgacgggtcggggccccatcacggctggtacgttaattacgtcgaggtcaccaccactggggtccacgcgccttgttctcagcagca

SEQ ID NO: 267979 - DNA, 401 bp, Glycine max
cccacgcgtccgcccacgcgtccgctgcttcatacctgtggcttacctctagaagatgtagacttcataaattctgatgggaagacaatgaacaagctgttgctggagggaaatccacgaatgactctttttactggtagttcaagagtggcagagaagttggctgttgatttgaagggccgtgttaaattggaagatgctggatttgactggaaaatactgggccctgatgtgcatcaggaagattacgtagcatgggtctgtgatcaggatgcatacgcatgcagtggtcagaaatgctcagcacaatcattgttatttatgcatgagaactggtctaaaacttccttgctatctaagttgaaagatcttgctgagagaagaaagttggcaaacttgac

SEQ ID NO: 267980 - DNA, 422 bp, Glycine max
cccacgcgtccgtgagtctgcacgagtggacgtaatgaagctcgacctttgctcagtgaattctattacatcatttgtggacaacttcatagctcttgatcttcctctcaacattttaataaacaatgctggagtaatgttctgcccattcaagctctcagaggatggcattgagatgcaatttgcaacaaaccatcttggtcatttccacttgacaaacctgcttcttgacaaaatgcaacaaactgcaaaagccactggaatagagggcaggatcataaatctgtcatcaattgcccataactacacttatagaaaggggattagatttaataagatcaatgaacgaaaaggttatggtaacaagaaggcgtatgggcagtccaagttagcaaacatattacatacaaatgagctttctc

SEQ ID NO: 267981 - DNA, 382 bp, Glycine max
tcagaagatcaaggacttgagaactaaggagatcaagaatggcagactggccatgcttgctgtcatgggtgcatggttccagcacatctacactgccaccggtcctattgacaacctctttgcccaccttgcagatcctggccatgctaccatttttgctgctttcacccctaagtgaaaaggctaagatcaacaatcagattaccagctgtttgggatgagaggagtgtttatatatgtctgtagaaattaagcttgtaatatggctacttctatgtcatatatgcacataatatcataatccaacgtgccgacacctatttaagttttagatgccatggatgtaagttcaggtaataatcccatttgtgcataagatcat

SEQ ID NO: 267982 - DNA, 364 bp, Glycine max
attctccattctcacttctcaaattgaatcgaacgaattcacaaaccctagttttcgaggatgggtcacatccagtactccgagaagtacttccatgacacttacgaatatagacatgtggatcttcctcctgaagtcgcaaaactgcttcccaagaatcgtcttctctccgaaaatgagtggcgggcaattggggttcagcagaaccgtggctgggttcattatgcaattcatcgccctgagccacacataatgctctttatgaggcctttgtattatcagcagcagcaggaaaaccatgcccagcaaaacatgcttggcaaaagagcactatctatgcaaatctgaaagtgggattacaatg

SEQ ID NO: 267983 - DNA, 346 bp, Glycine max
cccacgcgtccgcccacgcgttcgtcttttcgtccgcccacgcgttcggaaaaaagaaaaaaaaaaaaaataaaaaaaaaaaaaaaaaaaaaaaaaaaaaaaaaaaaaaaaaaaaaaaattaaaaaaaaaagtaaaaaaataatttaataaaaaaaaaaataaaaaaatttaaatataattttttatgctataaaacgaaaatattcctaatcaaaaataaaagaatttccctccctaacttttataattaattcaagaagctcgtgctttaaaaaaaaattatggtttttttttttatttaggagataaaaaaatttcttgatatgattcttattccgaatttat

SEQ ID NO: 267984 - DNA, 383 bp, Glycine max
cggacgcgtgggcggacgcgtgggcggacgcgtgggcggacgcgtgggcggacgcgtgggccatggtgagcacctccttcatgaggaagcaacctatgacgaccaagagcctaaagacattccccaacgctctttttggtctgaaaggtggacgaggtggtcgtgtaacttgcatggcctcgtacaaggtgaagctcataaccccagaaggagaagtggagtttgaatgcccagatgatgttttcattgttgacaaggctgaggaagaaggcattgaacttccctactcgtgcagggctggttcttgcgtttcatgtgttgggaaaattgtgaaaggtgacgtggaccagtcagatggtagcttccttgatgatgaacaaata

SEQ ID NO: 267985 - DNA, 282 bp, Glycine max
cccacgcgtccgcccacgcgtcctttttttttaaaaaaaaaaaaaaaaaaaaatggaaggaaaaaaaaaaaaaaaatggtgaataaaaaaaaaaaaaaaaaaaaaaaaaaaaaaaaaaaaaaaataaaaaaaactatatttaaaaaaaaaaaaaattataataaaatgtatttaatttatgggggggccttttttaagaatcctattttttttcccggttttttggcagttttttttttttttttttggcccctttatttattttctggggcgctcttttta

SEQ ID NO: 267986 - DNA, 419 bp, Glycine max
cccacgcgtccgcccacgcgtccgctataagctagtttatcgtgaggagaatatgaagttgtttgttttctttgttgctgcagtagttttggtagcatggccatgccatggcgcaggctaccaaaggttccctctccgaatgaaaactggctatggtgagcgttcttcggaggtaaaatgcgcaagttttaggcttgctgtggaagcacacaacatccgagcctttaaaaccattcctgaagagtgcgttgaaccaacaaaggactacattaatggcgaacaatttagatcagactctaaaacagttaaccaacaagctttcttttatgctagtgaacgcgaagtccatcacaacgacatatttatattcggcatagataacaccgtactctctaatatcccatactatgaaaaacatg

SEQ ID NO: 267987 - DNA, 408 bp, Glycine max
ttcccggggggctcagcgtttcatgaaagtccccatggaaattactcggcaggctcttgacactcactggtgtgtatggcttctggaagcacgtgaccaatcttgaacgccgtgagagcaaacgttacctcgagatgttctatgctctcaagtaccgcaaattggctgagtctgtgccccttgctattgaagagtaaattcatgtttgaagagaacatcaatggagaaaccggcttttggtcgtttgaagtcttatggagctttcataaataacgccattgattttgattgtgatcagcttttggatttaaagagtctaaaaaaaagtgtcgcttgtttttatattttgcttacgttttgggtaaaaaaagtaaaaaaagaaagtctttttttttttttaaattcttt

SEQ ID NO: 267988 - DNA, 383 bp, Glycine max
tacaatgtcactcctaatcaaccaactccaaaggatccttcatggctatccgatagtgaccaaatcggtgtcctaggtcatgtagccattgtctacatatacgaagcaaatcccaacagcaacaccattgagagattgaggaactctcttagcaagcttttggtgtactactatccattcgctggcagattcagcttgacaaaaagtggtcgcatagaagtggattgtaacgcaaagggagtgacattgattgaagctaaaacctcacacacacttgatgattatggagacttttcaccttcaaagttgaccgaggaacttgttccagatattgattatactccacccatagaggagattcccctattactacttcaattcac

SEQ ID NO: 267989 - DNA, 428 bp, Glycine max
  unsure (1)..(428): unsure at all n locations
gttccggtcgcccagaatccgagatcaaccctgacccctaaggccaggggtttttctcggcttcttcacattcctgaaatggcgtctgtttcagctttagccaagtacaagctcgtcttcttgggtgaccaatccgtgggcaaaaccagcatcatcactcgcttcatgtacgataaattcgataacacctatcaggctacaattggtattgattttctatcaaaaactatgtatctcgaagatcgaactgttcgactgcagttgtgggatacagctggccaggaaagatttagaagtcttattccaagctacattagggactcatctgtagctggtattgtatatgatgttgcaagccggcagactttcctaaatactgcaaagtggattgaagaggtgcgaacagagagaggcagngatgtcattat

SEQ ID NO: 267990 - DNA, 371 bp, Glycine max
gaaggattggaccttggaaagatggacaaagctgatgactctggacttgcttcatatgttgccggtcaaattgatcgtactcttagctggaaggatgtgaagtggcttcaaacaatcaccaaactgccaattctggtgaagggtgtgctgactgctgaggacacaaggatagctgtacaaagtggtgcagctggaattatagtgtccaatcacggagctagacaacttgattatgttccagccactatatcagccttagaagaggttgtcaaagctgctgaaggtcgtgttcctgtatttttggatggtggtgttcgccgcggaactgatgtcttcaaggcattggcactaggtgcctctggcatatttat

SEQ ID NO: 267991 - DNA, 351 bp, Glycine max
ggtttccatgtccatgccttgggggacactaccaatggttgcctttcaactggatcacatttcaatcctaataacaaggagcatggtgcccctgacgatgagaatcgtcatgctggtgatcttgggaatgttaatgtcggcgatgatggtactggcagcttcactattactgacagccagattcctctcactggaccaaacaacatcatatgaagggcgggtgctgtccatgctgatcctgatgatcttgggaaaggtggtcatgagcttagcaaaactactggaaatgctggtggcagagttgctcgtggtatcattggactgcaacgataaacttatcacatgaagttg

SEQ ID NO: 267992 - DNA, 425 bp, Glycine max
cccacgcgtccgggcagatggatcatcaacaccagcaacaccttcagccaaagtttcagccatcttcatataccctattaaatcatgccgtgcaatttctgtttctcgtgctcctctcactcctactggatttcgatgggatagacaatggatggtggtgaattcccaagggaggatgtacactcaaagagttgaaccaaggcttgctttggttgaggttgaattgccatctgaggcatttcttgaaaactgggaacctacacaagactcctacatggtggtgaatgcacctgggatgcaacctctcaaaatatgtttgagccaacaagggaaggaggtagcaaatgctgtctcagtatgggaatggactgcatctgccttggatgagggagctgaagcatcacagtggttctcagattatttag

SEQ ID NO: 267993 - DNA, 268 bp, Glycine max
  unsure (1)..(268): unsure at all n locations
gaataagtgatttatnctgatagtgatgatgaattggatggcgtcatgcggaatagtgaatgatttttatctagaaagtgtaagcaggcacatcttttgtactttaaataggtgttgtggtatcagggctaaatctcagattattatgttctatggttagaaatcttagttatggttctctttgtgtgacaatgtgaacaataagattgcttatgcatgaataatcaacaaaataatactatggtggagagccttttaattacacaag

SEQ ID NO: 267994 - DNA, 407 bp, Glycine max
cccacgcgtgcggtgactcgatcttcttcgtcgctatcttcttctttgaagtagagcgtgcgtttttctctcacctgaaaatgtcttgctgcggtggtaactgcggttgcggaagcgcctgcaagtgcgggaacggctgtggaggctgcaagacgtacccagacttgagctacaccgagtcaaccaccaccgagaccttggtcatgggagtggcaccagctaacgctcaattcgagagtgctgaaatgggggttaccgctgagaacgatggctgcaaatgtggagctaactgcacctgcaacccctgcacttgcaagtgaggtgttggagagctaaagcttcaagcagagatggcccttacgaataatgataaaaactatatgtagtgtcaaaacttcaaaaatatg

SEQ ID NO: 267995 - DNA, 343 bp, Glycine max
cccacgcgtccggtggtggtgtagtggcatactcagaatcacaatcaggagctgaacgtgctagtattgaagctaatgagcctgccaaaaagaaagtggtggttcttggaacaggatgggctgctaccagtttccttaaggatctggatgcttcattatatgatgttcaagttgtttcacctcgtaactactttgcatttactcccttattacccagtgtcacttgtgggacagttgaagcacggagcattgtagagccggtccgaaacatcattaaaaagagaaaaggagaagtgaatttttgttcgaataatcaatcttgacacattctgccatttttatt

SEQ ID NO: 267996 - DNA, 370 bp, Glycine max
agaggcttgagtctggattgtacagtagaagttaccttgaaaatcagatggctgttgccttgggtggaagggttgccgaagaggttatttttggccaggaaaatgtcaccaccggagcatcaaatgacttcatgcaagtttcacgagtggcaaggcagatggttgagagatttggattcagcaaaaaaattggacaagttgccattggtggacctggtggaaatccattcttgggtcaacagatgtcatcgcaaaaggattactccatggcaactgcggatgtagtggatgcggaagtgagggaactggtagagagagcatattctagggcaacacatattatcacaactcacattgacatccttcacaa

SEQ ID NO: 267997 - DNA, 419 bp, Glycine max
  unsure (1)..(419): unsure at all n locations
cccacgcgtccgggctggtccctctgagcccggcactggcttcctcggacgaggaatacatgaaggagaccgaggaagtgatcaacaaagtgaggacaacaatcgtgatggacaagaatgaccccaacgtggcaaccgcggtggcggagttgagagaaacctcgaactcgtgggtggcaaagtacaggagggaaaaagcgcttctgggacgcgtttcctttatggacatgtattccgcgctcaacgctgtttctggtcactacattagcttcggaccaaccgctcccattcccgccaaacgaagggcaaggatcttggaggaggtcgacactgctgaaaaggcgcttctaaggggaagataattgagcaaaaaggttttttttttttccttctttcgcttcgntcttcttggttcttaa

SEQ ID NO: 267998 - DNA, 304 bp, Glycine max
ctctgctcgcagggtttctccaccaagagggaaatggctcccaaaccgcctagtacgggtctgtttgttggactgaacaagggtcacgtcgtcaccaagaaggaattgcctccacgcccctcacatcgtaaggggaaaacaagcaagagggtgcactttgtgaggaacctcataagagaggtagccggctttgcaccctatgaaaagcgtataactgagttgctgaaggttgggaaggataaaagggcactgaaggttgcaaagagaaagctcggaacacacaaacgcgcaaagaagaagcgtg

SEQ ID NO: 267999 - DNA, 348 bp, Glycine max
ctaggtgtccggaaatcgttcctatcatcacttctcaaatctcgaaccctctcgttcgtgccgatcactaggtcacactgcatcaatggcgggtagaggcaaaaccctaggatccagcgccgctaagaaggccacctcaaggagcagcaaagccggcctccaattccccgtcggtcgtatcgccaggttcctcaaggccggaaagtacgccgagcgcgtcggcgccggagcccccgtctacctcgccgccgttctcgaatatctcgctgctgaggttttggaattggctggaaacgctgcgagagataacaagaagactcgaattgttccacgccacatccaattggc

SEQ ID NO: 268000 - DNA, 307 bp, Glycine max
gtcgaaaagctatggtctctcataccccaagacgcgaaggaaaaagccctaaaatcgagggacactgcccctctaatcgacgtcacacagcacgggtacttcaaggtcctcggaaaaggtgttctgccccaaaatcagccttttgttgttaaggccaagcttatttccaagatcgccgagaagaagattaaggaagccggtggcgctgttcttctcaccgcttacgtttaaaaactggtttttaattgggttgctttgtttcggataacttttttgattatatattgcaagtgatacattgtgtttt

SEQ ID NO: 268001 - DNA, 398 bp, Glycine max
  unsure (1)..(398): unsure at all n locations
caggccttcagacatcatcaggatgcgatacgaccgacttagaagcattgctgggagggtacagactgtggttggggatttggccactcaaggggagaggctgcagtctttgctcagcttgagagatccaagagccactgccctctttgtgattttctgtctggttgctgccattgtactctatgtcactcctttccaaattgtcgcacttttcactggaatctatgtgttgagacacccgaggttccgccacaagcttccttcggtgcctatgaatttcttcacgaggctgcctgcaagaactgattgcatgctttgagtcatggctagtgcacatactacaaaaagagcagcttgctttgctttcattgntcaacaccagattttgtggatttgca

SEQ ID NO: 268002 - DNA, 408 bp, Glycine max
attttatccaattgaaattttaaaaatgactgggataaacttaagaattcaattattggaattgaataagtaaacaatttaattggattggtcgaatggtatcaaaaaaatggagtactaactcccatttcttatttattattgaattaaccgatcaacttgctttgttatcgaacatttctttttgatttcaaaaattttccggaaaaaatttgaatctatttttatatgcgaatcaatcctactacttctggtcctgaggtttctgcgcttgaaaaaaaaaatctgggacgtatcgcccaaataattggtccggtactagatgtagcttttcccccatgtaagatgcctaatatttacaacgctctgatagttaagggtcgagatactggtggtcaacaaattaat

SEQ ID NO: 268003 - DNA, 367 bp, Glycine max
cccacgcgtccggaaagttttatggttaaaccacaatatctttttttttttttttcttcttgttcgtctttctcgtagcgtatggaaaaccaccaaaatcacaaggtagaatcagaaccggacatagagaagaaccaccatcaccgccaccaacagcagcagcagcaacaacaccgtaacgaagtgtggggcacgtgggaggagctgttgctagcgtgcgccgtgaaccgccatggcttcaaggactgggacgccgtcgccatggaggtccagtcgcgcaccacgcgccttctcggcaccgggcaccactgcgagcagaaatttgacgatctcagccgccgattcggcgaccaatgcaacgacgacg

SEQ ID NO: 268004 - DNA, 324 bp, Glycine max
agccaagtgaaagtgagaaaaaataaaaatcaaagagcataatgtcagggatcattcacaagattggggagacccttcatgtgggagggcacaagaaggaggaggagcataagggtgagcaccatgctggagaatacaaaggggagcaccatggtgaacacagtagtgagtacaaaggagagcatcatggtgaacacaaagctggagagtaccatggtgagcacaagccagagcacaaagaggggttcctagacaaagtcaaggacaagatccatggtgagggcggcgccgccgaaggcgagaagaagaagaaggagaagaaga

SEQ ID NO: 268005 - DNA, 412 bp, Glycine max
cccacgcgtccggaagaatcagagaatggcaactatgactggtgtgagcctttcatgcgcccagggttttcttcaacgcatcagcctcaccgcaaaacgcgcatgctgtaaagttctcacttccacccagccaagcagtgcgaccgggtagtatcaagttgggtcgcgtgatgaggatccgacccgttcgcgctgcgcctgagcgcatatcggagaaggtggaggagagcataaagaacgcgcaggaggcgtgcgccggcgatccgacgagcggcgagtgcgtggcggcgtgggacgaggtggaggagctgagcgcggcggcgagccacgccagggacaagcaaaaggaaaaggactccgacccgctcgagaattactgcaaggacaacccggagaccattgagtgcaaaac

SEQ ID NO: 268006 - DNA, 419 bp, Glycine max
cccacgcgtccgctctcatctttcaatttcaatcaacggttatacccttttctatttgagcatcatcatgtccaccgcagcgcagcccaaggccaagaaaacggcgtcgtccaagaagcccctctcccatcctaccttcgccgtgatgatagcggaggcgatagcgagtctgaaggagagaaccggttcgagccaatacgcgataaccaaattcatcgaaggcaagcacaaggagttgcctccaacctacaagaagcttgttctcgttcatctcaagaagtctgttgctgctggcaagctcgttaaggtcaaaaactctttcaagctcgcaccgactaagtctgctcctgttaaagccgctgctgctcccaagaagcccaccaaagcttgggctaagcccgccggcaagcccggtttca

SEQ ID NO: 268007 - DNA, 355 bp, Glycine max
gaaaaaaaagggggggaaatttcaatggcgtcaagggtttctctgaaggcgaagggtaagagttgagagggatcgaaggccgcggaagatcgatctgcgagcgagtgcctgaaggagtggacgacatgggcaatgcgaaaagcgaaggtcatcactcactatggtttcatccctttggtcatcatcatcggtatgaactctgaccccaagcccccactttcccagcttctcagccgcgtctgatctacctcttcatttcttccaccatcaacgcgacctcgtttttttcttttcttttgccccctttctacatttgtaagtttctttatggatcaattttcactttgacatctca

SEQ ID NO: 268008 - DNA, 435 bp, Glycine max
cccacgcgtgcgcacacgcatacgttcctttattgtccttcggaaggaagaaaagtatgctgccggtcgatccatactgcctgtgctacaggctgaagaggatgagagatttgttaaagagtggcataaatatctcgagtatgaggcagacgtgatgaaggatgtgcctggttggaaagttgctgaaagtgtgtatcactctgagagatgggtgcccccagcaagtggtgagttgcgtcctgatgtatggtgatgttatttcagccatctctatctgcttctttcattacatgctgctggtacttttgtccagtctctaaattacatgctggtacttttgtgcaggctcttaaataaatttatatcaaaaggttgcaaccctttggaatataatattcatttttaaaaatgttatatgaaggaatcttatttatg

SEQ ID NO: 268009 - DNA, 372 bp, Glycine max
cccacgcgtccgcaagaagagtgggattgacgttcagtgtcagattccattatatgtgggaaccaagatggcatcaatcaggaaatcttcattctttgtaccatcaacagatggctatgccaaagcaggtgtgaaatggataggctatgagcctcgttgcacaccatactggccgcatactcttctttgggctgtggcattctcattgcccgagtttgatgatgatgcttggcgcctgtggttttgcttgggtattcgaaagaggggacagcgcaaagagtccatgaagaacgaataaaaggatgcttggttctgatgtgtaagccaatagacgctactcatctgataatatatatgcagattgttagctga

SEQ ID NO: 268010 - DNA, 404 bp, Glycine max
cacctgaggcttccaaagcaatggctttccttgcagcatccactgctgctgctggcctgggcatgtcagaaatgctgggaaaccccatcaacttcagtggtgccacaaggccagctccatctgcttctagtcctgcctccttcaagactgtggctcttttctccaaaaagaaggctacaccaacacctccaaaaaaagctgctgctgctgctcctgccaatgatgagcttgccaagtggtatggtcctgacagaaggatcttcttgcctgatggtctcttggaccgatccgaaatcccatagtacttgaccggagaagtccctggagactatggttatgacccatttggtcttagcaagaagccagaagactttgtcaaatatccagcatttgagttgattcat

SEQ ID NO: 268011 - DNA, 411 bp, Glycine max
caagccaagtgaaagtgagaaaaaataaaaatcaaagagcataatgtcagggatcattgacaagattggggagacccttcatgtgggagggcacaagaaggaggaggagcataagggtgagcaccatgctggagaatacaaaggggagcaccatggtgaacacagtagtgagtacaaaggagagcatcatggtgaacacaaagctggagagtaccatggtgagcacaagccagagcacaaagaggggttcctagacaaagtcaaggacaagatccatggtgagggcggcgccgccgagggcgagaagaagaagaaggagaagaagaagaaggagcatggccatgagcatggccatgacagcagcagcagcagtgacagtgattaaactggtggatcaactatatatttaaa

SEQ ID NO: 268012 - DNA, 425 bp, Glycine max
atggattccttgcttggaattcgagttggagcacggtttcgtgtaccgtgagcacaacaggtcaccaggatactacgatggacgctactggaccatgtggaagctgcctatgtttggttgcactgatgcttctcaggtgttgaaggagcttcaagaggctaagactgcataccccaacggcttcatccgtatcatcggattcgacaacgttcgccaagtgcagtgcatcagcttcatcgcctacaagcccccaggcttctaagtgtgaaaaatttgcaaagcatttgtagccgccaccccactttgtttgtttgtacttaaactacattcccatttggttttgctttttgagatttcatcatcctgtatttttggcttctggtttcggacttcaatggaaattaatggatgagaacttatgaatt

SEQ ID NO: 268013 - DNA, 347 bp, Glycine max
cacgaaaatattcacagggtttggtttattccaatttttatttttagtttttccctttattggacggtagagtgtgtaagagagagagagagaaatgggaagaggaagagtggagttgaagagaattgagaacaagatcaacaggcaagtgacctttgcaaaacgaaggaacgggcttttgaagaaagcttacgagctttccgttctttgtgatgccgaggttgctctcatcatcttctccaatagaggaaaactgtacgagttctgcagcagttcaagcatgctcaaaacgctagagaggtaccagaaatgtaactatggtgcgcctgaggctaatgtgtctacac

SEQ ID NO: 268014 - DNA, 366 bp, Glycine max
gaacagagaagcaatcagttgccaaactatttttctctctcctttttttgacttttctgtctttctgcaactccaaaatgtcttccataggggcaaaaaatctagcactctcctcagcctttttgctccttttggtcggttttgcaacctcagacatcaaccaagacaaagcagaatgtaccgacaaacttcttggtctagctggttgtcttccctatgttggtggtgaagccaaagtccccgccatggattgttgctctggtatcagagaggttattgacaagagcaagaggtgcctctgcatcctcatcaaggatcgtgatgaccctaatcttggcctcaagatcaacgtcacccttgctctaa

SEQ ID NO: 268015 - DNA, 405 bp, Glycine max
  unsure (1)..(405): unsure at all n locations
ctctgttctttctctctcaaaggaaagaaaaggaaagaaaagaaaagaaaaagaagagagtgtacgtaaacagaagcacacactacacagttaccaaaatcaggttcaaacgcacagatctgggagaagagaagaagaagaagaagaagatgggacaggatcagaaccagagatcgctgatctacgcgttcgtgtctcgcggcacggtgattctcgccgagtacactgaattcagtggcaacttcaacacaatcgcgttccagtgcctccagaagctccctgcctccaacaacaagttcacctacaactgtgacggccacaccttcaactacctcgtcgacaacggattcacttattgggttgntgcggatgaatcgattgggagacaggtgccttgggcttttc

SEQ ID NO: 268016 - DNA, 157 bp, Glycine max
gatggatccagacgcgtcggcaaaggcatccgtggagcactactacagcaccttcgacagcaacctgaacgggttagcggattagtatcatgagggtttcatgctgaccttcgtagggctgaagatccagtgcgcttgcagcatcagtcagtaaact

SEQ ID NO: 268017 - DNA, 276 bp, Glycine max
tctttctgcatcttttattttaaatttcttatctctttcttgtaaattggatttgctttaatctaaatataacaaagttctcgtaaaaaaaaaaaaaaaaaaaaaaaaaaaaaaaaaaaaaaaaaaaaaaaaaaaaaaaaaaaaaaaaaaaaaaaacaaaaagcaaacaaacaacaaaaacacaatcttaatcgtcacacaaagaaaaaattaaacggcttcagtcgggtaacctacaacctcaacaacgccctgtggttacccacctcagaaact

SEQ ID NO: 268018 - DNA, 172 bp, Glycine max
aaaaaataaatattttataataaataaaataaaaaaaaaattaaaaataaaataaagatagaatataaatataaaaaaaaaaataataaaaaaaaaaaaaaaatttaataaaataaaaaaaaaataaaaaaaaaaatacataaaaaaaatcaatttttaattttaatttaat

SEQ ID NO: 268019 - DNA, 316 bp, Glycine max
ctaaacattcactcatgccactatcccaccacgcactctaaatgccgcaccacccactccaaagactacaccatcaactgcgaagcccacaccatccacgccaaaatccacaccaactactgcaaagtgctagtgatcatcttcgtctcctgcttaaccaccatgaaacaaagcctcatgccctaatgacacattaaagctaggctcttgtgctcatctattaggacttgcttacattattgatggaactcctccttccaacccgtgatatgcattgatcaaagctttggcggattatgaaacttcacttttccta

SEQ ID NO: 268020 - DNA, 433 bp, Glycine max
  unsure (1)..(433): unsure at all n locations
ctcactcacaactcagtgaaagagaattcgaggcgaagagaagagaaaaattaagatggaggggaaggagcaggatgtgtcgctgggagcgaacaagttcccggagagacagccgattgggacggcggcgcagagccaagacgacggcaaggactaccaggagccggcgccggcgccactggttgacccgacggagtttacgtcatggtccttttacagagcagggatagcagagtttgtggccacttttctgtttctatacatcactgtcttaaccgtcatgggagtcgccggggctaagtctaagtgcagtaccgttgggattcaaggaatcgcttgggccttcggtggcatgatcttcggcctcgtttactgcaccgctggcatctcnaggggacacataaacccggcggtgacatttgggctgcttttg

SEQ ID NO: 268021 - DNA, 428 bp, Glycine max
  unsure (1)..(428): unsure at all n locations
ctcttcctcaccgattgctagaatggaatttcgatgctcagtcatctcttttaccattctcttcgctcttgctcttgcaggagagagccatgtccatgcatcgctacctgaggaagattattgggaagctgtttggccaaacactcccattcccactgcactgcgagagcttctaaagcctctccctgcaggtgttgaaatcgatgaactccctaagcaaattgatgatacacagtacccaaaaacattcttctataaagaagaccttcatccaggcaaaacaatgaaagtacaattcaccaagcgtccctatgcacaaccttatggtgtatatacatggttaacggatattaaagacacctctaaagaaagatatagttttgaagagatatgcatcaagaaaggagcgtttgnaggagaagagaaag

SEQ ID NO: 268022 - DNA, 281 bp, Glycine max
ttccccatcgacccgcgcgtccgataaaccataaccaggggtattatgaatctttagttttggatcgagcctctgaggaacaaatcgggtccaattccaatatgcctaagcaaattcacaagattaatgacttcctactaactgctaggacgaatgatgcacgctctgcgaaaatcaagcggatcaacgacgtcgtgaagctcaaggtcctctgcttcaagtaccttaacaccctctgtgagaacaaatctcagaatgcataataacatcatgcatcactt

SEQ ID NO: 268023 - DNA, 402 bp, Glycine max
  unsure (1)..(402): unsure at all n locations
aaaaaaggaaaggaacttgagccacattttgtccctggtggactcaagaagagtctttgataggacagttaattaaaattatagcctgaaataagggttcactagcaatggcctcaacctcttctgctctcactatatcctcttcttccacccttcatgattgcaaggctccaagacagtcaccagctgcttcaccacaatgtgtgagccttccctctccccttttgcactctcagaactgttcatggaagaccactgcttattgtcgcagtattgctcgaaatgttatggcaatggccacaggagaggcaccagctgaagctgccccgactgaggtgccagagattgtcaagactcttcaagaaacttggacanagttgatgataagtatgcagtgagttc

SEQ ID NO: 268024 - DNA, 338 bp, Glycine max
  unsure (1)..(338): unsure at all n locations
gtttgtgatggctatcttgctgttgttagaggcattaggagagctattatgacagggagggcagtgagggtgaattcacaattgaaatctcacaaaagatttgctaatgcatttccaagattttgcaaacttgttgatgatgccaggctctattgcacaaatgatgtgggtggtccaccacagctcanatggcggaaggatgatgatcagaatctgccatatcccagagatataaaatgcttggaaaggataggcagtgtaaatgttgaagctgattccatctacgaactttacaaggaacccagncntatcatggaaccaggttctgtttggaaaga

SEQ ID NO: 268025 - DNA, 414 bp, Glycine max
ggacaaggagggtatccccccggaccagcaacgtctcatcttcgccggaaagcagctcgaggacggacgcacccttgctgactacaacatccagaaggagtcaactctccacttggtgttgcgtcttcgtggtggtatgcagattttcgtgaagactcttacgggtaagactattaccctcgaggtggagagctctgacaccattgacaatgtgaaggccaagattcaggacaaggaaggcatcccaccggaccagcagaggctgatttttgctggcaagcagctcgaggatggaaggaccctcgctgactacaacatccagaaggaatcaacccttcaccttgtcctccgtctccgtggggggttttaagctccgtgtgtaatggtggatgtgttcccaaaacatttgaagaa

SEQ ID NO: 268026 - DNA, 186 bp, Glycine max
ctttgataaataaaatattatttcttaataaaaaaaaaaaataaaaaaaaaaaaggaaaaaaaaaaaacaaaaaaaaaatgactacaacaaaaaaataaaaataaaatataaactaaaatacacaaacttcaaaataatatacaaaactaaataacaaaactctaacaaataaaaaatattaccct

SEQ ID NO: 268027 - DNA, 353 bp, Glycine max
  unsure (1)..(353): unsure at all n locations
aaagggttagaaggcactgccatagatttacctactaaccgccgtgtcaacctggaaagcgctaccagcgacgacgactgcaccaacattcttgcacacatcaaatcctccaaaacccccgctgtcatcaaatatggcgctccttggtgtcccgtttgtatccaaattctcccagcattctgtagactgagcaataattttccaaagcttacctttgtatacacagacatcgatgaatgcccagaaacaactcaacacattcggtacactcccaccttgcaattntaccggaatggtgaaaaggtagatgagatgtatggtgctggtggngaagagaggctccatgatcgtct

SEQ ID NO: 268028 - DNA, 280 bp, Glycine max
tctcacgaaactcagaatccatggcgtcaccagctacttttaagcgaaaaccggtgttcgtgaaggttggtcagtttaaacctggcaccgacggccacacactgacggtgaaggtggtcagttccaagccggtgaagacggtgagcacccgctgcggtcgaccgacagtgctagccgcgcgcccgtcgcgcattgccgagtgcctcgtctgcgacgaaaccggtaccataatcttcaccgttcgcaactaacacgtggaccatattaatgctggcgcatc

SEQ ID NO: 268029 - DNA, 452 bp, Glycine max
  unsure (1)..(452): unsure at all n locations
cactgcgtgttgttcttgttcaatggcacgcctatttcgttccctcagaaaaaccctaaccctaggcctaaccctaacacaccaatttcagcatcaaccatgcatttctcgaagaagttacatatccgacatgcgcaaatcagctttcgagggaaacatcttgagactcctccgcaacgagattcaatacgagcttcagtcctctcctcccaacaaccctgttaccaagtttaattcctttattgtggatggtcgagctggggagcgatggattacgttgaaaagacaatacgctgatgaagacattaaacttgaagtcaccatgtttgatggagctgttcctgctccaactccaactccaaatggtggtgtagttaattctgatgaaatgcagatgcacattactggaattgtcaacatctncaagggagaaggtcgtgtgttggaaatca

SEQ ID NO: 268030 - DNA, 444 bp, Glycine max
cccggtcgaccgcgcgtccgaacgctcctcacttgcagaattcaaagaaggcgtcttcataaacgcctttattctccgtttccgggtccttcccggaattcgatttttcatctatgaaaatgagagagtgcatctcgatccacattggtcaggccggtatccacgtcggaaatgcttgctgggagctctactgtcttgagcacggcatcgggcccgatgggcaaatgccaagtgacaaaacagttggcggacgtgatgatgctttcaacactttcttcagtgagactggtgctggaaagcacgtgccacgtgccgtctttgtacatcttgagcccactgttattgatgaagtgaggaccggaacttaccgtcagcttttccacccagagcagctcatcagcggcaaagaagatgccgccaacaactgtgcccgtggtcattata

SEQ ID NO: 268031 - DNA, 396 bp, Glycine max
cccacgcgtccgcccacgcgtccgcccacgcgtccgcccacgcgtacggttactcatggggaacgcggcgcttcggaacgtgaaggtgctcccgaactcggcaaatatggaggaagctcgtcaccgagtcttccaattcttcagaacggcttgcagatcgttaccctacgtcatggaaatctacaacctctacgacgtcgtttccgtctccgaactccggtcctctgtctgctaccagatccgttagaacatccacgtcaccgatcccaaagtgatcgatatgctgcttttcaaggggatggaagagctgaagaacgtcgtggaccattcaaagcagacgcatcatatcattggtcagtatgtagttggtcaacaagtacaggattcaaccacaaa

SEQ ID NO: 268032 - DNA, 367 bp, Glycine max
ctttggttgcgaaatttcagaagttacatgaggacctgactaatggtttccgcaaccttgaggacgaaacccgatgattgatgattgaagatttggtagtttgctcaaatattgtgttatttccaattgtaagacgcagtctagcatcgcagggttgcaacgtcccgagtgttctcatatttgactgttcgattcattcatatcacatttatttcctttcttggtgctggtttggcttttgatctagtctcatgtgtagctataatcatgtgtttcagtcatcctcagtttgtttattgagaataagaaacgagacttgctctttcaatatgtatttaggagaataaaattatcttaggacatgaag

SEQ ID NO: 268033 - DNA, 414 bp, Glycine max
cccacgcgtccgcagaaacaggtgcaatataaagaggctgaaggttcctcctttcgtggtgggtcatatggtgaaacacgtggcacaccaaagcatttacatcgtggtggggatcaggatcgaacatttattccagattcaatgaatttcggagtggaaagggtaggcaaaaaggaccaaaagcgcaaggcacctggagctccatcagctcataaaagacctagaaaactaaaggcctcagatctttagtttctcaggtggcaaccgggaaaggtgtttcaattcacagaattctttcaatcaaaattatgaatgttgtggaaggtgtggctgtgaactcaacacctgaaaattcggattgtggtatatctaggccaactgaaattcgggtcacttcggtctaaaattttaaac

SEQ ID NO: 268034 - DNA, 340 bp, Glycine max
aagagaatccgaggcgaagagaagagaaaaattaagatggaggggaaggagcaggatgtgtcgctgggagcgaacaagttcccggagagacagccgattgggacggcggcgcagagccaagacgacggcaaggactaccaggagccggcgccggcgccactggttgacccgacggagtttacgtcatggtccttttacagagcagggatagcagagtttgtggccacttttctgtttctatacatcactgtcttaaccgtcatgggagtcgccggggctaagtctaagtgcagtaccgttgggattcaaggaatcgcttgggccttcggtggcatgatct

SEQ ID NO: 268035 - DNA, 318 bp, Glycine max
ctcacgcgttctctctgcttgggttgcagctcagcttctagtacatctaatgatggagggaaaggaaaagggtcacgtcaaggttgacattattgtccatgttaacggtcataaggactctaccactggcaatatcacttaccacctgatctacattctcaaacgcattatcgagagagttattgagagatctgataagatgaacactaagactaacaagaatgccttcaagcatgactagctgcttgctaagcttaaagcaggactcacaagaggtatcaccttggataatgcctagaccaccattgactattgcac

SEQ ID NO: 268036 - DNA, 385 bp, Glycine max
cccacgcgtccgcccacgcgtccgcacctccttagtttcgaaagcatggcttccctggcggcttccaccgtggctatgtcagaaatccttggaaaccccgttaacctcagatgcgcaaccaggtctgctccatcaccaactacacctgccaccttcaagaccgacgcacttttctccaagaagaagccagctccacctccaaagaaaaagcctgccgctgtatcccccgccaatgaggaactcgccaagcggtatggtcctgacagaaggatcttcttgcctgagggtctcttggaccgatctgagatccccgagtacttgaccggagaagtgcctggagattatggttatgatccgcttggtcttagcaagaagccagaggact

SEQ ID NO: 268037 - DNA, 424 bp, Glycine max
cttctattctcttttgaaacacttagaaaagaaaaaaaaaatgtctgcgttccttttgcttttcctagttttttcttctcagttgatcggtggactcaatacacctctaccatctccaatctatggaaacctcgtaaccattctcagcatagatggaggtggtataaggggtatcattccagctgtagttcttgaccacttcgaaaaggctcttcaggcatgggataaaagtgcatcactagcaagttattttgatgtcatagcagggactagcacaggaggactcatgactgctatgctcactactcctcacccagacgaccgcactcaccctctgtttactcccagcggaatcatagacttttataaagaatacggtccttctatattcaatgaaactagtgcttgggataatgcattcccg

SEQ ID NO: 268038 - DNA, 442 bp, Glycine max
cccacgcgtgcgatggtccttctgaagaggagattgcaagtgcttcattcaagatgtggtttgttggacatggtttcagcaatgagagtcttgctgcacagggaaacacaaaacctgacatggagattataacaagagtaatgggacctgaaatgggttatgtaaccaccccaataattatggttcagtgcgctctcgttcttcacggccaaagaaagaatctaccaaagggaggtgtttacactccagggattgtatttggtccaactgatctccaagaaagacttcaacaaaatggaatatcttttgatgtcatctcgaaaaggtctatttcttcttgactctaaacagttcatccatttttggttggaagtgaaaaaactgacttgtcggagtgcagaaggtataataaagtattgagaaaatcttttttggtttatat

SEQ ID NO: 268039 - DNA, 246 bp, Glycine max
gccagtccacagatcttctcagagggaggcctagactacttgctcaacccaagcctgatccatgctcagagcattcttgctatctgggctgttcaggtcacgctcatggagtttgttgaatgttacggattcggtgaaggaccactcgttgaatggctagacccaatctaccatggtggtgctttagacccttttggtctgtctgatgaccctgatgcatttactaagttgaagttcttggacttc

SEQ ID NO: 268040 - DNA, 449 bp, Glycine max
cccacgcgtccgcgcagtgttagggtttctgtagcctccaaccagaaagagagggaaatggctccgaaacatcctagtacgggtttgtttgttggattgaacaagggtcacgttgtcaccaagaaggagttgcctccacgcccttcagatcgtaaggggaaaacaagcaagcgagtgcactttgtgaggaacctcattcgagaggttgccggctttgcaccttatgaaaagcgaataactgagttgctcaaggttggaaaagataagagggcactgaaaggtgccaagaaaaaagctggaacccataagcgcgcaaagaagaagagagaggagatgtccaatgttcttcggaagatgagggctggtggagctggagacaagaagaaataagtcttggttactttttctagtttcactagactgtttcgatgtacgagttgtcttatttt

SEQ ID NO: 268041 - DNA, 458 bp, Glycine max
cacaaaccctcccctcacactctccaaaccctagcggcactacacacgttatctctctctctctgtctctctctccctctctccttccccaagatgtcgagcgccgatcccgagcaccgagaagaggaggaggcacccgccgtcggcgacgacgaggacaccggagcacacgtcgctcccatcgtcaagctcgaggaggttgctgtcaccaccggcgaggaggacgaagatgcaatcctagatctcaaatcgaagctttaccggttcgacaaggatgggaaccagtggaaggagcgaggcgcgggcaccgtgaagttcctgaagcataaggctacgggcaaggttaggcttctcatgaggcaatccaagacgctcaagatctgcgccaatcatctcattttgcctactatgagtgtgcaagagcacgctgggaacgagaaatcttgcgtttggcacgc

SEQ ID NO: 268042 - DNA, 339 bp, Glycine max
cccacgcgtccgcccacgcgtccgcccacgcgtccggtgaaggacttggaactgctcatgatgcacaacaggacttactgtgctgagattgcccacaatatatccacaagaaagaggaaagatatagttgagagagccgcgcagcttgatgttgttgtgacaaacaaaacagccagattacgcagccaggaggatgaatagtctaaatgactaaaaaagtcacttatctgtagtgattcagtagttcaatatcaaatttgcagtttaattttaaattgaattctgcttcaatgtattttgcttattgagaaccaagtttgattttgttgtgtctcttgc

SEQ ID NO: 268043 - DNA, 406 bp, Glycine max
gataactagaaacagtgtgatgaaaatgaaggtccttggtttcttcgttgctacaattggggtagcatggcaatgccatgcgtacgatatgttccctctccgaatgaacactggctatggtgcccgtactccggaggtgaaatgcgcaagttggaggcttgctgtggaagcacacaacatctttggctttgagaccattcctgaagagtgcgttgaagcaacaaaggaatacatccatggcgaacaatatagatcagactccaaaacagttaaccaacaagcttacttttatgccagagacctcgaagtccatcccaaggacacatttgtgttcagtatagatggcaccgtactctctaatattccatactacaaaaaacatggatatggggtggagaaatttaac

SEQ ID NO: 268044 - DNA, 366 bp, Glycine max
cccacgcgtccgcccacgcgtccgcccacgcgtccggcgagcgagcagtttcaaagagaggatttgggattgggaaggcgagggattgcgctgcgtctcttcctcttctctttcgattcatccctcattcataatcttccaatccaacaacctcagcctcacactcacacatacacacatctgaacgcgtatcgtccctcccatggcttcaaagcgcatcctcaaggagctcaaggacttgcagaaagacccaccaacttcttgcagcgctggtccagtagctgaagacatgttccattggcaagcaacgattatgggtcctgctgatagtccttatgctggaagtgtattcctagtcactattca

SEQ ID NO: 268045 - DNA, 445 bp, Glycine max
gcaccatgaagctctacaggaggcccttccaggtgacaatgtaagatttaatgtgaagaatgttggggtcaaggatctcaagcgtgggtttgttgcctcaaactctaaggatgatcctgccaaggaggctgccaacttcacatcccaagtcattataatgaaccatcctggccaaattggaaatggttatgctcctgtgcttgactgccacacttctcacattgccgtcaagtttgccgaacttgtgaccaagattgacaggcgatctggtaaggagattgagaaggagcccaaattcttgaaaaatggagatgcaggttatgttaagatgattcccaccaaacctatggtggtcgaaactttctccgagtatcctcctcttggtcgatttgccgtgaaggacatgcgacaaactgtggctgttggagtcatcaagagtgtggag

SEQ ID NO: 268046 - DNA, 395 bp, Glycine max
cccacgcgtccggccaatcgagctcacagtgttataggtaccgatgagttcatggccacagatctgtatgaagaggaatacaacgtgcttgatgacatctatgcatgtggcatgtgcttgctagagttggtaaccgttgagtacccgtatattgaatgcaccaatgctgctcaaatatacaagaaagtgacatctggaataaagccagcatcattggcaaaggtggctgatcttgaagttaaagcatttatcgaaaagtgtattgctgatgtgtcggaacgattgtctgcgaaagacctcttgatcgatcccttccttcagtcagattatgataatgatagtgtaggtcgatcttcaagatctcaaacccatcattcaggaaataattctcataa

SEQ ID NO: 268047 - DNA, 458 bp, Glycine max
cccacgcgtccgtgagttttggctttcctcaagtaagtactaatggtttattctacatgaaatatgctttcatttaaatttgacaatggttacaggaattgaagcgctttccaactcttcaagctgaaatagcagaagcagctaatgaggggttagagagattccatgatgacggtaagaagacaacgttgcggctggtggaaatggaatcttcctatatcaccgttgatttcttcgggaaactccctcaggaagttgacaagggaaagaattcagcttcctccttgttagatgatcagtatgccaagggacacttccagaggatcggttcaaatgtttcatcttatgttgggatggtgtcacaaacgttgaagaacaccattccaaaggctgtggttcattgccaagtgatggaggctaagcgatctttattagacccgttttatgcacaactgggc

SEQ ID NO: 268048 - DNA, 458 bp, Glycine max
atagctagttgaagctgatgctccatcccttgcgttaatggtggattgttagatttgatttgattttaggaacaacttatcgatccctcaatctggtatgaacagatcgagggcgtggtctatttgatttgaactgaatttcggattgaaggatctcattttcttggagcattaaagcagaaattttcttgcatcctattctgttttacctaaaacatgtggagatttaagccattcagtcacaaagagcagactggtcttgaaggccgcactatagatgttggcaatcttaaaatacatgtcattaaggccattgccgaaggagggttctcttgtgtctacctagctcgagatgctgtacatatgtcaaagcaatatgctttgaagcacatgatatgcaatgacgaagaatcacttggattggtaaagaaggagatatctgtgatgaaggtgctggc

SEQ ID NO: 268049 - DNA, 417 bp, Glycine max
ctctttgtattggttgcaggttacttgcctttcgacgaccctaatcttatgaacctgtataaaaagatctcacctgctgaatttacttgccccccatggctttctttcactgccaggaaattgattacacgaatcttggatccagatcccaccactcgtatcactatacctgagattttggatgatgaatggcttaagaaagaatataagcctcccatttttgaggagaatggggaaatcaacctcgatgatgttgaagctgtctttaaagactctgaagagcaccatgtgacagagaataaagaagagcagcctacagccatgaatgcatttgagttaatctccatgtccaaaggactgaaccttgaaaactcgtttgatactgaacagggatttataagggaaacaagattcacc

SEQ ID NO: 268050 - DNA, 458 bp, Glycine max
cttttcttctatttttttattcctttttggtgaaatataagttttcctctttagttgttgacttcttgtttatttttctgattaatgagaaaaatccactttggttgttcactcgtatatgtatctcagtctcaggtggtggtgcatcgctgagttgtgtgagagtgagaaagagagagtgtgtgtgtgtgcagaagatgtggccattcagcagaaaaggggcttctggtttttcatcatcatccacggcagagcaagtcactgaaggaattgatggaactggtctcactgccattgtcacaggagcatccagtggtattggcactgagactacacgtgtcctttcattgcgtggtgtccatgtgattatcggtgtgagaaatatgcttgctgctaaagatgtcaaagagacattacttaaggagattccctccgctaaagtgatgccatggagttag

SEQ ID NO: 268051 - DNA, 381 bp, Glycine max
tcggagcatttggggctggatttttgaaacagtcgaagtggaatgatgcatgactagagatgggtcataatgaatatataggcactgctccatatatatcctgctctccttcactacgtcaccatagattatgccagagagatcagttcctgatcctctcatctgatggtttatatcaatatctaagcaatgaagaagtggcttctcatgttgagagcttcatggaaaaatttccagaaggggatccagcccaacatttaatagaagagctgctcctgcatgcaactaataaggctggaatggattttcatgaattgctagatatcccacaaggagatcggatgacgtatcacgatgatgttactggcatggtgatatcac

SEQ ID NO: 268052 - DNA, 453 bp, Glycine max
ggcttttcatttactaggtggattacattcttggggacaatccattgggaatgtcgtacatggttggatatggtgcacgctacccgcagagaatacaccaccgggccagctcgcttccctcagtggcagcccacccggcccacattggttgtaaagctggatctcggtattactttagcccaaatcccaacccaaatgtgttggttggggccgtggtgggtgggcccaccaataacacagattccttccctgattccaggcctttctttcagcagtctgagcccactacatatatcaatgccccgctggtgggccttctttctttcttttcagctcactgttgactttgcaagaagtgtatctatgatttccatgtggtgcgcaaaattggtcaccctgcattgctcctaaggggaaaaaaaatggagacgagtgtcgctaatagtagtattc

SEQ ID NO: 268053 - DNA, 430 bp, Glycine max
  unsure (1)..(430): unsure at all n locations
tgcaaatcttccaactccaccatgttcggttccgcacgaatcctctccgacgtcactctccggctccgtcaaaacctttcggttcacggtgtgcgcgtgcagaacataaacatcggatgcggtgtgggaggcgagatcccggacaacaagcgtctggtgtacgctcttcagaacctncacggaataggccgttccaaggcgcaacacatcgtcgccgagctcggcgtcgagaacaaattcgtcaaggaccttagcaagagagaactctattccattcgtgaattgctctccaagtatctcatcggaaatgatttgaaaaagtgtgttgagagagatgtgggaaggttggtgggcattcagtgctaccgagggattagacatgttgatagcttgccatgccgcggacagaggactcatacaaatgcacgca

SEQ ID NO: 268054 - DNA, 449 bp, Glycine max
tcgcccacgcgtccgctgaatcatggctttagcatgtggcatcatattccttcctctgggttgatgcctgcaagtgatgttcttattcgtgcaaaggaggtgataattaacagggacaatctggttaaactacttgccaaacacacgggaaattcagaggaaacagttgctaatgtgatgaagagaccgtattatatggatgcaacaagggcaaaggaatttggggtcattgacagaattctttggcgtggccaggaaaaggttatggcagatgttgcttctccagatgactgggacaagggagctggtatcaaaattgtagatggattctagttcctcttttgtggatacgtttctctttgtcaatgtgacatgtttcggtaggattttttttttcatggtataccggtccagaaatgttccacagctattcacagaaaactagagct

SEQ ID NO: 268055 - DNA, 364 bp, Glycine max
cccacgcgttcgctgactcatgggcggacgcttgggccaatatagcccaagccctatacaaggaaaccctatcacacacccatgtgattcaagttccatggctagcctcaaggctgcatttttggctgcattgctctgcatgcttgaggtgagtgcacccatggcacatgcagctatcacgtgcgggcaggtgacgagtagcctggccaattgcatcggttacctccagaagggaggaacgccgtcgtccggatgctgcaacggagtgaagagcctcaatgccgtcaccaagaccaccgactaccgccaaacggcgtgcaactgcctaaagtcggccgccagccaaatttccggctttaacgcc

SEQ ID NO: 268056 - DNA, 451 bp, Glycine max
gttctttcctcacttcaaacttgccaaaaatggcaacagaattggcatcatctcccaattgggttccaagcgcagccacatgtttggcagcctttgccgccctccttctcctcttcctccgcggtctccgccgccgccgatacaacctccccccaggcccaaagccctggcccatcataggcaacctaaacttaattgggtcccttccacatcggtcgatccacacgcttggcaaaaaatacgggcccatcatgcacgtatggttcgggtcgagctccgtggtggtgggctcgtccgttgaaattgccaaggccgtcctcaaaacccacgacgccaccctcgccggcaggccgaagttcgcggcgggcaaatacacaacctacaactactcggacatcacttggtcccagtacgggccatactggcgccaggcccgtagaatgtgcctaat

SEQ ID NO: 268057 - DNA, 108 bp, Glycine max
taatgtcactttatgttatgtgggtaagtcacctaagacactccacgtacctacgttgttgtctcttaccggctttaataaatcttctgcccttgttccatatttact

SEQ ID NO: 268058 - DNA, 454 bp, Glycine max
  unsure (1)..(454): unsure at all n locations
ggcagagacagatcagccagcaattgaactaaaacctggaattgaccttctaggacctgtggatgagatattttttgatatctatgacagatatgaaccggtcaatgaacccactttggacaactgctttgtatcaacaagttatgatgctactactcactttgagtcgaccgtggatgatgttctcaacatgtatacattgataactggaaaggttattgacctgagtgtggatcttagtgctgctagtgctgcagaagagtaaagaaaactcggtgatgtccttccttcatgatttgttgctgatgggatccgtaatggacttgataatgaatgttattaacgtttataataaattgatataaaatatttcttttttttttaaacaagatttgtgtggctggngaactttttcccgttcagaagctctgttgtgcgtaacatttttatatgt

SEQ ID NO: 268059 - DNA, 339 bp, Glycine max
  unsure (1)..(339): unsure at all n locations
cgggtgaggtagaacccttccactgtggtgactctgcgatgggtgcctacaagtatgtttcagagctatggcgcaagaagcagtctgatgtcatgcgcttcttgcagcgggtgaggtgctgggagtataggcagcaaccttccattgttcgtttgacaaggtctaccctgcctgacaaggctcgtcgcttgggcttcaaagctancanggctatgtatttaccgtgtcgtgtangagggtggcgaagaaccagtcaaggtatgtatggaagcacaacaggagtccactgaatacgacagagcagtgcagacactgacgactggtgctaggtctatctat

SEQ ID NO: 268060 - DNA, 446 bp, Glycine max
  unsure (1)..(446): unsure at all n locations
cggacgcgtgggcgcgctcagcgtaagggtgctgggtcggtgttcaagtctcacactcaccaccgcaagggtccggcgaggttccgcagcctcgacttcggcgagcgcaacggctacctcaagggcgtcgtcaccgacatcatccacgaccccggtcgcggcgcccctctcgccaaggtggcattccgccaccccttccgctacaagaagcaaacggagctcttcgtcgccgccgagggcctctacaccgggcagttcgtctactgcggcaagaaggccaccctcgtggtcggcaacgtgttgcccatccgatccatccccgaaggtgccgtcatctgcaacgtcgagcaccacgtcggcgaccgcggcgttttcgccagagcctncggtgactatgctattgttataagccacaaccctgataacgacacctctaggatcaagct

SEQ ID NO: 268061 - DNA, 448 bp, Glycine max
cccacgcgtccgagaatggctcccaagggtttaacctttctggctgtgttaatatgcgtttcagcactgtcactgagtccttctgttgcgggggaagggcaaaataatggccttgttatgaacttctacaaggaatcatgccctcaggctgaagacatcatcacagaacaagtcaagcttctctacaagcgccacaagaacactgctttctcctggctcaggaacatcttccatgactgtgctgttcagagttgtgatgcttcactgttgctggactccacaagaaggagcttgtctgagaaggaaacagatagaagctttgggttgagaaatttcaggtacattgagaccatcaaagaagctttggaaagagaatgccctggagttgtttcatgtgctgatatcctcgttctctctgccagagatggcattgcttcgctaggaggtc

SEQ ID NO: 268062 - DNA, 388 bp, Glycine max
atgtctgtgggagatggcgccgtatgcggccggaccgacgtggtcactccattcaccggcctgaaatgcatgcctggcttccacacgaggaagaccatcaatgacatcacctccattgctagcaacgatggaagagtacaatgcatgcacgtgtggccaccaattggcaagaagaagttcgagactctttcctacttgccagacctcgatgatgcccaattggcaaaggaagtcgaataccttctaaggaaaggatggattccttgcttggaattcgagttggagcacggtttcgtgtaccgtgagcacaacaggtcacctggatactatgatggacgctactggaccatgtggaagctgcctatgcttggctgcactgatgcttctc

SEQ ID NO: 268063 - DNA, 286 bp, Glycine max
cactgtttttggacacatgaaccctgaagagatcccatgggggtcaactggagctgatatcattgttgagtccaccggagttttcaccgataaggacaaggccgtcgcacatttgaagggtggtgcgaagaagttattatttctgcccccagtaaggatgcccccatgtttgttgttggtgttaacgagcacgagtacaagccagagcttgatattatttccaatgctagctgcacaaccaactgccttgctccacttgctaaggttattaatgacaggtttggca

SEQ ID NO: 268064 - DNA, 445 bp, Glycine max
  unsure (1)..(445): unsure at all n locations
gcgcccacgcgtccgaaaagatgctgcanggctttggcgccaaccttaccgtcgagacggatgcggacggcgtgcgcaccatccgcctggaaggccgcggcaagctcaccggccaagtcatcgacgtgccgggcgacccgtcctcgacggccttcccgctggttgcggccctgcttgttccgggctccgacgtcaccatcctcaacgtgctgatgaaccccacccgcaccggcctcatcctgacgctgcangaaatgggcgccgacatcgaagtcatcaacccgcgccttgccggcggcgaagacgtggcggacctgcgcgttcgctccttcacgctgaagggcgtcacggtgccggaagaccgcgcgccttcgatgatcgacgaatatccgattctcgctgtcgccgccgccttcgcggaaggggcgaccgtgatgaacggtct

SEQ ID NO: 268065 - DNA, 439 bp, Glycine max
cttgaagtctccacttatggggctatttgaaaaacgccgagcacgcaagttgttcattagggtccaaatttccaatgaaagggtccccagaaccctggacggaatggcctggccagaatgaattcttaagaagtggttggaaaattccggcttggtggttacccttttaaattcattgggcattctttggcgcttcattggtaagaacgctacttgggttaaccagtacttgacacttggaatagaatgaaggtatatgcagagtctcttgcacgctttcaaggagggtgaccttacatatatcctttggatgggttatgagagcttccccaaggatatgcacggcttagtgctgcctattgtgggacatatatgtttgataaacctgagtgcgaagtataatttgatgaggaacgaaaggttgttgatgtcacatctg

SEQ ID NO: 268066 - DNA, 457 bp, Glycine max
  unsure (1)..(457): unsure at all n locations
ctcgttcagattttggtttttgcttccctatccgctctctcttcttcacttcagtatggcggtggtaccttacaccaccggttctgcacctcttctttctcctccttctacttctagtgttgccacaaagctctactccggattgaaacttcaagctgcgagtcctttcggagctgcaaaacctaacgtaaccgctgagttttatggaaaagttcacaacactcttcactgtcggtatgctaaccacaatacatcaatggcacgtattcgaatgatgccaatagggactcctaaagtcccctataggacacctggtgaaggaacttggcaatgggttgatgtatggaacgccctttatcgagaacgtgttatcttcattggacaagagatagatgaagaatttagtaaccaaatattggctactatgctntatcttgacagtatagaaaactccaag

SEQ ID NO: 268067 - DNA, 411 bp, Glycine max
cccacgcgtccgcccacgcgtccggcaagcaatggctattactacaccttccaattcttcagattctcctctccctttctctattgctcatctccctctccctcgctgagtcgcaatctttcatcggagtaaactacggccaggtcgccgacaaccttccggcgccggaggacacggccaacctcctcaaatccacaaccatcggaaaagtccgtctctacggtgccgatcccgccatcatcaaggccctcgccaattccggcatcggaatcgtcatcggcgccgccaacggcgacattccgagtctcgccgccgatcccaacgcggccactcagtgggtgaacgcgaacgtcttgccctactacccggcgagcaacatcactctcatcaccgtcggaaacgagattttga

SEQ ID NO: 268068 - DNA, 399 bp, Glycine max
tttaaatatggtacaggggcagaagatttattaaagccggtcagagacaacaacgtatgtacgtggagtgtcttaggtgacttacccacataacataaagtgacattaacaaacatagctaatgctcctatttgaatagtgcatatcatcataccttattacatatagataggagcaaactctaactagattgttgagagaggtgaatgtactactcaacgtagtacatgggattaggaagcttaaaggtcctgctttcgtctatgaggtcttcaagcaaatcgctccattggtctccaatgattccaacaattctgaatccctgcctcaacagattctctctcattgctgatttgtatgaaagtgcatttgtagtgataagatctggatccttgagaa

SEQ ID NO: 268069 - DNA, 394 bp, Glycine max
cccacgcgtccgtgggcattcgccgtaaacagaagagagagagagagagagagagagtcctgaaacttgggtgcgattccttgactcacaacatcaacacatcactatggctcttctgagtcgagcctcttcacgcttgcctcagctggtttcccctcaaagggcactttcactccacacaacgctcccatctttgaacgcatccccatccacagccacgcctacaccatatgccccgccaccgcctacgtccgcttcctctcccgccggcgtttcgaaggcggcggcgttcgtgatctcgaaggtggaccatctgatgaactgcgcccgtcgacgctgcatctgggccatgaccttcggcctggactgctgcgccgtctaaatgatgcacacc

SEQ ID NO: 268070 - DNA, 450 bp, Glycine max
cccacgcgtccgcccacgcgtccgcccacgcgtccgctgaactgaattgagtctcaacaacccagttgagtaactaagatggcgcacgtgaggaacaagcaagtgcttctaaaggactatgttaccggttttcccaaagaatccgacatgaatattgtcgaaagtaccataacattgaagcttccacaaggttccaatgatgtcttgctcaaaaatttgtatttgtcttgtgatccgtatatgaggaatctcatgaacaggcccgaaggccctcccaatagtcgtgcttacactcctggctctccattaataggatatggtgtgtctaaagtcctggaatctgggcacccagattataaggaaggtgatttagtgtggggctttaccaaatgggaagagtatagcttgttaccctcagctcacatactcttcaaaattgagcacactgat

SEQ ID NO: 268071 - DNA, 449 bp, Glycine max
cccacgcgtccgacttttttgagattctggcaacatctgaggatagagatggaaagactttcgtttccacagcacgtggtaggaaatatcccgtgactgtcaacctatggcaaccagagaaaaatgcttttgaatgggctacatctttgaaagcccctcacacagaggatgcaattcgggttactcagtccacagcaaactttttcatatgtgaagctaggaaatccacaaacacacctgatgctcaaaaagtgcgagataatctcatctacaattacaaacctacttttggtggaacggctgggaaaggatatgatcaagcgtatctctttgaataattctatctgtaggacgtgtccttgaatttgattatatgcacaataaattatgaactgaggatgtactttgaagaacataactttttgcacagtgatgtttgtaagacgctt

SEQ ID NO: 268072 - DNA, 411 bp, Glycine max
acaatttctctctcctctctctctctaaaaatccttctttctttcttctcttcgctgctcactgtagccatggctttcagagtaggaggagcgggagggggaaatgcctcttctggcatgggtgttgctgagcatagtgtaaacaccttcctggaattgcagaggaagaaagttcatcgctatgtgatttttaaaattgatgagaaaaagaaagaggttatcgttgaaaaaactggaggccctgctgagagctatgatgatttcactgcatccttgcctgaaaatgattgccgatacgctgtctttgactttgattttgtgacatctgagaactgccaaaagagcaaaatcttttttattgcatggtctccttcagtggcccgcattcgcccgaagatgctatatgcaaca

SEQ ID NO: 268073 - DNA, 444 bp, Glycine max
gggagaactaaccaagtccatggaaaaaattggcctggatatgcgcgttgctgctctagttagtgataccattggaacattagctggaggcagattctacaatcaggatgtcattgctgctgtgattcttggtactgggacaaatgcagcatatgtagaacgagcacatgctattccaaaatggcatgggcttataccaaaatcaggagatatggttataaacatggagtggggtaatttccgatcatcacatcttcctctaacagaatatgatctagctctggatgctcagagcttaaaccctggagaacagatttttgagaaattgatttctggcatgtatttgggggaagttgtaaggagagctttattgaagatggccgaagaagctgactcttttggcgatactgttccccccaaattgaaagttcctttcatacttag

SEQ ID NO: 268074 - DNA, 435 bp, Glycine max
gcggtttactactcaactaagatggactcgaagaggaagatagcattacttatttcaggccttcgggccatgctcattttaatctgctcagatgtggcagccagagaattgaaagaggtcactggtgctggcttgtctggtggtcgtggggtcaactatggtggctttggtggtggctcccctggctttggtggtggcttccctggctttggtgttggtagcttccctggctttggtggtggcggctgcttccctggctttggtggtggctgcggcttccctggctttggtggcggcggcttccctggctttggtggcggcggcttccctggctttggtggtggcggcggctttcctggctttggtggctgcagcttccctggctttggtggcagcagcttccctggctttcgtggcagtgggcttaacaaccct

SEQ ID NO: 268075 - DNA, 446 bp, Glycine max
gttttgctactaataatgacaacaacagtgacgacggcgacaaggacagtaacaacgttggtgccgccggagaggaaagtggtggcgacgattcgaaatccaacgttacgacgacgatgcccgaagaagagagaggattcacttcgcagaaatcgacgcctccttccacttctcagaggtcgtctttgtcatcgcttggaccagcatacaacacttttcaagttgattctttcaaacttattgagctccttgggcctgagaaggttgatcctgctgatgtaaagctgattaaggataagctttttgggtattcgaccttctgggtgacgaaagaggagccttttggagacttgggagaaggcattcttttcattgggaatttaagggggaagagagaggatggttttgccaaactccagaatcagctagttgaagtcacgggtgat

SEQ ID NO: 268076 - DNA, 449 bp, Glycine max
ctttacaaggccttccaatattttgacaaatatggcagcgggtatatcacaagagatgaactggaaatagccatgaaggagtatggtatgggtgacgaggccacaatcagggaaattatatctgaagttgacacagataatgatggtagaatcaactatgaagaattttgtacaatgatgaggagtggaacccaacaacaaggcaagctattctgatgtctctagattgagtgtcctgcagccaagacggggtgcttgcttcagagaaaggctttcaagagttaatatttatcttacgcatgtaaagcttgtagtttcgatttgttttgagttacatgctccgcgtgacttgttgtcaactcttatttctctttttggattccttttcactctgaagtttattattgagtccaaatgtaatttattatgcacactaataataaatggac

SEQ ID NO: 268077 - DNA, 453 bp, Glycine max
cccacgcgtccgcccacgcgtccgattgcaatcaaattagttcattctctttgcgcagttgcctacctctcctttcaagatgcacatcttcgtcaagaccctcaccggaaagaccatcacccttgaggtggaaagctctgacaccatcgacaacgtcaaggccaagatccaggacaaggaaggaattcccccggatcagcaacgtctcatcttcgccggaaagcagctcgaggacggccgtaccctcgccgactacaacatccagaaggagtcaacccttcaccttgtccttcgtctccgtggtggcatgcacatcttcgtcaagactctcactggcaaaaccataaccctagaggtcgaaagctctgacaccattgacaacgtcaaggccaagatccaggacaaggagggaatccccccagaccagcaacgtctcatcttcgccggaaagca

SEQ ID NO: 268078 - DNA, 450 bp, Glycine max
aaaaaaattataaatggggataggggtactatttggtgggtttatcttgctatcttgtgttgtgtgtgtgaagggtgtgtagccaaaagcctcacccacttgtacattttcggcagtttacaactttggggactcaaactcagacactgtaggcatatcagcttcatttgtgccaattgctgcaccttatggcgagggcttctttcacaagccttctggaagggactgtgatggccgtctcattgtagatttcatagctgagaagctaaacttgccatacttaagtgcttatctgaattcccttggaaccaattaccggcatggggcatattttgtcactgggggatccaccattaggaagcagaatgaaaccatatttcaatatggaatacgtcctttgtctcttgacattcagattgtgcaatttaaccagtttaaagcacgcaccaa

SEQ ID NO: 268079 - DNA, 442 bp, Glycine max
  unsure (1)..(442): unsure at all n locations
cccacgcgtccgcttagctactaaggatcaaagagaatggctcaagcaatggcatcaatggctggcttgcgtgggtcctctcaggctgtgttggaaggtagccttcacgtgagtggctccacacgcttgaatgtggggagtggaagcagggtggcctcagtcacacgtgcagggttcacagttagagcacaacaacaacaagtgagtggtgaggtacaaagcagccgtagggcagcgctttcacttgttgctgctggtttggccactggctcttttgttcaagctgtgcttgctgatgccaaatctatcaaagttggaccacctcccccaccttctggtggattgcctggaacgttgaactcagatgaagcaagagaccttcagctggcattgaaagataggntctttctttaaccattgtctcctactgaggctgcacaaa

SEQ ID NO: 268080 - DNA, 452 bp, Glycine max
tcgaaaaccctcatccccaacctcaaccttaacctctcctcactttcttttcaaccagaactatgattaagctttttaaagtaaaggaaaaacagagagaactggcagaaaatgcgagtggcggaccacccgttaagaagcaaagtgcctgctagttgcgtcttcacaaagatataagcgagctgaatctaccaaaatcatgtaccatgcaattccccaatggcaaagatgacctgatgaactttgaagtttcaattcgacctgatgatggatattacttaggtggcacatttttgttttcctttcaagtgtctcccatctatccacatgaagcaccaaaagttaaatgcaagacaaaggtctatcatccaaatatttgacttgaaggaaatgtttgtctcaacatcttacgaggagattggaaacctgtccttaatataaacactgtcatc

SEQ ID NO: 268081 - DNA, 440 bp, Glycine max
  unsure (1)..(440): unsure at all n locations
gccgggttacgccgattcttaccggaaggagctcgggagaagagcgtggcatttgggaccgggttgtttgagcaatatggacgccgaggaaaaagcatgcagaggaagagaagctgctattgatgaacacgagtgtctgaagtggcttgactcaaaggaaccaaattcagttgtgtatttgtgtttcggtagcatgacagcgttctccgacgcgcaactcanagaaatcgctttaggtttggaggcttcagggcagaatttcatatgggttgtcaaaaaagggttgaatgaaaaattggaatggttaccagaagggtttgaggagagaattttaggtcaaggaaagggtttgatcataagaggttgggcaccccaagtgatgattntggaccatgaatccgttggagggtttgtgacacattgtgggtggaactcagtat

SEQ ID NO: 268082 - DNA, 376 bp, Glycine max
tcggtggaccagtcagatggtagcttccttgatgatgaacaaatagaaagtggatgggttctcagctgtgttgctctacctaggtgagacgttgtcattgagacacacaaggatggagagatcgaatgatcgatatatatcataatggaatcttgtccattgctcttctaatgccatctatctatgtcgtgttttgattttgttagagtgatttggcattggctagttagctagctgaaatcatcgcgaggttattaattacttttgtcatgtttgtggaaacaagtgaaattgttgcactttaattaattagtttggtaatgcttactggttatgcacatgttgtctaagacaataatagttcttctttatcttt

SEQ ID NO: 268083 - DNA, 457 bp, Glycine max
  unsure (1)..(457): unsure at all n locations
aactagtctaagcagaaatggcctcttcagtgatggcatctgtggccctcaaacctgcccctttcactgttgagaagtcctcagttagaggccttccctccctctcaaggaactcctcttcattcagagttgtggccagtggtggcaagaagatcaagactgacaagccttatggaattaatggtggcatggctttgagggaaggagttgatgcatctggcaggaaaggaaagggaaagggcgtttaccagtttgtagacaaatacggtgctaatgtcgatggttacagtcctatctacgacaccaaggactggtctccaaccggtgatgtctacgctggcggtacgactggcttggctatctgggctgtgactctacttggtcttcttgctggtggtgcacttcttgtctacaacacaagtgctttggcgcaataaactntgcanatcgatgtttt

SEQ ID NO: 268084 - DNA, 418 bp, Glycine max
aactcgcctaagcagaaatggcctcttcatttatggcatctgtggccctcaaacctgccggtttcactggtgagaagtcctcagttagaggccttccctccctctcaaggaactcctcttcattcagagtcgtggccagtggtggcaagatgatcaagactgacaagccttatggaattaatggtggcatggctttgagggaaggagttgatgcatctggcatgaaaggaaagggaaagggcgtttaccagtttgtagacaaatacggtgctaatgtcgatgggtacagtcctatctacgacaccaaggactggtcttcaaccggtgatgtctacgctggcgggactactgacttggctatctgaactgtgactttacttgaaattcttgctggtagtacacttcttgtctacaacac

SEQ ID NO: 268085 - DNA, 458 bp, Glycine max
cccacgcgtccggagataactagaaacagtgtgatgaaaatgaaggtccttgttttcttcgttgctacaattttggtagcatggcaatgccatgcgtacgatatgttccctctccgaatgaacactggctatggtgcccgtactccggaggtgaaatgcgcaagttggaggcttgctgtggaagcacacaacatctttggctttgagaccattcctgaagagtgcgttgaagcaacaaaggaatacatccatggcgaacaatatacatcagactccaaaacagttaaccaacaagcttacttttatgccagagacctcgaagtccatcccaaggacacatttgtgttcagtatagatggcaccgtactctctaatattccatactacaaaaaacatggatatggcgtggagaaatttaactcgaccttgtatgatgaatgggttaacaagggcaatgc

SEQ ID NO: 268086 - DNA, 464 bp, Glycine max
cccacgcgtccggtgaaactgtgatgtcctcctaaaaaactctatccatgtctatgatgtctctcacaaccgtggctgcattcaagtccctcacaatggcggaatcgtgccttctatccctcccttccctcttctacgccaaaaacaataccctttctctctcaattcccaccaagcccctcaacctccatcttccatgctccaactcttcgctctttcccctcaccaccaaaacaacgcgccactcttctctcctcacattcgtggctcagacatcggattgggccaaagaagaagaggaagaagaaacctcgtgggagaaccaaagcgacaccgcgtggggaactgaagaaggtggccacgaagaaaggggtttcgctgaaaaagctgaggaagataagatcttcggtgggaacttgcctttcgacatcgacagcgagaatttggcgtcgctcttcgggcag

SEQ ID NO: 268087 - DNA, 401 bp, Glycine max
tgaaattttaaaaatgactgggataaacttaagaattcaattattgaaattgaataagtaaacaatttaattggattggtcgaatggtatcaaaaaaatggagtactaactcccatttcttatttattattgaattaaccgatcaacttgctttgttatcgaacatttctttttgatttcaaaaattttccggaaaaaatttgaatctatttttatatgcgaatcaatcctactacttctggtcctgaagtttctgcgcttgaaaaaaaaaatctgggacgtatctgccaaataattggtccggtactagatgtagcttttcccccaagtaagatgcctaatatttacaacgctctgatagttaaaggtcgagatactgttggtcaacaaattaatgtgac

SEQ ID NO: 268088 - DNA, 438 bp, Glycine max
gtttgttgatcgagataactagaaacagtgtgatgaaaatgaaggtccttggtttcttcggtgctacaattttggtagcatggcaatgccatgcgtacgatatgttccctctccgaatgaacactggctatggtgcccgtactccggaggtgaaatgcgcaagttggaggcttgctgtggaagcacacaacatctttggctttgagaccattcctgaagagtgcgttgaagcaacaaaggaatacatccatggcgaacaatatacatcagactccaaaacagttaaccaacaagcttacttttatgccagagacctcgaagtccatcccaaggacacatttgtgttcagtatacatggcaccgtactctctaatattccatactacaaaaaacatggatatggcgtggagaaaattaactcgaccttgtatgatgaat

SEQ ID NO: 268089 - DNA, 318 bp, Glycine max
gtggtttcagtgagtgatcggtgttcactggatccttcataagtcgtcatcatcatcatcagcatcaccgttgattgaagaagatgccgatcagaaacatcgtcatcggaaggcctgaagaggctactcaccccgacacgttgaaggcggcgttggctgagttcatctccaccttgatcttcgtgttcgccggttcatgttccggcatcgcctacaacaagctcaccgacaacggcgccggcactcccgccggcctcatctacgcttacatcgcccatgctttcggcctcttcgtcggcgtctccgtcggggccaaca

SEQ ID NO: 268090 - DNA, 401 bp, Glycine max
ctttcggaattttcttcactgctatttaccattgccacactctcattctcgatggcggcggggattgcattggcaattggtttgagaactctcttcactgttttgggacttctcatgcttgctgtctttctttacactgccttcaccgatggtctacgtgttcgctttctcaaagaacttgtcagaccgtggatggttgcaactttggtttgggtctatatcaacattgtagctcttgctgtctggattgcttacaaggaatcaaacttgatcagctcaattctagggattggtttgattgccttgttagggagtatctctacatatggctatattgacgggcaatttctgaagttggcatctcaagaatcttgacaggatcctatgtattatgttctggt

SEQ ID NO: 268091 - DNA, 460 bp, Glycine max
gcattgagacctttgttgctgatattaatagtggaaggtgggatgcaatattgcctcaagtttctcaactcaagcttcccaggaataagttggaggatttgtacgagcagattgtattagaaatgattgaacttcgagaactggatactgcacgtgctattttaaggcaaacacaggtgatgggtgtaatgaaacaagagcagcctgaaagatatttgcgtcttgaacatctcctagttagaacttattttgatccaaatgaggcttatcaagactcaacaaaagagaagcgacgtgcacaaatagcccaagctcttgcagcagaagttactgtagtgccaccatcccgattgatggctttaattggtcaagctttaaagtggcagcagcatcaagggttactttcttcaggaaccgcagtttgatttgttcgtggaacagctgctatgaaacaagatgt

SEQ ID NO: 268092 - DNA, 413 bp, Glycine max
attaattctcaaggatccacaagatccttccactccaaatgcagtttcatacaaaacaggagcgagagagaaactgataaggcgagggatacaacattgttgggatcattggagaccaatggagcgatctcctcggaggccacagaggcgaaagcaggacctttaagcttcctaataccctgtactacattcagtacttcctttacctgtcaacaatctagcttgctcctatctatctatatgtaataagatgcgttcaaataggggcactagcttcactttatgttgttatagctgtgtgttaacaagtcatgttagagacttcactattgcggtttctctttcgtggctataattaattatgcgcccttgatgcatataataaaaacatttttgatggttgtcattgtttc

SEQ ID NO: 268093 - DNA, 420 bp, Glycine max
gagaaaacaacaacaaacctcatcaccacacagagtagtagagagagagagaggaaaaaaaagagagtccgttaggtaatttcagtttatttattttatatttttaaaaagaagagaaaaagcaatggtgacagaggaagaaatatctgaagcggttcagtctctgctgcgggaatcaaaccctagtagattcacgacgctaaaccaggtggtggaggagctccaggccaagctcggccacgacctcactcacaaaatcgatttcatcaccgcgcagatcaacctcctcttcggatcccgacaaccgccgcaaaacccgcataggcagttacaacagcctaaggaccattttgcccctccgccaaaccctaattttcactctgcccctgtcagtgttggctttcagttgcagaatttctc

SEQ ID NO: 268094 - DNA, 454 bp, Glycine max
tgataatcatagctatggcaacggcgaggtccaagttgtgcggtatcatttagaaacagcggtctgtgtgagtaaaccctcggatcttgggttcttgagctctcgtctgaacggcctcagaatctgcttccccaaattgccacccacacccttcactgcttctcccttccccacacccttcctatcgctgccaagaaaaggtgtcccttcactggaaagaaatcaaaccaggccaacaaagtatcattttcaaaccacaagactaagaaactgcagcttgggaaccttcaggacaagagaatttggtgggaagcatggaagcgctacgtaaagcttcgtttggcaactaaggcattgaagaccattgagaagaatggacttgatgcacgtgcaaagaacggtggaattgatctcacgaagaaataagcctatctaataattattgtaatttgga

SEQ ID NO: 268095 - DNA, 442 bp, Glycine max
  unsure (1)..(442): unsure at all n locations
gcgtcctgttgggaaagagccgcttcgccggcgtcgacatgcgcatccgcgtcaagggcggcggggacacctnccacatctacgccattcgccagagcatcgccaaggcgctcgtcgcgttctaccagaagtacgttgatgaacagagtaagaaggagatcaaggacattctggtgaggtacgatcgtaccttgctcgtcgcggatcccaggcgctgcgagcccaagaagtttggtgggcgtggcgcacgtgcgaggttccagaagtcttaccgttgaaggagaatggtggtgtttttgtgtttttttgtttttggttcggttcatgctttatgctgtggaaaaaatgaaaacttttgttggtggttttggtagttttataattttgatcgttctttttataatggttggattatggattcttgctttgattcaactttttc

SEQ ID NO: 268096 - DNA, 418 bp, Glycine max
ttgagtccaaatggaagcaattgggagaattagccatgtctactggaaagttagaaatggcgtgaagagtgtttaaaacacgcagcagatttgagtgtgttattgctgctatattcttctttaggagatgctgaaggaatatcaaaacttgcaactcttgctaaagagcaagggaagaataatgttgcattcctttgcttattcatgttgggtaaacttgaggactgccttcaactcttggtagaaagcaatcggattccagaggctgctttaatggctcgatcctatctcccaagcaaggtctcaaagatagtggcaattatgagaaaagatctcagtaaggttaatccataagctggtgaatcattggctgatcctgaggaatatcctaatttgattgatgattggcaagttgcac

SEQ ID NO: 268097 - DNA, 445 bp, Glycine max
caaatgcaagcttgggagacagagaaagagattgagaatggacgccattgattctgtgttcggtccgctgagagaattcgcaaaggacagcgtgaggctcgtgaagcgctgccacaaacccgatcgcaaagaattctccaaggttgccgtccgtactgcaattggtttcgtcgtgatgggattcgtcggcttcttcgtgaagctcattttcattccaattaacaacatcatcgtcggatctggttagattaagggaactactatcgccaaagtaattcaagttgtcaagcaaaaggaggcagacagatttccctcatcaatagatcattctatgccaccaatcttagttcttttttcatttttggttttttcttgtctcacgaatctttacttcctttagatgtaaaattttatttatcctctgttgcaccttgacacattgttt

SEQ ID NO: 268098 - DNA, 459 bp, Glycine max
cccacgcgtccgccgttccttcagagtggaaccctagttgtctctatccttaaggttccggcaccgcaccaagtctcagcacccaacctggtcttctttcattcatggcggaggaacttatttctcaattaaacaatatgctagaagaaaatggaacaccaagtcatgtagaaagggctgctgatgctgatgctgatgctgagctttcttcaacatcacaaaaaggagatgacacttaagaagtttcaaagaagaaaaagaagaaatctaaaagcaagaaaaagaaagaactcttgcaacagactgatccaccatcaatttctgttattgaccttttcccatctggagattttcctgaaggtgaaattcagcagtacaaagacgataacctatggagaactacatcagaggagaagagagaactggagcgcctgcagaagccattatataattcagttc

SEQ ID NO: 268099 - DNA, 455 bp, Glycine max
attaacatatacaaattctctgtgttgtgttgtgtacttgtgttaattgtgttgttgttggaggaaatttaagtgaagagagaatgatgatgaagtctgctatgtgtgcattggtgcttgtggcactggttgtggttgaagtggggcccatggctgaggctgcggtgacttgcaacccaacacagttgactccttgtcttccggcaattaattcaggttctgcaccttcgagtgcttgttgccagaagctgaaagagcaaaagccatgcttctgtggctacctcaaaaaccctagcttgaagcagtatgttaactctcctaatgccaaaaaaacccgtagttcttgtggtattggctatccaacttgttaagcacctcttatatatatatataaaacgtgtgaacaatatatatatattgattaaaaaatatagtttaatttatatacacacttt

SEQ ID NO: 268100 - DNA, 451 bp, Glycine max
cccacgcgtccgcccacgcgttcgcccacgcgtccgcccacgcgtccgtgcagaaatggcgtcattcaccatgacggcttgcatccttggcagcccagccgtcaccaaccggtcggcagtagcaacgcagaggagatcactcgtagtgaatgctgccaaagctgttgaagcagaaaaggtcagttatgacaatgacatggatggtagcaatggaaggaggaacttgatgttcgccgcggcggcggctgctgcttgctctgttgctgggatggcagtggcagatgagcctaaaccaggaaccccagaagccaagaaaaagtatgctccgatttgtgtcaccatgccaactgctaggatttgtcgcaattgagggactttggtttttattttacttctgatgattggaaatgtacaatggggttgttgtaatgctttgatgatttcatttgat

SEQ ID NO: 268101 - DNA, 343 bp, Glycine max
tcggtttgaggaacatatataaagggtctggaatagggttgagagggatcaaaacgcacaccagaacacggtactgagttattagtaattgtgttgcgatgtgttgagcaagatagaaggatcaagaaaggataagacgaaagagggaatagggttagggctaggtttagggttaggtagaggatgcctgagaacaaacgtgaggtagcggagaacatgatgattggaaagaacgatgctgaccaccagaagcgagtgctggtgttcacggatgacaggcaggagtacacgcaagtgctgcggatgcttgataacgctcggagcaaagcgatgtgcatccacg

SEQ ID NO: 268102 - DNA, 453 bp, Glycine max
  unsure (1)..(453): unsure at all n locations
cccacgcgtccgcccacgcgtccgaatccctctttcttcctcttcctcagtagggcgatggtcgattctcttctgtgcaacgatgcctaaccctaaggtcttcttcgacatgaccatcggcggtcaacctgccggccgcatcgtgatggagctctatgccgacgtgactcccagcaccgccgagaacttccgcgcgctctgcaccggcgagaagggcgccgggcggagcggcaagcccctccactacaaaggctcgtccttccaccgcgtgatcccgaacttcatgtgccagggcggcgacttcaccgccggaaacggcaccggaggcgagtcgatctacggcgccaagttcgccgacgagaacttcgtgaagaagcacactggtcccggcatcctctccatggcgaacgccggtcccggaaccaacggatctcagntcttcatctgcacgac

SEQ ID NO: 268103 - DNA, 444 bp, Glycine max
cccacgcgtccgcacaagccaagtgaaagtgagaaaaaataaaaatcaaagagcataatgtgagggatcattcacaagattggggagacccttcatgtgggagggcacaagaaggaggaggagcataagggtgagcaccatgctggagaatacaaaggggagcaccatggtgaacacagtagtgagtacaaaggagagcatcatggtgaacacaaagctggagagtaccatggtgagcacaagccagagcacaaagaggggttcctagacaaagtcaaggacaagatccatggtgagggcggcgccgtcgagggcgagaagaagaagaaggagaagaagaagaaggagcatggccatgagcatggccatgacagcagcagcagcagtgacagtgattaaactgctgcatcacctatatatttaaaaggtttatgggaccatagt

SEQ ID NO: 268104 - DNA, 414 bp, Glycine max
atggcattgagtgttcctgctcttcccctgacatacgtggctgacgttctggcacttgttggcagcatcttggtcgtgctctgggtcctcaattctaagggaggctcggcttgggattctgataacaaggccctcatcttcaatcttcatccagctcttattgtcattggcttactagtccttgggggtgaagctattatcagctacacatgattacccctgaagaacgaagtgaagaaatcgatacaccttgccttccatgccatcgcattaatacttgggacagttggaatttatactgccgttacgtatcacaatgaaagggggattgccaatctatacagcttgcattcatggcttggaagtggggatattgtcctttatggcattcagtggatatatcggtttgtgatc

SEQ ID NO: 268105 - DNA, 425 bp, Glycine max
  unsure (1)..(425): unsure at all n locations
accacgaccatttgagcctctatatataggtgtctcgtatgctcaaacatgacaagccagtgatagtagctttcagataactgatagttgtgtgcaattatttgaattcaagaatgtctcaacccgactcgttggtggctgagattgaggtgaaaacctctgctgatcacttttacgacaccttgaagggtaagaaacagcatcgtattcatgatgttgcccctcatcatatccataaggtggaagttcatgaaggtgagtgggataaatctggcaatatcaaggtgcttacattcgctgatggggacactgttgagaccttaaaggagagagttgattttgatgatgaanacaagaagataacctacaccatattggagggtgtcatgttgaagtactataagagctacaagggtatcggtcat

SEQ ID NO: 268106 - DNA, 463 bp, Glycine max
  unsure (1)..(463): unsure at all n locations
aggacattgatgttattccaaatgaagagatgatattggcacttagtgaaaaaggttatatgaaacggatgaagccaagcactgttaacctacaaaatcgtggaacaattggaaaatctgtaggaaaattaaaagtgaacgattcaatgtctgattttctcgtttgtcatgcacacgatcatgtcctatatttcagtgataagggaacagtttactcagctcgtgcctacaaaattcctgaatgtagccgcactgctgctggcacaccacttgttcagatcttatctttatctgatggtgaaagaataacatctattattcctgtgagtgagtttgctgaggatcagtttttgctgatgcttacaatgcaaggctatatcaagagagtatccttgaatttggtttcatcaatcangtcgatcggaatcattgctattcaattggttcctggtgatgagctgaa

SEQ ID NO: 268107 - DNA, 457 bp, Glycine max
  unsure (1)..(457): unsure at all n locations
atttctctgaagtctttccaatttattccctgcacgagcttctttatatagtaggattgtggcttccttcatcacactaaacaggttaaaagaagagcatcactgaactaacaaagcaaccctatgtcgaaggtggtttgtgtcaccggagccagcggcgccatcggatcatgggtggtcctcctcctcctccagcgtggttacaccgtccatgccaccgtccaagatatcaaggatgaaaatgagacgaaacatttggaggaaatggaaggagcaaagagtcatctccatttttttgaaatggatcttcttgacatcgactccattgccgctgccataaagggttgttccggcgtaatccaccttgcatgtnctaacatcattggtcaagtcgaagatcccgagaaacagatattggaaccggcgataaaaggaaccggtaatgtgttgaaggccg

SEQ ID NO: 268108 - DNA, 421 bp, Glycine max
ctttgtttcaacaccaagttcagacaaaaagcagcgaggtttttcataacaaaggagaatgagggctttttcagttaaagttgaggaaggaagggaaggtaaaaatggtaacctttctgttggtccagtataccgtaacctcctctcagaaaatgaatttcctccaatggatcctgatttcagtaccacttgggatattttctgtgtgtctgtcaaaaatcatcccaataaccggatgctgggaaagcgtaaaattgttgatggaaagattggaccatatgtctggaagacatataaagaagtctatgatgaagttctgcatatgagttctgctttacgagcatctggttccgaacctggcactaacattgaaattatggatctaatttgcctgaatggatgtggcaatggaagttggtct

SEQ ID NO: 268109 - DNA, 429 bp, Glycine max
  unsure (1)..(429): unsure at all n locations
atgtcgttggtttcaagcatgttcgggtgtggagtggtgatggcggcgtcgcaagcaatgggaattggaaggagaagcgatggtggattgacgatagtgtgttcgtctaggccgcagaagaaagcgacggcgcatcacatgaagactcggcctcggaagacgcaggcatgggatagaaaccgcaagcccaccgtctacgatccactccctcctcttcctcctgattggaccctcgttattcccgctgacgcttcttctgctcccgttacgccttcgccttcaactccctctgcctagtcactctctcggtactctctctcgttntcatgtagtcttatctttaattccagcagcttttctttcatgttttcatctcaaatcaaaccttcatcatttggtttggatcaataaatgtttctgaattctttc

SEQ ID NO: 268110 - DNA, 428 bp, Glycine max
tccacgcgtccgccaaaaccttttttcgaagtctctgattttcctaatggctgcggcaaaggcagagaagaagccggcggagaagaagccagcggcggagaaggcaccggcggagaagaagccgaaggcggagaagaagatctcgaaggaaggagggagcgagaagaagaagaagcgcacgaagaagagcgtggagacctacaagatctacatcttcaaggtcctcaagcaggttcaccccgacattggtatttccagcaaggccatgggcatcatgaacagcttcatcaacgacatcttcgagaagctcgcccaggaagcgtcgcgtttggctcgctacaacaagaagcccaccatcacctcgagggagatccagaccgtcgtgcgtctcgtgctccctggtgaattggccaaacacgccggttctg

SEQ ID NO: 268111 - DNA, 455 bp, Glycine max
  unsure (1)..(455): unsure at all n locations
aggaaatgagggaaagaggttgtccacctgatggaaggacctacaacgctttgataaaactgatgactagccaacatatgccagatgatgcagtgagaatatacaagaagatgattcaaagtggcatcaaaccaacaattcacacttacaacatgataatgaaatcctattttgtgacaaaaaattatgaaatgggtcatgagatttgggatgagatgcatcagaaggggtgctgtcctgatgataattcctacattgtatacattggtgggcttataagacaggacaggtctggtgaggcatgcaaatatttagaggaaatgttagagaagggaatgaaagctccgaagcttgattataacaagtttgcttctgatatttctaagactgggaatgctgtcattcttgaggagttagctcgaaagatgaattttgntggtaagtttgaagtgtct

SEQ ID NO: 268112 - DNA, 446 bp, Glycine max
aattaacaacatggcacaagggatacaaacccttaatcccaattccaatttccataaacgccaagttcctaaatcttcaagttttcttgtttttggatctaaaaaactgaaaaattcagcaaattctatgttggttttgaaaaaagattcaatttttatgcaaaagttttgttcctttaggatttcagcatcagtggctacagcctgcatgcttcacggtgcaagcagccggcccgcaaccgcccgcaaatcctctggcctttccggaaccgtccgcattcccggcgacaagtcgatctcccaccggtccttcatgttcggcggtctcgcgagcggtgaaacgcgcatcaccggccttctggaatgcgaagacgtcatcaatacgggcaatgccatgcaggccatgggcgccaggatccgtaaagaaagcgacacctggatcatcg

SEQ ID NO: 268113 - DNA, 455 bp, Glycine max
cccacgcgtccgaagcagcagagggaggagcggcattaaaaatgcagatcttcgtgaaaacggtaacggggaagaccataaccgtcgaggtcgaaagcagcgacaccattgacaatgtcaaggctaagattcaagacaaggaaggcatccctccggatcagcagcgtttgattttcgccggaaagcaacttgaagatggaaggaccttggccgattacaacatccagaaggaatcaacccttcaccttgtcctcaggcttcgtggtggcatcatcgagccttccctcatggctttggctcgcaaatacaaccaggacaagatgatttgccgcaaatgctatgctcgtctgcaccctagggctgtgaactgccgtaagaagaagtgcggtcatagtaaccagttgaggcctaagaagaagatcaagtaaattctgggtgggatattgttggtctct

SEQ ID NO: 268114 - DNA, 414 bp, Glycine max
gaaaacaagagatatcgaagatggctctgcccaaagctaaggagatcgtgtcgtccaattgcgtcgtcgttttcagcaaaacctattgccctttctgcgtcgatgtgaagaagctcttcggtgacctcggtgccaattacaaggccatcgaactcgacactgaatccgatggaaaagagctccaagcagcattagttgagtggacggaccagcgaaccgtgcctaatgtgtttattggtggaaaccacattggtggctgtgactcaacaactgccctgcacactcaggggaagctggttcctctgctgatatctgctggagctgttgccaaatcaactgcttaaaggatctcccatttctagggtatgcagttaaataaaaattaaaaacccaagtagttgggtccgttatata

SEQ ID NO: 268115 - DNA, 372 bp, Glycine max
  unsure (1)..(372): unsure at all n locations
tccatgtcgtttttgtcgttgatgagcgttttggtctgaaactcgacgccaatggtggctggagaatcgacgttgaattgggtcttggcgaagcgcgcgaggagctgggtcttccccacggcggagtctccgaccagcaccaccttgaacacgtagtcgatcttgtggttgtattcgccgtacaggttcgacatcatccccgcggaagaagaattcaatcgccgatcgtcgtcgtcgtcgtcgtcgtcgatcactacgcgagatggaggaaggtggcggtgctgctgccgtcgttgtcgttgtcgctttgatgaaccatcgccttcttatcttctgtctagctaaaaaaaaaaaaatnaaatattaatttat

SEQ ID NO: 268116 - DNA, 307 bp, Glycine max
tcgggaaatgctaacgaggatgctattaacaggggaactttcttccaatcttgaattggaggcagagcaaacttggcaagtaaatatttctgttcctgaaggttgtgctgatccaagtgctagaagttgtgatgggacttgcgtgtaacattcttagaattctcaatgtcttaggtgcaaagagaagatgccaagtttgagatgattttactatatttttcatattggactgtcttcctctataattttgagttaaagtgtccacttaaattgaaaaaaaaaaaattaaaaatattaattaataatt

SEQ ID NO: 268117 - DNA, 394 bp, Glycine max
gttcagtctttcttggaactttgttactctcacacatgtctcgctccgtgcctgtggtttgaaccatttttgtcttgcttctgcttctggtggccactgagatgatggggccaacaatggtggcagaagcaagaacttgtgagtctcagagccaccgtttcaaggggccatgtttgagtgacaccaactgtggctctgtttgccgaaccgaacgtttcactggaggacactgccgtggcttccgtcgcagatgcttctgcaccaaacattgttaattttaaaaaattaattaagagtgctttgatagaagatgatagatctatcatcttttaactcgggttgttaattaaccactttgggtttgaaaataagggttacccattctactatgggt

SEQ ID NO: 268118 - DNA, 418 bp, Glycine max
acgcccacgcgtccggtgtatttccctacctctcccttcaagatgcagatcttcggcaagaccctcaccggcaagaccatcacccttgaggtggaaagctctgacaccatcgacaacgtcaaggccaagatccaggacaaggaaggaatccccccggaccagcaacgtctcattttcgccggaaagcaacttgaggacggccgtacccttgctgactacaacattcagaaggagagtactcttcacctcgtcctccgtctccgtggtggcatgcagatcttcgttaagacactcaccggcaagaccataaccctagaggttgaaagctccgacaccatcgataacgtcaaggccaagatccaggacaaggagggtatccccccggaccagcaacgtctcatcttcgccggaaagcagc

SEQ ID NO: 268119 - DNA, 433 bp, Glycine max
agaaactcaattctcactgaaagaaagttgctaacacttggcaccacttatcaacttatcatagttgataacatcaaaggcacaacattgagggaatgagggttgttatatcagcagtatgtgctattgtgctattctcttatgctgctgcgtacgatcctttggatccaaacggaaacataacgatcaaatgggatgttgtgtcatggacaccagatggctatgtagctgtggtaacaatgagcaatttccaaatgtttcggcacatcatgaatcctggatggaccttgggatggacatgggcaaagaaggaagttatatggtccatggtaggagctcaaaccacagaacaaggagactgttctaagttcaaaggcaatgtacctcactgctgcaagaaaactcccacagttgtagactttgctcctggtgt

SEQ ID NO: 268120 - DNA, 375 bp, Glycine max
tcgatcctgcttatattctaaccttcaaaattaacgttgtcaaatgctggtgcagggacaggggaaccaaatccacctgagtgggcgcaccagttccacgcgtttatgttcatgaacgaaagcggaattcttcagaaactggacttgtggtacgaatggaccaacggccgaaacttcaacatcattcagaatcagctggaccacgtcggctcctacgacctcgaatggaccaacggcacctacttcgtctacaccctctaccctttcgacccgacatgcaaagttgtggactttggagtgcgtattttacgacccaattggcttgaccgtgcaacctatttgggtcagctacacgatgataactggctctgcaac

SEQ ID NO: 268121 - DNA, 458 bp, Glycine max
cccacgcgtccgcgttgctccaactccagaaggacctcggcaacccttatcacatcatatggtggaacgcaaaggaggattgctgcgagtggttctgctgcgttaagtgtgacgagaaaacaaaccgcgtcattagcgttgccttatcatccccttttccagacaccaatctctcggcccaaatacctccctctgtgggtgacctcccttacctcgagtccctcgtcttccacaaattccccaaactcgtgggcccaatccagcccgcaatcgccaaactcaccaaactcaagtaccttgatctctccaacaacaatctctctggcccaatacccgattttttcgcgcaactcaagaacctcgacgatatcgacctttcctttaacaacctctccggccccataccaagctcgcttggtaaactgcctaaactcgcgtatctagaattgagccgcaac

SEQ ID NO: 268122 - DNA, 406 bp, Glycine max
agaaggggtacaccgactcaaccggagcatacacaatgtacgtggatgaggatcacgcagagcagatctgcagtgccaagcttgtaagcagccctcaccctcaatgcaaggaagtcaccccaggccgcgacgaagccgtcgtgattctcacccgctacaacggcattgcctccgacgataggttcgccaatgccatgggcttcatgtctcaggaggttgcttctggctgtgctgagatcctcaggcaataccaggagttcgacaatgagaattaattacgtaattaatttcagtatattattaatctacttcctaatgtctcttgatgtggagtgttatctcgacattttcatattatcatgttatatatggtgatggaacgacccttgttaaatttaataattcc

SEQ ID NO: 268123 - DNA, 457 bp, Glycine max
atggcgaacgccggtcccggaaccaacggatctcagttcttcatctgcacgacgaagacggagtggctcgacggaaagcacgtggtgttcggacaggtcgtcgaggggatggacgtcgtcaaggagatagagaaggtcggatccagctccggcaggaccgccaagcctgtcgtcgtcgccgactgtggtcaactctcttagatagacgacgttgaccctaggcttttatctctgtgtcggtggctctgaatgtgtcgtttctttcggtgtcgtttttgcctttttttctctttcccatgtcgtttaggggattgcggtgttatggatatcatttcgaaacccttcccctttgaatccttcctttcctttctaaaatatcagtatcatgtggttcgttcatagagtgaatggagtctgttatgagaaacataaaaaaatatgatgagctaccttcaat

SEQ ID NO: 268124 - DNA, 394 bp, Glycine max
  unsure (1)..(394): unsure at all n locations
gaacaagggtttctctttctctttctctgtctgcttcttcactttctctcgtttcaatcgaggaaaatcatgggcagaaaatgcttcgtcggtggcaactggaaatgcaatgggaccactgaggaggtgaagaagattgttactactttaaatgaagctaaagtccctggagaagatgttgtagaagttgttgtgagccctccttttgtgttccttccttttgtaaaaagtttgctgcgccctgatttccatgtctcggcccaaaattgttgggttcgcaaaggtggtgcttatactggagaggttagtgctgaaatgcttgttaatttgggaattcccttgggttattattggtcactctgaacggangcagcttttgaatgaatcaaatgag

SEQ ID NO: 268125 - DNA, 359 bp, Glycine max
cccacgcgtccgataattagtattcatattggacaagctggaattcaggtggggaattcatgctgggagttgtattgccttgagcatggaattaaccctgatggcaccatgcctagtgatacctcagttggtgtagcacatgatgctttcaacaccttcttcagcgagacgggatccggcaagcatgtgccaagggctttatttgttgatctggaacctagtgttattgatgaagtaagaactggtccttacagacaactctttcaccctgagcaattaatttctggcaaggaagatgctgctaataacttcgcaaggggacactacactgtttggaagagaaattgttgaactatgcc

SEQ ID NO: 268126 - DNA, 412 bp, Glycine max
ccggatcttcacgattaggagatggctaagtcgaagaaccacaccgctcacaacgcagtcctacaaggcccacaagaatggcatcaaaaagccaaagaggcaccgccacacttccaccaaagggatggatccaaagtttctgaggaaccaaaggtacgcgaggaagcataacaagaagagcggtgaaacagccacggaagaagagtaaagtgtcactctcaaatggggctattaggatttgatttgctattcaagtcccatatgttttgtgtcaaatctatatttagtagtatagtcattttgatgagttaatttaatccagagagaatgcagtacttactcttatagcatcgttgctggtttttgtttgttaaagacccttcaaattttatcgatgggatattattcagtt

SEQ ID NO: 268127 - DNA, 300 bp, Glycine max
ttgtgcattatttaatggccaccacagcagctctatccggaaccatggtgagcacctgcttcatgaggaagcaacgtatgacgaccagaagcctaaagacatgccacaacgctctatgaggcctgaaaggttgacgaagaggtcgtgtaacttgcatggactcgtacaaggggaagcttataacccgagaaggagaagctgagctcgaatgcccatatgatggtctcattgtggacaaggctgaagaagaaggcatagaacttacatactcgtgcagggctgcttcttgcgtttcatgtg

SEQ ID NO: 268128 - DNA, 386 bp, Glycine max
tttgacactgcggtgtttctgagctgggtagggattactccttctcgcgccagcccagttgcgagcttggaggagaagatccttgccgtggccaacgagtataaggccgtgaaggcctttctggtcgcttacagcaccgttgctgaggattgggctaatttttcgccacctatcttctttatcactctccatggacttctgggtaactctgcggttaagggagcgcccattaaggggattagtgacgccaccgcctacttttccgccaagtggatccctgaaattttatcgttggctgcctctaaatgaatgaagtatgacatgaagggtgaacacgtatctgacaagtgctatgtgatatgtgtgatgcgtgaatcttgaaatag

SEQ ID NO: 268129 - DNA, 454 bp, Glycine max
  unsure (1)..(454): unsure at all n locations
agagtttgcagactgagtggctcggtgagttagtgagcgaaaacgatagatagcattaccatgttggttggataactgaagtgagtgatgatttcaacttcaagcatggctttgctttctttactacccaaaacggcaccgcatgccctttccctcacaaacccttcctcttccactcccctcatcttacctttcagtttccaatgtttgcctcaccctcttccttctcctctctcttccctcaaagctactttttccgacggtggcgacaatttgcgcggcaagcccctggttcctcaggcctttgaagaagaagacgacgacgacgacaacaaatgggttgactgggaggacctgattntggaggacaccgttcctctcgttggcttcgtcagaatgattcttcattctggacaatatgacaatggagataaactaagtccagagcatgaga

SEQ ID NO: 268130 - DNA, 239 bp, Glycine max
gctgcagcaacctttaaggagctcttgacaagacataaatctactgtagctgaattcctatgcaagaattatgaatggttttttgcagaatataacactaagctgttggaatcttccaattatattacaaggcgccaagctgtcaagttgttgggagatatgttacttgatcgttcaaattcagctgtaatgacacgatatgtgagctcaagagacaacttgaggatttaaatgaatct

SEQ ID NO: 268131 - DNA, 436 bp, Glycine max
gttcaggctatctacgaaggtgtgcacagtttggacattgtggacgcaaattggagataggcgtcccttgtatgacttgcagaccattacaacgggaagcattgcttgaagtagacactttgatgcacacatactaccttgaattgcaaatatctgtctttagaaacgatgtcgtaaagagttgttatctatatgtatgatcaatcatagtatctattaggacattaatcatcggtagtactaagtgtagtcttggcaccatttaattctcaatatagggatcgagttaattttgtgatgttgaatgttgataacacatagtgggagcaagagcttgacgagtttggcgtggagggtattccacactttgcatttctggatatataaagaaatgaggagggcaattgtgtcggtatgctaccaatacaggtcttgc

SEQ ID NO: 268132 - DNA, 448 bp, Glycine max
tggagtttcaagggttaccggaaggttgcattgctagtatactctctcgcactacgccggcggacgtgtgtaggttttccgtcgtatcaaagattttccgttcggccgctgaatcggacgctgtgtggaaacgttttctcccttccgattaccattccatcatttcccagtctccttcgcctctcaactatccttccaagaaggagctctatctcgctctctcggatcgccctatcatcatcgatcagggtaaaaagagctttcaattggagaaaaagagtgggaagaagtgttacatgcttgctgctagagctctcagcattatttggggtgacactgagcaatactggaactggacaaccgataccaattccagggtcccggaagttgctgaacttagagatgtgtagtggcttgaaattcgtgtggtgctaaatacccttggttt

SEQ ID NO: 268133 - DNA, 341 bp, Glycine max
gtcacaaatatttgtggcataacaccgttcttttcatgttcaaagggttcaacatgacgggggtgatatggcgctgacattcacgaagcttgttagccggctcttcgcgaagaaggaaatgcgacttctgatggatggtcttgatgctgctggttagaccactattctttacaagctcaagctcgtagagatcgttactacaagtcctaccattgggttcaatgtttacactgtggaaatcaggaacattatcttcactggtttgagatgtttgtggccaagacaagattcttccttggggatgcactacttccatatctctcagggttttatttttgttg

SEQ ID NO: 268134 - DNA, 437 bp, Glycine max
ctctctctttgcgctttctgcaaaccgaacatttcatctccaaagggatcaacaggtcgaaggagaaatggggctgacattcacgaagcttttcagccggcttttcgcgaagaaggaaatgcgaattctgatggttggtcttgatgctgctggtaagaccactatcctctacaagctcaagctcggagagatcgttactacaattcctaccattgggttcaatgttgagactgtggaatacaagaacattagcttcactgtttgggatgttggtggccaggacaagattcgtcccttgtggaggcactacttccagaacactcagggtcttatttttgttgtagacagcaatgatagggacagagttgttgaggccagagatgagttacataggatgttgaatgaggatgaactgagagatgccgtattgcttgtgt

SEQ ID NO: 268135 - DNA, 433 bp, Glycine max
agtagttgagaactaagaaggagaagcaaatggcttcctcaatgatctcttgcccagctgttaccactgtcaaccgtgccggtgccggcatggttgctccattcactggcctcaagtccatggctggcttccccaccagaaagaccaacaatgacattacctccattgctagcaacggtggaagagtgcaatgcatgcaggtgtggccaccagttggcaagaagaagtttgagactctttcctacctgccagaccttgatgatgcacaattggcaaaggaagtagaataccttcttaggaagggatggattccttgcttggaattcgagttggagcacggcttcgtgtaccgtgagcacaacaggtcaccaggatactacgatggacgctactggaccatgtggaagctgcctatgtttggttgcactgatgc

SEQ ID NO: 268136 - DNA, 297 bp, Glycine max
  unsure (1)..(297): unsure at all n locations
cgagttgttacagagaacgttgagagagagtatcttgaatacgatgatcctaaaacggtatgtanaggagaggcttgtgatgatcttggaggaactttttgtgagaccgagtatcagaagggtgtctactagagaaaaaagaaaaccctttttattgccatggctactgcgtttttaatgtctaccagtaatgattgtagtggtgaatgtacataggtataggctatggatctcagtttatattgagtttcattttcgctataaactttacaataattatatactaaatttggtaaa

SEQ ID NO: 268137 - DNA, 361 bp, Glycine max
  unsure (1)..(361): unsure at all n locations
cccacgcgtccggattgaccccatttgtgcccttcaggctctcatggaaggccttcagggtgtgaccttggaggatgttgttgctgaggctgatatctttgtcaccaccacgggtaacaaggacatcatcatggttgaccacatgaagaaaatgaagaacaatgccattgtttgcaacattggtcactttgacaatgagatcgacatgctggggctggagaactaccccggcgtgaagcgcatcaccatcaagccccaaaccgacagatgggtcttccccgagaccaatgtcggcatcattgtcttggccganggtcgtttgatgaacttgggatgcgccacaggacaccctagttttggg

SEQ ID NO: 268138 - DNA, 269 bp, Glycine max
gcaagctcatcctagagttttaaaaatggcagcagcctcctccatggctctctcttccccagccttggctggcaaggccgtgaagctgggcccatcagcccccgaagtcgggagggtcagcatgaggaagaccgtcaccaagcaagccttctccggaagcccatggtacgggccagaccgcgtcaagtacttgggcccattctctggcgagcccccgtcctacctcactggcgagttcccaggtgactaccgctgggacactgctgggc

SEQ ID NO: 268139 - DNA, 459 bp, Glycine max
  unsure (1)..(459): unsure at all n locations
atgaaaatgaaggtccttgttttcttcgttgctacaattttggtagcatggcaatgccatgcgtacgatatgttccctctccgaatgaacactggctatggtgcccgtactccggaggtgaaatgcgcaagttggaggcttgctgtggaagcacacaacatctttggctttgagaccattcctgaagagtgcgttgaagcaacaaaggaatacatccatggcgaacaatatagatcagactccaaaacagttaaccaacaagcttacttttatgccagagacctcgaagtccatcccaaggacacatttgtgttcagtatagatggcaccgtactctctaatattccatactacaaaaaacatggatatggggtggagaaatttaactcgaccttgtatgatgaatgggttaacaagggcaatgcaccggcactgnccgagactcttaagaattacaac

SEQ ID NO: 268140 - DNA, 421 bp, Glycine max
gttgtgactcgttcttcttcgtcgttatcttcttcttttgttgcttgtgtgtgggtttttgctctcacctgaaaatgtcttgctgcggtggtaactgtggttgcggaagcgcctgcaagtgcggcaacggctgcggaggctgcaagatgtacccagacttgagctacaccgagtcaaccaccaccgagaccttggtcatgggagtggcaccagttaaggctcaattcgagagtgctgaaatgggtgttcccgctgagaacgatggctgcaaatgtggagctaactgcacctgcaacccctgcacttgcaagtgaagtgttggagagctaaagcttcaagcagagatggcccttagaaataattgataaaactatatgtagtttcaaaacttcaaaattatgtagtatgtattatggtgcac

SEQ ID NO: 268141 - DNA, 357 bp, Glycine max
ttccactcactacccagaaactagggtttagcgccacactccaatcgtagccgtcgcactctgtgttttctgcgccgtctccgatctccgacaatggcgacccaaatgagcaagaagagaaagttcgtagctgatggagtgttcttcgctgaactgaacgaggttctgacaagagagttggtcgaggacggttactccggcgcggaagttagggttacgccgatgcgcaccgaaatcataattagagccaccagaacccaagctgttctcggtgagaagggaatgagaataagggaacttacctctgtggctcagaagacgttcaagtttcccgagaacagagttgaactttatgct

SEQ ID NO: 268142 - DNA, 360 bp, Glycine max
gcggtgatttcagtgagtgatcggtggtcacttgatctcatcataatcgtcagcggcaattgaggaagatgccgatgggaaacattgccgtcggaaggcctgaataggctactcacctcgacacgttgaaagctgttctggctgagttcatctcaaccttcatcttcgcgttcgccggctcaggctccggcatcgcctacaacaagctcaccgacaacggcgctgccacccctgccggcctcatctccgccttcatcggccatgcattcgccctcttcgtcgccgtctccgtcggcgccaacatcttctgcggtcacgtcaaccccgtcgtcacctttggcgccttcgtcggcggcaaca

SEQ ID NO: 268143 - DNA, 433 bp, Glycine max
  unsure (1)..(433): unsure at all n locations
gaagaacgctcgctcgcactgtccagatcttaatcaagaggagtgagttttgtttttccaggcatgacgccgctgatcctgcatgctgggaaaaccaacaaaaattcttacaagacactcattgcagccgagtatgctggcgtccaagttgattttgcccctaattttgagatgggtgtctccaataaaactcctgaatttctcaagatcaatcctattggcaaggttcctgtgctggaaacccccgatggtccaatattcgagagcaatgccattgctcgctatgttacccggctgaaaggtgataacactntgtatggatcttccttgattgaatatgcccacattgaacagtggattgatttttcatcattggagattgatgctaatattatcaagtggtatgccccaagagttggacgaggaccatatc

SEQ ID NO: 268144 - DNA, 414 bp, Glycine max
caattctgaatttgcgggttttggatttggacttggtcgtcaacacagtctaattaatatggttttgctccttcgcttatgaatcttcttcttcttcttcttcttgttcctgcaacgcactgaattcgatcaatcaatccatcttcaattgctttgtttcgatcggaggaaaatggccgatcagttatcgaagggagaggaattcgagaaaaaggctgagaagaagctcagcggttggggcttgtttggctccaagtatgaagatgccgccgatctcttcgataaagccgccaattgcttcaagctcgccaaatcatgggacaaggctggagcgacatacctgaagttggcaagttgtcatttgaagttggaaagcaagcatgaagctgcacaggcccatgtcgatgctgcaca

SEQ ID NO: 268145 - DNA, 443 bp, Glycine max
caaactaacgtttatttatttggacattttatttcacttcaagttcatatcgggtctacacagagacataactcaggttgctagagtggttttctcacaaccatcgtgcacacaggccaaaacatctctgtagtctcttgaaatggtaaaggaatcatagacctttccatcactacttctcttgtactcaaacaagagatatgaatgattgaatgccagtcaatttgccaaacccatagtcgagagatccctgtaaagactccaaatagggggtgttggtgtgaagtctgacaagtgacttcccccaccaccaacaaccacatgaattgttccgttcacagtgccagagtaattgatgcttttcttgattcacacattgattctgataaatggggcacattctttcatagttatggacgtgaccataaaaatggaatttctac

SEQ ID NO: 268146 - DNA, 454 bp, Glycine max
  unsure (1)..(454): unsure at all n locations
cccacgcgtccggatcgagataactagaaacagtgtgatgaaaatgaaggtccttgttttcgtcgttgctacaattttggtagcatggcaatgccatgcgtacgatatgttccctctccgaatgaacactggctatggtgcccgtactccggaggtgaaatgcgcaagttggaggcttgctgtggaagcacacaacatctttggctttgagaccattcctgaagagtgcgttgaagcaacaaaggaatacatccatggcgaacaatatagatcagactccaaaacagttaaccaacaagcttacttttatgccagagacctcgaagtccatcccaaggacacatttgtgttcagtatagatggcaccgtactctctaatattccatactacanaaaacatggatatggggtgggagacaattaactcgancttgtatgatgaatggggtaacaa

SEQ ID NO: 268147 - DNA, 405 bp, Glycine max
cccacgcgtccggtcccgagtgctaaacctgagttgtgtctcaagttgctcttgttcttggtttcttttctttcaccctcaaaatttctcactctctttatcttcaccttttcagtttaaagcttcagatcacaacagatccaccattcacctcaccactttctcttcacaaggcaaatctaacaagaaaaagtagtctctgaagccgatccagtgtcttgtgaatttggaattggtggtgaatttagatctaaaaagccatagcaatgtcttttatcggtacccagcagaagtgcaaggcttgtgagaaaacggtttatccagttgatcagctttctgctgatggcactgcttatcacaaagcttgcttcagatgttctcactgcataggaacattaaagctga

SEQ ID NO: 268148 - DNA, 445 bp, Glycine max
gatcgagataactagaaacagtgtgatgaaaatgaaggtccttgttttcttcgttgctacaggtttggtagcatggcaatgccatgcgtacgatatgttccctctccgaatgaacactggctatggtgcccgtactccggaggtgaaatgcgcaagttggaggcttgctgtggaagcacacaacatctttggctttgagaccattcctgaagagtgcgttgaagcaacaaaggaatacatccatggcgaacaatatagatcagactccaaaacagttaaccaacaagcttacttttatgccagagacctcgaagtccatcccaaggacacatttgtgttcagtatagatggcaccgtactctctaatattccatactacaaaaaacatggatatggggtggagaaattaactcgacctgtatgatgaatggttaacaagggcaat

SEQ ID NO: 268149 - DNA, 469 bp, Glycine max
cccacgcgtccggcaagcaaaaagaaagaatcccaggcgaggagaaagatggaggggaaggggcaggatgtgtcgttgggagcgaacaagttccccgagagacagccaattgggacggcggcgcagagccaagacgacggcaaggactaccaggagccggcgccggcgccgctggttgacccgacggagtttacgtcatggtcgttttacagagcagggatagcagagtttgtggccacttttctgtttctctacatcactgtcttaaccgttatgggagtcgccggggctaagtctaagtgtagtaccgttgggattcaaggaatcgcttgggccttcggtggcatgatcttcgccctcgtttactgcaccggtggcatctcagggggacacataaacccggcggtgacatttgggctgtttttggcgaggaagtttgcgttgcccagggcgattttctacatcgtga

SEQ ID NO: 268150 - DNA, 428 bp, Glycine max
cagagacagagacgcagccatggggcggagacctgcgaggtgttataggcaaattaagaacgagccataccccaagtcacgtttctgccgtggtgttcctgatcccaagatcaggatttatgatgttggtatgaagaagaagggtgttgatgagtttcctttctgtgtccatctggttagttgggagaaggaaaatgtttcaagtgaggccctggaagctgctcgcattgcttgcaacaagtacatggccaaatttgctggaaaggatgctttccacttgagagtcagggtgcacccattccatgttcttaggatcaacaagatgctttcgtgtgctggtgctgataggctccaaactggaatgagaggtgcttttggaaagccacagggtacttgtgctagagtggctattggacaggtgcttcttt

SEQ ID NO: 268151 - DNA, 289 bp, Glycine max
gtggtataggaggaggagttggtagtggtggaggtgctggaggaggcattggaggtggtgtaggaggaggaattggaggtggacatggtggtggagtaggaggaggaattggaggtggtggaggagcgggaggaggctttggaggtggagcaggtggaggagctggtggtggctttggaggtggtgcacgtggaggagctggtggtggctttggaggttgtgcatgtgggggtgctggtggtggttttagtagtggctggggtttttgaacttaaatatagttttaatt

SEQ ID NO: 268152 - DNA, 444 bp, Glycine max
agacattatgctccaaatgtgcctatagtgctggtgggaacaaaactagatttgcgagatgacaagcaatttctgattgatcatccgggatccgcacgaataacaactgctcagggtgaagaattgaagaaaatgattggtgcagtcacttatattgagtgcagctccaaaacacagctgaatgtgaagacagtttttgatgctgcaataaaggttgcattgaagccaccaaagccaaagaagaaaccacgcaagaaaaggacctgtactttcctctgatatttcatattcagttttctttcaccccaaatcatttatagaacagaagtgaagtccagtatttttagtttttttgtgatctatatatataaagagcctatggatttatggataatttctgttaagaacattagattcctctcaaattgtataccgatagtgttg

SEQ ID NO: 268153 - DNA, 416 bp, Glycine max
  unsure (1)..(416): unsure at all n locations
cccacgcgtccgcggacgcgtgggccgccgcaactcactgtcttccttctctagggtttttagctcccccaatttcttcgctcaacatggttcttcaaaatgatattgatttgctaaatcctccggttgagcttgagaagaggaaacacaagctcaagcgtcttgttcagtcaccaaactctttcttcatggatgttaagtgccagggttgcttcaacataaccactgtctttagccactctcagactgttgttgtatgcggaaactgccagactgtcttgtgtcaaccaaccggtggccgggcaaggctaaccgagggatgctcctttaggaagaagggagactgagtggatngccatctttttttggttgtgattggagagtttcagtaatgcccttctttgttttggtatgat

SEQ ID NO: 268154 - DNA, 294 bp, Glycine max
caacttagtagtggtaagaaggatgaacgcgcgcacactcacatgcacatagacagcgtcggtggtgttgaattttcctcaaagaggatgtgtaaacttgtgcgatatgccgtcgtcttcaaccttgcccgatcgcggcggttctacgacgggattcctggtccgtgcattgttcacaagcgcggtgccgacatacttcatgacccctggttcaacaaggatacaaggtttactttgactgaaagggatatgtaggggctttagggcctcttatcttctcgtgttttatccttt

SEQ ID NO: 268155 - DNA, 330 bp, Glycine max
cccacgcgtacgtacttaataggaaaagatgaaaggagtcacacagtaagcccagctctggtctgctacaattctctaacaatggcgacggctttcaaaatggcgactactgtgatgtgagtgacggatgagtgcacgaactcattcatgggaatgaaacgtaagatggtgcacagatacatagtctgcaacatcgatcagaagacagggctcggcaccgttgataaggtcgatggccccggcgagagctatggagatctcccatgcctgttgctcaacgatgattggatcaaggctgcggtcgactttgaattggtgaccgctgataac

SEQ ID NO: 268156 - DNA, 418 bp, Glycine max
cccacgcgtccgctctttttcttctctctcaacaacttcaccttcttcctcctcgatcatgtgtcacttcaagggcaagtaccatgatgagcttatcgccaatgctgcgtacattggcactcctggaaagggtattcttgctgctgatgagtcaacagggacaattggcaagcgtttggccagcatcagtgtagagaacattgaatccaacaggcgagctcttagggagctgcttttcactgctcctggtgttcttcaatatctcagtggtgtcatcctctttgaggaaaccctctaccagagcacagctgcaggcaagccctttgtgaatgtcttgaagggaagctggtgtgcttcctggcatcaagggtgacaagggcacaatcgagcttgctggaactaatggagaaaccaccac

SEQ ID NO: 268157 - DNA, 429 bp, Glycine max
aatttcattttgactctctctctctctctgattgcttccttttcccttttattttgctctcgtctctgcacaacaattccttctcattccagatattccaaccatcgaccgatctcaattctcaaccttaacctctcagaatgtcttacgcttatctcttcaaatacatcatcatcggtgacaccggagttgggaaggcttggcttctactttaattcacagaccagcgctttcaagccgttcattacttgaccattggtggtgaatttggtgccaggatgatcacaattgattacaagccaatcaagttgcaaatattggataccgctggtcaagaatcattcagatctattacaaggtcttattatagaagggctgcacgtgcacttgcttgttatgatataaccaggagggagacatttaatcact

SEQ ID NO: 268158 - DNA, 443 bp, Glycine max
cccacgcgtccgcccacgcgtccgcccacgcgtccgcccacgcgtccgaaaagggctgtacgtacctccaaagggcaagcacttgctgatgagtatggtatcaagttctttgaaactagtgcaaaaaccaacatgaatgtggaagaggttttcttttcaatagcaagagatatcaagcaaaggcttgcagacacagattcaagagctgagcctcagactatcaagattaaccaaccagaccaggcagccagtggtggtcaacctgcacaaaagtcggcttgctgcggttcatgaaaagaatcagtatctgtagcaagaggtgcaggtttctgcaatagcactcttctgggtgctaatgttattctgatgacattagaaagtgggagcatgtatttgtccctctgtatcttccaactgcaaatgtcgtgttttaaaattaatat

SEQ ID NO: 268159 - DNA, 341 bp, Glycine max
gcagctgatgaatctgtggtaatctcggatgatctagatgtcatgaaagaggggtgcgccaaatcctttgctccctttccaccagggtgtatgtttcacagtgaaggaggattgatgagctttgagcatccaatgaacaagttgaaagcaatgcctagaatagacagtgaaggggccatatgtggagccaacttcaaggttgacaagtacgcaagggtcaacagcatacctcgagtaggaagccaggctaattggatggaatggacccagcattagcccaaaaaataaaatagtttaaatgtggatttagtttttataaatataataaattttctgtttaa

SEQ ID NO: 268160 - DNA, 210 bp, Glycine max
gcagtaccttggtcaaaatgaggcctctctagcatgccctcatgggtgttgccctacttccttattgttcaacccttcgccaccccactttgtttgtttgtacttaaactacattcccatttgtttttgctttttgagatttcatcatcctgtatttttggtttctgttttcggacttcaatggaaattaatggatgagaactaatgaat

SEQ ID NO: 268161 - DNA, 405 bp, Glycine max
  unsure (1)..(405): unsure at all n locations
cccacgcgtccgagcgccgcttcctgcatgttgtgtatcgtgttggtgatcttgatcgcgccattaagttttatactgaatgttttgggatgaagcttttgaggaaaagagatattccagaggagaaatatgccaatgcttttcttggatttggccctgaacaatcccattttgttgtggaattaacatacaattatggggtgacctcatatgatattggaactggatttggacattttgctatcgcaactccagatgtttacaaattggttgaagacatccgggctaagggtggaaatgtcaccagggagcctggtccagttaagggtgggaaatctgntattgccttcgtgaaagatcctgatggttatgcttttgagctcattcaaagaccttcaacccctg

SEQ ID NO: 268162 - DNA, 388 bp, Glycine max
  unsure (1)..(388): unsure at all n locations
cccacgcgtccgaagagaagggctacacaaacacaatctctaatggcactcaggatgtgggcttcttccactgccaatgcactcaaactctcttctgtctccagacctcatctcttgcctcctttttctttctccagatgcttatcttccgtcttggatggacttaagtacgctgattcacatgaatgggtcaagcacgaaggctcagtcgccaccattggtatcactgaccatgcccaggaccatcttggagaggttgtgtatgtggagctgccagaaccaggtggcacagtttccaagaagtctggcttcggagccgttgaaagtgttaaagcaacaagtgatataaactctccaaatctcgnggagatcgttgagggttacaaaa

SEQ ID NO: 268163 - DNA, 405 bp, Glycine max
gagacctcgaagtccatcccaaggacacatttgtgttcagtatagatggcaccgtactctctaatattccatactacaaaaaacatggatatggggtggagaaatttaactcgaccttgtatgatgaatgggttaacaagggcaatgcaccggcactgcccgagactcttaagaattacaacaagctggtgtctcttggcttcaagattatattcttgtcaggaagaacactggacaaacaggccgtaacagaagcaaacttaaagaaggctggctaccacacatgggaaaaattaattctcaaggatccacaagatccttccactccaaatgcagtttcatacaaaacagcagcgagagagaaactgataaggcagggatacaacattgttgggatcattggag

SEQ ID NO: 268164 - DNA, 432 bp, Glycine max
  unsure (1)..(432): unsure at all n locations
gtagttgagaactaagaaggagaagcaaatggcttcctcaatgatctcttccccagctgttaccactgtcaaccgtgccggtgccggcatggttgctccattcactggcctcaagtccatggctggcttccccaccagaaagaccaacaatgacattacctccattgctagcaacggtggaagagtgcaatgcatgcaggtgtggccaccagttggcaagaagaagtttgagactctttcctacctgccagaccttgatgatgcacaattggcaaaggaagtagaataccttcttaggaagggatggattccttgcttggaattcgagttggagcacggtttcgtgtaccgtgagcacaacaggtcaccaggatactacgatggacgctactggaccatgtggaagctgnctatgttttgcactgatgcttc

SEQ ID NO: 268165 - DNA, 449 bp, Glycine max
gattccactcagtgaattatgaagtgatctgaaatcacccgcgaagccgttaggataaggcaaagagagagaaacaaagcggcttccaatggcgactctgcggctcaccttctccgactcaaccaccttgttcaggccttctctaccttccacgcgaaccttctctcgaaaccgaagcctcattgtcaaagcctcttcttctgaagacgatttctccagaagcagcagaagacgcttcatcgccgaaaccgccgcactctcggtctcgctccctcagttaacggcgcgttctgaagacgcgctttcggagtgggagagagtgtacctccctatcgaccccggcgtcgtgcttctcgacatcgcttttgtccccgacgaccccaaccacggttttcttctcgggacgaggcaaaccattctggaaacgaaagatggaagaaacacttggg

SEQ ID NO: 268166 - DNA, 375 bp, Glycine max
  unsure (1)..(375): unsure at all n locations
cccacgcgtccgatcgaccactcccaaaccctagccttcacgcgcgcgctcctcaatgccgccggcaccgtcttcttcaccggcgtcggaaaatccggcttcgtcgcgcacaagatctcgcagacgctcgtctctctgggcgttcgctccgcgttcctctcgccggtggacgctctccacggcgacattggaatcctcaccaatcgcgatgtgctcatcctcctcagcaagtccggcgccaccgaggagctcctccgccttgtgccgtgtgcgagggccaaaggcgcgctcctcatcgcgctcacctncgttgaaggcaacgcgctcgccgcggcgtgcgacatgtccgtgcatttgccgctccagagagagctc

SEQ ID NO: 268167 - DNA, 454 bp, Glycine max
ccagaggttacttctgttgatctccatcaacattttcattctcttaatgccggaactattgaagatgttagggtgcaacgagacaaaggttttgggtttgtgagatacagtacccatgctgaagcagctcttgctatacagatgggtaatgctcgaattctatttggcaaacctatcaagtgttcatggggtagcaagcctactcctccagggactgcctcaactcctctcccaccacctacttctgcgaatgtgtcgggattttctcttgctagtcttgcagcttatgaacgccaaatggctttgagtaaaatgggtggtgcacatgcccttatgcatcaacaaggtcaacatgccctaaaacaagtagccatgggaatgggtgctcctggggctggttatgatgcaagattccagaatgttgcgaccacccaacacctaatgtactatcagt

SEQ ID NO: 268168 - DNA, 399 bp, Glycine max
agaacacgtacgagagcactaagatggaaactcagatggataagtaaatgatttcttcaacgattgctaccactgctaacagcactggcaaccgcatgggtgctggattgactggtctaaagactatggttaacttcatgactaggatgaccaacagtgacactacctatgtcgttagctacattggtagaaaccaatgcatacagcagtggacaccagtttggacaacaaatgtcgagactatgttctacattctatactatgtggatgaacaagatgatgcagaagtggaatacgttgttaagaacctattgatgactggatggaaatcttacttggaacacgagttcgagcaccgttagcactaccgggcacacagatagtaaccaggacactact

SEQ ID NO: 268169 - DNA, 457 bp, Glycine max
agcacaccacaggaactagaaaatccatacaatcttcaccaccaaaaagaaaataatggcaatggccagtgcaacaactctagccacaatcactgttgtggcggctagccccagtgttggcagcagaaggagtgggaagaggaatgtgaacttcatcagagggttgaattcttttggagggttgaaggctcagaacaatgtgacattactaggccttcctgtgtgcactgagcagtgctttgcaaaggtggtgagctcattgaaatatccatcatcatcatcacgtaaggggagaggtggaggtgctgccttttcaacatgcaatgctgctggtgagattttccagattgcagccatcatgaatggccttgtgcttgttggggtggcaataaggtttggccttcttcgagtcgaagcgtttgtggaagagtctgaatgagaattgcatcaactttta

SEQ ID NO: 268170 - DNA, 414 bp, Glycine max
gaaactggatcccatagactggcttacgtatgagccatatctctgggagaatgagagacagtcttacctacgacatgctgttctctttggtttctttgtgcaactcaaccgtatgtacacagatactgttcagaaactgcctactaattcagaatctaatattctgaggtgttctacagttccccgatttaaatacctccccatcagtgctccagcattgtcctctagagggacaaagaaggcatttactccatcatcaaatgaaatcgctttgagaagttcatggaattcaattacaaatggagatctttctcaaaagataaatttggatgacagttcaagtctgggggtggcagcacccttactgaagtcttttatgccaggtggaaaccaggtccgggaaaagtcctttaa

SEQ ID NO: 268171 - DNA, 346 bp, Glycine max
gtgagctataagctattctatcgggaggataatcttagatgaagaggtgcgcatgatcttgagcaagttctacaagaacggccatgccatgatctagggctaccaagctgaacgatgatgataatgaaaactggcattcaagacactcttaggagtgaacccacgagcagactggtcggaacccacggatccttgacctgaaagacattcctgagtagcattggaaccaacgcaacactacgtatctgccgaacgcgttagatctgaccctactgcacatgaccggcctgatctcttttatggtactgcactccaagatgctcacgacgacgtagatatgctccct

SEQ ID NO: 268172 - DNA, 435 bp, Glycine max
  unsure (1)..(435): unsure at all n locations
cccacgcgtccgcccacgcgtccggtcttcattgcacaatgtcgacctcttccattaacgggtggtgcctctcttccatctccccagccaaaacctctctcaagaaggccacattaggcccttctgtcttcgcaaccgttagcactccttcttctccttcttcttcttcttcttcttccttcccttctctcattcaagacaggcctgtctttgctgcccctgcccccatcatcaccccaactgtgagagaggatatggcaaaggaatacgagcaagctattgaagaactccagaaattgttgagggagaagagtgaactcaaagccacagctgctgaaaaaaggtgagcagattacagcttctcttggaacatcatcatctgatggcatnccatcatcagaagccttaaacaggatcaaagctgggttcattcac

SEQ ID NO: 268173 - DNA, 308 bp, Glycine max
  unsure (1)..(308): unsure at all n locations
cccacgcgtccgcgagataactagaaacagtgtgatgaaaatgaaggtccttgttttcttcgttgctacaattttggtagcatggcaatgccatgcgtacgatatgttccctctccgaatgaacactggctatggtgcccgtactccggaggtgaaatgcgcaagttggaggcttgctgtggaagcacacaacatctttggctttgagaccattcctgaagagtgcgttgaagcatcanaggaatacatccatggcgaacaatatagatcagactccaaaacagttaaccaacaagcttacttttatg

SEQ ID NO: 268174 - DNA, 256 bp, Glycine max
ttcatccatagacatggccaccgtcacttctgcagccgttgctattccctcattcactgggctcaaggcaagcgcaggcaaagtgagtgccgcagttaaagtctcagctccccaagccacaaggttgggcatcaaggcttcgctgaaagacgttggagtcgctgttgtggccactgccgcaagtgcagtgctggctagcaacgccatggccattgaagtgttgctgggtggtgatgacgggtctctggctttcgtt

SEQ ID NO: 268175 - DNA, 451 bp, Glycine max
aaaaaattgaatggccatggaaaataaaaaaattatagagtattgggttgtgtctatactgtgcatgcttttgtcgggtcattggatctctgttcaagctgcccctgcaccctctctcatcacacaactccctggctttaacgccaatttcccatccaagcactattccggatatataagtattgatggaaatactgaaagtgggaagaacctgttctactacttcgttagttcagaaagaagtccagagaaggacccagttgtgctatggctgaatggtggacctgggtgctccagctttgatggctttgtttatgagcatggaccattcaactttgaggctgcaaattcgaaagggaatctacccactttgcatatcaatccttacagctggtctaaggtttccagcgttatatatttggattcccctgctgggggtgggttctcttac

SEQ ID NO: 268176 - DNA, 427 bp, Glycine max
tcttcctgcattacagctgttgatttcttcaatcaggtgaatctgctttatggtacccttacagagttctgtactcctgagaattgtcggacaatgtctgcaggacccaagtatgaatatagatgggcagatggtgtacaaattaagaaacctattgagttttctgctccaaaatatgtagaatatctaatggactggattgaagcacagcttgatgatgaatccatattcccacagaagcttggttcaccatttcctcccaactttaaggaagttgtgaagacaatattcaagcggttgttccgtgtatatgctcacatataccattctcactttcagaaaattgtgagcctcaaagaagaggcccacttaaacacttgcttcaagcattttatactcttcacctgtgagttcgggctgattgaca

SEQ ID NO: 268177 - DNA, 234 bp, Glycine max
aaaaaaaaaaaaaaaaaaaaaaaaaaaaaatttaaaaaaaaaaaaaaaaaaaaagaaaaagagaaaagtggaactaaaaaagagggaaatgcctatagtaatagaaagctagctggtactaaagattatgcgttcttgggtttccatccaagtcagctgaatccctgctggctgtgtcgtgccagtcctgtgcaagtaaggcgaattgtaaatccgtgtttcttacttttgaat

SEQ ID NO: 268178 - DNA, 375 bp, Glycine max
tgcgtgctgagtgaaaatggtgcgacccttgttctccaagaggatcgtgcagaagctcttcaagaaggtcatacgcccccacagtgatcgcaagatctgcgtcaagccaagctggcgcatacccaagggtcttgattctcgcgtaacgagaaagatcaaaggatgcactttgatgcccaacattggatatggttcaaacacgaaaacccgccattatttaccaaatggtttcaagaaatttgtcgtgcacaatgtgaaagacctggaacttctcatggtgcataacatgacatactgtgctaagcatgctcacactgtatgcacttagattaggaacgacgtatttgatagagctgctcagcttgatgttgtctt

SEQ ID NO: 268179 - DNA, 84 bp, Glycine max
gggtaagtcacctaagacactccacgtacctacgttgttgactcttaccggctttaataaatcttctgcccttgttccatattt

SEQ ID NO: 268180 - DNA, 450 bp, Glycine max
ctggaatgaaggctttggatatgaatgctgtagttagttagctatgtgggcacgatggaccttttggcgccaccggggttaagaggttgaagagtattggcatgattgatagcgttcctggaatgaaggctttggatatgaatgctgcagaggatgctattgtgaggctcacgagggagattgtgcccggcatgattgtcaccggcatggaggtggcagaaattgatggctccccaaggatgggtccgacgtttggggcgatgatgatatcagggcagaaggcggctcatttggcgttgaaggcgttggggaggaacaatgcaattgatggaacgtgtggagttggaagggaagaaccccagcttattttcgcttctgcagacactgaggaaattgttgatgcttaaacttactttcaaattagctagatatatagcttttcttttcttt

SEQ ID NO: 268181 - DNA, 326 bp, Glycine max
gttggcgaccatatttacactgatgtcagtctatcaaaagtccatctgcgatggcgaacaggattgatttgtcgagaactggaagaagagtacgatgccttgattggtagccgcagttatagagaatcattggtggagcttattaatcaaaaggagattgtaggggatctctttaatcaacttcggctggctctgcagaggcgaagcaaagaccgttctgctcaaaccctagcagcaactaacttgaatgatgaagacctcactgatagcatgcaaaagctacttattgttatgcaaagactggatgagaaaattgctccaatgct

SEQ ID NO: 268182 - DNA, 211 bp, Glycine max
  unsure (1)..(211): unsure at all n locations
taaaaaaaaaaaaaaaaaataaaaaaaaaaatttaaaatttaaaaaaaaaaaaaaaaaaaaaagaaaaaggtaaaaataaaaaaaaaaaaaaaaaaaaaaaaaggacattacattgttagattcctatatgggcgtccgttttaatgatcccaagtttccttccccttgcttgccactttttagctcttttttaggngaacttaaattaat

SEQ ID NO: 268183 - DNA, 365 bp, Glycine max
ctaggatttcggccgtttgctccccaaggatagaagcagagtgtttcttttgaaatcagctagaaaagatgtcaggtgaagaggtagctgttgcagctgaggcacctgctgcttcaattccaggtgagccaatggacatcatgactgctctacagcttgtgctgagaaaatctctggcctatggtggtcttgcacgaggtcttcatgaaggtgctaaggtgatcgagaagcatgctgcacagctctgcgttctagcagaagattgtgaccaacctgattatgtgaaactggtgaaggctctttgtgcagagcacaatgttagccttttgacagttccaagtgcaaagacccttggagaatgggct

SEQ ID NO: 268184 - DNA, 345 bp, Glycine max
aatcaccaattcaaaacccttcttcccttggaacaaattgagagatcgtgatggcaccaaaggcggagaagaagcccgcagaggagaagaagtccacggtgggagacaaggctccggcggagaagaagccaaaggccggaaagaagcttccgaaggagggaggcgccggcggagaagggaagaagaagaagaggaacaagaagagcgtggagacatacaagatctacatcttcaaggttctgaagcaggttcaccctgacattggtatctcaagcaaggccatgggaatcatgaacagcttcatcaacgacatcttcgagaagcttgcccaggaatcttctagac

SEQ ID NO: 268185 - DNA, 457 bp, Glycine max
cccacgcgtccgccaagaaatctgaaattgaaagattggtgaagcagatagaatctctgaatccaactccatgcccaactctagaactggagaaggtggctgggtgctggaggcttgtttacagtacgatctcaattttgggatcaaagaggaccaaattaggcctcagagacttcatctcattggatgatttttttcagacgattgacatatccaagagcaaagcagttaatgtgataaagttcagtgcaatgggattgagtttgttgtctggacagcttaatattgaagcctctttcaggattgcttcctcaacaagggttgacattaatttcgaaaactcaacgatcactcctgaccggttgatgaatgtatttcggaaaaattatgatcttttgttgggcatcttcaatccagagggatggctggaaatcacatatgttgatgataccttgag

SEQ ID NO: 268186 - DNA, 431 bp, Glycine max
cagccatggaaacaggcatagcatgctacactcgcgggcctttcttgcctagtgtttcttgcaagcactctccaccctccatctctccatcttttggcttgaggagtctgaaatcgagctctttatttggagaatctctaagagtggcatccaaatcaacactaaaggtttcaaagacaaagaatacttcactcgtgaccagatgtgaaattggtgacagtctggaagaattcctcacaaaagcaacaccagataaggtgttgatcaggtcgctggcgtccatgggagaagcattaagaacaatttccttcaaagtgaacacggcttcttgtgggggaacacaatgtgttaatactattggggacgagcaacttgcaatggatacgctagctaatcaacttccttttggggccctaaattacctctaattc

SEQ ID NO: 268187 - DNA, 442 bp, Glycine max
agaaaatacacattacattactaagtctttgttcatttgagtagtagtgatggctagcctgaaggttgcatgtgtggttgctgtgatgtgcatggttgtggtggccatgagtgctgcacccatggcacaggccgcaatcacgtgcgggcaggtcgccggcgacatgtctccgtgcttcagttatcttcgaagcggcggaaaaccgtcgcaggcctgctgcaacggagtgaagtccctcagcagcgcggcgaagaccaccgcggaccgccagggggcgtgcagttgcctgaaaaaccttgccaataatatgggacagagtttgaatgccggcaacgcagcctctctccctggcaaatgtggcgtcaacatcccttacaagatcagcaccttcaccaactgcgccaccatcaagttctgaagggcaatttttcagtcgcagaat

SEQ ID NO: 268188 - DNA, 453 bp, Glycine max
aaaacatctccagtgggttcttcttcttctattacaacaacgtcgtccaagaccatgaccatggccatggccacgatcctgctcctgttcacggtcttcgcggtttcatcggccctagacatgtcgataatctcgtacgacaacgcccacgccgccacgtcgcgcagcgacgaggagctgatgtccatgtacgagcagtggctagtaaagcacggcaaggtgtacaacgcgctcggagagaaggagaagaggttccagatcttcaaggacaacctgcgattcatcgacgaccacaactcccaagaggaccgaacctacaagctcggactgaaccggttcgcggatctcaccaacgaggagtacagggccaagtacttgggaaccaagatcgatcccaaccggaggctcggcaagaccccgagcaaccgatacgcgccacgtgtcggcgacaaa

SEQ ID NO: 268189 - DNA, 360 bp, Glycine max
  unsure (1)..(360): unsure at all n locations
cccaacacaagaaatacgcgtggcgccatatatagcagcagagactcagaatcagaatctaaaggcaaaagggtttgaaggtgtgccttgttaaggtttcgtctgatccaaagagagaagaagaaatactggaagaagaactacattttcccgataacgagccacttattgtgagagacgggaacagaaggctaatgcaagacatagattgtggtgggttgtgcaagacgaggtgcagtgcacattcgagacccaacttgtgcactatggcgtgtggcacgtgctgtgtgaggtgtaagtgtgtcccacctggcacatctggnaatagggaactatgtggaacttgctacactgatatga

SEQ ID NO: 268190 - DNA, 425 bp, Glycine max
atttacatttctctctccagtatggcttctactcacaatgagttttatgcacttatgctagtggtggtggttggctccatggtggcttcctgtggtgctaacttcaaccaagactttgatctaacatggggtgatcaccgtgctaagatattcaatggtggtcagcttctatctctttctctggacaaagtctctggctccggcttgcaatccaagaaagagtacctatttgggaggatcgatatgcaactcaagctcgttgctgtcaactctgccggcactgtcactgcttactacttgtcgtctcaagggccatctcatgatgagattgattttgaattcttgggaaacgtgagcggtgacccttacattcttcacactaacgtgtttaccaaaggccaagggaacagagagcaacagttcta

SEQ ID NO: 268191 - DNA, 266 bp, Glycine max
cccacgcgtccgaaaaaaaaaaaaaaaaaattataaaaaaaaaaaaaaaaaaaaaaaaaaaaagaaaaaaaaaaaaaaaaaaaaaaaaaaaaaaaaaaaaaaaaaaaaaaaaaaaaaaaaaaaaaataaaaaaaaaaaaatataaagaaattaaatacatacatttttatcttctacattatttcatgcttaatttattttctaatcggtttaaaaaaaaattatttcttctaaaacttaaagatatttccatattaaaaacttta

SEQ ID NO: 268192 - DNA, 458 bp, Glycine max
cccacgcgtccgggaagagtttgtggaatctagtgagagagagcagaggaaaaggggaagagaaatgttgagtgcgacggcgatcggcgcgttattgggtttgggaacccagatgtactccaatgctctccgcaaactcccctacatgcgccatccgtgggagcacgtggtcggaatggggttgggcgcggtgtttgtgaaccagcttctgaaatgggaggcccaagtggagcaagacctcgacaagatgctcgaaaaggccaaggccgccaacgaaagacgttatatagatggagatgatgattaatgcatgtcttcatggattgtggcagttggtgaaaataatcatgaaatatgttgaacttgttgcctttgttttctgatttgatgatgttatgtttgtaaagctgttaaaactttttcgtgctaatcagcctattttttgcacaagtttttgc

SEQ ID NO: 268193 - DNA, 249 bp, Glycine max
gccatttgtcttggaaaaacaaattgtattgtaagtgcttggtgactagtttattggaatgttagtttgttcaaaaaaaaaaaaaaaaaaaaaaaaaaaaaaaaaaaaaaaaaaaaaaaaaaaaaaaaaaaaaaaaaaaaaaaaaaaaaaaaaaaaaacaaaaaaaaaaaagaataaaactatatacattcaaatactactaggattacatagacatgtacaaaaaccagatataaaccaacgcataaa

SEQ ID NO: 268194 - DNA, 315 bp, Glycine max
cagacgccttcgggagatatgcagctactccttggatgacgaatgggtttacaaggtccaggcacctgacctgaccgagacttttaagacttactacaagctggtgcagctggacttcaagaatataatcgtgtcaggatgaacactggacttacacgtcgatgcagaggcaaactctatgaacgctggctactacacatggtaaaggttcattatcaaggatccagatgatatctgcacacaaaatgcatgttcatacaaaacagcgcatgagagacaaactgatcacgcatggattcaacattgccgatatca

SEQ ID NO: 268195 - DNA, 372 bp, Glycine max
ggcatattaccttctgctccacaatttctgcatttatcatattagtccacctgggcatgagttgggagctgctgcaatcgatcaagatcacccaattctttctgtagatgatttagctgatcaaatagccgaggttctcaacttttttggtcttagtgcagtcatgtgtatgggagtaactgctggggcttacattcttaccttatttgctatgaagtatagacaacgtgttcttggtttgatacttgcttctcctctatgtaaagaaccgtcttggactgaatggttgtacaacaaggtcatgtcaaatttactatacttttatggcatgtgtggggtgggtaaggaaatattgctgaagcggtactttag

SEQ ID NO: 268196 - DNA, 445 bp, Glycine max
ggcatattaccttctgcttcacaatttctgtatttatcatattagtccacctgggcatgagttgggagctgctgcaatcgatcaagatcacccaattctttctgtagatgatttagctgatcaaatagccgaggttctcaacttttttggtcttagtgcagtcatgtgtatgggagtaactgctggggcttacattcttaccttatttgctatgaagtatagacaacgtgttcttggtttgatacttgtttctcctctatgtaaagaaccgtcttggactgaatggttgtacaacaaggtcatgtcaaatttactatacttttatggcatgtgtggggtggttaaggaaatattgctgaagcggtactttagcaaggaaattcgaggtggcactcaattgccggagtcagatatagttaaatcttgtcgaaagttgttggatgag

SEQ ID NO: 268197 - DNA, 359 bp, Glycine max
  unsure (1)..(359): unsure at all n locations
ctttaacaacctctccggccccataccaagctcgcttggtaaactgcctaaactcgcgtatctagatttgagccgcaacaagctcacgggctcaattccggcctcatttggatccttccaaaagcccgggccggctattatgctctctaaaaaccagctttcagggcgccttcctgcttctttggccaacttagactcggacaggatagacttgtcaaggaacaagctcgaaggcgatgcctncatgcttttcgggagcaataaaaggacgtggtctcttgacctttcaaggaacaatttcgcgtttgatctatctcgcgtggagattccccacaagacccttggcagggtgggatcta

SEQ ID NO: 268198 - DNA, 455 bp, Glycine max
gtggtctgcaactatgagcaaggattatctaatcatactttctctccttctttccacggtgcttgcaactgcaagttcttcttcttcttcttcctccctctatcttgggaagggcttctcccatcgcaaattgtctcccagttatcacattcacaaaaccattgacgaatcctatgcagttatcttcgatgctggtagcacgggaagccgtgtacatgtctatccgtttaaccaacaattagatctccttcgcattggccaagacctttgagttgttgtcaagactatgccaagtttaagtgcttacgctgagaatccaccagatgcttcagaatctcttaatccacttttggaggaagcagaagctgctgttcctcaagagtttcaccccaggacgccagttaaacttggagcaactgcaggtttaaggcaattggaaggggatgcttctgata

SEQ ID NO: 268199 - DNA, 367 bp, Glycine max
cactcactttctctctctataactctttctcacccgctagggtttccttttcatcgcatcgtgagtttgcaacctcgtcttgtgatttccatggagggtgctgggatggaagagaataatattattaatgatgatgataataataacaagtctgaggcgcatttgacttctgccgctgcttttgtggagggtggaattcaggacgcttgtgatgatgcttgcagtatatgccttgaagctttctgtgatagtgatccttccacggtgacgagctgcaagcatgagtttcatcttcagtgcattctcgaatggtgtcaaagaagctcccagtgccccaatgtgtggcaggctatcagtcttaaaagat

SEQ ID NO: 268200 - DNA, 432 bp, Glycine max
cccacgcgtccgaatcaattaaaactgagaatattgattcacgaataatcaaatcaatatgcgaaagaaaaaaaagattattaattttaagatatgagaaaggctccattgtcgaattcagacctaaccattaatcgagaagcgatgggaacgactaatcctgctaatacttaagactttattaaaagcaaatcttaatgattcattaggtgggatggcggaagaaaccaaaaagcaatcctttttttaggagttgcgccctacattacatgtgaatttgattgataataaaagagtaaatattcgcccgcgataatgatgattttattgaatttgccattattattgccaattctatatattctttctaataataaaaaatattctaataactgataataaaaaggaaaattaagatcattaagatcctat

SEQ ID NO: 268201 - DNA, 441 bp, Glycine max
gcgaaaatataacaaataatttgtactttcatcaaaacaaaatcccgttgtatttttctcaaatggctcgaacgaagcaaacggcccgcaagtcaaccggcggcaaggcgccgcggaagcagctggcgactaaggcggctcgcaagtcggctccggcgaccggcggcgtgaagaagccgcacagattcaggccgggaaccgtggcgctgcgcgagatccggaagtaccagaagagcacggagctactcatccggaagcttccgttccagcgcttggtccgagagatcgcgcaggacttcaagaccgacctccggttccagagctccgccgtctccgcgctccaggaggccgccgaggcttacttggtcggtctcttcgaagacacgaacctctgcgccattcatgccaagcgtgttactatcatgcccaaggacattcagc

SEQ ID NO: 268202 - DNA, 402 bp, Glycine max
gttgatcgagataactagaaacagtgtgatgaaaatgaaggtccttgttttcttcgttgctacaattttggtagcatggcaatgccatgcgtacgatatgttccctctccgaatgaacactggctatggtgcccgtactccggaggtgaaatgcgcaagttggaggcttgctgtggaagcacacaacatctttggctttgagaccattcctgaagagtgcgttgaagcaacataggaatacatccatggcgaacaatatagatcagactccaaaacagttaaccaacaagcttacttttatgccagagacctcgaagtccatcccaaggacacatttgtgttcagtatagatggcaccgtactctctaatattccatactacataaaacatggatatggggt

SEQ ID NO: 268203 - DNA, 385 bp, Glycine max
  unsure (1)..(385): unsure at all n locations
ctacactgtagataatccaacgaaaaattggagaggaggtgcaggttacatatcaaaggatgtggttgcgaaaggcttacccagtcctagtgatgatactctaatacttgtgtgtggacccccgggtatgatgaaagcaatatctggagaaaaggccaaggactggacacaaggagaggtttctggcatcctaaaagaggctggatacactgaacaaatggtatacaaattctgagaaatttagttttcttgcatctgaattccaagcacttgtccgctgcagaaatcgtgtactgaaatggctttctgataacaacagttangtgcggttgaaaattccaacatgaaataaatcttgaattacagagcatagagaattattaat

SEQ ID NO: 268204 - DNA, 406 bp, Glycine max
cgtgtttcgctcttctcttcgaataaaccacatacggacaagcgagaagaggagtgagagaagatggggttgtcgttcacgaagctgttcagcaggttgtttgcgaagaaggaaatgaggattctgatggtaggtctcgatgctgctggtaagacaaccatcttgtacaagctcaagcttggagaaatcgtcaccaccatccccaccatcggatttaatgttgagactgtggagtacaagaacatcagcttcactgtgtgggatgttggtggtcaggacaagatccgtcctctgtggaggcattatttccagaacactcagggtctcatttttgtggttgatagcaatgatagggatcgagtggttgacgcaagggatgagttgcacatgatgttgaatgatgatg

SEQ ID NO: 268205 - DNA, 291 bp, Glycine max
cccacgcgttcgcacgagcctcgaagtggatccttcgcaacatgggtgctagagaaccacgcaattcacctgaaccctgctcactacatcagtgagattattagagaaggcacaaaaaatggcactgctttctttaagtgccatggacatgagcaatttgagatgacgggtttggatcctgagtataataggttgttcaatgagggcatggtgtgcactgctagggttgtgtccaaggctgtgatcactggctacaaagatgggttcaaccagattaagtccttggtgatg

SEQ ID NO: 268206 - DNA, 447 bp, Glycine max
  unsure (1)..(447): unsure at all n locations
cagagatttgcctaaggaccttcctggaaccaacatcaagaagcatgtttctcagctcattgggaggactccactggtttatcttaacaaagtcaccgaaggatgtggagcttatgttgctgtcaagcaagagatgatgcaacctactgccagcatcaaagacagaccagcatatgcaatgatcacagatgctgaggaaaagaatctgataactcctggaaagacaactttgatagagcctacatcaggcaatatgggtatcagcatggcatttatggccgccatgaagggatataagatggttttgaccatgccctcttacacaagcttggaaagaagggtgaccatgagagcgtttggagctgaattaatcctcactgatccagccaaaggaatgggaggaacagtaaagaaggcttatgaactnttggaaaacacaccaaatgc

SEQ ID NO: 268207 - DNA, 437 bp, Glycine max
caagtagttgagaactaagaaggagaagcaaatggcttcctcaatgatctcttggccagctgtaccactgtcaaccgtgccggtgccggcatggttgctccattcactggcctcaagtccatggctggcttccccaccagaaagaccaacaatgacattacctccattgctagcaacggtggaagagtgcaatgcatgcaggtgtggccaccagttggcaagaagaagtttgagactctttcctacctgccagaccttgatgatgcacaattggcaaaggaagtagaataccttcttaggaagggatggattccttgcttggaattcgagttggagcacggtttcgtgtaccgtgagcacatcaggtcaccaggatactacgatggacgctactggaccatgtggaagctgcctatgtttggttgcactgatgcttc

SEQ ID NO: 268208 - DNA, 437 bp, Glycine max
cccacgcgtccgcccacgcgtccggaaaaaagagaaacaaatggcagcactgggtggctttaccgacatcaccggagcacagaacagcatcgatatcgaaaatctcgctcgctttgctgttgatgaacacaacaaaaaagagaatgcagttctggagtttgtgagggtgattagtgcaaagaaacaagtggtttctggcaccttgtactatatcactttggaggcaaatgatggtgtgacgaaaaaggtttatgaaactaaggtgttggagaaaccacggttgaacatcaaggaggttcaggaattcaagcccatcactgttgctgttaatcctctttcggtgacggtctagcacatagctaggttatggaagtgactagcttggccgcaagagtaataatatgtatgaactgaataaatgtacctattaactctac

SEQ ID NO: 268209 - DNA, 457 bp, Glycine max
tccacgcgttcggtggaaggtgagagggaggtgaagatgagaaagatggaagaggcgcacaggagcgggaagctggtgttctgctgcggggaggtgcagagttacacgctggagatgctgatgagggcttaggcggagttgttagggagggggagtgtggggaccacctacaaggcggtgatggattcacggctgattgtgacggtgaagaggttggatgggaaaagtgcagcggcagtgagtgatggagaagggtttgagaggcacatggaggttgtggggaggctgagacacctgaatttggtgcctatgaggtgctattttgatgccaagggtgaaaggcttgctattgatgactatgagcccaatgtgagactgttcaatctaggtcatggttcatgatcagcgtgggcaaaaccattgcattggacatcatgtttgaaaattgcagaagatg

SEQ ID NO: 268210 - DNA, 468 bp, Glycine max
tgctcttcacttccggaatcgacccacgcactccatgctgtctggccaatttgttgcatggatttaactggatattgcctgataatgtgaggaaggaggatttgaatatggatgagatttttgggctctctacacctaagaaactaccactggaaactgttgtggatcctatgcttccataccatctttattctctctgagcagtgcctttgcacaaagcgtttctctctaataagattgttgtagggataatgggtcttgagtgagtttatgtttgtcacactggattgcaataaatttttctctcttttcataacaatgttagaaagagagaaaaaaaaaaaagatgttgtggtgatagggactcgtggtaaccaatgcatggcaaatgtgcaagcgaaagtattttaatgtgaccattttctctctggcagaaacatgcttttctcttcctttccttttttggta

SEQ ID NO: 268211 - DNA, 327 bp, Glycine max
agactatctttatataataatataaataagaataaaaaaataaaaaaaaaaaaaaaaaaaagagaaaaggaaaaaaaaaaaaaaaaaaaaaaaaaaaaaaaaaaaaaaaaaaaaaaaaaaaaaaaaaaaaaaaaaaaaaaaaaaaaaatacaaaaatatatactataaaaaacaaaaaaattacacataatattcaagctaaaatattaacagtaaaatccataaatgagcataaaatgaacataaaaataaaacacttgatatcaataaactactgtaaaaaaaacttacatacttaaaaaaagagttctataaaaaatatgtctt

SEQ ID NO: 268212 - DNA, 454 bp, Glycine max
  unsure (1)..(454): unsure at all n locations
tgttgatcgagataactagaaacagtgtgatgaaaatgaaggtccttgttttcttcgttgctacaattgtggtagcatggcaatgccatgcgtacgatatgttccctctccgaatgaacactggctatggtgcccgtactccggaggtgaaatgcgcaagttggaggcttgctgtggaagcacacaacatctttggctttgagaccattcctgaagagtgcgttgaagcaacaaaggaatacatccatggcgaacaatatagatcagactccaaaacagttaaccaacaagcttacttttatgccagagacctcgaagtccatcccaaggacacatttgtgttcagtatagatggcaccgtactctctaatattccatactacananaacatggatatggngtggagaaatttaactcgaccttgtatgatgaatgggttaacaagggcaatgc

SEQ ID NO: 268213 - DNA, 420 bp, Glycine max
  unsure (1)..(420): unsure at all n locations
cccacgcgtccgctatcacttccctcaccatggccgagtcctgcctcctctcttctccctcgtcactcgtccacaccaaaaccaaaccctctctctttacacccccctccaaacccctcacactccaattttcatgcctcaactcctccgtctctctctccctcgccgcaccaactcaccgttctccccttgtaactttcgtggcccaaacttccgattgggctcaacaagaagaagaacagagcctcgctgaaaccgaagcgggcctggaaagttgggagcccaacggcgaagacgccggcgatgagagcttcgtcgaaccgccggaagaggccaagctcttcgttgggaactngccttacgacgttgatagccagaanatggccatgcttttcgaacaggccggaacccgtgaaatcg

SEQ ID NO: 268214 - DNA, 451 bp, Glycine max
gtgaacctgatcccattcccacgtctccacttcttcatggtggggtttgcacctctcacctgacgcgggtctcagcagtacgtgtccctcactgtccccgaactcacccagcaaatgtgggacgccaagaacatgatgtgtgccgccgatcctcgccacggccgatacctgacagcatcagccatgttcaggggaaagatgagcaccaaggaagtggatgagcaaatgatcaacgtgcaaaacaagaactcatcctacttcgttgagtggattcccaacaacgttaagtcaagtgtgtgtgacatccctctcaagaacttgaagatgtcgtgcactttcattggaaactccacctcaattcaggagatgttcagaagggtgagtgagcaattcactgcaatgtacaggcgcaaggccttcttgcactggtacaccggtgaaggaatggacg

SEQ ID NO: 268215 - DNA, 251 bp, Glycine max
gctcatccgagaccggaagcagcaatggggatcgatctcaaggccggaggtaaaagcaaaggaaccaaatgaacagcacccaagtccaatgatatctatcttaagctcttggtcaagctttatcgcttacttgttcggagaactggcagcaaattcaatgccgttatactcaagagattgttcatgagcaagggtaacaagcccccattggctttgtcaaggttgattaagtataccaaggggaaggaaga

SEQ ID NO: 268216 - DNA, 425 bp, Glycine max
ccggaatcgacggacgcacccactcgtgcggttgctcggtctgaagccgctccgtctactctgtgacgctcagaaggcttcgagcctaccgaccaacgacctgcctaccgatttcgattggcgcgaacatggagccgttactggagtaaaaaatcagggttcgtgcggatcgtgttggtcctttagcgccgttggagcgttagaaggtgctcattttctttatacaggtgagctcgtgagccttagcgagcaacatcttgcggactgcgatcatgagcgtgatccggaagagcgtggagcatgtgactcgaactgtaacggtgctgtgatgaccactgcattcgatgacacactgcacgctggtggactaatgcgagaaaaggattatccttacactggaagagaccgtggtccctgcaaatttg

SEQ ID NO: 268217 - DNA, 311 bp, Glycine max
tcacactctctctttctttcttcctgctgctacaatatggagcctctctcttccaccaaacacaacatcaatctctccaagccttcctccctccacacggaggctccgccgccggaggccagtcccctccggaagatcatggtggtggcctccatcgccgccggggtgcaattcgggtgggccctacagctctctctacttaccccttacgtccaactgctggggattccccacacttgggccgtcttcatctggctctgcggcccaatctccggcatgctcgtccagcccatcgtgggataccacagcga

SEQ ID NO: 268218 - DNA, 447 bp, Glycine max
  unsure (1)..(447): unsure at all n locations
cccacgcgtccgtgataatggtgtttttgaagttcttgccacaaatggagatactcatcttggaggtgaggactttgatcagagaataatggagtacttcattaaattgatcaagaaaaagcatggaaaggatattagcaaggacaacagagcacttggcaagctgaggagagaggctgatcgtgcaaagagggctctcagcagccagcaccaggtccgcgtggaaattgaatcactttttgatggtgttgattcttctgagccactcacccgagctcgttttgaggagttgaacaatgatttgttccggaagaccatggngccagtgaagaaggctatggaagatgcaggattacagaagagtcagatcgatgagatngttctttgtggtggaagcacatggattccaaagtacaacagcttttgagggactacttgatggaaagg

SEQ ID NO: 268219 - DNA, 453 bp, Glycine max
gatggtgttgccgggctctaccgtggtttcaacatctcatgtgttggaatcatcgtgtatcgtggtctgtactttggattgtatgattctgttaaaccagttgtcctcacagggtcattgcaggatagcttttttgccagctttgcccttggatggctcatcaccaatggtgcaggtcttgcatcatacccaatagacactgttagaagaagaatgatgatgacctctggtgaagctgtcaagtacaagagctccttggatgcattcacacagatcctcaagaatgagggtgccaagtccttgttcaagggtgccggtgccaacatcctccgtgccgttgccggtgctggtgtgcttgctggttatgacaagttgcaggttcttgtgttcggcaagaagtacggctctggtggggcttaagttctaatgctgagtcagtactaatattggttt

SEQ ID NO: 268220 - DNA, 440 bp, Glycine max
  unsure (1)..(440): unsure at all n locations
ttcagggttaagcggtgagatttgcgaatctgagaaatggcggattcttctcgggaggagaacgtttacatggcgaaattggcggagcaggccgagcgttacgaggagatggttgagttcatggagaaggttgcaaagactgtggaggttgaggagttgacggtggaggagaggaatctcctctctgtggcttacaagaacgtgattggtgcgaggagggcttcgtggaggatcatatcctccattgagcagaaggaggagagcaggggcaatgaggaccacgtggccattataaaggagtacaggggcaaaattgaggctgaactcagcaagatctgtgatgggattttgaaccttcttgagtncaacctcattccttccgctgcatctnccgagagcaaagtcttttaccttaaaatgaanggtgattaccacaggtt

SEQ ID NO: 268221 - DNA, 416 bp, Glycine max
cccacgcgtccgtgaatatattggcttcttcgttctctggttatgcaaaaccctttgtaagagtaaacccttctcttcttacgctcagggcatcttctctgcgccatgactaccctcttgcaagcaaaattgttgtcaaaaatttaccatattctaccggtgagactactttgcagaaggaattttcaaattttggcaagatagctgaagttaaaatggttaaagatatgaacacaaaaagatctaagggtattgctttcattcaatatacatgtcaagatgatgccatgcttgcactagaaaccatggatcagaaggatttttatggtcgaacaatcggcgtggaaattgcaagactgggttgggatgattttggtgcatccccaagggcctcatgacccccaaaagagtgggat

SEQ ID NO: 268222 - DNA, 444 bp, Glycine max
gctctcttctctgcaaatgcttcattccaagatggttaggactctgtaggctgataaagacaacactcataccgttggaaagaaggatgctgctggccatgttgcttaatttagttcttgcttcctttgtcttcttgagttttatcagagacgggagtgcagggatcactagctctttcattcggtcagagtggccggcagttgacatcccccttgatcatgaagcatttgcagttccaaagggttataatgcacctcaacaagtgcacatcacgcaaggtgactatgatggaaaagcagtaatcatctcatgggtgaccacagaagagccagggcacagccatatacagtatggcacatcagagaataaatttcaaactagtgaagaaggcacagttacaaactatactttccacaaatacaagtctggctacattcatcact

SEQ ID NO: 268223 - DNA, 339 bp, Glycine max
cccactcgttcggcacaagcagagctgcaaggtgtgtcaaaagaattgacagctgctcttgaaaagaatgatagcctacaaaaagaattagttgaagtctacaaaaaggctgaaagcacagcagaggatttgaaggatcaaaatcagttagttgcttctctgaacaaagatttacaagcattagagcagcaagtctcaaaagacaaggagtcccgaaaatctcttgagagggacctggaggaggcgaccatatcactagatgaaatgaaccgaattgcgttgatcctttctggggaactactgatagctaatcctctggtttctagcctggaaaaagag

SEQ ID NO: 268224 - DNA, 382 bp, Glycine max
  unsure (1)..(382): unsure at all n locations
catttctgcatttccattttctctctcacttttcaagaatcgtaagctatgggaaagtctgacccaactgtgagtgctgattaccagaaggccgttgagaaggcgaagaagaagctcagaggcttcatcgctgagaagagatgcgctcctctaatgctccgtttggcatggcactctgctggaacctttgacaagggcacgaagaccggtggacccttcggaaccatcaagcaccctgccgaactggctcacagcgctaacaacggtcttgacatcgctgntaggcttttggagccactcaaggcggagttccctattttgagctacgccgatttctaccagttggcttgcgttgttgccgttgagggcacgggtggacctg

SEQ ID NO: 268225 - DNA, 418 bp, Glycine max
cacgatcaccaccgcaaagcaatgggcgctatactttctgccttaactggcggtgccgcaacggcggcgacgtcttcgccggagagttctgcttctagggtccagtctttccactcttcggcgcgctggcagctccacttcaacgagctcaaaaaataccaataagctcgttgtgatagatttctcggcgtcgtggtgcggcccttgcaaattcatagagccagcgattcacgccatgtccgaaaagttcaccgacgttgacttcgtcaagatcgacgtcgacgaattgccggatgtggcgaaagaagttaattgggaggccatgcccaccgtcggtgtgtgtaagaaagggaaggaagtcgacaaggttgtgggcgcaaaagatgacgagctcgaaagaagattgagaacatcgatc

SEQ ID NO: 268226 - DNA, 438 bp, Glycine max
  unsure (1)..(438): unsure at all n locations
ctctctctgtctctctctctctagacttagattttgtgaatggctgaagtggaagagggacaggtcatcggcgtccacaccgttgatgagtggaagctgcaactccagaatgcaaaagactccaaaaaactgattgtggtggattttactgcttcctggtgtggtccatgccgttttatggccccagttcttgcagagattgcaaagaaaactcctgaattgatcttcctcaaagtggatgtggatgaagtgaggcctgttgctgaggaatattccattgaggccatgccaaccttcctcttcttgaaagatggcgagatcgtggacaaggtggttggtgctagtaaggatgaccttcaagccaccatagccaagcatgcatctgctgntgctgctgctttcttctcttgaagtgaagtatcataatatgaaagaaga

SEQ ID NO: 268227 - DNA, 458 bp, Glycine max
cccacgcgtccgcccacgcgtccggttcactcctctctcctcccctcctgcaaggacccaggcgatctctctctctctctctctctctctgtttcatatcatgaaacgctcaaacgacgacgtcgctgcccccgtccccgcctcaacctccaagccagtgttcctaaccaaagcccaacgcgagcaattggctctccagcgccgccaggaagaagtcgccgaccagaagcgccgccaggagcagctcctctcccgcaaccactcctccgatcccaaaccctcctccgaccgcgacagagacagagaaagagaccgagaccaccaccgagaccgggaccgcgatcgtgacagagacagagaacgcgagcgcgcgaacgcgcccggttggagaaactcgcggagcgtgagcgcgagaaggagcttgagtccatcaaggagcagtacctgtgctcgaaaaa

SEQ ID NO: 268228 - DNA, 405 bp, Glycine max
atggtgccttgggaattagaatggctctccttggatcaaacataacaagcgaggttggactccgtttgctcctttgtcctcttggttccaacgttgtaattagaacagcatgctgtactgtgggagttgctttgcctgtgtactctacgttcaaggcaatagaaagtaaagatcaagatgctcagcataagtgtcttctctactgggcagcctatggttcattcagtctcgctgaagtgttcacggacaagcttatttcttggtgtcctatctactatcacctgaagtttgcatttcttgtttggcttcaacttccatctaccagtggtgcaaaacaaatatatgcaaaccacttgcgccccttcttgttgaggcatcaagcacgaagtgatcaagtcctgggtt

SEQ ID NO: 268229 - DNA, 373 bp, Glycine max
atcccacgcgaggagaaagatggaggggaaggagcaggatgtgtcgttgggagcgaacaagttccccgagagacagccaattgggacggctgcgcatagccaagacgacggctaggactaccaggagccgacgcctgcgccgctggttgacccgacggagtttacgtcatggtcgttttacagagcacggatagcagagtttgtggccacttttctgattctctacatcactgtcttaaccgttatgggagtcgccggggctaagtctaagtgtagtaccgttgggattcaaggaatcgcttgagccttcagtggcatgatcttcgccctcgtttactgcaccgctggcatctcaagaggacacataaacccg

SEQ ID NO: 268230 - DNA, 439 bp, Glycine max
gtcaaaacacttcaactttaggctccatctcaaaaaaatgggtggtttagctagcaatcttgctctaattgttatggtgggtctgcaaattcattatgcagcacttgctatattcacaagagccgctttgttagatggattgagtacgacggtctttgtagtgtacaggcaaggcatagccactttggctttggcgcctatgtttttctctcctaagcggagacaatcagtgaaagattctttgggattcaggagcttctttttgatgtttgtgaccgctcttgttggagtcacagcaaatcagaatgcatactttaaaggtttattttatgcatcctctactgcagctaccgctatgagtaatctgataccagcattaacgtttgtaattgcggcaattgcgggatttgagaaagttgacataagcttaagaagcacg

SEQ ID NO: 268231 - DNA, 434 bp, Glycine max
gtcgaagcgaggtcgcggaggatcggcgggaaacaagttccgcatgtcgctgggtctgccggtggcggcgacggtgaactgcgccgacaacaccggcgcgaagaacctctacatcatatcagtgaaggggatcaagggtaggctgaaccggttgccgtcagcttgcgtcggagacatggttatggccaccgtcaagaagggaaagcccgatctccgtaagaaggtgctgcccgccgtcatcgtccgccagcgcaagccttggcgccgaaaggacggtgtttacatgtacttcgaagataatgctggtgttatcgtgaatcccaagggtgaaatgaaaggttctgctatcactggtccaattgggaaggagtgtgctgatctgtggcccatgattgcaagtgctgccaatgctatgggttaagctaggattttag

SEQ ID NO: 268232 - DNA, 450 bp, Glycine max
ctggccgatttgatagacaggtgacagttgttgttccagatataaggggaaggactgaaagcctaaaggttcatgctagcatcaaaaagtttgatgctgatgtttctcttgaagtgattgcaatgagaacacctggctttagtggagctgatcttgcgaatctgttgaatgaagctgctatattagctggtcgccgtggaaagacagctatttcatctaaagaaattgatgattctattgataggattgtggctggaatggaaggaacagtgatgacagatgggaagagcaaaagtttagtggcatatcatgaagttggtcatgctatttgtggaactttgactcctggtcatgatgctgtgcataaggtaacactagttcctcgcggtcaagctcgtggacttacatggttcattcctaacgatgacccaactctgatctccaaacaac

SEQ ID NO: 268233 - DNA, 452 bp, Glycine max
cccacgcgtccgccttctccaacatgccaaacgacagcgttctgagtcttttcttgttcgtgaccctcttcacatgccttctctctgctacttcccacgatgaccatattttcctaccgagtcaactccatgacgatgactcagtgagttgcactgcaaccgacccaagccttaactacaagccggtgatcggaatcctgacccaccccggcgacggtgcctctggccggctcagcaacgccaccggggtttcttacatcgccgcctcctacgttaaattcgtggagtccggtggtgctagagttattccccttatctacaatgagtcacctgagaaccttaacaagaagctcgatttggtcaatggagtgctcttcactggtgggtgggctgtttctggtccatatttggatactcttggaaacatttttaagaaagctttagagaaaaat

SEQ ID NO: 268234 - DNA, 447 bp, Glycine max
tgctgatgagtcacattttctgataaatgctcaggcaaagaggacaactgcttctcttccagtcataaagaaagctcaatatgcattattgcttagtggaacacctgctttatcacgaccaattgaactattcaagcagctggaagctttgtatcctgatgtatataggaacgttcatgaatatggtaaccggtactgcaagggtggattttttggagtttatcaaggtgcaagtaaccatgaagagttgcacaacttgatcaaggcaacagtgatgattcgcaggcttaaaaaggacgttctttctcaacttcctgtaaagcgcatgcaacaagtcttcctagacttggctggcaaggacatgaagcaaattaatgctttatttcgagagttggagatggttaaagccaaaattaaggcagctaaatcacatgaggaggctgaatc

SEQ ID NO: 268235 - DNA, 452 bp, Glycine max
ccctcattgaccttacaattatagtaatcctgtcaaggcacgcatctgatgagttctaccttggggagagagatggtggtgacttctggacttctgatgctggtccactagaggccttcaagaggtttggaaagaagcttcaagagattgaacataagcttatacagaagaacaaggatgagacgttgagaaaccgcactgggccagctaaaatgccttacactctgctctatccttctagtgaggagggattgactttcagaggaattcccaacagtatctctatctaagggctctctcattgaggttgctgtactactctgcctgtttttcaataatgtgaaataggaggaatatgattccttcatctacctacgtatggtcaagttacatttggcgtggttgaatgttctcgtgtttgctgtattctgttttaatacagatcgaagaga

SEQ ID NO: 268236 - DNA, 428 bp, Glycine max
gagaaaaagagagaggtagagaaaagcgaatagtctctctcttcctatctctctctttcaatgtcagggcacaaatcttccacctctacttcttcttcttcttccttctaacctatatcagaaggaaacgcgaaaaaagaaaaaaaaaaaagaggcagaaggttctagaagccgccaatttttatttcttttaattcgtctgagtcagagacgttcgtgattgtaaccatggattcttcgtgtgtcccaaacggcgacgtttctgggttcaaagataaggagtcaatggttgaccctttcttggtcgaggctcttgagaaccctcggcaccgtgtcaccattttgcggatggagctggatatccagaggttcctgagtaatgcagattatcagcattttgagtttcaacatttcccttcttcctatct

SEQ ID NO: 268237 - DNA, 402 bp, Glycine max
cccacgcgtccgtttagagagagaaaggatgaagatcacggcattgttggtgcttaaatgcacaggtgagggttccgatcccgttattctggcgaacgcttccgacgtcagccacttcggttacttccagcgttccagcgtcaaggagttcatcgtcttcgtcggtcgcaccgtcgcccgtcgcacccctcagggccaacgccaatccgtacaacacgaagagtacaaggtgcacacatacaacagaaatggtctttgcgcgttgggatttatggatgatcattacccgattcggagtgcgttttctcttctcaaccaggtaatagatgaatatcaaaaaaactttggcgagtcatggagaaatgctcaggaagacagttctcaaccatggccctatttgaa

SEQ ID NO: 268238 - DNA, 191 bp, Glycine max
cccacgcgtccgactagaaacagtgtgatgaaaacgaaggtccttgttttcttcgttgctacaattttggtagcatggcaatgccatgcgtacgatatgttccctctccgaatgaacactggctatggtgcccgtacttcggaggtgaaatgcgcaggttggaggcttgctgtggaagcacacatcatctt

SEQ ID NO: 268239 - DNA, 263 bp, Glycine max
aacattgcaatgccattcctaccatatggtcccttttcgaatgaaaacttgctatggtacccctacctccgacgtgaaatgcgcaagttggaagcttgctgtggaaacacacaacatctttgtctttgagaccatacctgaagagtgcgttgaatcaacacaggaatacatccatggcgaacaatatagatcagactccaaaacaatttaacaacaaacttacttttattccataaacctttaaaaccatacaaaggacacat

SEQ ID NO: 268240 - DNA, 437 bp, Glycine max
caccaccaagccaacagaagatgtttctccacattgttttcctcctttcccttctctcatcgacttcccatgccactgtccaagacttctgtgtggcagaccttaagggtgcagacaccccttcaggctacccctgcaagccacctgcaaatgtaacttcagatgactttgtgtacacaggcttagctgaagctgcaaatgtcacaaacataatcaatgctgctgtgaccccagcttttgttgctcaattcccaggtctcaatggccttgacctctctgcagcaagattagaccttggtcctggtggtgttatcccactccacactcaccctggtgccaatgaactactcattgttctccaaagtcacatccttgctggattcatatcttcaggtaacatagtttatcagaaggtgctaaaaaagggagagctcatg

SEQ ID NO: 268241 - DNA, 450 bp, Glycine max
tcgcttttgggtatctctcagatggtctcttagctcgagcccaagagaggaagaaaggagtgccatggacagaagaggaacacagaatattccttgttggacttgagaagctgggaaagggtgactggaggggaatctctagaaactttgtgactacaagaaccccaacacaagtggcaagccatgctcaaaagtactttcttcgattggcaactatagacaagaaaaagcgacgttcaagtctctttgacttggtatgcatacataacaatgaattaatttactatatattgcttttattaattagctacctgataatttcacactgaatgaatgataaatgtttctctttaaactgaaaagtaattcacttttcttttttacttttcctttgtcgttgaattattgtggcaagttggtagcaacaaagcaggttctaattcattttcg

SEQ ID NO: 268242 - DNA, 295 bp, Glycine max
gagataactagaaacagtgtgatgaaaatgaaggtccttgttttcttcgttgctacaattttggtagcatggcaatgccatgcgtacgatatgttccctctccgaatgaacactggctatggtgcccgtactccggaggtgaaatgcgcaagttggaagcttgctgtggaagcacacaacatctttggctttgagaccattcctgaagagtgcgttgaagcaacaaaggaatacattcatggcgaacaatatagatcaagactccaaaacagttaaccaacaagcttacttttat

SEQ ID NO: 268243 - DNA, 363 bp, Glycine max
ctcgcaatccgcactaaaattctagggttcctaaatggacgctgacggaaagatcaagaagggctccggcggaagaaagggcggcggcccaaagaagaagccggtttcaaggtccgtcaaagccggtctccaattccccgtcggaagaattggccgttatttgaagaaaggaaggtacgctcagcgtgtcggtaccggtgctcccgtatacttggctgcagttctcgaatacctagctgccgaggtgcttgagttggctgggaatgcagcacgtgacaacaagaagaacaggattattccaagacacgtgcttttggcagtgaggaacgatgaggagttgtggaaattgctttgctgagtgac

SEQ ID NO: 268244 - DNA, 448 bp, Glycine max
  unsure (1)..(448): unsure at all n locations
catctgttggatttgaaaccaatgggttatttatagaaagaaagatttccttacctattcttgacctcgaccacaagaactcgaaacttccaattttatgcacaaattcatcaaaaatgctagggatcactttagatgaggctgtttttaactccgcaacagccttatattatgatgcaaaatttatgcactggattgttgaccaaataccagatcaatctctactgaacactgcaggatggagatttattgttccccagctgtacaagaaatacccaaatcatgacatgaacttgaatgtatccttatcgtctcctccagttgtggagatttcaaatcagaaagctggtgccaccatatttgcagacatggcaatcgatgttttggaagaagatgaagtaataccagtggcatgcatatcnatggtaattcaaggtacaggtctggt

SEQ ID NO: 268245 - DNA, 455 bp, Glycine max
cccacgcgtccgagaacactaccctgaacatagtagagaagccagtgctaggatgggttcgtgaagcaatggctcaaaccatgttgctcacgtctagtgtctctagcaggtattccgtggatttgaagaaagaccttttcctccaattgcagagtcaaagtttaaggcctaagttctctcagctctcattcaacccacttccatcatcaacttcttccttttcttcaccccgtacattcacaactctggccctcttcaaatctaagaccaaagccgctcctgctaagactaaggttacaaagccaaagcaaaaggttgaagatggtatctttggcacttctggaggatttggttttactaagcagaacgagctctttgtgggtcgtgttgctatgcttggttttgcagcatcactgttgggtgaaggaataactgggaaaggaattctagcacaa

SEQ ID NO: 268246 - DNA, 410 bp, Glycine max
  unsure (1)..(410): unsure at all n locations
aaaaaacgaaaaggggaaaatcggaaacgaagtctcgcaaaacgcagcctacaacgcaagttcgcaaccctaacgcgaagctcctcgtcgctcccaaggcctccgccgtctccgtcgcgccagagtccagacatagcgtcgtgaacagttcaatgttctatctcagtaaaatcgaacacaaattgcccctgcctccttctcgttttgttcttcctattcgagaagctatacacatggagcttgagaaacttttcttagataaggttatagcaaacttgggcctctgcatttctgtctatgatatcagatccattgatggtgggtttatcttccctggtgatggngctccaacctatacggttgtgttcaacttgattatggttcgtccgtttgagatggagatcattact

SEQ ID NO: 268247 - DNA, 329 bp, Glycine max
  unsure (1)..(329): unsure at all n locations
tgtcacactttgcgttattcgcgtgatctcctattcgccgacaatggccacccatatgagcaggaagagaaagttcgtagctgatggagtgttcttcgctgaactgaacgaggttctgacaagggagttagccgaggacggatactccggcgtggaagttagggttacgccgatgcgcaccgaaatcatcatcagagccaccagaacccaagccgttctcggtgagaagggaaggagaatcagggaacttacctcggtggttcagaagaggttcaaagtttccgagaacagtngtgaactttatgctgaaaaggtcaacaataggggtc

SEQ ID NO: 268248 - DNA, 412 bp, Glycine max
attggtttctctctctagcttggacgagtgaattagattcatcatcaagatgtcgtctctgatagcagaagatgtgaagagcagatcagaggtgtaccacggggacgaaatgtgccaagtgaagtccaaggagcttctcaaggaaatcgccctccccaacggccttcttcccctcaaggacatggaggagtgcggctacgacagacaaaccggcttcgtctggctcaaacaaaagaagagttacacccacaagttcgacaagatcggaaagcttgtctcctacgcgcccgaggtaactgctcatgtccaacaaggtaaaattaccaaactcaccggggttaagaccaaggagctcttgctctggatcacgctcagtgatatctatgttgatgacccttccactggcaaaatc

SEQ ID NO: 268249 - DNA, 439 bp, Glycine max
ctcttacacacacaagcactacaacattttctttggtctctcattttctctatagctagatgggttctggtgctttacaacttcttctgatcttgggtcttctggctagctcatgcttagcacaagccccaggtgctgcacccacacaaccacccactacaaccccatcaccaccaccaccaagatcagcacctgcaccagcacccaccccgccagcaacaccaccaccagcaacaccaccaccagcaacaccaccaccagcagcagcaactcctccaccagcaacatcaccaccagcaacaacaccaacgccaacaccaacagctgcacctacacctgcttcttctcctgcaacctcaccagtcccttccgctagttctccaccagcaccaggcacacccggacccgctcccggacccgcatgtggcgccgagccacc

SEQ ID NO: 268250 - DNA, 436 bp, Glycine max
ggtctctggagttacaccacagttcacggagctctaggactgctcattaggtagttttttatttagaggctaacatgagctttgctgcgccatcacttggttctgctggtggtagatctgctagaagagcatttgagtttgggagaacctatgttgtcaggcctaaaggtaaacaccaagcaactatagtctggttgcatggcctcggggataatggctccagttggtcccagctattagagacccttcctcttccaaatattaaatggatatgtccgactgctcctactcagccaatatctatatttggtggctttccgtccactgcttggtttgatgttggagatatttcagaagatgctcctgatgatctagaaggtttggatgcttctgctgcacatgttgcaaatttgctgtctacagaacctgcagacat

SEQ ID NO: 268251 - DNA, 453 bp, Glycine max
cttcttcttcttcttcttcttcactctacaaccactaaactaagtggttggttttggtttagtttcatttttttgaagctcttaaacttaaggcttaagccatggcatcctcatcctctctgcatctatctcaggcccttctggcacgtgctgtgtaccttcatggctcttcttcttctgaccgtgtctcactctccttcccatcattctctggcctcaagtcacattctacatgcaaagcagcagcagccacgtcctcgcgtagaaggggtgcttgtccatccaccaacgttgttcgagccgctgcggttgagacactcgaccaaaccaccgaggtttctctggtggagaaatccgtcaacaccattcggtttttggccattgatgcagttgagaaggccaactctggtcaccctggtcctcccatggggtgtgctccaatgggtcacattc

SEQ ID NO: 268252 - DNA, 452 bp, Glycine max
  unsure (1)..(452): unsure at all n locations
tttctctctctctctcttcaatttcacccttttagcatttgtacattcctttcccttccttgaatcgttcttaattgcgagaggggatatcggagaagttgattggcctcccattaattgcaggtctgaatgatctgatggagtctaaagttgggaagaagaagtcgtctagtagtaagtcccttttgtacgaagctcctctcgattacaccattgaagacgttcgaccacacggtggaattaagaagttcacatctgctgcttactccaactgcatccgcaagccatcctgagattccctaggttgtgtgacgacatagcccccgtagtcttgcatctgctatattattctagtctcttcttttcccttttcttgttctcttccttgcccttttgntctctctacctatacagcaagactttgtttctttttgagtcaagatggctggctc

SEQ ID NO: 268253 - DNA, 400 bp, Glycine max
cccacgcgtccgcccacgcgtccgcccacgcgtccgcggagccctctcttcaggtcaccatctagactgcaatcatggctgatggaccacagcatccatcagttgttcagaagctagctggacagtcttacctggtgtccaggcttagccccaactttaactctaggaattattctgcaactggttcttacgtcaatggcggaatgcactcgcctgggttggctttgtgtcacctgtatctccagttactgtgcatgctccagcagagaaaggagtgagtggacttctagtggactttctgatgggtggagtatccgctgctgcatcgaagacagctgctgctccaattgaacgagtcaaatcgcttatccaaaatcaggatgaaatgatgaaaagtggt

SEQ ID NO: 268254 - DNA, 421 bp, Glycine max
agatgccccaagagctgcaagaatcgatttcgtggctgtcattgtgctaagagtcaatgcagaagtcgtcaatgtccatgttttgctgcagatagggaatgtgatccagatgtttgtaggaattgttgggtcagttgtggcgatggtacactagggattcctagccaaagaggggataattatgaatgtagaaacatgaagcttcttctcaaacagcatcaaagggttcttcttggaaggtctgatatatcaggttggggagccttcttaaagaatagtgttggtaagcatgaataccttggagagtatactggagagttgatttctcatcgggaagcagataagcgaggaaagatatatgaccgtgaaaattcatcttttctcttcaatttgaacgatccagttgttcttgatgcttacc

SEQ ID NO: 268255 - DNA, 456 bp, Glycine max
cccacgcgttcggatcgagataactagaaacagtgtgatgaaaatgaaggtccttgttttcttcgttgctacaattttggtagcatggcaatgccatgcgtacgatatgttccctctccgaatgaacactggctatggtgcccgtactccggaggtgaaatgcgcaagttggaggcttgctgtggaagcacacaacatctttggctttgagaccattcctgaagagtgcgttgaagcaacaaaggaatacatccatggcgaacaatatagatcagactccaaaacagttaaccaacaagcttacttttatgccagagacctcgaagtccatcccaaggacacatttgtgttcagtatagatggcaccgtactctctaatattccatactacaaaaaacatggatatggggtggagaaatttaactcgaccttgtatgatgaatgggttaacaaggg

SEQ ID NO: 268256 - DNA, 438 bp, Glycine max
cccacgcgtccgcccacgcgtccgcccactcgttcgcccacgcgtccggtttttcttcctggtctacccctttgatctcatgcaatctcccctcatggatccctttgatttgattcgcaaagggtttggctgaagctatctggaatatttgcgttacatttttggaggtccatctatgttttagtcattttgtccatattcttgtcaataatgagcttatccaagaaaggttcccaaacagacacaaaactgagctccttaaacaaagcaacctatttgaatccaaacgcagcagagtttgttccatttgccctcagatcatcgccatctggaagcaccagctcggtagatgcagcagcgaggtttactactgctggatctcttgggaaagcagctttagatcgatcagaatcatgcatttcaaataattccgatgat

SEQ ID NO: 268257 - DNA, 414 bp, Glycine max
cgcgattccattttcactcggtcctgttgtgtgtgcgcagaataaaatttctcatcgacgggggcgaataccttacaacgcgcccttcgcgccaccatggcccggccgttctccaccggctcattggccgaaattaagcgaggcgagatcggaatggtttctggaattcctgaagaacaccttcgtaggagggttctaatttactctcctgctagaactgcatctcaacaaggatctggaaaggttggaagatggaagatcaacttcttatcaacccaaaagtgggaaaatccactgatgggctggacatccactgtggacccctactctcatgttggtgattctgccttgactattgatagcgaacaagcatcataagcatttgcagagaaacatggttgggagtattcggtc

SEQ ID NO: 268258 - DNA, 410 bp, Glycine max
cccactcgtccgaacaaatcaaagccatggccacctccaacttctctattgatctctccgggtacctatccttctttttggtgctacttaccaaggcacactcgaccgataccgcttctttcaccttcaacaagttcaacccagtccaaccaaacattatgctccaaaaagatgctagtatctcatcctatggggcgttacaactcaccaaagttggcagcaacggcgtgcccatcctgggatctctcagtcgtgccctttacgctgtcccaatccagatttgggacagcgaaaacagctagggactcagctaggctacaatacttaaattcaacattctcgcacccaacaaatcaaactcagctgacaggcttgccttcttcttggcaaccgtcgggtcttatccccaa

SEQ ID NO: 268259 - DNA, 382 bp, Glycine max
tccacgcgtccgaaaaaatctcaaaataaatcaaccaaaccacacacttcacaccctcttgaacatcctcagcaagtacaagaacaagaagaaacaatgtcttgctccaatctcacaatgttggtgtcctcaaaaccttccctttccgatccctccaatctctccttccgctctgtcctcaacccttttcagctcccttcacaaaacccaacttcatgcactccttcacgctcctcaaccacccaaattcagtgtggtctgagagaactcagaacccgcattgattccgtgaagaacactcagaaaatcaccgaggctatgaagcttgtggcttgagccaaagtgagaagagctcaagaagcctgtgtcaacggaagaccct

SEQ ID NO: 268260 - DNA, 407 bp, Glycine max
cccactcgtccgctctctctagacttagattttgtgaatggctgaagtggaagagggacaggtcatcggcgtccacaccgttgatgagtggaagctgcatctccagaatgcaaaagactccaaaaaactgattgtggtggattttactgcttcctggtgtggtccatgccgttttatggccccagttcttgcagagattgcaaagaaaactcctgaattgatcttcctcaaagtggatgtggatgaagtgaggcctgttgctgaggaatattccattgaggccatgccaaccttcctcttcttgaaagatggcgagatcgtggacaaggtggttggtgctagtaaggatgaccttcaagccaccatatccaagcatgcatctgctgttgctgctgcttcttcttctt

SEQ ID NO: 268261 - DNA, 423 bp, Glycine max
cttgcctcgtcgctttgtgctgctgctgctgcaaaacctagggttgagccttttgctcaggttttcagcgcttctttcttacaatggttctacagaacgatattgatttgctgaatcctccagctgagttggagaagagaaagcacaagctcaagcgtcttgtgcagtcaccaaactctttcttcatggatgttaagtgccagggctgcttcaacataacaactgtgtttagccactctcagactgttgtggtttgcggaaactgccagactgtgttgtgccaaccaacatgctgacggtcaaggttaaccgaagggtgctcttttaggaagaagggagattgaatggtttgttaaccagacttttctttgtcaatgattgaaaattttcggttgttaggtttttgaaatggaatccatttcc

SEQ ID NO: 268262 - DNA, 421 bp, Glycine max
cgcagagtactgcactgaacgaaccgtagttgttccgtttcagccatggtggagaacaatgtcttcgaggatatatttagggtcgaaaaattaaaccccgatgacaaaaaattattcgataaagtcactcgcattgaagcaagaagtgaaaagtttgacatgtttatgcacctggacattaattccgagatatatccgttaaaggttggtcagaagtttgctcttgtgcttgtttcaacacttaatcctgatggaactccagacactggatattatacccagatcagtcgacaatcactggccaacaattttgaatatgtcatgtatgggaagctctacaggataacagagggttcatggcgtgaaaaagcggagatgaatatttcatttggtgggcttctgatgatgctgaagggagata

SEQ ID NO: 268263 - DNA, 431 bp, Glycine max
tcgcccacgcgtccgcaacaatgacattaccttcattgctagcaacggtggaagagtgcaatgcatgcaggtgtggccaccagttggcaagaagaagtttgagactctttcctacctgccagaccttgatgatgcacaattggcaaaggaagtagaataccttcttaggaagggatggattccttgcttggaattcgagttggagcacggtttcgtgtaccgtgagcacaacaggtcaccaggatactacgatggacgctactggaccatgtggaagctgcctatgtttggttgcactgatgcttctcaggtgttgaaggagcttcaagaggctaagactgcataccccaacggcttcatccgtatcatcggattcgacaacgttcgccaagtgcagtgcatcagcttcatcgcctacaagcccccatgct

SEQ ID NO: 268264 - DNA, 451 bp, Glycine max
cccatttttcacaccaccaagccaacagattatgtttctccacattgttttcctcctttggcttctctcatccacttcccatgccactgtccaagacttctgtgtggcagaccttaagggtgcagacaccccttcaggctacccctgcaagccacctgcaaatgtaacttcagatgactttgtgtacacaggcttagctgaagctgcaaatgtcacaaacataatcaatgctgctgtgaccccagcttttgttgctcaattcccaggtctcaatggccttgacctctctgcagcaagattagaccttggtccctgtggtgttatcccactccacactcacccttgtgccaatgaactactcattggtctccaaggtcacatccttgctggattcatatcctcaggtaacatagtttatcagaaggtgctaaaaaagggagagctcatgttt

SEQ ID NO: 268265 - DNA, 476 bp, Glycine max
cggtcccgaatcgccggatccacccagcgcgtccgctcagaatggtaactcaatgcactatgggaccctggttggggaagtgaaagctaatttgaagaaaggtattggagcgaatgaattgctgtcccatctttcagcacatcctgcacctgctcaagaaaagatgagtgctctggttgaagctctattcgagggaactgagaaaggttttgctaaagaagctgataagaagaagaactactttgctgctgctgttaccgaagagggatcccagctgttattgcttcatgctattgaagaattttcttgcaagtctacttccaatgctttgaatgaggttgccctggttctaaaggcactctatgatgctgatgtgttggaggaagagcacatagtgcagtggtatcaaaagggactgaagggcgataacaagaactctaagattttgaagaatgctcaacctttcattgattggc

SEQ ID NO: 268266 - DNA, 305 bp, Glycine max
cccacgcgtccgatgaaaatgaaggtccttgttttcttcgttgctacaattttggtagcatggcaatgccatgcgtacgatatgttccctctccgaatgaacactggctatggtgcccgtactccggaggtgaaatgcgcaagttggaggcttgctgtggaagcacacaacatctttggctttgagaccattcctgaagagtgcgttgaagcaacaaaggaatacatccatggcgaacaatatagatcagactccaaaacagttaaccaacaagcttacttttatgccagagacctcgaagtcca

SEQ ID NO: 268267 - DNA, 385 bp, Glycine max
cccacgcgtccgcccacgcgtcctgtttttttcaatggagtgctcttcactggtgggtggggtgtttctggtccatatttggatactcttggaaacatttttaagaaagctttagagaaaaatgatgctggagaccatttcccagtaattgccttcaacttaggtggaaacctcgtaataaggatcgtaagcgagcaaactgatattcttgaaccatttactgcgtcgagtttgccaagttctcttatattgtggaaggaagcaaatgctaaaggaagtctatttcaaagatttccttcagatttgttgacacagctgaagacagattgtctcgtcctgcacaaatcatcgtatgccatatccccacgcaagcttcaatataata

SEQ ID NO: 268268 - DNA, 255 bp, Glycine max
aaaaaccggcccgacccacgcgttcgaccaaacaaactaccaactcaattttatttttttaatggaatgctcaaaaaatcaaggaagagctgattttggtccatctttggatactctccaaaacatctttcacaaacctctacagaaaaatgatgctatagaccatcttccagtcattgccttcaacttcggtctaaacctccctatatggaacaacaccgagcaaaccgatcttatataaccatttactccttc

SEQ ID NO: 268269 - DNA, 436 bp, Glycine max
aacaaatcaaagccatggccaccttcaacttctctattgttctctccgtctccctagcctgctttttggtgctacttaccaaggcacactcgaccgataccgtttctttcaccttcaacaagttcaacccagtccaaccaaacattatgctccaaaaagatgctagtatttcatcctctggggtgttacaactcaccaaagttggcagcaacggcgtgcccacctcgggatctctcggtcgtgccctttacgctgccccaatccagatttgggacagcgaaaccggcaaggtagccagctgggctacatcctttaaattcaacattttcgcacccaacaaatcaaactcagctgacgggcttgccttcttcttggcacccgtcgggtctcagccccaatccgacgatggatttcttggtcttttcaacagtccctt

SEQ ID NO: 268270 - DNA, 386 bp, Glycine max
  unsure (1)..(386): unsure at all n locations
actactttctctctctttgtaacttgtaagcatggagtcctcaaagatctatgcttacctcttcctttgcatgctcttcctctcctccgccactcccattctcggttgtggctactgtggcaaaccccccaaaaagcacaagcctggtaaaacaccaaagacacccacagtacccgttgttaagccaccagtcacaatccctcccattgttaagccaccagtcacaatccctcccattgttaatccaccagtcacaatccctcccattgttaatccaccagtcacaatccctcccattgttaatccaccagtgacagttccacccgttgtgcttncaccaatagtgaagcccccgggttttctcccttcaattctaacccaccaag

SEQ ID NO: 268271 - DNA, 443 bp, Glycine max
gcttaagatcacccaagagagatcctaagttacacaacacagactcacacaaagagttacgagagaaatcatcatggcatcagcagcatctgggtttgtgttgtcacttaatgttgcagctgccaccacaaactcaagggtggtcatgttcaacaccaagaacaacacttctaggtttgttgtaaaggcttcagatgagcctgcagcggcggcacccgccaccgtcacacccccagctgaagctgaagctaaaccaaagccaccacctattggccccaagagaggtgctaaagtgaagattcttaggacggaatcttactggtacaaaggcaccggtttaatggttgctgttgatcaagaccccaacactcgctaccctggtgcggttcgattcaacaaagtcaactatgccaatgtatcaacaaacaactatgctttggatg

SEQ ID NO: 268272 - DNA, 446 bp, Glycine max
cccacgcgtccggcttcaatggcctctgtttcagcaacttgagagagggttggaagctgagagaagttgctgaaacagaggccattgaagctaagcttgcaaccctctctcaagttgtctacaaggactagccaggggtgttacaaaacttcaagtttggaggtagtttctgtgggatggaataggagaacctttccctctttgagatcctcccgtttctgcatttgtgcagtcaaggcacaaccggagacagtgcagaaggtctgcaatattgtgaggaaacaacttgctctgcctgctgaatctgagcttaccccagacaccaaattttcagcacttgttgctgattcccttgacacggtggaaatagtaatgggtttagaggaagagtttgccttaacttgttaggaggatggctctcaaaccatttaaaccgttcaagaggc

SEQ ID NO: 268273 - DNA, 414 bp, Glycine max
ggtaggttaaacactcttcttcatcgtcgttgcaatgggacgtgtgatccgtgcgcagcgggagggagcaggctcggtcttcaagtcccacacgcaccaccgcaagggccctgcccgcttccggagcctggatttcggagagcgcaacggctacctgaagggtgtcgtcactgacgtcatccacgatcctggccgtggcgcgcctctcgctaaggtcgccttccgccacccgttccgctacaagaagcagaacgagctcttcatcgccgccgagggtctctacaccggccagttcatctactgcggcaagaaggccaccctcgttgtcggcaatgtgttgcctcttcgatccattcctgaaggagctgtcatctgcaacgtcgagcaccatgtcggcgaccgcggcgtcttcgc

SEQ ID NO: 268274 - DNA, 433 bp, Glycine max
gataactagaaacagtgtgatgaatatgattttccttgttttcttcgttgctacaggttcgctagcatggcaatgccatgcgtacgatatgttccctctccgaatgaacactggctatggtgcccgtactccggaggtgaaatgcgcaagttggaggcttgctgtggaagcacacaacatctttggctttgagaccattcctgaagagtgcgttgaagcaacaaaggaatacatccatggcgaacaatatagatcagactccaaaacagttaaccaacaagcttacttttatgccagagacctcgaagtccatcccaaggacacatttgtgttcagtatagatggcaccgtactctctaatattccatactacaaaaaacatggatatggggtggagaaatttaactcgaccttgtatgatgaatgggttaac

SEQ ID NO: 268275 - DNA, 412 bp, Glycine max
cccacgcgtacggatggtctcacttgactttattgcaagggatccacgacacactgatcgcggcacaaatgcttcggatccaattcctcagtaacatctgcaagaagtcttcttcttcaccatgccaccaactcctttagactatggctcaataaatgaaaacgtgaagaagagtcactatgctgtcagatgtgaatcataccttcgagcttctgagcttcagaaagagggcaaaaagattatatttactaatgttggcaactcacatgcattgggacagaaaccactgagctatcctcgacaggttgttgctttgtgcacaagctccattcctacttgatgatcctaatgttggactgttattccctgctgatgcaattgcaagagctaaacactatctatcattgacctc

SEQ ID NO: 268276 - DNA, 323 bp, Glycine max
gtaaaggtgcaacctttccagtctcttgattttgctccatggccaaccaaggatttgatgtgcctttgtacgaaaaaatttggttcaagcgaacatttcaaagagtgatggacaccttcattttagttctcctcctattgcttcttagttaccgaattttctcatccaacaacttcactttcccatggttccttgctttcttatgtgaatcttggttcaccttcacttggattgtgattctcaacgccaagtggagtcctgcagtaaccataacccaaccagatcgtctcttgcaacgggtacctgagctttcacgagtagac

SEQ ID NO: 268277 - DNA, 367 bp, Glycine max
  unsure (1)..(367): unsure at all n locations
caatgagttcgtcgaacctcagagatcttcaacgcgaattggagaacaaagccaatgatctcagcaagcttcaaaaggaaattgcgaagaatcaccaaatgagaaagaaatacacggtccagcttggcgagaacgagctcgtccttaaggaactggatttattgaaagacgacgcaaatgtttataagttgattgggccagtacttgttaagcaagatttggccgaggccaatgcaaatgtccgcaagagaatcgaatacatctcagctgaattgaagcgtctggatgccactgttcaagatttggaagagaagcanaatagcaagaaagatacgatactaaaattgcaacataggattcaatcatt

SEQ ID NO: 268278 - DNA, 222 bp, Glycine max
cttagaactctgtccacgctgctgtttatgttatatcatgcctaaccaaatacacgggattggggatttacttctcactgtcagaatgcaggatgctaggtcatcgaacatcactacgagcagaaatttcggtacatacaccgtcagatgcttcaaatacctatacacactatgagtgattgacccagagaaagctgatacattgaagcaatctattcctac

SEQ ID NO: 268279 - DNA, 437 bp, Glycine max
attgtttgttgttgtaactcgttcttctttttttgttgttctgtgtttgtgtttggttcggctctcacctgaaaatgtcttgctgcggtggtaactgtggttgcggaagctcctgcaagtgcggcaacggctgcggaggctgcaagatgtacccagacttgagctacactgagtcaaccaccaccgagaccttggtcatgggagtggcacctgttaaggctcaatttgagggtgctgaaatgggtgtgcccgctgagaacgatggctgcaaatgtggaccaaactgctcctgcaacccctgcacttgcaagtgaagtgttgggagagcaagcttcaagcaaaaatagcccttaattatgaataatggataactattaatgggtagctaaaaacctatgtattatgtctgtgatggttttcgtgcactctggtgtttt

SEQ ID NO: 268280 - DNA, 439 bp, Glycine max
gagataactagaaacagtgtgatgaaaatgtaggtccttgttttcttcgttgctacaattgtggtagcatggcaatgccatgcgtacgatatgttccctctccgaatgaacactggctatggtgcccgtactccggaggtgaaatgcgcaagttggaggcttgctgtggaagcacacaacatctttggctttgagaccattcctgaagagtgcgttgaagcaacaaaggaatacatccatggcgaacaatatagatcagactccaaaacagttaaccaacaagcttacttttatgccagagacctcgaagtccatcccaaggacacatttgtgttcagtatagatggcaccgtactctctaatattccatactacaaaaaacatggatatggggtggggaaatttaactcgaccttgtatgatgaatgggttaacaagg

SEQ ID NO: 268281 - DNA, 351 bp, Glycine max
gtgaaaagttaaaccagatagaactttcagtctgtgaaatatatgcttcttgtgaaccttgccctatgtgctttggagcaattcacctctcacgagttaagaggttggtttatggagcaaaggcagaggcagcaattgctattggattcgatgacttcatttcagatgcattgcgaggcactggattctaccagaaagcacaattggagattaaaagggctgatggcaaagcggcaaacattgctgaagaagtttttgagagaaccaaggaaaaattccgaatgtattaattgaatctccatgtttcctaagccgttaggtatttacacctgatgaaatctgagttcacat

SEQ ID NO: 268282 - DNA, 328 bp, Glycine max
cccacgcgtccgcccacgcgtccgactgaatgctccaggttgctcaaatgcaactggtgcttgtgtctacaaagcaagctatggtgacacttccttctcaattggctatttgagtcaagatgtgctaaccttaaccccttcagcggcaccatcatcaggttttgtatatggctgtggtcaagacaatcaaggcttgtttggaaggtcagcaggtatcataggtctagccaacgacaaactctccatgcttggtcaattgtccaacaaatatggcaatgccttctcctattgtctcccctcatctttttcagcacaaccaaactcttct

SEQ ID NO: 268283 - DNA, 416 bp, Glycine max
  unsure (1)..(416): unsure at all n locations
cccacgcgtccgcagcaagtgcgttttggatgcagagtccgaaatacttcgagatggcccgtacaaagcaaactgctcgtaagtcaactggaggaaaagctcccaggaagcagcttgcaaccaaggctgcacgtaagtctgcaccaacaactggtggtgtgaagaagcctcatcgttatcgccctggaactgttgctcttcgtgagattaggaaataccagaagagcactgagctcctaatcaggaagcttcctttccagaggttggttcgtgaaattgcccaggatttcaagactgatctgcgtttccagagccatgctgtgcttgcattgcangaagctgctgangcatacctttgtgggctctttgaggacacntaactgtgtgccattcacgccaagcgtgtgactattatg

SEQ ID NO: 268284 - DNA, 360 bp, Glycine max
cccacgcgtccgcttcctctctgcagagtgcagagctttctctccccgttgcttcattcagtctcaacaacaaaccaatctttcttagaaaatgagggggggcttgtggcaacttgggcaatcgatcactcgccgtcttgcccatggagataagaaggctgttgctcgtcgatgttttgcctcagaagctgagctgaaaaagacagtgtttcatgacttccatgttgctcatggtgggaagatggttccatttgctgggtggagcatgccaatccaatacaaggactcaatcatggactctaccatcaactgtagggagaatggtagcctctttgatgtttcccatatgtgtgggctgag

SEQ ID NO: 268285 - DNA, 463 bp, Glycine max
  unsure (1)..(463): unsure at all n locations
ccggntggaaaaccggccgacgacgcgttcgcccacgcgtccgtcccgcgtccttccactttccggtattcttgtcaggaagatatctggacaaaatggccgtaacagaagcaaacctaaagaaggctggcttccacacatgggagcagttaattctcaaggatccacatcttatcactccaaatgcactttcatacaaatcagcaatgagagagaatctgttgaggcagggatacagaattgttggaatcattggagaccaatggagcgatctgcttggagaccacagaggcgaaagcaggacctttaagcttcctaatcccatgtactacattgagtagtaccttcacctctctcaacaatctagctagagtttgctcctatctatatgtaataaggtatgctgatatgcactattcaaataggagcattagctatgtttgttaatgtcactttatgttat

SEQ ID NO: 268286 - DNA, 197 bp, Glycine max
attgttaattgcctgcttcccatttttctattttatcttatttgttctttacatgaaacagaacttttaaaaaaaaaaaaaaaaaaaaaaaaaaaaaaaaaaaaaaaaaaaaaaaaaaaaaaaaaaaataaaaaaaaaaaatacataacaataaaaaaaaactaacacaaaaaaaataccaaaaaacataattaaat

SEQ ID NO: 268287 - DNA, 310 bp, Glycine max
ctttcttaatggagaactgagcgttttcttagtaacattgctaatatctatgtgaaagcgcatttttaaaaaaaaaaaaaaaaaaaaaaaaaaaaaaaaaaaaaaaaaaaaaaaaaaaaaaaaaaaaaaaaaaaaaaaacaaaaaaaaaactcccaaagcactatcatacatattaaccccagagagcgactcttgtgaatgcaaaaatacaaaaatatttcaaattataaaaaaaccaaaggatcttcctgtttgcacaccacacaacgagaaagcaaaacccctaaactatctaattccataaactac

SEQ ID NO: 268288 - DNA, 436 bp, Glycine max
cttccatccatcaccctttctctctgcttatggttttgatcgcatcggatcttcactctgttctccgatctcaaaatgcccgccgtttatggagctcgcttgaccaccttcgaagactccgagaaggagagtgaatacggttacgttcgcaaggtatcaggaccagtcgtcgttgcagatggcatggctggggctgctatgtatgaactcgtgcgtgttggtcatgataatctcattggtgaaattattcgtctcgaagggaattctgctaccatccaagtttatgaggaaactgctggcttgatggttaatgatccggtgttacggactcacaagcctttatccgtggagttgggacctggaatactggggaatattttcgatggaattcagaggcctttgaaaactatggctaaacgatctggtgatgtctata

SEQ ID NO: 268289 - DNA, 226 bp, Glycine max
caatactgtaattgagtgatagttttcttgttgtctatttagtgatctggctggtattgagactttagtgagagactattgagggtatttttcactttgttcataattataatataattgtaattatatgaaaaaaaaaaaaaaaaaaagataaaaaaaaaaaataaaaaaaataaaaataaaaaaaaaaacatagaaagacaaaaaaaggccggtcggtttaaag

SEQ ID NO: 268290 - DNA, 331 bp, Glycine max
ggccaatggtctttgttttgtcccagagatttaccgtttttgacagattgttggtgtgagagaatttgaggagctctatcttgaatatgaaagagaaggaaaagcaatgaacgttgaccaggctcagagcctctggttcgaaattctgaagtcacagatagaaaccggaaccccgtacatgctttttaaggatacttgcaataggaatagcactcaacagaatctgggtacaattaaatcgtcaaacttgtgtactgagataattgaatattcaagtccaactgaaactgctgtgtgcaatctagcatcaattgcactaccacgatatgta

SEQ ID NO: 268291 - DNA, 296 bp, Glycine max
gctagaaaatcgtggggggaatatagagttttttgcgtggtagaatcctgccgtgttttggtgatcaggctcgtgccatggctcactgttcccatgtgattctctatctccaacgcacgctgcttctggcgaggcattattcgaacgtgaaagtcgcctattacaagcttgttgaagaggctcgcaacgtccgagcctatgatctcattactgcctatcgcatgcttgctacaaaggactacattgatggcaaccctttcagctcagagtatgctgcagccaactctcagcctatc

SEQ ID NO: 268292 - DNA, 468 bp, Glycine max
cgtctcctcataagcattaatacaactctcaaaattagttcatttcaaaatgcaaacagcgcttaacgcgttcgctgcccccaacgtctgtgcgcattggcactccacaaagacgtgtactcccatattactcatctttcccaccaaattgaaagccccgcgctcctcacctcgttactctccgattagggttgcaaccgtggagcccgacacttcaactgtcgactacaactctgcgttctcagtgtttcctgcagaagcatgcgaaactgtaggaggggaagcctgcatggcggagatgtaccctgaaacgaagctacagccagaggctaagactccacgagtcgttacagagaacgttgagagagagtatcttgaatacgatgatcctaaaacggtatttcgaggagaggcttgtgatgatcttggaggaactttctgtgagaccgagtatcagaagggtgtcta

SEQ ID NO: 268293 - DNA, 457 bp, Glycine max
aaaaccgggccgacgacgcgtccgcccacgcgtccgtaaaaaaataaaattaattttttttcatggtaaccattcgtgcagatggggttagtaaaattatccgtgaacgcattgagcaatataatacggaagtaaaaattgtaaatacgggtaccgtacttcaagtaggcgacggtattgctcgtatttatggtcttgatgaagtaatggcgggtgaattagtggaatttgaagagggtactataggcattgctttgaatttggaatccaaaaatgttggtgttgtattaatgggtgatggtttgatgatacaagagggaagttcagtaaaagcaacaggaagaattgctcagatacctgtaagtgaggcttatttgggtcgtgttataaatgccctggctaaaccaattgatggtcgaggagaaatttcagcttcggaatctcgattaatcgaatc

SEQ ID NO: 268294 - DNA, 444 bp, Glycine max
cccacgcgtccgctccaattagggtttttgttatctgcagctacgatgggtaagggaacggggagtttcggtaagaggaggaacaagacccacaccctctgtgtgaggtgtggccgccgcagcttccacctccagaagagtcgttgctctgcgtgcgcttaccccgctgcgcgcaccaggaaatataactggagcgtgaaggccattaggagaaagaccaccggaactggaaggatgaggtacttgcgtaacgtgcctcgcagattcaagagcggcttcagagagggtaccgaagctgcacccaggaagagaggagctgctgcctctgcctaagctttgaatgaatgacagcaatttttgctgggtcagtgaattataggagttaatgtttctgtgttggtgccaaactctttggaacacattttctttctgtcgttttaattt

SEQ ID NO: 268295 - DNA, 265 bp, Glycine max
gtgaagaggacgttcttgtgattgaaggtgtcgagtattacagcaacataccagtgaaaggggatgggctcattaatgatgaagatgataagcagatgtagccagaagattcgcagtatgcaagaagctttgtgactgtgcctcattcgcataagcacaaaaataagaagattatcacttgtttgaggctgggactgacagatttgttggaagaattggaagcagacgatgatgatagtgttgtggtgacgttggttccgaggta

SEQ ID NO: 268296 - DNA, 213 bp, Glycine max
attgtttgttgttgtaactcgttcttcttctttcgttgttctgtgtttgtgtttgttttgtctctcacctgaaaatgtcttgctgcggtggtaactgtggttgcggaagctcctgcagtgccgcacggcttcgaagctgagatgtccagacttactcatgataccacaccaactgtcatggatgcactgtaagtattaggtctaatggttccc

SEQ ID NO: 268297 - DNA, 323 bp, Glycine max
cccacgcgtccgcccacgcgtactttcattttgcagaaccaacatctgtagacgagatgggaagcactggctagctacatttgatatgccttgacattgctttagtacgtgtgtcgcttgttcaagcagaagatgcgtataagtatttcacatggactgcgacttatgggactctttatccctagtctagtccccagtaggttatacttatcaatggtcacattactgcgcctatacatgacttggcaactaatgaaaatgttattctcaaccttatcaacaagctggacaaaccatttttactcacttagaacggtattaaa

SEQ ID NO: 268298 - DNA, 439 bp, Glycine max
cccacgcgtccgaccacgcgtccgtttgtattacaagggaagaagaacttagctgcaagcgaaggaaggatcaaagagaatggctcaagcaatggcatcaatgactagcttacgtggttcctctcaggctgtgttggaaggtagccttggctccacacgcttgaatgtggggagtggaagcagggtggcctcagtcacacgtgcagggttcacagttagagcacagcaacaacaagtgaatggtggtgaggtacaaagtagccgtagggcagtgctttcacttgttgctgctggtttgaccactggctcttttgttcaagctgtgcttgctgatgccaaacctatcaaagttggaccacctcccccaccttctggcggattacctggaacattgaactcagatgaaccaagagaccttaagctgccattgaaagataaa

SEQ ID NO: 268299 - DNA, 415 bp, Glycine max
  unsure (1)..(415): unsure at all n locations
gtttgntgttgtaactcgttctttttctattgccgnncggcgnnggggnncggggcgnccggcaaccggaaaaggccnggcgggcgaggaaacgggggnggcggaactcctgcaagtgccgcaacggctgcggaggcttcaagatgtacccagacttgagctacactgagtcaaccaccaccgagaccttggtcatgggagtggcacctgttaaagctcaatttgagggtgctgaaatgggtgtgcccgctgagaacgatggctgcaaatgtggaccaaactgattctgcaacccctgcacttgcaagtgaggtgttgggagagcaagctttaagcagagatagcccttaattaggaataatgataaactattaatgtgtagctaaaaacttatgtattatgtatgtgatggttt

SEQ ID NO: 268300 - DNA, 350 bp, Glycine max
ccctaacaacacaggcgcagacgcaaacgctaacgcaaacgcaaacgcaaacgcagagcgtgatccattgacgaagatggtgcaacgtctcacctaccgcaggcggcacagctatgccaccaagtgcaaccaacacagggtcgtcaaaacccgtggtgggaagctcgtttatcagactaccaagaagagggccagcggacccaagtgccccgtgactggcaagaggattcaggggattacacacttgaggcctgcagagtacaagaggtcaaggttacccacaaaccgtatgactgtcaaccgtgcatatggtggagttttatctggaagtgccgtcagggagaggatta

SEQ ID NO: 268301 - DNA, 388 bp, Glycine max
gcttcagagaagaaactttcgaacccaatgttggagataaaagtgcagaagctcgtcctcgatatctctgttggcgagagtggagatcgtctcaccagagccgccaaggtgttggaacaacttagtggccaaaccccagtgttttccaaagcaaggtacactgttcgttcctttgggattagaagaaatgagaagattgcatgctatgtcactgtcagaggtgacaaggcaatgcaacttttggagagtggtttgaaggtgaaggaatatgaacttctcagaaggaacttcagtgatactggttgctttggctttggtattcatgagcatatcgatttgggaaatcaagtatgatccttcaactggtatttatggaatggatttcttt

SEQ ID NO: 268302 - DNA, 450 bp, Glycine max
cccacgcgtccgcccacgcgtcctaattgttcctggaggtgtagctcctgtacagactgagttttctcttaacaacatagacatgtttccttcattccccttttttcgatcaaaatcaaatcgtgtggaaaattccgtgtctggaccattggttgatcaaaaggatgggatgctagtgttgaaaaacaaggcccctaggtggcatgagcagctgcaatgttggtgcctgaactttcatggacgggtgacaattgcctcagttaaaaactttcagctggtggcttctgcagaaaacagacctgctggaccagaacatgataagatcatcctgcaatttggaaaagttgggaaggatttgttacaatggattaccgttccctatctcagcatttcaggcatttgcaatctgcctcagcagttttgataccaagattgcttgtgaatgacatg

SEQ ID NO: 268303 - DNA, 303 bp, Glycine max
ccacgcgtgcgcgctggtacactcatctgggtcctctcttttctctcaatttcgagcctttcaaggctctggttctttgctgagtcctcatggaaacaggcatgcgaatgccgcggtctctgtgaaggcctctgcttctggggttgtgttggtggagaagtctgcggcagagaaggcctatcggctcaaaacagcttacactgagaaaattattcccttgctcatggaagagttctgttacaccaacaaacaccacgagcctaacattgagaagatctgcgtgaactgtggtattggagatgc

SEQ ID NO: 268304 - DNA, 440 bp, Glycine max
tccacgcgtccgctcagaattttttaaatttgatctttttctgctctttgaagaaagaagggtctttgctcgattttggagacagtctctgctctcagatctcatcaaccttaacctctacgataccaccgagaaggtgatcgcatgagtacatatggatcggtgcatcaagaatggacctgaggagcatagcaaggactctaccaggaccagttatcgaccctacagagcttcccaagtggaactatgatggttccagcacaggtcaagctcctggtgaatacagtgaagtgattttatacccacaagtcattttcagggattcattcagaaggggtaacaatatcttgcttatctgagatgcctacacttctgctggagaacctattgccactaacaagaggcacgcttctgccaaggttttcagccatcctgatgtt

SEQ ID NO: 268305 - DNA, 476 bp, Glycine max
  unsure (1)..(476): unsure at all n locations
aaacccgggcccgacccacgcgtctcgcttgagcatccccttcaactttctatttctctttttgtaaacacttagaaaagaaaanaaaaaatcggcggcgttccttttgctctttcctagtctttttctttctcagttcgatccggtggactcaatacanncctctaccatctccaatctatggaaacctcgtaaccattctcagcatagatggaggtggtataaggggtatcattccagctgtagttcttgaccacttcgaaaaggctcttcaggcatgggataaaagtgcatcactagcaagttattttgatgtcatagcagggactagcacaggaggactcatgactgctatgctcactactcctcacccagacgaccccactcaccctctgtttactcccagcggaatcatagaattttataaaaaatacggtccttctatattcaatgaaactagtggttgggataatgca

SEQ ID NO: 268306 - DNA, 439 bp, Glycine max
  unsure (1)..(439): unsure at all n locations
gtgcattngtcggatttcttcttttggtattgcccgnggattcattcaattaaaagctatagacatctacgcccattaactaaactatgtcaacggcattatatgatcaaaacagcaaaaccccctcttcctcaagttgcagatgagattcaacggtgttgctgagcatcaatgtagccagcaataaacaaaaacttttcttttttttagccatctcaatgtccgcggaaacaataattttcacaagctgctaaaaccacactataggtttaaaaccaaacaccttcttggcctgggacgcgtcctctgagaggttatcgtcttcagaggggagaaagtatctcttgtcaatggacgagaggaaccgatnctggactcggttgcaactcgttggcagctgttatttctgctatgctgttgagaagcttatcgcacctat

SEQ ID NO: 268307 - DNA, 356 bp, Glycine max
cggccgcccacgcgtcgggaggtgtgagtcacactgtaccaatctatgaggggatgcactcccccatgccatccgtcgtttgcatctcgctggtcgtcatctaactgatcatttgatgaacatcctcactgagagaggatacatgttcaccacctctgctgagcgagaaattgtccgtgacatgaaggaaaaacttgcatatgttgccctagattatgagcaagaactcgagactgcaaaaagcagttcatcacttgagaaaagctatgagcttcctgatggacacgttatcacaaattgggcagagagattccgttgtccagaagttcttttccagccatctatgattggaatgg

SEQ ID NO: 268308 - DNA, 353 bp, Glycine max
  unsure (1)..(353): unsure at all n locations
ctttagaataatcaaaaagaatattaaatttaaataaattttagatagaaaaaagacttaggaaggaggatttgaaatgcgagatctaaaaacatatctttccgtggcaccagtagtaagtactctatggttcggggctttggcgggtctcttgatagagatcaatcgtttttttccagatgcattgatattcccttttttttcattctagttattgacacggaaaggggtgaagaagattatagatccaattaagtattaaatatatgtaattaatatgtaattaatctcctcttctttatttcgncttttatttcttcttttttttacaattgtaatagaataagttaagg

SEQ ID NO: 268309 - DNA, 438 bp, Glycine max
cccacgcgtccgcccacgcgtccgcccacgcgtccggtcgacgagaacttcgtgaagaagcacactggtcccggcatcctctccatggcgaacgccggtcccggaaccaacggatctcagttcttcatctgcacgacgaagacggagtggctcgacggaaagcacgtcgtgttcggacaggtcgtcgaggggatggacgtcgtcaaggagatagagaaggtcggatccagctccggcaggaccgtcaagcctgtcgtcgtcgccgactgtggtcaactctcttagatagacgacgttgaccctaggcttttatctctgtgtcggtggctctgaatgtgtcgtttctttcggtgtcgtttttgcctttttttctctatcccatgtcgtttagggtgattggcgtgttatggatatcatttcgaaaccccttccctttga

SEQ ID NO: 268310 - DNA, 297 bp, Glycine max
gtcacaacaagccttaacgagactgagagttaagttggtatgagggaagaagagaaggaggtgcaacaacaagatcactccatgttcaacatcaagagcttcctctggcatggaggctctgtttgggacgcatggttcagctgtgcttcaaatcaagtggctcaagtgctgttgacactgccctattctttctctcaactgggcatgctatcaggaatcttgcttcagattttctatggaatcttgggaagttggacagcgtatctaatcagtgtcctctacatggagtaccgtacc

SEQ ID NO: 268311 - DNA, 439 bp, Glycine max
gccatggccacctccaacttctctattgttctctccgtctccctagccttctttttggtgcgtcttaccaaggcacactcgaccgataccgtttctttcaccttcaacaagttcaacccagtccaaccaaacattatgctccaaaaagatgctagtatttcatcctctggggtgttacaactcaccaaagttggcagcaacggcgtgcccacctcgggatctctcggtcgtgccctttacgctgccccaatccagatttgggacagcgaaaccggcaaggtagccagctgggctacatcctttaaattcaacattttcgcacccaacaaatcaaactcagctgacgggcttgccttcttcttggcacccgtcgggtctcagccccaatccgacgatggatttcttggtcttttcaacagtcccttaaaggacaagtctc

SEQ ID NO: 268312 - DNA, 425 bp, Glycine max
ggaagaagcggtggtttatactcacacgcttatcattggtctttttcaaaaatgatcctggtgcccttccacagaggggtggtgaagtaaacctgacgttggggggtattgacttaaacaattcagggaggtttttcaactgggggcttgtacactggtggtttttcaactgggggcttgtacactggtggtttctcaactgtagctgctatatatccatccagccattaaatacaaagatatgcctgattgtggttgtgatgtgatactggactaaggggagtttgtataaatatttatgttgtgaactttatcatttggtactggtaaaattatctccgtataggatcaggaaactgctaagaccatgttgtttatgtagtatgtaatttctgtatgtatgcttgacatatacaagtgggaaa

SEQ ID NO: 268313 - DNA, 440 bp, Glycine max
cccacgcgtccgcccacgcgtacgtcagccatgtcgatcttttctattccctcaccaacggaccgttgttcaatgtcaatggcaatttctcggcagccattgccatgttctttcacggctcaggtgagaggaatagggaagggaaaactggaaataacattggaggcacgccatgggagtgatgggcaccacgttgggtatgatgagctatttcaaatccgacggagaggttgttcctgtcactgtcgtgggttacaaagaaggcaacatcgtcacccacatcaaaactgacgccaccgatggatacgacgccgtccaggttggttaccgaagggtcagagatcgcaaattgaccaaacccgaaatctgtcatctacagaaggtcgacgccattcccatgcgccatcttcaggagttacgtcttcaagccgtcgatggct

SEQ ID NO: 268314 - DNA, 389 bp, Glycine max
ccatccatagacatggccaccgtcacttctgcattcgttgctattccctcattcactggcctcaaggcaagcgcaggcaaagtgagtgccgcagttaaagtctcagctccccaagccacaaggttgggcatcaaggcttcgctgaaagacgttggagtcgctgttgtggccactgccgcgagtgcagtgctggctagcaacgccatggccattgaagtgttgctgggtggtgatgacgggtctctggctttcgttcccaacaatttctccgtggcctctggggagaagatcgtgttcaagaacaacgcaggtttcccccacaacgttgtgttcgacgaggacgagattcctagcggcgtggatgcagggaaaatctccatgagcgatga

SEQ ID NO: 268315 - DNA, 382 bp, Glycine max
cggacgcgtgggttctgaccaatggcttccctcactgtcccaaaccattgtgttcccactttgcttcgcactcactctctcaactacccatcttcccaaaacctcccacttccttccgcgccatcaaattctcaattttttggcctcaagctatctcattcttccttttccacaattccctcttcttcttcttcactcaaaggctccattttcgccaaggtgactaaaggttcaaagccaccgaattttacgctaaaagatcagaacgggaagaatgttagcctctccaacttcaaaagaaaacccgtaggtggggatttctaccctgctgatgagacccctggctgtaccaaacaagcttgcgctttcagggattcatatg

SEQ ID NO: 268316 - DNA, 393 bp, Glycine max
ggatactgaatgatgcgttgaggagtatggtgaatgcagagaggagagggaaagctttggtggaactcaagccaatctccactgttatgtcttcctttctccaaatcatgaaacaccatgggtatatcaaggactttcaagtctatgatccgcatagagtggggaggataagagttgaactacaaggtaggattaacgattgcaaggccctttcgcaccgaaaggaccttaaggcaagggatattgaagcctatagattgcagactcttccaacacatcagtggggttatggtgtcattacaactcctgatggtattttggatcatgaagaagccattaggaagaatgtaagtggccaggttcttggttactttcactaaaatgatcattact

SEQ ID NO: 268317 - DNA, 182 bp, Glycine max
  unsure (1)..(182): unsure at all n locations
cttcttcgacgntatcttcttcggggggtgtttgtgagactgatttaggtctcaccttaaaatgtcttgctgccgaggcaactgtggttgctgaagcgcctgctagtgcagcaacggctgttgaggctggaaaatgtacccagacttgagctacatcgcatcaaccaccaccgagacctttt

SEQ ID NO: 268318 - DNA, 258 bp, Glycine max
aaaaaaaaaaaaaaaaaaaaaatttaaataaaaaaaaaaaaaaaaaaaaaaaaaaaaaaagaaaaaaaaaaaaaataaaaataataaaaaaaaaaaaaaaaaaaacattttcaaataataaaaaataaattaaattaaataaacggcctttaatttaattttattttttaattttttcgacttcacgaaccttaattatctttttttatatccccttttttccatttcatgttatactttttagacctgttccttttt

SEQ ID NO: 268319 - DNA, 423 bp, Glycine max
  unsure (1)..(423): unsure at all n locations
cccacgcgtccgcgagataactagaattagtgtgatgaaaatgaaggtccttgttttcgtcgttgctacaattttggtagcatggcaatgccatgcgtacgatatgttccctctccgaatgaacactggctatggtgcccgtactccggaggtgaaatgcgcaagttggaggcttgctgtggaagcacacaacatctttggctttgagaccattcctgatagagtgcgttgaagcaacaaaagaatacatccatggcgaacaatatagatcagactccaaaacagttaaccaacaagcttacttttatgccagaaacctcgaagtccatcccaaggacacatttgtgttcagtatagatggcaccgtactctctaatattccatactacnaaaaacattgattatgggtggagaaaattaact

SEQ ID NO: 268320 - DNA, 372 bp, Glycine max
caaccccattttcccaggtggcacatattacattatgccatcaacttggggcgctgccggtggtggattgaaactaggccggacaggaaactcaaactgcccagttactgttttgcaagattactcagaaatcttccgtggcacaccagtcaaattcagcatacctgggataagccctggaatcatctttacaggtactccacttgaaatcgagttcgcagagaaaccttattgtgctgaatcctccaaatgggtggcgtttgtggacaatgaaatccaaaaagcatgtgtgggtattggtggtcctgaaagtcatcctggtcaacaaacatttagtggcacatttagcattcagaaatataaatttggata

SEQ ID NO: 268321 - DNA, 284 bp, Glycine max
aagatccaatcattgatgttgataaattttaatgatcccaccaacttcaggcgctcacggcggtggaccaaaactaagtcatatataaaacatatacaaactacttactgtactgatctaacacttagaaatataccgtcgcacaccagacaaattcagcatacctgggataagccctggaatcaactttacaagtactccacttggaatcgagttctcaaagaaaccttattgtgcttaatccttcaaatgggttgcgtttgttgacaatgaaattcaaaaag

SEQ ID NO: 268322 - DNA, 310 bp, Glycine max
ttttaatttcctagatctcccaaacaaattgttgcataagtcccatggccaaagagacgagtggggtttatctatatcccagcaaatcacaagtttggggtgagaattttgatcataaaaaacttgtaataacaacactagctgctaatggaaagaaggaggagagtaatggagcacctaatgacacatatcctgcgtttcccgggtggtatgctgatgtttcctggccaggagaagcacacacatataaaatagaaaagattctattccacgggaaatcagaattccaagagcttcttgtatttgagtc

SEQ ID NO: 268323 - DNA, 425 bp, Glycine max
  unsure (1)..(425): unsure at all n locations
cccacgcgtccgcccacgcgtncgcggttgcgtgggcggacgcgtgggcaatctcgagggagggcaaaagtaatgggtacggagatcaatctgtctggatatattanaaaaccgaattccattgtctaatgatgaaactaaaacaaaatatttaactaaaatatatgatcctttcctgaacggacgctttcgtggacaaatcgaaaatgttttttcaacctcaatccaatatgaaaaaaatgaaaaaaaaataccattttgataaataaaattcatggtatccttatttctaataatacttataaaaaaaataatagtaattatccagaattagagaaaaaaataaatatatttgatagaaaatctttagtaactacattttttttttttaatttaatcaagtaatttttaaaaaaattaatatt

SEQ ID NO: 268324 - DNA, 388 bp, Glycine max
cccacgcgtccgcccacgcgtccgttcactacttggaccgctactttattgcccggaggtcacttccgccacttaatgaagttgggttgacttgcttccgtgatttggtttacaaggaattaaacgggaaagtgagagatgcagtgatttcccttattgatcaagaacgtgaaggagagcagattgaccgagctttattgaagaatgtattagatatatttgttgaaattggaatggggcaaatggatcactatgagaatgattttgaagctgcgatgctcaaagacacttctgcttattattctcgaaaggcttcaaactggatcctagaagattcttgtcctgactatatgctcaaggctgaggaatgcttaaaacgggagaaaga

SEQ ID NO: 268325 - DNA, 451 bp, Glycine max
ccctacgcgtccgaaaaaaaaaatttttataatataaaaaaaaaaaaaaaaaaaaagagagaaggaaaaaatattaaaaaaaaaaaaaaaaaaagaaccttcaatataaaaaatcctatctttcctacccttccatacacatacatctctcttctttggtctcccttttatttacttctcttgccctctgttttaccaccgtttaaatttgttatcccttttcctctctttactttacttgtctttaaactcctttcctttttttccgtttttccttaattacaatatcccccattttgtttttcctttttatactttcttctcaattttgttttatcataaatttcccttctcttttttctctttttaaatatctctttttttttccaacctcttctttttgatcactttttctttcccccccttttaatttctttactttttttttttt

SEQ ID NO: 268326 - DNA, 435 bp, Glycine max
  unsure (1)..(435): unsure at all n locations
cccacgcgtccgcccacgcgtccgcccttgcgtccgcccacgcgtccgattccagtggggttcatttcatcgtgcattcgatggccaccacagcagctctatccggaaccatggtgagcacctccttcatgaggaggcaacctatgaccaccacaagcctaaagacattccccaacgttggtgaagctctttttggtctgaaaagtggacgaggtggtcgtgtcacttgcatggcctcgtacaaggtgaagctcataaccccagaaggagaagtggagtttgaatgcccagatgatgttttcattgttgacaaggcataggacgaaggcattgaacttccctactcgtgcagggccggttcttgcgtttccctgtgtggcaaaattgtggaaggtaacgtggaccantcagatggtagctttcttgatgatgagc

SEQ ID NO: 268327 - DNA, 284 bp, Glycine max
catccccattttcctaggtggcacatattacattatgccatcaacttgacgcgctgccggaggaggattgaaactaggccggacaggaaactcaaactgcccaggtactgttttgcatgattactcagaaatctttcgtggcacaccactcaaattcagcatacctgggataagccctgcaatcatctttacaggtactccacttgaaatacagtttgcagagaaaccttattgtgctcaatcctacaaatacgtggcgtttgtggacaataaaatccaaaaag

SEQ ID NO: 268328 - DNA, 417 bp, Glycine max
cccacgcgtccgtggagctctgccacatactttagaaagcagagaaaacgatgatgggcttgcgatggttgtactctcaaactcgcttcacttcccaatttctcttctccaactttccttttcaaaactccaaccctccgttttcagaaatctccattgtcacgccccatcagagctctatcttcctccgccctcgtccaaacatctactaccaaggccactgaagaccaaggtgtgaagcctcaatggaaggccacgatagacttcaagtggataaaggataacaaggaagctgttgctgccaacttaaagaaccgcaactctgatgctgatttgaacctcgtgctccacctttatgacaaaatgttcactcttcagaaggaagttgagagggttcgtggtgaaagaaatgcagtg

SEQ ID NO: 268329 - DNA, 353 bp, Glycine max
gtgaacttatggctgacggggtggttctgttttatacatgggccagcatgtttgggatgagggttaggattgcattagctgaaaagggtgttgagtatgaatacaaggaagaaaatctcaggaacaagagtcctttgcttttgcaaatgaacccaattcacaagaaaattccagttctgatccataatggcaaaccaatttgtgaatctgcaattatagtgcagtacattgatgaggtctggaatgataaagctccaatcttgccctctgacccttatgagagagctcaagccagattctgggtagattacattgacaaaaaggtgtatgacacttggaagaaaatgtggctt

SEQ ID NO: 268330 - DNA, 393 bp, Glycine max
cccacgcgtccgcttttttgttgttgttgtgtttcatttgtgaaactaacaacagcacggggccatcatcatggcagctgcttccccaatggcaagccaactcaagtccaccttcactaggactcttgtagctcccaagggcctctctgcctcttcaccacttcacctcgtgccttctagaaggcaatttagcttcactgttaaggccatccaatcagagaagccaacctatcaagtgattcagccaatcaacggtgacccattcattggaagcctggaaaccccagttacatccagccctttgatcgcatggtacttgtccaacctgcccgcatacagaaccgcagtgagcccactactaaaaaggatcgaggtgggcctggcccacggata

SEQ ID NO: 268331 - DNA, 424 bp, Glycine max
cccacgcgtccgcaaaagaagcggcggttgtggcgggagccctagcattcgcgtggcgggctatagagctcgctctcaaacccttccttgccaaggcacgtgcttcgattgacaactccgacccgccacgtgaccccgacgacgatgctcttcctaaaaccaccactgacgacgttcccgacgccgccgattctaaacccgccggcgacgtgcctgccgctgctgatactataaccaccgacgccgtctgaagtggtctctcattcatgttattttgaatttcgtcatatctcaaaactactgtccaaatgaaataatattgttagcctcgtgtgcttctgttaaatatgtatattgtgttgtcggtaaatgctcctgttggtttgatttggttttaggattgaaaaaaatatcaagcgtgtct

SEQ ID NO: 268332 - DNA, 285 bp, Glycine max
gcgagagctgatacagccatcagatgttatttgtggaacttaacctgctggatcacacgttcaagccctaaccatggaaatggtgtgcacatacaccatggtgttcatttccatggccgtggccactgactcaaacgcgacaggacagctatcacgagttgcagtaggttcttctgtttgcatagcaagcattgtagccggaccaatatcagggggatcaatgaacccagcaaggacattatgtcctgcaattgcaacatcatactacaagggacttttggtata

SEQ ID NO: 268333 - DNA, 392 bp, Glycine max
cttccaaaccctaacacttctcttcctcttctttcatcacctctccacaatgccgccgaagtgcgacccctcccagatagtcgacgtcttcgtccgcgttaccggcggcgaagtcggcgcggcgagttccctggccccgaagatcggtcccctcggtctctcccccaagaagatcggagaagacatcgccaaagaaaccgccaaggactggaagggcctccgcgtcaccgtcaagctcaccgttcagaatcgtcaggcgaaggtcacggtggtcccctccgccgccgccctcgttatcaaggccctcaaggagcccgagcgcgaccgcaagaagaccaagaacatcaagcacaacggcaacatctcgctcgatgacgtcatcgagatcgcta

SEQ ID NO: 268334 - DNA, 424 bp, Glycine max
gaagatggagatgtatcagatctggagtaggagaatagcgttgggagcgttcgcgttggttctgcttttcctatcggcctcagcagacgacgtcgttgtgctctctgaagataacttcgagaaggaagttggtcaggacagaggagctctcgttgagttctatgctccttggtgtggacactgcaaaaagcttgctccagaatatgaaaagcttggtagcagcttcaagaaagccaaatctgttttaatcggcaaggttgactgtgatgagcacaagagtttgtgcagcaaatatggagtctctgggtacccaacaattcagtggtttccaaaaggatctcttgaacccaaaaagtatgaaaggccacgcactgctgattcacttgctgagtttgtaaatacggaaagaggaacaaatgtgaag

SEQ ID NO: 268335 - DNA, 288 bp, Glycine max
gctacgcaccagtttcaccggacgaatttgttgttgttgggagcgatccgagaaaaagtgtgataacatgttggtttaccaggaccttcttacaggtgatgagcttctttgtgactccttacgttacaaggaaattgagaatggaatgctgtggtaagatgaggggaagtgacgttgttaaaggagcacatgatgtaacacattggtgcacacccttctgctgagtgtggatgagaagatgacggagttgaagatgcagctgttaaagttgtagacattgttgacaca

SEQ ID NO: 268336 - DNA, 324 bp, Glycine max
cgcttatcctttatggattgaacaaacttgccaccgttggacctgtcaacaccagcgcgactgaaatgtacaacacgagggacatagctaaactggatgcatggaaggccgttcgaggggacatccaaggacaaagcagtgggtgattacatcaataaggtggaacagctgctggaagcacatgacttgcctgctggataacagatggatgacttgctttctgcatactgagctagaaggtcacatcagctttgagagtaacaattgcaaagctttgaagctgttattatcataatcatactgatctctaacgattaagacatg

SEQ ID NO: 268337 - DNA, 226 bp, Glycine max
aagaaagcaagctcgtgaatatgaaattgttgttgaggcttccgattctgtagctgacgagaggatgatcaaagcactcctactgatgactcttacgcaaacgattctaatgccactgatagtggcgatgagaaagacaagcctgccaaaatggaatcaaagaaggatctgtcttctaaggcatttacttgtaaaaagaactcaccagattatgaagattgaaaga

SEQ ID NO: 268338 - DNA, 395 bp, Glycine max
cggacgcgtgggcggacgcgtggggcgcgattctgcatcgcttgacctcgtgaattggctcgggaatagaccggagtggaagatcatgaatgggagagaccattttcttgtcgccggtaggatcacatgggattttcgaagactcactgaagaagaatcggattgggggaacaagcttttgtttttgcccgctgcgaagaacatgtcgatgcttgtggtggagtcaagtccttggaatgccaatgatttcgggattccgtatccgacttattttcatcctgccaaggatgatgatgtgttcacctgggcagagaggatgaggaggcttggagaggaagtggttgttttcgtttgccggacctccgggcccggataacccgaaatcgataaggggc

SEQ ID NO: 268339 - DNA, 411 bp, Glycine max
cctcagttgtgtgtatgcacaagacacatcattccttgtgcctgcaatcataactttgggtgattctgctgtggatgtagggaacaatgactatcttcccacccttttcaaggctgattaccctccttatgggagggactttgttaaccaccaacctactgggaggttttgcaatggcaaattagctactgatttcactgctgacacattgggtttcaagacctatgctccagcatatcttagcccacatgcatcagggaaaaacctccttattggagcaaactttgcttcagctgcatctggttatgatgaaaatgctgctactttgaatcacgcgattccgttgtcccaacagttgagttatttcaaggaataccaaggcaagctggccaaggtagctggcagtaaaaa

SEQ ID NO: 268340 - DNA, 363 bp, Glycine max
cccacgcgtccgaacactttgagttgctttacatcacaacaacaacatggctggcactgctgctgcaggcatagcttccttgttttcttcttctattaacagtgtcaaatgtcttcgttcctccaagaactgctccataatagaccctctcataacaacagtgccctcaaaccgtggcatgtttgggtcacacttggtggaacctttgtccattaattcgcacaagttgtggggacctagaatttctgctgctgttgcacaagaagaggctgttgttgttgtggatgatgatggtgctggtttagttgaagaagaaaaagtggaagagaatgaaagagaagcggtggcagaacaagactctga

SEQ ID NO: 268341 - DNA, 307 bp, Glycine max
cccacgcgtccgcttgaaaatatgttttgtttgtgttgaactcaattgcgtccgattgataatagtactctaatatcccacctacgtctgttatgaatgtgtgaaatatgaaatgattaattgtcatatcgtgttgatttaatttgttctgaattggctagaggggacttaatgtggattttttattcgatttgagtggacttccatgcttgtcatgaaggaaaaacatggatgagttgtctgaaggatggtgatcatccttggaattcgatcgtattataggttgaagtcggtcttacgacactta

SEQ ID NO: 268342 - DNA, 351 bp, Glycine max
attgaaattctttagttgtaactgacttagttttctgagaaaataaggattattattgagagaatggctggctcatcggaagagggacaagtcattagctgccacaccgttgaagaatggaacgatcaactccagaagggcaacgaatccaagaaactcattgttggggattttactgcttcttggtgtggaccatgccgtttcattgcaccattcttggctgagctggctaagaagttcacacgtgtcatattcctaaaggtggatgtggacgaattaaagagtgtttctcaagattgggctattgaggctatgcccacttttgtgtttgtgaaagagggaacgcttctg

SEQ ID NO: 268343 - DNA, 353 bp, Glycine max
attcggatttgtgaccttcgccttagttcagtcaatgaaagatgcgatcgcaggaatgagcggccaggaccttgacggccgtaacatcactgtcaacgaagctcagacccgcgccagccgtggtggtggtggaggcggtggtttcggaagtggtggtggatacaaccgcggtagcggtggatatggtggtggtggtggcggcggcggatacggtggtcgtcgtgaaagtggatacaaccgtaatggtgggggtggaggtggaggatacggcggtggtagagaccgtggttacggtggtgatggtggttctcgctactctcgcggtggggaaagcggtggatccgatggaaact

SEQ ID NO: 268344 - DNA, 388 bp, Glycine max
cccacgcgtccctttctcaatatattgttactagcagctcatatcaaaacacagagacgctactgcatttatacgagcccactgtgatcattattcctccaaacacgttagcatacaattccacggctggagttacagaatcggttgatagattttatggttcagtgaagcaggtgatgctggcccagagttgctttgatgacacacacggtgctatcttaataaaaaacctttctgccaaggaaccttcaacacttggtgtggacacttactataagcagtattatcactgcctggctgctgctgctgtcactttaaagtggacggaagcaaaaaaagggggtgttggtaaccaataatcatttgtcgtcaacttcaattgaacaat

SEQ ID NO: 268345 - DNA, 320 bp, Glycine max
gctacacgttcaaatctaaatatggttcaaatgcttccaaacagatgggaatggaaggactgtatagctgacagatcttaattatctttattataaatatgggcaaaatccatggaatgatagtctcagcagacctgttacagacctgcttactattatagcaggtgctgtaagaggcattactagcaacatatgcgatcttttagaaagctatctcatcatggaatgcttacaataatcaactcagggaacttgagcaaacatggaatgacattgaatgagcatattgagtacttgtagcgaaagatatgcaatatgct

SEQ ID NO: 268346 - DNA, 341 bp, Glycine max
catttctaataataggcgggaaccaaggtgtctatggcaaccatggcatgatttacattgcaggattgaaggccctgctgcatatgatatactcactaattttgagcagcgctggagaaaagccaccaaatggtctgagttgggtcggaaactcaagagagtatctcactggaacgatgattctttgatcaaggtagaacgcatcttttgtattcttagtccttcggaatcaactccagttgatgatcctgaactatgggtttcgaaggaagacgatcctgaaaattggcatgttcaagtttttcgatccataaattctggttctttgaaaggattcccta

SEQ ID NO: 268347 - DNA, 375 bp, Glycine max
gttataaggatcctccaaaacctcgtcttaggtatgtgttgtgtggcgtgagatttcagtgctagcatcgtttcatcacatggcttgtatgactggagttcagcgtctgcttcgccgcactccacttgttcattcccactatgcttctattcgtctcagctcaactctcacttaccccaaactcttcgtaagcggtctttgtagactgacaacagatgaaaaacttaaggaagcattttcgtcttttgggcagctggttgaagctaacgtgataattgatagagcctctggaagatcaaaggggtttgcttttgtaacttatacaaccatagaagaagctgaaaaggcacgagaaggaatgaaccctcaattttt

SEQ ID NO: 268348 - DNA, 413 bp, Glycine max
ataatttcaaatctatctccaatcctttcaaccttctctctttctctctctgtgtattagttgttgctgttcacaccggtaatttcactgtgttctgttatatgcatctctttaccaaattgccccttctcagagggtttggaggctatgccgaaaacgggttaaataagctcggaaaatgattctcacaaagcagtaccgatgcatacactcagctagttgtcaatgtactaaagggcatttaagtgaagatatgatattcttagtatttcataatttgaattggaatcccaagctaattgcaactctatcatgtgtgtgcaaatggtttgatgatcttgccaagcgagttctatggaaagagttttgtcgaacaagagctccgaaaatgttgtgtgatctgcaatctaatg

SEQ ID NO: 268349 - DNA, 401 bp, Glycine max
  unsure (1)..(401): unsure at all n locations
nccacgcgtncgcccacgcgtncgcctacgcgttcgactatttcgaactccgccatggctgggaccaccgccaccgccacgtcatacttttttggcacccgcctcaacaacccgacaaccttaaacaacggaagattccacgcgctcctcaacttcggcaaaaagaaggcggcggcgccgccaccgaagaaaaaggaagtgaaagtgaaaccctccggcgaccggctggtgtggtttcctaatgcggagccgccggagtggctcgacggaagcatgatcggcgaccgcgggttcgacccgttcgtgttcgcgaagcccgcggagtacctgcagttcgacctggactcgctggaccagaacctcgcgaagaacgtcgccggcgatgtgatcggaaccagggt

SEQ ID NO: 268350 - DNA, 351 bp, Glycine max
  unsure (1)..(351): unsure at all n locations
cccacgcgtccgcccacgcgtccttaatatataataccgtacttgaccacatagggtggatgagcctcaatgtgcactcacgaangatgccactgactcggtagggaataccccaatggtatttctaaacaacattgtcgtctggtgtgtagcccgtattgctgctaaactggagtacatgcacgcctgctgtagtgtcaaatataagattgctttgagcatcattgaagatgctgagaaaaaaggccttattactcctggaaagactgttctggttgagtatacaagtggtaacactcgcataggattgacattcatagcaccattgaggggctataaacttcaagtgac

SEQ ID NO: 268351 - DNA, 192 bp, Glycine max
cttacgcctagggttttaccgctgctttttctagatttaaggaagatgggtgaggaagaggtttacatcagcattgcggttatagcccatgttgactctcggaagtccactaccactggccacctgatctacaagcttggaagcattgacaagcacgttattgagagatttgagaaggaagctgcttacatg

SEQ ID NO: 268352 - DNA, 455 bp, Glycine max
acgcccacgcgtccgcggacgcgtgggttttttttttttttattttatgattgtatgtttactggatatataatttgttgatattaataaaaaggaaacggtttaaaagacagaaaaattattaatgggatgataatggatgaattataaaatgtcaaactaatagccctatttttgctccccttaatcttttgtttttgcactatgttctttgtttccctgtacacacaaatcatatgcattcggtcactgaatgatggatgacacactcttgcttccatagtgtctttggttcaattattctctctttattaagccaattaacaagtgtctaaggcattaaagatgcagcttaattacaagttataacatctgaataagttgctctttgtaaaaattggtgagctagtaaccagaaattcaacatttaagtgtttgctttttattattttttt

SEQ ID NO: 268353 - DNA, 317 bp, Glycine max
cccacgcgtccgggacctttaagcttcctaatcccctgtactacattcagtagttccttcggctgtcaacaatctagcttgctcctatctatctatatgtaataagatgcgttcaaataggggcactagcttcactttatgttgtttcagctgtgtgtcaacaagtcatgtaagagacttcactatgttgttttctctttcgtggctttaataaattatgcgcccttgttccataaaaaaaaaaaaaaaaaaaaaaaaaaaaaaaaaaaaaaaaaaaaaaaaaaaaaaaaaaaaaaaaaaaaaaaaaaaaagggcgg

SEQ ID NO: 268354 - DNA, 433 bp, Glycine max
acgcgtacgcgtacattcacacgtacagtaacaatgcacatcctacaattaatgctccttcatcctatgagccatggactccagtctaaagcgtataaatggctctccgcttcttgcggtaggctgctgctatgtacatgttcgcatgactgctgatcagatcggcacatagcacaatactcaggggacatcttcgttcagcagatagatttgtacggatcatgtgctgccaggagccgaccatcatctcgtccacgcctctgccaaagagctagcagaacttgatgtagacgctgtaactgcgtgccacctgacactgctgctaaccaagaattgtgaccctgctatacaagtttgactactcatagaggcaaacgcaagttcccttagacttaattggaccactaatccatgcatgcctatgacttatatt

SEQ ID NO: 268355 - DNA, 440 bp, Glycine max
  unsure (1)..(440): unsure at all n locations
cccacgcgtccggcctcctccaaagaagcgaatggataagctcgatactgtcttcagctgccctttctgcaatcatggcagcagtgtcgaatgccgccttgacatgaagaacttgataggggaagctatctgtgggatatgccaagagagctttagcactacaatcacagctttatcagagccaatagacatatacagtgagtggattgatgaatgtgaactggtgaaccacccggatgatgatggtgctgagcactgatgctcagattcctgttcttgtggttgtcaaaatggattaactggccaattttatatcttaaaagttcaacctgtaactatgtcagttcctgatgtgagcactggtgcaactatatgatccatgtaatagcttagntatgtaataacatgtgcaagaacatgagaataattggccctttttt

SEQ ID NO: 268356 - DNA, 442 bp, Glycine max
caaggatccacgagaggatgtccttcaagcctggtacatggatgatagtgatgaagatcaaagactcccccaccacaaagaacccaaggagtttgtctcgttggaccaacttgctgaacttggagtccttagctggaaactagatgctgataaccatgaaaatgatccagagctgaagaagattcgtgaagagcgtggttacacctacatggatgtttgtgaggtctgcccagaaaagttgccaaattatgaacagaaaatcaaaagcttctttgaagagcatcttcacactgatgaggagatccgcttttgtgctgctggaagtggctattttgatgttagggatcgcaatgaagcttggattcgtgtgtgggtcaagaaaggaagaatgatcatcttacctggccgaatttatcatcgctttacgctagatgagagcaac

SEQ ID NO: 268357 - DNA, 423 bp, Glycine max
caatttttctctcaaccggcccaatttagcataagcccagcatggccaccgcaacagcagcagccacctcgtccttcatggggacgcgcctcctggaggcccattccggggcggggcgggtgcaggcccggttcgggtttggcaagaagaaagccgccgccccgaagaaagtttccagggggtcgggctctagctccgataggcccctgtggtatccgggcgccaaggcgcccgagtacctggatgggagccttgtcggagactacgggttcgacccatttgggctagggaagcccgccgagtacctgcagttcgagttggactcgctggaccagaaccttgcgaagaacgtggctggggacatcattgggaccaggaccgagctcgcggacgtgaagtccacgccgttccagccctacagcg

SEQ ID NO: 268358 - DNA, 295 bp, Glycine max
actcggactggaattcccgggcaggccgtccgaacttgctccaaagaaaaagcctgttgctgtttcccttgccaatgaggaactcgccaagtggtatggtcctgacagaaggatcttcttgcctgaaggtctcttggaccgatcagagatccccgagtccttgaccggagaagtgcctggagattatggttatgacccgtttggtcttagcaagaagccagaggacttcgccaaataccaggcgtttgagttgattcatgccaaatgggcaatgcttggtgctgctggattcatc

SEQ ID NO: 268359 - DNA, 441 bp, Glycine max
acgcccacgcgtccgcccacgcgtccggcacaatgggtgcctacaagtatgtttcggagctatggcgcaagaagcagtctgatgttatgagattcttgcagcgggtgaggtgctgggagtatcgccagcaaccttctattgtccgtttgacaaggtctactcgcccagataaggctcgtcgcttgggtttcaaggctaagcagggttacgtgatttaccgtgttcgcgtacgaaggggtggccgtaagagaccagttccaaagggtattgcttatggtaagcccaccaaccaaggtgttactcaactgaaatttcaacgcagcaagaagtctgttgccgaggagagagccggaaggaagttgggtggccttaagggtctcaattcatactgggtgaatgaggactccacttacaaatattttgagggcattctggtggatg

SEQ ID NO: 268360 - DNA, 409 bp, Glycine max
cccacgcgtgcgctaatttgctcgttgtcttttaagaggcgaatccttaccattggtcgagatgggtgaagaagtgaatgccgcggttgcagagtatgttttgaagatgcatacgagagagtacgaatgggcgtttgtcatgaagcaagacctcgaggctgcgaagaagaagagagcctacagccgtatactcatgtacaacatagctaagcagaactctatggagtacgatcaccaggagaaggaattgattcagctgaaacgcgaggccaagctgaaaggtggattttatgatcatccagacgctaagctcttgatgattgttcgcattcgtggtattaatgccatggatcctaatgtaatgaagatcctgcatgtgttgcgattgatagagaatttcaatggtgta

SEQ ID NO: 268361 - DNA, 428 bp, Glycine max
caacaagtgtttctgtcaccatggcatccaccactctatcccctacaaccccttctgagctatgctcaggaaaaagtggcattttcagttcctcacaggcacttcttgtgaagccagtgaagaggcctatgatggggaagagcaagggattgagaattgcatgccaagccaccagcatttccgctgatagagtccctgacatgggcaaaagacagctcatgaatcttcttcttcttggtgccctttcactccccactgctggaatgcttattccctacacctacttctttgtgcctacaggttcaggttcttcagctggcggtactgttgccaaggatgccgctggaaatgatgtgattgccgagaattggctcaaggcacatggacctggtgaccgaacccttacacaaggattgaatggcgatcct

SEQ ID NO: 268362 - DNA, 313 bp, Glycine max
tgggggcctcagaatccttaacagaacaagttgcatgtatggcctccactctctctatatggtctgcatccacccttgttgatgccaagccttcaactccaagacaatgcgtcacccttcccactcttccctctccaccttttcactctcagactcgtccttggaagaccactgctttctgtcgtaggcttgctcgcaattttatggcaatggccaccacaagagaggcagccgcagcagaagttgccgccacaactgacctctctattgccgagacgccagagattgtgaagactattcaagaagcttggga

SEQ ID NO: 268363 - DNA, 453 bp, Glycine max
tcgcaacaagtgtttctgtaaccatggcatccaccactctatcccctacaaccccttctcagctatgctcaggaaaaagtgggattttcagttcctcacaggcacttcttgtgaagccagtgaagaggcagatgatggggaagagcaagggattgagaattgcatgccaagccaccagcatttccgctgatagagtccctgacatgggcaaaagacagctcatgaatcttcttcttcttggtgccatttcactccccactgctggaatgcttattccctacacctacttctttgtccctccaggttcaggttcttcagctggcggtactgttgccaaagatgccgttggaaatgatgtaattgccgagaattggctcaaggcacatggacctggtgaccgaacccttacacaaggattgaagggagatcctacctatcttggtgtggagaaag

SEQ ID NO: 268364 - DNA, 439 bp, Glycine max
cccacgcgtccgcccacgcgtccgcgcagatcgattacgaagtaatttcactgaatcttagtgaagatgtttctcacaaggactgagtatgaccgaggagtcaacaccttttctcctgaaggccgcttatttcaggttgaatatgcaatcgaagccatcaagctgggatcaactgcaattgggttgaagacgaaagagggtgttgtccttgcagttgaaaagcgcatcacttcgccgcttctggagccaagtagtgttgagaaaattatggaaattgatgagcatataggttgtgcaatgagtggattgattgctgatgctcgaacacttgttgagcatgcacgggttgaaactcagaatcataggttctcatatggtgaaccaatgactgttgagtccacaacccaagctctttgtgatctagccttgcgttttggtg

SEQ ID NO: 268365 - DNA, 202 bp, Glycine max
cccacgcgtccgcccacgcgtccgcccacgtttccgttaacgcgtccgcccacgcgtacgagaaaagtaaaaaaaaaaaaaaaaaaaaaaaaaaaaaaaaaaaaaaaaaaaaaaaaaaaaaaaaaaaaaaaaaaaaaaaaaaaaaaaaaaaaaaaaaaaaaaaaaaaaaaaaaaaaaaaaaaaaaaaaaggggggacgattt

SEQ ID NO: 268366 - DNA, 456 bp, Glycine max
cccacgcgtccgcaacaatgacattacctccattgctagcaacggtggaagagtgcaatgcgatgcaggtgtggacaccagttggcaagacgaagtttgagactctgtcctacctgccagaccttgatgatgcacaattggcaaacgacgtagaataccttcttaggaagggatggatttcttgcttggaattcgagttggagcacggcttcatgtaccgtgagcacaacaggtcactaggatactacgatggacgctactggaccatgctgaaactgcctatgcttggttgcactgatgcttctcaggtgatgaaggagcttcaagaggctcagactgtataccccaacggcttgattcggatcatgctattcgacaacgcttgccaagtgcagtgcatcaacttcatcgcctaccagctcccaggcttgtaagtgtgaaaatattttttttttt

SEQ ID NO: 268367 - DNA, 434 bp, Glycine max
ataactagaaacagtgtgatgaaaatgaaggtccttgttttcttcgttgctacaattttggtagcatggcaatgccatgcgtacgatatgttccctctccgaatgaacactggctatggtgcccgtactccggaggtgaaatgcgcaagttggaggcttgctgtggaagcacacaacatctttggctttgagaccattcctgaagagtgcgttgaagcaacaaaggaatacatccatggcgaacaatatagatcagactccaaaacagttaaccaacaagcttacttttatgccagagacctcgaagtccatcccaaggacacatttgtgttcagtatagatggcaccgtactctctaatattccatactacaaaaaacatggatatggggtggagaaatttaactcgaccttgtatgatgaatgggttaacaa

SEQ ID NO: 268368 - DNA, 355 bp, Glycine max
cccacgcgtccgcaaaaaccaagtactacaagggaagaagaacttagctacaagctaaggaaggatcaaagagaatggctcaagcaatggcatcaatgactagcttacgtggttcctctcaggctgtgttggaaggtagccttggctccacacgcttgaatgtggggagtggaagcagggtggcctcagtcacacgtgcagggttcacagttagagcacagcaacaacaagtgaatggtggtgaggtacaaagtagccgtagggcagtgctttcacttgttgctgctggtttgaccactggctcttttgttcaagctgtgcttgctgatgccaaacctatcaaagttggaccacc

SEQ ID NO: 268369 - DNA, 436 bp, Glycine max
gagataactagaaacagtgtgatgaaaatgataggtccttgttttcttcgttgctacaattgtggtagcatggcaatgccatgcgtacgatatgttccctctccgaatgaacactggctatggtgcccgtactccggaggtgaaatgcgcaagttggaggcttgctgtggaagcacacaacatctttggctttgagaccattcctgaagagtgcgttgaagcaacaaaggaatacatccatggcgaacaatatagatcagactccaaaacagttaaccaacaagcttacttttatgccagagacctcgaagtccatcccaaggacacatttgtgttcagtatagatggcaccgtactctctaatattccatactacaaaaaacatggatatggggtggagaaatttaactcgaccttgtatgatgaatgggttaac

SEQ ID NO: 268370 - DNA, 441 bp, Glycine max
acgatccatacccatatcatatcgcattcttcaaacttactgcattcaatttctctctgtctacaacgcaacacacacacacacacaaagagaacttttcagcttcacgcttcaattcagttcaattttaaacatgctttgcgtcaacactgccttcacctctttcttacccagaaaatcaacttgcgtcttttcctccaaatcaaccaccccaatttcctgcaccctccaaggaacagttgcagagccaaaatctacagctgctgctgaaccgcttttgctaaatgcagttcgcgggatagatgttgaaagacccccggtttggctcatgaggcaagcagggaggtacatgaagagttaccaaaccatctgtgagaaatatccttcattccgtgaaagatctgaaaatgttgatctcgtggtggaaatttctctgcaacc

SEQ ID NO: 268371 - DNA, 386 bp, Glycine max
atccatacatacatcctagtacaatgttcataacacttgcaaagattatctctatcgaggggtctcatatcacactcagacgcataaagtacatcattagctaaacgcaataaatcaggaaatgataaacatgctttacagtaaacacgtgcctacaactgtatcttacccaaaaaatcaacttgcgtcataaaccttcaaatcaaccaccccaatttacctgcgcacttcaaggaacagttgcagagccaaaatctacatgtgctgatgaaccgcttttgctacatgcatttcgcgagaaaaatgtcgaaagactcaaggatcggctcatgaggcaagcatggaggtacatgaagagttaccaaaccatatgtgataaatatcct

SEQ ID NO: 268372 - DNA, 427 bp, Glycine max
ccccagtagaggttcctgttgagaagactgaagcttatacctatggacagtgtgagtgagagaaacaagtttaaaaatggtcctagttgtggggatcaggtctaccattttgcatgccatgttgaaaagcctcttttttttttttctttttatttctttagtttactttattaatattattatatgatgcttaagtctttggttgtattatggagggtacacctacgtgtaagcacaacacttggctccacatcagcgtgcttgccacgtggtgacatgagaaattctgggagttgtgtattgaagtgagcaagctgctggtgctggagtttaggggtgatggtttattggcagggttacatgagtttgtgatgctgtgttactgtgtttctttaggtttgaataaatgatatttactttataattt

SEQ ID NO: 268373 - DNA, 390 bp, Glycine max
ccaattttctagggttttattcattttccgatggcttctgcagatgttgagtaccgttgcgttgtcggtgggctcgcttgggccactgacgaccatgccctcgagagagccttctctcagtacggcgaaatcgttgaaacgaagattatcaacgatcgtgagactggcagatccaggggttttggatttgtgaccttcgcctcggagcagtccatgaaagatgcgatcggagcgatgaatggacagaacttggacggccgtaacatcactgtcaatgaagctcagtcccgcggtggcggcggcggcggcggacgaggaggatacaatcgtggtggctgtggatatggtggtcgtagtggcggttgcggtggtggataccgtagccgtgac

SEQ ID NO: 268374 - DNA, 417 bp, Glycine max
gcaaaggaatgggcggcttattttcttatttatcacttcccgaggaggagagtcctgacgtgaaagcattccactccgcggagagctggcagagccacttgaaagagatcaaagagtcccctaagctaataaataaaaatcaggttgtgatatatttcacggcgtcctggtgtggcccttgcaaattcatcactccagtgtttaaccagatagccgcagagtttgcaaacgctgacttcgtcaagatcgacgtggactaattatctgcgattttctcttccatattctctcttttctttattcaatccaattacttttgttagtttcccttggctcagttcgatagagtggatagaagactaatgaaattttgaattaaaatatactggaaaagcattgatctcatcagattatttt

SEQ ID NO: 268375 - DNA, 448 bp, Glycine max
  unsure (1)..(448): unsure at all n locations
cccacgcgtccgcccacgcgtccggcggaaatcattacttataatagtcttgtacgattattcatagtgcggcaatagcagagcagcgactcacactggtcttcgcttctcattcatcatttctcacctaaccttctcttcctctcagtctcagatcagaaacctcagccagccatggcagcgttccagaagatcaaggtcgtcaaccccatcgtcgagatggacggagatgaaatgactagggttatctggaagtcaatcaaggacaagctcattttgcccttcttggagttggacatcaagtattatgacttaggccttccttaccgtgatgagaccgatgataaagttacaattgaaagtgcagaagcaactctcaagacaatgtagcaatcaagtgtgcaactatcactccagatgaagctcgtgtgaaggaagtntttttttt

SEQ ID NO: 268376 - DNA, 338 bp, Glycine max
  unsure (1)..(338): unsure at all n locations
tagcatcgcactcaacaagcccatgctggcattgccctcttcgtctcgaaccgcaacccctatcagagccatgaactcctccacctcctccgtcaggacctctctctcctccaacttcgtcgctccttacactggaatcaacagcgcctatagcctcttctccggccacaagctccgactctcctccctcaatccggggtcgtttcgcggctccaactccaaacgaggcgtcgttaccatggttattccttttcaaagaggaagtgcatgggagcaacctncaccggacttagcttcttactcgtacaaaaatcgaattggttatttgggcatgtctc

SEQ ID NO: 268377 - DNA, 357 bp, Glycine max
acctggtgaagctttgaatcaggttgtggaggtcaatatgaaagtcgaggaaccaggtgagaagaatgttcacaataatgcattctatgctgaagagactttgctcagatctgaattggaagccatgcgtgattgcaattctttgactgctcggcattgggttgtaaggaacacgagaacatgcaatagaactggacagttgacaggctataagctggtacctggctctaactgcttgccattggcaggctctgaagccaagtttttaagaagagctgctttcttgaagcataacttttgggtaacaacatattcacgtgatgaagttgttcctggaggagaatttcctaatcaaaa

SEQ ID NO: 268378 - DNA, 372 bp, Glycine max
caacattttcggatctattcaaaaaaaaaattaaaaaaaaaaaaaaaaaaaaaaaaaaaaaagaaaaaaaaaaaaaaaaaaaaaaaaaaaaaaaaaaaaaaaaaaaaaaaaaaaaaaaaaaaaaaaaaaaaacaaaaaaaaaaaaaaaaagactgataaaaaataaaaatgaaacgaacacaagaaacatgcaatataaactggacagaaaacaagctataacactgatacataactataacatgattgccattgtgcaagctaagaaaccaagatcttaagaagagctgctttcatgaagcataactataggttaacaaaatattcacttaaagagatgggacctataagagaatttcctaatcaaaaacc

SEQ ID NO: 268379 - DNA, 344 bp, Glycine max
atcattctgccactccttctataatttctctgatatgattcatggctttagcactggcctgcactgcattgacaagccttccaaacagacaaattcgtcaaaagggtttcccagacagaacacccacatgcttgagtttgaccagaataacagttgcatatgctacaaaaggggtctcagctgcctgagagccacttactccagataggccattgtggttccctggcagctcaccttctgagtggcttgattgaagtcttactggtgatttacagatttgaccctctgggattaggctctgatccacagctgctaaagtggattgctcaagcagatctaatgca

SEQ ID NO: 268380 - DNA, 406 bp, Glycine max
cccacgcgtccgatgccttagaccctagtatctaagatatggattagacaggaggttattggggatttggtggagcagtgtcgaacttacaagcagagagtggtacaccttgtcaactcaactttggatgaatcactgctatgccaaggactagccctgaatgatgatcttcagcgtgtactggctaagcacgaatctatttcttctggaacttctaccaaaaatgaaaatcacacacagaattcgaaacctgcacctgctggggctcttgtagatattgatgctcctttggttgatactggagatactagcaaacaaactgatgggagatcctcttctaatgtcgaagcagggtcccaaacactgaatcagttactgctttctgcaccttcaacttctaatggat

SEQ ID NO: 268381 - DNA, 443 bp, Glycine max
ttcctcgttacttcctcttttcgcatcagcattttgaattctgtttttgttggtgagacagataaattcagagtttcaactgttcctggtgctcatgttggtttcattagaaagactgtagaatgtaaggaatcacgaattgggaagcaaccaattcctgtgccatccaatgtcacagtcaaattggaaggacaggatatacaagtgaaaggtcctttgggagaacttgcattaagttatcctcgagaagtgttggttgagagggaagagtcagggactctaagggttaaaaaggcagttgaaaccagaagggccaatcaaatgcatgggctttttaggacccttacagacaacctggtgattggagtatctaaaggttttgaaaagaaacttcaacttgttggtgttggttatcgtgctatggtagaaggaaacgaagtcgt

SEQ ID NO: 268382 - DNA, 402 bp, Glycine max
cccacgcgtccgcccacgcgtccgcccacgtctccgtgaaaatttagccttgcttggagatgaggggtaccagacgaatatatatcaggatgaacgacccttcatcagatctagaaaggttttgatggaattggggccacctataagcaaggaagttcagcttatttcttttcactctgtgtcaaaaggttattatggtgaatgtggacagcgaggtggatattttgaaatgaccaacattccttcagagacagttgatgagatctacaaggttgcatcaatatcacttagtccaaatgttccagcacaaatatttatgggagttatgctcaatccaccttaacctggatatatttcttatgacaaatttggtagggagagcaccggaatacttgaatcact

SEQ ID NO: 268383 - DNA, 182 bp, Glycine max
aaagagacatcatggcttctctagcaacctgtgctgctgctcaaccagctacgatcaatgagcttgcttaaagttccctctctggaactaagctctctttcaagccctctcgccacagtgtcaaatccaagaacttcacgagtattgccgtggtagcaaagtatattcacaagagtgtgtac

SEQ ID NO: 268384 - DNA, 346 bp, Glycine max
cccacgcgtccgcccacgcgtccggccacgcttactgaagattttgggaattgacaagagggctaggttttcacattcgatggcgcttgaaggtggaagcattcatgtggatggagaaggaacttgtcttaccacataagagtgcctcttgaacatgaacaggaaccctcactcgagtaagaaccacatagaggctgaacttaagacatattttggaatcaggaaggatatatggttgcctcgtggattatatggagatgatgacacaaatggacatattgataacatgagctggactgtgaggcctggtgcggatatgctgcctaggattgatggtcaaactgat

SEQ ID NO: 268385 - DNA, 404 bp, Glycine max
aaaccccctccagagaacaagaatcatagaatggcaactatgactggtgtgagcctttcaagccccagggttttcttcaacgcatcaccctcaccgcaaaacacgtacgccgtaaagttcgcagttccactcagccaagggatgcgacttggtagtgtcaggttgggtcgggtgatgaggatccgacccgttcgcgcagctccagagcgcatttcggagaaggtggaggagagcataaagaacgcgcaggaggcgtgcgccggcgacccgacgagcggcgagtgcgtggcggcgtgggacgaggtggaagagctgagcgcggctgcgagccacgccaaatacaagcaaaaggaaaaggacttcgacccgctcgagacctactgcaaggacaatccggagaccat

SEQ ID NO: 268386 - DNA, 416 bp, Glycine max
ccctaatctctatttctctctctctctttttctctgcataacacaaatgtctcacttcggacgttcgggtcccccagacatttccgacacttactctcttctcgttctgaacatcaccttccgtaccaccgccgacgacctattccctctcttcgacacgtatgggaaggtcgtcgacatcttcatccccaaggatcgaaggactggtgaatcgaggggttttgcgttcgtgcgttacaagtatgctgatgaggctcagaaggccgttgagaggctcgacgggagaatggttgatggtcgcgaaataacggtccagcatgcgaaatatgggcctaatgctgaaaggattcacaaaggacggattattgaaacatcctcaagatcaaggcgatcaaagagccgtagcccaaggaaaa

SEQ ID NO: 268387 - DNA, 447 bp, Glycine max
ctcaattaccattccataacctaaatctcctttttgtttccgagtcagagagcaatggcacgtaccaagcaaaccgctcgcaagtccaccggcggaaaggcgccgaggaagcaattggcgactaaagccgctcgcaagtcagctccggccaccggcggagtgaagaagccccaccgcttcaggcccggaacggtggctctgagggagatcagaaagtaccagaagagcactgaacttctgatccgaaaactcccattccagaggctcgtcagagaaatcgctcaggatttcaaaacagatcttcgtttccagagcagcgctgtttctgcgcttcaggaagccgcagaggcttatctcgttggactcttcgaggacaccaacctctgcgctattcacgccaagagagtcaccattatgcccaaggatattcaactggctcgcagaatc

SEQ ID NO: 268388 - DNA, 451 bp, Glycine max
  unsure (1)..(451): unsure at all n locations
cccacgcgtccgcccacgcgtccgcggacgcgtgggcggacctgcgcgttcgctcctccacgctgaagggcgtcacggtgccggaagaccgcgcgccttcgatgatcgacgaatatccgattctcgctgtcgccgccgccttcgcggaaggggcgaccgtgatgaacggtctggaagaactccgcgtcaaggaaagcgaccgcctctcggccgtcgccaatggcctcaagctcaatggcgtggattgcgatgagggcgagacgtcgctcgtcgtgcgtggccgccctgacggcaaggggctcggcaacgcctcgggcgccgtcgtcgccacccatctcgatcaccgcatcgccatgagcttcctcgtcatgggcctcgtgtcggaaaaccctgtcacggtggacgatgccacgatgatcgccacgagcttncccgagttcatggacctgat

SEQ ID NO: 268389 - DNA, 450 bp, Glycine max
  unsure (1)..(450): unsure at all n locations
cccacgcgtccgttcgctaacactcattaattgcaagaatggcacttcgttgcttggtgatgtccctttctgttctcttcactcttggtcttgcgagagaaagccatgccagagacgaagatttttggcatgctgtttggccaaacactcccattccaagttcattgcgagatcttctaaagcctggccctgcaagtgttgaaatcgatgatcaccctatgcaaattgaagaaacacagtacccgaaaaccttcttctataaagaagaccttcatccaggcaaaacaatgaaagtacaattcagcaagccttcctttcaacaaccatggggtgttggtacatggttaaaggaaattaaagacactactaaagaaggatatagttttgaagagctatgcatcaagaaagaagccattganggagaagagaaagtttgtgcaaaatccttgg

SEQ ID NO: 268390 - DNA, 451 bp, Glycine max
cccacgcgtccgcatggacggcggcaccctttagaccgccctcgccgccagcggcacgttcgcggaagagcgactcgccaaggtggcgcgtgacgtcctcgaggggctcgcgtacctccacgcgcgcaacatcgctcaccgcgacataaagcccgcgaacatcctagtaaactccgaaggggatgttaagattgcagacttcggagtcagcaaactcatgtgccgctcgctcgaagcgtgtaactcttatgtcggcacgtgcgcgtacatgagtcccgaccggttcgacccggaagcgtatggcgggaactataacggctttgctgcggatatttggagtttgggtttgaccctatttgaactctatgtgggtcacttcccatttcttcaagcgggtcagagacccgactgggctacccttatgtgtgcaatttgcttcggcgacccgccg

SEQ ID NO: 268391 - DNA, 457 bp, Glycine max
cccacgcgtccgcaaaagctggcactgtaacacccaatattccccaggctatagcagaattcaagcagggaaaagttgaatacagggcagacaaaactggaatcgtgcacttaccttttggaaaagctgactttccagaagaggatcttcttgtaaacttgcttgctgcagtgaaatcagtagaggcaaacaaaccttcaggtgctaaaggtgtgtactggaaaagtgctcacatatgctcagccatgggaccttcaatcaggttaaatatcagggagatgcttgattacagacctccatcagaatagaaccctcacatgtaaatgttcgtttggcctcagtcagctatcccgggtgccattgtgagatcttgccaaatatttattcaaagatgttaccaaagttacatacaaggggatggggatctcttctgttccaaaatgggtttttttttttt

SEQ ID NO: 268392 - DNA, 358 bp, Glycine max
cccacgcgtccggaaaaaacatgactactgcaaaagcagttcttgtggcatctttacatagggagtacggggataatttacggagtatgtatctgaagaaaccaacagttagtggggaagtcatagaagtttatcagccaagtcatgaatggaagcagaagtttaatgataatgggcataacctaaaagcatggacggatatgtatctgttaagtttatcagacgtgttggtgactacctctctctcaacatttggctacgttgctcaaggattgtgaaatttaaagccatggcttctctacaggctagtcagtatccatagcggctattttccacgctgcgaacgggatttatcaac

SEQ ID NO: 268393 - DNA, 447 bp, Glycine max
  unsure (1)..(447): unsure at all n locations
gttgaaagttaagaagtagtaaagatgtttctattcgggcacaagggtcaaaagataaaggggactatggtggttatgcagaagaatgtgttggatatcaacagcatcaccagtgttgacgggatcgtcggcaccggcttagacttcttaggcagtgcactcgatacagttacttttttagcctcctccatctccatccaacttattagtgctaccaaggctgatggtgggaaaggaaaagttggaaaggctacaaatttgagaggaaagataacattaccaaccataggagctaaggaagaagcatacgatgctcaatntgattgggacagtgacttccgaattcccggtgcattttatattaaggacttcatgcaaaacgagttctacctcaagtctttaattctcgaagacattccaaaccatggaaccattcacttcatatgt

SEQ ID NO: 268394 - DNA, 450 bp, Glycine max
cttcccttctccaacatgccaaacgacagcgttctgtgtcttttcttcttcgttaccctctggacatgccttctctctgctaattcccacgatgaccatattttcctaccgagtcaactccatgacgatgactcagtgagttgcactgctaccgacccaaaccttaactacaagccggtgatcggaatcctgacccaccccggcgacggtgcctctggccggctcagcaacgccaccggggtttcttacatcgccgcctgctacgttaaattcgtggagtccggtggtgctagagttattccccttatctacaatgagtcacctgagaaccttaacaagaagctcgatttggtcaatggagtgctcttcactggtgggtgggctgcttctggtccatatttggatactcttggaaacatttttaagaaagctttagagaaaaatgatgct

SEQ ID NO: 268395 - DNA, 433 bp, Glycine max
cccacgcgtccgaaattatgttgctcctgatgtgcttaatgatagaggttatgttggttctacatctgatatctggtcctgtggagtcattctctttgtgcttatggctgggtacttgccctttgatgagccaaatcatgcgacactgtaccaaaaaattggcagggcccaattcacatgtccatcatggttttctcccgaggcaaagaaactattgaagcgtattcttgatccaaaccctctaacaaggataaaaattcctgaactcttagaagatgaatggttcaaaaaaggatacaagccaacaacttttgtagaggaagaggatgtcaatgtagatgatgttgctgctgctttcaatgattctaaggaaaatcttgtgacagagagaaaagagaaaccagtgtcaatgaatgcttttgagctcatatct

SEQ ID NO: 268396 - DNA, 318 bp, Glycine max
tctacgtcgatccatggctagttgtatggtttatgcgtgttacatttatattgttctgggaatatgagtgttgaaaggtgctgaggcacaacgtgcgttctttgggtttggggattctcttgtggataatgggaacaacaactttttggcaactacagctcgagcagatgctcctgcttatggcattgatttcccaaccggaagacccactggccgtttctctaatggctacaacattcctgacttcatcaggcaatcacttggggccgaatccacattgccttatttagatcccgagctcgaccgggaaagattgct

SEQ ID NO: 268397 - DNA, 434 bp, Glycine max
gagagaaactgagagaaattcgcaaaccctaatttcggaaagatcggcgatggctgcctccaaggatcgcgagaacttcgtctacatcgccaagctcgccgaacaggccgagcgatacgaagagatggtggaatcaatgaagaacgttgcgaatctcgacgttgaactgactgtggaggagcggaatttactttctgttgggtacaagaatgtgattggtgctcggagagcatcgtggaggatcctgtcttccattgagcaaaaggaagaaacaaaagggaacgagttgaatgcgaagcggattaaggagtacaggcagaaggttgaattggagctttcaaacatctgtaatgatgttatgacagtgattgatgagcaccttatcccttcggctgcagctggtgaatccactgtgttttactataagatgaaag

SEQ ID NO: 268398 - DNA, 372 bp, Glycine max
gttgagaactaagaagaaggaaatggcttcttcaatgatctcctccccagctgttaccaccgtcaaccgtgccggtgccggcatggttgctccattcaccggcctcaaatccatggctggcttccccacgaggaagaccaacaatgacattacctccattgctagcaacggtggaagagtacaatgcatgcaggtgtggccaccaattggcaagaagaagttcgagactctttcctacttgccagacctcgatgatgcccaattggcaaaggaagtcgaataccttctaaggaaaggatggattccttgcttggaattcgagttggagcacggtttcgtgtaccgtgagcacaacaagtcacctggatacta

SEQ ID NO: 268399 - DNA, 449 bp, Glycine max
tccatgctgagatcctcccgtttactcatttttgcagtcaaggcacaaccggatacagtgcagaaggtctgcgatattgtgaggaaacaacttgctctgcctgctgaatctgagcttacctcatacaccaaattttcagcacttgttgctgattcccttgacacggtggaaatagtgatggctttagaggaagagtttggcataactggttaggaggatggatctcaaaacatctaaaccgttcaagaagcaggtgatctaatagagaaactgattcaagacaaaagtagagctagatagctaggatgtgaacaattctagggaaaatccattgagtgagtgcacatgattaacagacatgaggctaattattcaatccattcaatggaccatttgtactgtgcttacgctgtattcatttaccaagctttttttgggcgacttttttt

SEQ ID NO: 268400 - DNA, 442 bp, Glycine max
aattctacagcagccctccgatttttaaggaggttgtgtgaattgctggtgagtgatttaaatggctcctactaaggtggacaatgccaaaagggctgatcccaaagctcaggccttgaagacagctaaggctgtcaaatcaagtggtcaagtgtttaggaagaaagctaaaaagatcaggacatcggttacatttcacaggccaaggaccttgaagaaggaaaggaaccctaagtaccctcgcattagtgctccacccagaaacaagttggaccattatcagatacttaaatttcctctaactactgagtctgctatgaagaaaattgaagattacaacacgctggtttttattggtgaccttcgtgcaaacaagaaaaagattaaggatgctgtgaagaagatgtatgacattcaggcaaagaaagtcaatacattaatc

SEQ ID NO: 268401 - DNA, 440 bp, Glycine max
cactcacaaacacacactgaactaaaaaacattaaaagagacatggctgagcaaaccttcatgatgatcaagcctgatggcgtccaaagaggccttattggcgagatcattagcagatttgagaagaaaggtttctacttgaaaggtttgaaacttgttactgtggaccgtccttttgctgagaagcactatgctgatttgtctgccaagcctttctttagtggtttggtggattacattatctctggccctgttgttgccatgatctgggagggcaagaatgttgttacaactggccgaaagattatcggagccacaaacccagctcaatctgagcctggaactatccgtggtgactttgccattgacattggaaggaatgttatccatggaagtgatgcagttgaaagtgctaacaaggaaattgcattgtggttccc

SEQ ID NO: 268402 - DNA, 437 bp, Glycine max
ggggttcgggattggagggattgacgctgcttctcttcctcttctctttcgatccatccctgattcggaatcctgcaatccaaccacctcagcctcacactcacatatacacatatctgaacgcgtatcgtccctcctatggcttcaaagcgcatcctcaaggagctcaaggacttgcagaaagacccaccaacttcttgcagcgctggtccagtagctgaggacatgttccattggcaagcaacaataatgggtcctgctgatagtccttatgctggaggtgtattcctagtcactattcacttccctccggattatcctttcaagcctcctaaggttgcctttaggactaaggtgtttcacccgaacatcaatagcaatggtagcatttgtcttgatatcctgaaggagcagtggagccctgcactcaccatctc

SEQ ID NO: 268403 - DNA, 326 bp, Glycine max
cggacgcgtgggcttttaccattctcttctctcttgctcttgcaggagagagccatgtccatgcatcgctacctgaggaagattattgggaagctgtttggccaaacactcccattcccactgcactgcgagagcttctaaagcctctccctgcaggtgttgaaatcgatgaactccctaagcaaattgatgatacacagtacccaaaaacattcttctataaagaagaccttcatccaggcaaaacaatgaaagtacaattcaccaagcgtccctatgcacaaccttatggtgtatatacatggttaacggatattaaagacacc

SEQ ID NO: 268404 - DNA, 277 bp, Glycine max
gtcaacaaagttaacagttgcacttgaatgagttttaaaaaaaaaaaaaaaaaagaaaaaaaaaaaaaaaaaaaaaaaaaaaaaaaaaaaaaaaaaaaaaaaaaaaaaaaaaaaaaaaaaaaaaaaaaaaaaaaaaaaaaaaaaaaaaaaaaaaaaaaaaaaaaaaaaaaaaataaataagtaaaaccttaataaaaaaaaaaacaaaaacaatttacaaattaaaaaaaatctttaaaacaaggaaaacaatgaacttattaatgcaccaagtata

SEQ ID NO: 268405 - DNA, 404 bp, Glycine max
cccacgcgtccgaaagaatgggcaaagtttcaattccagtcccgcaaaacggcttctccatacgcaatttctcaacgtccaaacgctcatgtttcaccccttcaccttcaacgctcagaatttcttgctctggagtagctgagttagatggatctcatgagaataagggaggtttgtttaatttcaatggaatcaagggcgtggcttgtggtattcttgcagcttgtacggttacttctgctgcatttcccgttactgctgctacccagagacttcccccattgtcaactgagccccatcgctgtgagcgtgcatttattggcaacacaattggtcaggcaaatggtgtatatgataaaccattagatctccggcaatgtgatttcacagatgaaaaaaccaac

SEQ ID NO: 268406 - DNA, 442 bp, Glycine max
agtttccaggatttggatgatcatagcaagaatgttctcaaacgattataccatgactactatttctgtcgtcaagagaatctttggaggcaaaatgcattgaagaccctgcctgtacttctaaattcatcagacatgctggcctgtggggaagatttgggtctcattccatcttgtgtccatcctgttatgcaagaactgggattagttgggttgcgcattcagcgcatgcccaatgaacctgatctggaatttggtattccttctaagtacagctacatgacggtatgtgccccttcatgtcatgactgttccaccttgcgtgcttggtgggaagaagaataagaaagaagacttcggtttttcaagaatgggaaggagtcccaatggttggcggccgatcaatggggtccaaaagttggacattttggtataagggggg

SEQ ID NO: 268407 - DNA, 371 bp, Glycine max
gtggattgcaaaggcagaatatgacgaatctggtccatcaattgtgcacagaaagtgcttctaaactgtttcgatagatagggttattgaagggaaagactactatcatcacgatttgtctggaagcaatgcattgcagattgtaaccctttgattctagcttttgttatcctttcattttattctcttgttggagtgatcatttatttgcagaaggtgaggagagttgttttttaaaatggtccagttcttttcttatactttgataagtttttaactggttcattctgagtatgagttagctggattatatcaaactacgcttgtacccttggtatgcataattataatcctttatccgttgaactacc

SEQ ID NO: 268408 - DNA, 435 bp, Glycine max
cccacgcgtccgcccacgcgtccgaatcacactagtagtcagtagcagtagtacttggacccataacataacaaccatggctaatgtgtcccttctccttttccttttgttcttgtctctctcatcaggagggaatttgatcatggctaatgggcagaaaacttggtgtgtggcaaagccttcatcagatcaagcaacccttttggccaacctcaattatgcctgttctcaagttgattgcaggattcttcagaaaggatgcccctgctcttaccctgacaatctcatgaaccatgcttccatagccatgaatctctattaccaatccaggggaaaaaaccactggaattgtgatttcaaggcctctggaatcgttgttgtcactgatccaagttatggtaactgcatttatgcatagaagaagggtggagtaca

SEQ ID NO: 268409 - DNA, 408 bp, Glycine max
cccacgcgtccggggatctcttggtatcagggtgtgaagcctgatgacatatgttcacaagtgggtttatgttcttccaaaaggcatgaatctaagagtgctggaattgaaatggtgactgaaaaggagcagggagagttgacggcaagagataatcctttgtgttcttcttgtcagatgcttgttctttggatccagaatcaactaaaacaaaaggcaacgaaggacagagtattcaactatgtgaatcaactgtgtgagagcctaccaagtccatctggagagtcagtgataagctgtaatagtctttccaagatgccaaacattacattcacaattggaaataaaccttttgtcctcacaccagagcagtatattctaaaaactggagaaggcattacagaagtc

SEQ ID NO: 268410 - DNA, 447 bp, Glycine max
cccacgcgtccgggcaggttggagagatcggaggggagagcagccatggcgcatcgagtagaccacgagtatgactatctgttcaagatcgttttgatcggagactcaggtgtaggcaaatccaacatcctctccaggttcactcgaaacgagttctgtttggagtccaaatccactatcggagttgagttcgccaccagaactcttcaggtagagggtaaaactgtgaaagcacagatctgggacacagcaggtcaagagcggtaccgtgccattaccagtgcttattacagaggagctgttggtgctctacttgtatatgacataaccaagaggcaaacctttgacaatgtccaaaggtggttgcgtgaactgagggaccatgcggattctaatatagttatcatgatggctggaaataaatctgatttgagccatcttagagca

SEQ ID NO: 268411 - DNA, 432 bp, Glycine max
caacttcttcaaccacgctattgctatcatcactcacacttggaagcaccccatcaatcaactcccgaaacctttcattttttttgcttcaaaatcgttctttgaatcgacccaagaagcgagtttccttcgttgttcaagcagccaagcccactgttggtggaaattccaaaggtgcagcctcaatttaagcctccgtttcttgggttgactaagactgcagaaatatggaactctagagcttgcatgattggaatcattggagtttttattgtagagtttataataaacaagggaatacttcaggtgattgggcttgaagttggcaaaggccttaatcttcctctcggaacattatttttggttgtgctcgtgaatgttgtcatgcataaagtcaaccttctttttattgatttcaagaaatttttttga

SEQ ID NO: 268412 - DNA, 436 bp, Glycine max
  unsure (1)..(436): unsure at all n locations
cccacgcgtccgcccacgcgtccggatcgagataactagaaacagtgtgatgaaaatgaaggtccttgttttcttcgttgctacaattttggtagcatggcaatgccatgcgtacgatatgttccctctccgaatgaacactggctatggtgcccgtactccggaggtgaaatgcgcaagttggaggcttgctgtggaagcacacaacatctttggctttgagaccattcctgaagagtgcgttgaagcaacaaaggaatacatccatggcgaacaatatagatcagactccaaaacagttaaccaacaagcttacttttatgccagagacctcgaagtccatcccaaggacacatttgtgttcagtatagatggcaccgtactctctaatattccatactacaaaaaacatggatatggngtggagaaatttaac

SEQ ID NO: 268413 - DNA, 445 bp, Glycine max
gaaggacttgctcaaggttgttgatagggagtacacatttgcatacattgatgacccctgcagtggaacataccctttgatgcaaaagctaaggcaagtgcttgtggactatgcattggccaatggagagaacgagaagaacacaaacacatcaatcttccaaaagattgcaacatttgaggaagagttgaagacccttttgcctaaggaagtggaaggtgcaagagttgcatatgagaatgaccaatgtgcaattccaaacaagatcaaggaatgcaggtcttaccccttgtacaagtttgtgagagaggagttggggacagcattgctaactggtgaaagggttatctcaccgggtgaagagtgtgacaaagtgttcactgctttgtgccaagggaagatcattgatccacttttggaaatgcctggggagtggaatggggca

SEQ ID NO: 268414 - DNA, 415 bp, Glycine max
atttgatgcagggcatagtgctgatgttcttgctgatgaatgcttcttagaatcagtaggaaaggctcttcgacccggaggagtgttctctgctccagcagacagcctgtggcataagaactttgtggttgcagacaccatagcaaattgcaagaagatattcaaaggctccgttaactatgcttggaccacggttcctacatatgcaaggcatttcttatctaactatatgtttacttttctaaattttatatattaagagaagcttttggtaacaagtgtttctttgtttttgtttaccagtggggtgattggattcatgctttgctctacggagggtccaccagtgaacttcaaacatccaataaataaattgaatccagagaaaaatggggtggcaaagggacctactaag

SEQ ID NO: 268415 - DNA, 430 bp, Glycine max
  unsure (1)..(430): unsure at all n locations
cccacccgcaccggcctcatcctgacgctgcaggaaatgggcgccgacatcgaagtcatcagcccgcgccttgccggcggcgaagacgtggcggacctgcgcgttcgctcctccacgctgaagggcgtcacggtgccggaagaccgcgcgccttcgatgatcgacgaatatccgattctcgctgtcgccgccgccttcgcggaaggggcgaccgtgatgaacggtctggaagaactccgcgtcaaggaaagcgaccgcctctcggccgtcgccaatggcctcaagctcaatggcgtggattgcgatgagggcgagacgtcgctcgtcgtgcgtggccgccctgacggcaaggggctcggcaacgcctcgggcgccgncgtcgncacccatctcgatcaccgcatcgncatgagcttnctcggcatgggcc

SEQ ID NO: 268416 - DNA, 422 bp, Glycine max
  unsure (1)..(422): unsure at all n locations
agaaaatggcggtgcctctgctctcaatgaagatcgtgaagaagagggtaaagaagtgcaagaggcctcagagtgacaggaaaatttccgtcaagactaactggcgcagaccaaagggtatcgattctcgtgttaggagaaagttcaagggatgcactttgatgccaaacattggttatggttcagacaagaagacccgccactatctccctaatggtttcaagaaatttgttgttcacaatgtgaaggatttggaactgctcatgatgcacaacaggacttactgtgctgagattgcccacaatatatccacaagaaaaagaaaagatatagtcgagagagccgcgcagcttgatgttgttgtgacanacaaaacggccaggattacgcagcccaggaggaaatagtctaaatgactgaaa

SEQ ID NO: 268417 - DNA, 421 bp, Glycine max
ggtttccatgtccatgccttgggggacactaccaatggttgcctctcaactggatcacatgtcaatcctaataacaaggagcatggtgcccctgaggatgagaatcgtcatgctggtgatcttgggaatgttaatgtcggtgatgatggtactgtcagcttcactattactgacagccagattcctctcactggaccaaacaacatcataggaagggcggttgttgtccatgctgatcctgatgatcttgggaaaggtggtcatgagcttagcaaaactactggaaatgctggtggcagagtagcttgtggtatcattggtctgcaaggataaactaatcacatgaagttggaaacgtgctttagatttgtggataaagtagcacccatttaaaccccgttggttaggtccggtctgtact

SEQ ID NO: 268418 - DNA, 385 bp, Glycine max
gaagagaagggctacacatacacaatctctaatggcactcaggatgtgggcttcttccactgccaatgcactcaaactctcttctgtctccagacctcatctcttgcctactttttctttctccagatgcttatcttccgtcttggatggacttaagtacgctgattcacatgaatgggtcaagcacgaaggctcagtcgccaccattggtatcactgaccatgcccaggaccatcttggagaggttgcgtatgtggagctgccagaaccaggtggcacagtttccaagaagtctggcttcggagccgttgaaagtgttaaagcaacacgtgatataaactctccaatctcgggggagatcgttgaagctaacaaatagctcaca

SEQ ID NO: 268419 - DNA, 430 bp, Glycine max
gaacagaccaaaggttcaagggtcaagcatcaagtgcgttcgtgttggcggtgtggagattgcgaacaacaagcgaatcgagtactcgctgcagtacattcatggagttggaaggaccagagcgaaacagattctctgtgatatccaaatggataataaaatcacgaaggaactcactgaggaggagctaatcacactcagggacgaggtctccaaatacatgattgaaggcgacctgagacggttcaatgcggttaatataaagagactgaaggatattcagtgctacagaggaataaggcatattcaggggcttccttgcagaggccagcgaaccaagaataattgcagaaccttggagggtaacgagggtgccattggccggaaaaaggaaaaagtaaccgcttctaatttttgggaaggtggtttc

SEQ ID NO: 268420 - DNA, 452 bp, Glycine max
agcaaagacagtcatggcgtcgtttcttcaatggtttctggatccgaagaagaactggttcgccgctcagcacatgaaatccctctccagacggcttcgcaaatacgggctccgatatgacgatttgtacgatccttactacgatctacatgtgaaggaggcgctgaatcggcttccgaaagaggtggtggacgctcgccacgcgcgtcttaaacgcgccatcgatctttccatgaagcacgagtacctccctgacaatcttcaggcaatgcaaacaccattcaggggctaccttcaggatatgctgactcttgtgaagagggagagagccgaacgtgaagcattgggaggtttgcccctatatcaacgatccattccttgagtgcattaatcattttgattgaagtgggaggtttaaattgtattgatgctgcgatagaatgtttctttta

SEQ ID NO: 268421 - DNA, 438 bp, Glycine max
gttattttcagtatcagcatcatggctccaattgcagtgggagatgtcattccagacggcattttggcttacttggatgaagaaaacaaaccccaaactgtctctattcactctctcgccgccggcaagaaagtcatcatctttggggttcccggtgccttcactcctacatgcagcttgaagcacgtgcctggcttcattgagagagcagaagagctgaaaggaaagggtgtggacgaaataatctgtatcagcgtgaatgatccctttgtgatgaactcatgggccaaaacgttcccagagaacaagcatgttaagttccttgctgatggtgcagccaaatacaccaatgccctcggtcttgagcttgacctcaccgacaagggtctcggcgtccgctcaaagaggtttgctttgctggtggaagacctcaaggtg

SEQ ID NO: 268422 - DNA, 456 bp, Glycine max
gcgaaactaaagtcagcattcgaaaaagatgagtagcatcggtacaggttacgatctatcggtcaccactttctcccctgatggccgcgttttccagatcgagtatgccgctaaagccgtcgacaacagcgggactgttattgggatcaagtgcaaagatggggttgtgttgggcgttgagaagcttattccgtcgaaaatgatgcttccgggttccaatagaagaatacactccgttcatcgtcactctgggatggctgtagcaggattagcagctgatggcagacaaattgttgccagggctaagtctgaagctactaactatgacagcgtatatggcgaaccaattcctgttaaggaacttgctgaccgtgtggctagttatgtgcacctctgtacgctatattggtggctcagaccttttggatgtggtgtcatactaggaggttatgacag

SEQ ID NO: 268423 - DNA, 439 bp, Glycine max
cagcgatcgaagtttcacatcagccttatccagtttagggtttcggttccttaccctacctttgacgtatcgaaaccttaaatttgggattaggtctgagcaatctggttggtagaacctttggtcttagagagtcaagttttatgtctggattagacgatcaaattcctactgccttcgatccttttgctgatgcaaatgctgatgactcgggtgctgggtcaaaggagtatgtgcatattcgcgttcagcagcgaaatggtaggaaaagcctgacaaccgttcagggattgaaaaaagaattcagctataacaagatacttaaagacgttaagaaagagttctgttgcaatggaacagttgttcaggacccagaactaggacaggttattcaacttcaaggtgatcagaggaagaatgtttctactttcctagtaca

SEQ ID NO: 268424 - DNA, 372 bp, Glycine max
  unsure (1)..(372): unsure at all n locations
cccacgcgtccgaacctttctcattccccatctcctcaccttattcagccactgctaatttctagggttccgaaatggacgctggcggaaagatcaagaagggcgccggaggaagaaagggcggcggccctaagaagaagccggtttcaaggtccgtcaaggccggtctccaattccccgtcggaagaattggccgttatttgaagaaaggaaggtacgcccagcgtgtcggtaccggtgctcccgtttacttggccgcagttctcgagtacctagctgctgaggtgcttgagttggctgggaatgctgcacgtgacaacaagaagaacaggattattccgagacatgtgctatnggctgtgaggaacgatg

SEQ ID NO: 268425 - DNA, 453 bp, Glycine max
caaggctggagcgacatacctgaagttggcaagttgtcatttgaagttggaaagcaagcatgaagctgcacaggcccatgtcgatgctgcacattgctacaaaaagactaatataaacgagtctgtatcttgcttagaccgagctgtaaatcttttctgtgacattggaagactctctatggctgctagatatttaaaggaaattgctgaattgtacgagggtgaacagaatattgagcaggctcttgtttactatgaaaaatcagctgatttttttcaaaatgaagaagtgacaacttctgcgaaccaatgcaaacaaaaagttgcccagtttgctgctcagctagaacaatatcagaagtcgattgacatttatgaagagatggctcgccaatccctcaacaataatttgctgaagtatggagttaaaggacaccttcttaatgctggcat

SEQ ID NO: 268426 - DNA, 423 bp, Glycine max
  unsure (1)..(423): unsure at all n locations
tctaatcactctagctgttgcaaatttctactatttttcaatggcttctgcagatgttgagttccgttgctttgttggtgggcttgcttgggtcaccggcaacgatgccctcgagaaagccttttcaatctacggcgacatcgttgaatcgaaggttatcaacgaccgtgagactggaaggtccagaggattcggatttgtgaccttcgcctcagagcagtcaatgaaagatgcgatcgcaggaatgaacggccaggaccttgacggccgtaacatcactgtcaacgaagctcagacccgngccaggcgtggtggtggtggaggcggtggtttcggaagtggtggtggatacaaccgcggtagcggtggatatggtggtggtggtggcggcggcggatacggtggtcgtcgtgaaggtggata

SEQ ID NO: 268427 - DNA, 446 bp, Glycine max
attttattttatttttgaatcaagggtgagggccttccatggcttccgcttgtgcttcctgtgcaattacagctgttgccatctctacgccgagttccgggcagaagaatggatcaggaggttgttttcttagtggaaggaaattgagggtgaaaaaggagagagcagcacttggaggacgatcgatgggcactacagtgtgcgcagatgctgaacctgacagacctctatggttcccaagcagcacccctcctccatggcttgatggcactctacctggagacttcggctttgaccctcttggtcttggatctgacccggagagtctgagatggaatgttcaggcagagctagtgcactgcagatgggcaatgttgggtgctgctggcattttcattccagaattcctaacaaagaatggtgtctggaacactccttcatggtac

SEQ ID NO: 268428 - DNA, 379 bp, Glycine max
tgattcgttcgttcactttcactttaccaactcctaacaatttctctctgtttccttcttcaccgcatcaatggagttggacggcgttctcctcggcatgtgcaaccctctcctcgacatctctgccgtcgtcgacgacgctttcttgcaaaaatacggtatcaagttgaacgatgcgattctcgctgaggataagcacaaacctatgtatgaagaattggctaacaatcctaatgtggagtacattgctggaggtgctactcagaattcaatcagggttgctcagtggatgcttcaagcaccaggtgccacaagttacataggttgcataggaaaggacagatttggagaggagatgaagaagaaatgtacacttgat

SEQ ID NO: 268429 - DNA, 202 bp, Glycine max
aacgaactttccaacatctgaagaaattagcacactgattaatcccttaacttttggcaatttaatgtaaagaaaatcgagaatggccgagagcctgtctgttatgtgggctatatactccgttggctatgtaatacgaatattgcaaatgctggcaggtaattataatatcaacagctggtactgctttagtttcataaac

SEQ ID NO: 268430 - DNA, 260 bp, Glycine max
gggctatatagcataaacatttgagtcttcattgcacaatgtcgacctcttccattaacgggtggtgcctctcttccatctgcccagccaaaacctctctcaagaaagccacattaggccccttctgtcttcgcaaccgttagcactccttcttctccttcttcttcttcttcttcttccttcccttctctcattcaagacaagcctgtctttgctggccctggccccatcatcaccccaactgtgaaaaaagatatggc

SEQ ID NO: 268431 - DNA, 410 bp, Glycine max
cccacgcgtccgcccacgcgtccgcttcgaagtcgtcgtttatctctcctcgttcgcatcttcaccctttccctgtctctcagaaagatgaaggtggtcgctgcgtatctgctcgccgtcctcggtggcaacaacaccccctccgccgatgacatcaaggaaatcctcggctccgttggaatagaggcagatgaagataggattgaatcgttcttgtctgaagttaagggtaaggatatagttgagctaattgctgccggtaaggaaaagctggcctcggtgccttctggtggcggtggtgccgttgccgtcgccgctgctcctggtggaagtggcggtggtgctgctccggctgctgaagtaaagaaagaagaaaaggtggaagaagaagaggaatctgatgatgatat

SEQ ID NO: 268432 - DNA, 413 bp, Glycine max
  unsure (1)..(413): unsure at all n locations
cccacgcgtccggaaagaagacatttccttccgaattgaggaagggaaaggtgtcttggatggccaagtcatcttccttagctatcacgttgatctgcgccgccacggtattggtggcgatgagtcggtggccgacagccgtgggcggcggggaccaccacttgggaatgggatgggtttccagcacgtgcaaggggaccattgctgagtgcctgggaggggaggagtacgagttggattcggagatcaaccggcgcatcttagccaccaacaagtacatcagctacgttgcgctgcagaggaacactgctccctgctctcgccgcggcgccttctactacaattgccgacccggagcacaggccaatccttacagccgtggctgcagcgccattacgaggtgcangagctga

SEQ ID NO: 268433 - DNA, 399 bp, Glycine max
cccacgcgtccgagttgagaactaagaagaaggaaatggcttcctcaatgatctcctccccagctgttaccaccgtcaaccgtgccggtgccggcatggttgctccattcaccggcctcaaatccatggctggcttccccacgaggaagaccaacaatgacattacctccattgctagcaacggtggaagagtacaatgcatgcaggtgtggccaccaattggcaagaagaagttcgagactctttcctacttgccagacctcgatgatgcccaattggcaaaggaagtcgaataccttctaaggaaaggatggattccttgctcggaattcgagttggagcacgggttcgtgtaccgtgagcacaaacagtcaccctgatactatgatggacgctact

SEQ ID NO: 268434 - DNA, 373 bp, Glycine max
cccacgcgtccgcccacgcgtccggtgagaactgagaatgcaggcatccaaggaggagatgattgatgctctatacaagccattggaaaatgagagtgatgatggtattatcaggcctatcaacatcttggtgaggttaatgttcccaagttcactgtgattgtggcacaataaaatcatcataccaagctgtttctgcctaatggcccagaaaatgttcctcctgggacggctgtggacacaacaatcacacatccaaaattatgatttttacatgtgtgctcatgcagggatgcttgaaccaaaggagcacaattgcaacctcaggtgtggcacccaatatgttatgctcaccatgctgcaacttaaaatg

SEQ ID NO: 268435 - DNA, 261 bp, Glycine max
attttccaaacgagcatcttcgtagtttcttaagtcaagagaagaagtgaagtgctgcttcaatggcttcaagtcaggaagaggtgatccttttgggggttattggaagcccatttctgcacagggtgcagattgctctcaaattgaagggagttgaatacaaatatttggaagatgatttgaacaacaagagtgatttgctcctcaagtataacccagtttataaaatgattccagtgtttgttcacaatgaaaagccca

SEQ ID NO: 268436 - DNA, 441 bp, Glycine max
ctcaccgattgctagaatggaatttcgatgctcagtcatctcttttaccattctcttctctgcttgctcttgcaggagagagccatgtccatgcatcgctacctgaggaagattattgggaagctgtttggccaaacactcccattcccactgcactgcgagagcttctaaagcctctccctgcaggtgttgaaatcgatgaactccctaagcaaattgatgatacacagtacccaaaaacattcttctataaagaagaccttcatccaggcaaaacaatgaaagtacaattcaccaagcgtccctatgcacaaccttatggtgtatatacatggttaacggatattaaagacacctctaaagaaggatatagttttgaagagatatgcatcaagaaagaagcgtttgaaggagaagagaagtttgtgcaaaatccttggg

SEQ ID NO: 268437 - DNA, 445 bp, Glycine max
  unsure (1)..(445): unsure at all n locations
caaggacaatgaataaaggttccagatattccaaagtaatttgaggtacatcaacgagatgaatgcgaagaggaagtcacctacgacgcaacatcgtttgggtctgaacaagtttgctgatatgagtcctgaggagtttatgaaaacctacttgaaagaaatagagatgccctactccaacttggagagtaggaagaagctgcagaagggtgatgatgctgactgtgataatcttcctcattctgtagattggagggacaagggagctgtcactgaagttagagaccaaggaaaatgccaaagccattgggctttcagtgtcacggnggccatagaaggaataaacaaaatagttactgggaatcttgtttccctatctgtacaacaagtcgtggattgtgaccctgctagccatggttgtgctggaggcttttacttcaatgcg

SEQ ID NO: 268438 - DNA, 302 bp, Glycine max
gatttttatacaagtaaaaaaaaaaaaaaaataaaaaaaaaaaaaaaaaaaaaaaaaaaaagggaaaaaaaaaaaaaaaaaaagaaaaaaaaaaaaaaaaaaaaaaaaaaaaaaaaaaaaaaaaaaaaaaaaaaaaaaaaaaaaaaaaaaaaaaacaaaaatgaaaaaactgggaatgagtaaaacatggaaagaaggaaaaaaataaagaattaacaaattaaaacattgagacaaatattaaaaaatttatcaagcttaaaaacaaaggaatagggaaaaaacgaacagactaacaaaaa

SEQ ID NO: 268439 - DNA, 345 bp, Glycine max
cccacgcgtccgcccacgcgtccgcccactcttccgcaatatagcccaagccctatacaggcaaaccctaacacacacccatttgattcagtttccatggctagcctcaaggttgcatttttggctgcagtgctctgcatggttgtggtgagtgcacccatggcacatgcagctatcacgtgcgggcaggtgacgagtagcctggccaattgcatcggttacctccagaagggaggaacgccgtcgtcgggatgctgcaacggattgaagagcctcaatgccgccgccaagaccaccgccgaccgccagacggcgtgcatctgcctcaagtcggccgtcagccaa

SEQ ID NO: 268440 - DNA, 328 bp, Glycine max
  unsure (1)..(328): unsure at all n locations
cccacgcgtccgagaagttgatggaaaagtgggggttggtgcactgtttgtcaaggtcagtatggatggtgctccctatttaaggaaagtagacttgaagaattactctacatatccagaattatcttctgctctagaaaagatgttcagctgttttactatgagtaaatgtggatctcatggaattctgggcagggagatgctgaatgaaaccaagctgaaggaccttcttcatggatcagaatatgttcttacatatgangacagagagggcgattggatgcttgtgggtgatgttccctgggagatgtttattgaaacatgcaag

SEQ ID NO: 268441 - DNA, 438 bp, Glycine max
gtttgagagaaaggttgagctatagcctaaagggagagacacataaatagtttctactttgtattcatagatagatggctggcccaattatgagacctcagattgtgctatttggctcctccataattcaaatgagcttcgacaatggtggttggggtgctattctagctaacttgtacgctaggaaggcggacatcatcttaagaggatactctggttggaattcaaggcgggctttggaggttttggatgaaattttccccaaggatgcttatgtgcaaccatcattggtaattgtgtattttggtggcaatgattctattgatcctcacccatctggccttggtcctcatgtaccccttgaagaatatgttgaaaacatgaggaaaattgctaatcatcttaagagcctctcggaccatattcgcattataattc

SEQ ID NO: 268442 - DNA, 430 bp, Glycine max
  unsure (1)..(430): unsure at all n locations
cccacgcgtccgccgaggctatgaagcttgtggctgcagccaaagtgagaagagctcaagaagctgttgtcaacggaagacccttctcagagaccctcgttgaagtcctctacaacatcaacgagcagctcctaactgaggacgtagacatccctctcacaaaggttaggcctgtcaagaaagttgcacttgttgtggtcaccggcgaccgtggtctctgcggcggtttcaacaacgcaatcataaagaaagctgaggctagaatcagggaattgaaggagcttggcttggaattcactgtcataagtgttggcaagaagggtaactcttatttcatcagaaggccttatattccggttgacaggtttctagaaggtggcacacttncaactgctaaggaagctcaagccattgctgatgatgtnttctc

SEQ ID NO: 268443 - DNA, 280 bp, Glycine max
attaagttcattttcctccctttcactctcgtagacatcacaaaccttccctccattcatgccacgcatggctgccatgaactctagcgtattggcctgtagctatgccatatcaggtgcagcgtgttcggagctcaatgggaaggtcacttccgtggcctatgttgcatgctctggctacaagttgccattgatcaaagctgaggccagagttcctaaagccaaagaatctgaaggaggaaggagaggtgcccttgttctcttggcagctacccttttc

SEQ ID NO: 268444 - DNA, 292 bp, Glycine max
cccacgcgtccgcccacgcgtccgcaggatctagaaaagccattccatcttcaccaccaagaagaaaataatggcaatggccagtgcaacaactccagccacaatcactgttgtggccatctccagtgttgccagcacaaaaagaagggagaggaatgtgcacttcatcagaggtttgaattcctttggagggttgaaggctcagaacagtgtgacatcactaggtcttcctgtgtgcactgaacagtgttttgcaaaggtggtgagctcattgaaatatcaatcatcatct

SEQ ID NO: 268445 - DNA, 413 bp, Glycine max
agaacacgtacttgagaactaacaaggagtttcatttggccatctcaatgatactcatccggagcggttactatcgaagaccggtgcaacaactgcagccacaatcactgttgtggccatatgcagagttgccagcacaaaaagaaggtagcggaatgtgcacttcatcagaggtttgaattcctttggagggttgaaggctcacaacagtgtgacatcactaggtcttcctgtgtgcactgaacagtgttttgcaaaggtggtgagctcattgaaatatcaatcatcatctaaggtcagatgtggaggtgctgcctcttcaacatgcaatgctgctggtgagatttttcagattgcagccatcatgaatggtctcgtgcttgttggggtaacaattggatttgtccttcttc

SEQ ID NO: 268446 - DNA, 453 bp, Glycine max
  unsure (1)..(453): unsure at all n locations
ctccttcttctctaaacactcatctatgactacctttccctcccctccttcaccatcttcgtcttcttcaattccttctccaagatctagcatgttttactatgctggaagtgaagatcactctgaggagcctcacttcctccaagcttgttttctttgcagaaaaccactcggccaaaaccgtgacatcttcatgtacagagggaacacaccattttgtagcaaagagtgcagacaggaacaaatagagattgatgagtcaaaggagaaaagttggaagctttcttccaaaaggggtgtgagacaatcagagaccaatcaaaattccacacccaataaggctgtaagaacaggcacagttgcagtggcctaatcaaagaataatccatgacatgatgatgagtgnngaaagtgcccaatttttgaaggaaaaaaagatggaatattggaatg

SEQ ID NO: 268447 - DNA, 343 bp, Glycine max
cccacgcgtccgcccacgcgtccgcccacgcgtccgaccaggtctaaggcggaaatatccatttcatgaatatgtatctgctgtacttctggtgattgggttgatcctattcacactagcagacgcacaaacatcacctaatttcagtgccattggtgttcttatgatatctggggctttgatcatggactcctttttgggaaatctgcaagaagcaatctttacaatgaaccctcagaccacacagatggaaatgcttttctgctctactgtggtgggattgcctttcttgattcctcccatgcttttcacaagagagttattcaaagcatggacatcatgc

SEQ ID NO: 268448 - DNA, 266 bp, Glycine max
gttttaatggagataaccaaacttggcaagagatttcaaggtaaggtagctattgtgacagcttccacccttggaattggctttagcatagcagagaggcttggcttggagggtgcatctgttgtcatctcttctcgcaaacagcaaaatgttgatgaggctgctggtaaactgagagctaaaggaatcgaagtattggcggttgtttgccacgtttcaaatgcccaacaaaggaaaaatttgatagacaaaactttacagaagta

SEQ ID NO: 268449 - DNA, 386 bp, Glycine max
cccatgcaaggagtcgaagcagttcgcgaagcgtgagaagcagtcgataaagaagctggagtcgtcgctgaagctctacgaggcgggcagcgcccccgcactggccattaaggcgagcgtggagaagacgaagaggaggttcgacaactacgcgaagcaggggttgctgtgcggcggcgatgggttgccgcacctgatcgtgagcggagaccagaggcactggggtgagttcatcacacccggaatactattcctgtacatctcgggatggatcggctgggtgggtcggagctacctgattgcgatcagggacgagaagaaacccaccatgaaagagatcatcatcgatgttcctctggcttctcgcttgctctttcaggggtttc

SEQ ID NO: 268450 - DNA, 323 bp, Glycine max
  unsure (1)..(323): unsure at all n locations
agagtttgttgtgagctataagctagtttatcgtgaggagaatatgaagttgtttgttttctttgttgctgcagtagttttggtagcatggccatgccatggcgcaggctaccaaaggttccctctccgaatgaaaactggctatggtgagcgttcttcggaggtaaaatgcgcaagttttaggcttgctgtggaagcacacaacatccgagcctttaaaaccattcctgaagagtgcgttgaaccaacanaggactacattaatggcgaacaatttagatcagactctaaaacagttaaccaacaagctttctttatgctag

SEQ ID NO: 268451 - DNA, 379 bp, Glycine max
cttttctccaaaaccatccaacatgggaaacagaatattattccattttttcacttccacggtttggtgcattcattccccattttcaactatggcctcttcagctcaattttccaccactttggtcgtactatgtctcttccaattcctagcaggttcatattcaacgacattcacaattgtgaacaagtgcagctacacagtttggcccggcattttaaccggcgccggaacctcaccgctctccaccaccggcttcgtcttacaacccggcgagtccaacgtgatcaccgtgccggccgcctggtccggccgcctctgggggcggaccgtctgcacccaagacgccaccggaaaattctcctgcgttacaagcgac

SEQ ID NO: 268452 - DNA, 379 bp, Glycine max
cgcgtcctcggtggtggaagttgcttgaacgctggcttttacactcgcgctagccctcagtgatgtaagggaagcggcgtgggatggaagggtagtgaatgagtcgtacgaatgggtggagaagatagtggcatttgagccacaattgaagcagtggcagtcatctgtgcgggatggactaatagagataggtgtggtgcctaataatggcttaacttatgaccataatggtgggaactaaggtagggggaacatctttgaccagaatggcttcaagcacactggtggtgaacctctggaatatgccaaacccaatggaattaacctggttttggatgccactgtgcataggatcttggttagagtcaaagatagatca

SEQ ID NO: 268453 - DNA, 443 bp, Glycine max
cccacgcgtccggttcctcccataccaggggccttcctttgcattgttggagatgttggacatgtttggagcaatggaaaattttggaatgccagacatcgtgtaatatgcaaggaaacgggtactcgttattcatttggtgcatttatgttatcaccaagggatggtaatgttgaggccccaaaaaaaattggtggaagttgaccatgtacaacgctatcgaccatttaagtacgaagatttgagggatttcagaatcaccacaggaaagagggatggcgaagtccttgatcaatatcgcatttgttagtcattttatgcatcgaaatacatcgccaatagaactttattttgaaaaataagttggcgataaaataaatgttgcatccattctaaataatttaaatagtttggtgtccttggtcgttcatgaatcctaattc

SEQ ID NO: 268454 - DNA, 285 bp, Glycine max
atcttccttgtcactgcccgtgtgtcgccgtcatggccaccgtcaccacccaagcctccggcgcaattttccggccatgtacctcgaaatcgaggtttttgaccggctcttccggtaaacttaaccgggaagtgactatgcggccaatggggtgccctacttctgcctctttcaaggttgaagccaagaagggagagtggttacctggcttggccgtcctaacctaacttaaatggcactcttcctggtgacaatggatatgaccctctggggctagctgaggac

SEQ ID NO: 268455 - DNA, 452 bp, Glycine max
ggaggggcctcattctgattttgctggaccaacttcgggaagcactgcctgtgttgccgggattagaaacaaccaacttgttgttgcaaatgctggtgattcgcgttgtgtgatatctcggaagggccaggcatacaatttgtctagagaccacaaacctgatcttgagattgagaaggacagaatcttaaaagctggtggttttattcatgcaggacgagttaatggaagtttaaatcttgcaagagctattggtgacatggaatttaaacagaataagtttcttcctgctgaaaaacaaattgtaactgccaatccagacataaacactgttgagctttgtgacgaagatgaatttgtggtgttagcttgtgatggcatatgggattgcatgtcaagtcaacaactggtagattttgttcgtgaacaattgcacttgaaaacgaaacttt

SEQ ID NO: 268456 - DNA, 321 bp, Glycine max
gtattctgtctcattataattagctctcagatagtgttctagtgcatggtcacacttcaagaggtacatttcgtcggatactttgtatgtaaaactacaaaaaaggaagtatacgttgttttatcccatgttaaaaaaaaaaaaaaaaaaaaaaaaaaaaaaaaaaaaaaaaaaaaaaaaaaaaaaaaaaaaaaaaaaaaaaaaaaaaaaaaaaaaagaaagaaacaataaaaaggggtggccgttttaaaggatccaggtttacgtacgcgtgcttgcaacgtcttagctcttgtatagggtaacctaacttcaattaat

SEQ ID NO: 268457 - DNA, 205 bp, Glycine max
tcgcaaactcacactattataatttactttttattttacatggctgaacaatccttcatgatgggctagctttatgacgtgcatggatgccttattagtctgatcattaacacatttgagaagaaaggtttctacttgaaaggtttgaatcttgctactgaagaccgtccttatactcataatcactatacttatatatctgcca

SEQ ID NO: 268458 - DNA, 427 bp, Glycine max
aaagttacaagtaaagtaaattaagaagatcattaatggcttctcttgcaaccttagctgctgtgcaaccagctgcgctcaatggccttgctggaagttccctctctggaactaagctctctttcaagccctctcgccacactgtcaaatccaagaacttcaggagtggtgccgtggtagcaaagtatggtgacaagagtgtgtactttgatttggaggatctggacaaccctcttcagagcaagttcttcgagacatttgctgctccattcacaaagaggggattgttactcaagtttctgatattgggaggtggttccacccttgcatacttcagtgcaacagcctcaagtgacattctaccaatcaagaagggaccacaacttccaccaaagcttggtcctcgtggcaagatctaatttgattt

SEQ ID NO: 268459 - DNA, 356 bp, Glycine max
gaaaaaagcctttcatagtgagatagccctataaatgtttcgtgaatctttgcttgctctgtttctactttctgccttctcctgctcactcctacctttaaccactgctcaagattacgttctcgacacggacggtcacgcggttgaaaatcacggtacatactatttgttgccagcgaaatcaggaagcggcggtggtggaatagaggtagccgcaactggcaaagaaagttgcgctctcactgtagtgcaatctctgaacgaggactccatggggctaccattgaagctttcaagcccatccatcactacgtctcacttcaccgaatacacttcggtgagcatcgagttcactt

SEQ ID NO: 268460 - DNA, 319 bp, Glycine max
  unsure (1)..(319): unsure at all n locations
gttgttgttaactgaacttttctgagcaagaatgtctgggcgtggaaagggaggcaagggtttgggaaagggaggagcgaaacgacaccgtaaggtgctgcgcgataacaatcagagcagcagccgccgacgagaccacagaggcaccagcaaaagtagaggctgcaccggtcgggttcaccccaccagaacttgacccaaacaccccttccccgatcttcggnggcagcaccggcgggctcctgcgcaaggcacaggtggaggagttttatgtcattacgtgggactcacccaaagaacagatctttgaaatggccaa

SEQ ID NO: 268461 - DNA, 411 bp, Glycine max
aggacttcctgaaggcacaaatagccaatcattggttaaggaggccatccatgttataagctgtggctatgaagagaagactgaatggggcaaagagattgggtggaatgctaataagactctgtggagaggccatgttgatgtcccaatgataagagttaattgcacttgtgtgcatgcttttattttcttactgctattgagtggtttgccttaattagaagagttatctgtgtacatagtcttaaaagaggaaagttgggtctgattggaatgtattcatttgatgatacaacaaaaccatatattgtagtatagccattgtcattgtttgggaaaacatgttctgtgttttgtgctactaagatgattttcatctattgagaataggatatatatttttgccacttc

SEQ ID NO: 268462 - DNA, 406 bp, Glycine max
ccaaaatgactcaagcccagattcaaccagttaaacttggaacccaaggctttgaggtttgaaaattgggattcggatgtatgggccttactggagcgtacaatgaccctctccaagaacaggatggcatatctgttatcaagtatgcgttcagtaagggaatcacattttttgatactgcggatgtttatggagccaatgctaatgaacttttggttggaaaggctttgaagcagctgcccagagaaaagattcagatagccacaaaatttggtattgctttacgaagttttcctgatttgaagatcaagggttcgcctgaatatgtgcgatcatgctgtgaagctagctttgagcgtcctgatgctgaatacattgatctctattatcagcacagagtggacac

SEQ ID NO: 268463 - DNA, 432 bp, Glycine max
cccacgcgtccgagtttttgtgccctttccttcttcttacaatcagaaactctgaatcagacagcgtcgggtttgggaattaactccgtccgacaccgttcacggcgactccgggcaccgttgggtttcaactgcttcttgtttttgaaccggtgcagtagagagaggcatgggtgacaaagaggaagagtcggcaatgccaagggacgcaaagattgtgaagtctttgctgaaatcaatgggcgtggaggactacgaacctcgcgtcattcacaagtttcttgagctttggtatcggttcgtcgtcgatgtcttaaccgacgcacaagtctattcagagcatgctggaaaacctgcaattgactgtgacgacgttaagcttgcgattcagtccaaggtcaacttcagcttctcgcaaccaccccctcgtga

SEQ ID NO: 268464 - DNA, 278 bp, Glycine max
  unsure (1)..(278): unsure at all n locations
accgacgcacgcgtccgccaacacgaccgacaaccccaagtttgttctaaagaacacgcccaagagggncagggggagttgaaagaaaagcctggggggcaaaagatgcacacttgtgaagagatgattgaagcctcggccaccctcatatggatcgcttgaggccttcatgcacctgttaactttggacagaatccatatggaggcttaatcttgaacaggccaaccattagcaggagattcatgcctgagaaagggtctgctgagtatgctgcttt

SEQ ID NO: 268465 - DNA, 237 bp, Glycine max
catagatacataatcttcaagatcgatgagaagtcaaagcttgtcaccgtcggtgacgaggctgatccctgcgagagctattgagatctcaccgtcttcttgcccgacgatgattgcagatatgccgcattcgactttgatttcaccaccgtcgattactgccgcatgagcacgaacttcttcattgcatggtctgcaacagcattcaggataagagcaaagattctctacgcaaca

SEQ ID NO: 268466 - DNA, 427 bp, Glycine max
  unsure (1)..(427): unsure at all n locations
gttggtcgagataactataaacagagtgttgtttatgaacgtccttgttttcttcgttgcggcgaattttggtagcatggcaatgccatgcgtacgatatgttccctctccgaatgaacactggctatggtgcccgtactccggaggtgaaatgcgcaagttggaggcttgctgcggaagcacacaacatctttggctttgagaccattcctgaagagtgcggtgaatcaacaaaggaatacatccatggcgaacaatatagatcagactccaaaacagttaaccaacaagcttacttttatgccagagacctcgaagtccatcccaaggacacatttgtgttcagtatagatggcaccgtactctctaatatttcatactacaaanaacatggatatggggtggagaaatttaactcgaccttgta

SEQ ID NO: 268467 - DNA, 309 bp, Glycine max
taactgtgacgtcaaaagcagcaggggaggtttaatgctcagaactctacatcttcaagtggacatcactcttgatccctccaatgaccctactaatcatgaatattgttggggtgggagccggccacttttattccatgcaaccaggaaacaaatcatggggacctctcttggctagattgttcttagcattgaggctcatcctacatctttacccctacttgaaggggatgcttggaaaacacgatagaatgccaaccattatattaggttggtcaatccttctggcctccatcttgactctcatgt

SEQ ID NO: 268468 - DNA, 404 bp, Glycine max
cccacgcgtccgcccacgcgtcctttccattcgtccggggatcgatctcaaggccggagggaaaagcaaaaaaaccaaaagaacagcacccaagtccaatgatatctatcttaagctcttggtcaagctttatcgcttccttgttcggagaactggcagcaaattcaatgccgttatactcaagagattgttcatgagcaaggttaacaagcccccattgtctttgtcaaggttgattaagtataccaaggggaaggaagataagattgctgtggtggtgggcaatataaccgatgatattcgtgtttatgaagttccagccttaaaggtcacagcactcaggtttacagagactgctcgggcaagaattgagaaggcaggtggggaatgcttgacgtttgatc

SEQ ID NO: 268469 - DNA, 426 bp, Glycine max
gaaaaacaagtagttgagaactaataagatggaaatggcttcctcaatgatctcctgccgagctgttaccaccgtcaaccgtgccggtgccggcatggttgctccattcaccggcctcaaatccatggctggcttccccacgaggaagaccaacaatgacattacctccattgctagcaacggtggaagagtacaatgcatgcaggtgtggccaccaattggcaagaagaagttcgagactctttcctacttgccagacctcgatgatgcccaattggcaaaggaagtcgaataccttctaaggaaaggatggattccttgcttggaattcgagttggagcacggtttcgtgtaccgtgagcacaacaggtcacctggatactatgatggacgctactggaccatgtggaagctgcctatgtttgg

SEQ ID NO: 268470 - DNA, 427 bp, Glycine max
gaacatcaccttgtcgataacgatttatattgacacggcttccttaaagatcatcgctggacatcataccaccgtatagcgcacctttgcctccacataagcaacattaaccactctcaaatgcatgtgctggcttccccacgaggaagaccaacaatgacattacctccattgctagcaacggtggaagagtacaatgcatgcaggtgtggccaccaattggcaagaagaagttcgagactctttcctacttgccagacctcgatgatgcccaattggcaaaggaagtcgaataccttctaaggaaaggatggattccttgcttggaattcgagttggagcacggtttcgtgtaccgtgagcacaacaggtcacctggatactatgatggacgctactggaccatgtggaagctgcctatgtttgg

SEQ ID NO: 268471 - DNA, 166 bp, Glycine max
tttatgtatagtagtggggaattatggtgtcaaaaaataaatccgcttggtttcagactgggtacaactcaaagtcatgattctatttggtttgctcaaccaacaaattattccgagaatatacaagaagataaaaaaatacgagattgtatcaaacattatatac

SEQ ID NO: 268472 - DNA, 346 bp, Glycine max
  unsure (1)..(346): unsure at all n locations
ccacgcgttcgncaaagcacaaagcatgctcatccttgcgttaaaaaatggcagcagcgtgcttccatggctctctcatccccatccttggctggcaaggccgtgaagctgggcccatcagccccagaagtgggaagggtgagcatgaggaagaccgccaccaagcacgtctcctcaagaagcccatggtacggcccacaccgagtcaagtacttgggcccattctctggcgagcccccgtcctacctaaccggtgagttcccaggcgactacggctgggacactgctgggctttccgcagacccagaaaccttcgccaagaaccgtgaactcgaagtgatccact

SEQ ID NO: 268473 - DNA, 246 bp, Glycine max
  unsure (1)..(246): unsure at all n locations
gcacccctcacattgaagtgaccttcgaagttgatgccaacggcattctaaatgtgaaggcagaagacaagggaactggtacatcagataagatcaccattacaaacgaaaagggacctcttatccaagaagaaattgatagaatggctcgtgaagcataacagtttgccgacggagacaagaaggtgaaggagaggatcgatgctcgcaacantcttgaaacctacgtatacaacatgaagaatc

SEQ ID NO: 268474 - DNA, 406 bp, Glycine max
cccacgcgtccgctagtttatcgtgtaggagaatatgaagttgtttgttttctttggtgcggcagtagttttggtagcatggccatgccatggcgcaggctaccaaaggttccctctccgaatgaaaactggctatggtgagcgttcttcggaggtaaaatgcgcaagttttaggcttgctgtggaagcacacaacatccgagcctttaaaaccattcctgaagagtgcgttgaaccaacaaaggactacattaatggcgaacaatttagatcagactctaaaacagttaaccaacaagctttcttttatgctagtgaacgcgaagtccatcacaacgacatatttatattcggcatagataacaccgtactctctaatatcccatactatgaaaaacatggatat

SEQ ID NO: 268475 - DNA, 426 bp, Glycine max
gttacagccgcagcttgaaacagatcagtgcgaccttgaagagctatggctgtcggaaagaataagaggatttccaagggaaagaagggtggcaagaagaaagccgctgatccctttgccaagaaagactggtacgatatcaaggccccttccctcttccaggtcaagaatattggcaaaaccctcgtctctcgtacccagggaaccaagattgcatccgaaggactcaaacatcgggtttttgaggtctcattggctgatctccaaggggatgaagaccactccttcaagaagattcgtttgagagctgaggacgttcaagggaagaatgttctgacaaacttctggggaatggatttcacaactgacaagttgaggtctttggtgcgaaaatggcaaactttaattgaagctcatgtggatgtt

SEQ ID NO: 268476 - DNA, 420 bp, Glycine max
cccacgcgtccgagaagactcctcaatcatccatagacatggccaccgtcacttctgcagcagtttctattccctcattcactggcctcaaggcaagcgcaggcaaagtgagtgccgccgcagttaaagtctcagctccccaagccacaaggttctgcggcatcaaggcttccctcaaagacgttggagtcgctgttgtggccactgctgcgagcgcagttctagctagcaacgccatggccattgaagtgttactgggcactgatgacgggtctctggttttctctcccaactctttctccgtggcccctggggaaaagatcgtgttcaagaacaacgcacgtttcccccacaacgttgtgttcgacgaggacgagattcctagcggcgtggatgcagggaaaatctccatgagcgaag

SEQ ID NO: 268477 - DNA, 394 bp, Glycine max
  unsure (1)..(394): unsure at all n locations
tgaagatgggtaggatcgcgtactggctgtactatattgtggtcactgttctcgccggggtgggaatcgcgcctaaggggaccgtcnatgttcatgagatgctcttcaagaccgctgactatttgaccagagggggtgactctgggattttctctccgatgcacatgatcctctgcagaaagccccatgacaaggacgaacaaaactctggttagggtttcgtttcatttggaaattggaaaacaaaaaccaccaccgccaccttgtttctttccggtactcttttttctcattattatcctgggtttaacttgttgttattagttattattactatgaacttggtgtaatttggattttgatcttttcaattttaattttagtttgcaatgtt

SEQ ID NO: 268478 - DNA, 424 bp, Glycine max
ggaagagagaaaaaccatggcaataacactcttcaatggcttcaagatgcctatcattggagtgggcgtgtggcgcatggaaggaaacgaaatcagggacctaattctcaattccatcaaaattggttatcgccattttgattgtgctgctgactacaaaaacgaagcagaagttggagatgcgcttaaggaggcttttgatagtggccttgtgaagagagaggatctcttcattaccaccaagctttggaattctgatcaaggccacgttcttgaagcgtgtaaagacagtctcaagaagcttcagttaacgtatctagatttatatcttgttcactttcctgttgccgtaaagcatactggggttggtaatacttctagtcctttgggtgatgatggggtcctggacatagataccaccata

SEQ ID NO: 268479 - DNA, 422 bp, Glycine max
cccacgcgtccgctttttctacttaccttttctcttaatccaaatacgatggcaggcagggcaaccacaaccctctcttcaaaccccaaactctcattcttcaacggaaagcccgtcacatattcttcccgcgtcgcgcccaccaccaaattatcctcatccaaacaaggcacaatttccatgtccctaaccccacccccctacgacctccagtccttcaaattccagcccatcaaaaaatccatcgtgtcacgggaaatgacgcgccgctacatgaccgacatgataacctacgccgacaccgacgtcgtaatcgtcggagccggttcggccgggctctcctgcgcgtacgagctcagcaagaaccccgccgtgagcgtggccatagtcgagcagtcagtgagccccggcggcggcgcgtg

SEQ ID NO: 268480 - DNA, 394 bp, Glycine max
caacattggggaagtttcaagtgtttgtttcagtccttgcctcaagaagaacatagccgggggatatgtgaaatcaggattgcacaaggcaggcaccaaagtaaagattattattcgaggaaagtctaatgaaggagttgttacaaagatgccatttgtaccaacaaaatactataagccatcctaatttactttgaggtttcaccttgaacctttgacctttcctaatactccctctaaaccagttttcttataatctggaagttgtagtgaatatctatgccattgtcctactcctacccatatcaagtacaaggaagacgccttgcatcaataactcaattttcattcaaatatgtatgatagttgagagaaatcttgaaatattaaacaa

SEQ ID NO: 268481 - DNA, 317 bp, Glycine max
cccacgcgtccgggccaattcctggccttaatacaaaaaccacttcgtttttagatccagatggatggaaaactgtcttggttgacaacgttgatttcttggaagaactgaagtgaagagcaagctttatatgaaataagtagtcctgctgcttttgtatgaataagttgtctcgcattttatcattgtgcgttttgtatcagtaccagtcatcaacttgttttcttgcttttatgggttcttttgttgacttaaaaccgcaattgaaacctcattctgcatgctacctatgattaatctactagtttatcataaaa

SEQ ID NO: 268482 - DNA, 403 bp, Glycine max
ctcattcacacattcacagttatactctctctctctttgtcgcttggatcactgatctgatggggaattttcagatatgtcgacatctgataagccagaagtggtggaaaggggtagcaaggatgaaaaacacaaggaagatgatcaagaggaggggaagggtggattcattgagaaggtgaaggatttcattcatgacattggtgagaagattgaggaagctattgggtttgggaagccaactgctgacgttactgcgattcacattccatcgattaatcttcacaaggcacatcttgttgttgatgtgctcatcaaaaacccgaatccggtgccaatccctctgattgacatagattacttggttgacagtgatgaaaggaaactagtttctggattgata

SEQ ID NO: 268483 - DNA, 426 bp, Glycine max
cgcttgagctctgcgagatcttgattcgtcgatttgaaaagatgagtaagcttcagagtgatgctttgcgtgaagccatctcaggaatcatggccgattccaaggagaagaatcgcaaatttgtggagaccatcgaactccaaatcggtttgaagaactacgatccacagaaggacaagcgtttcagtggctccgtcaagttgccccacatccctcgccccaagatgaaaatttgcatgcttggtgatgctcagcatgttgaagaggcagagaagataggactggactggatggatgtagaagccttgaaaaagctaaacaaaaataagaagttggtgaagaagctagctaaaaaataccatgcttttttagcatctgaagcagtcattaagcagattcctcgtcttttgggtcctggtctcaaca

SEQ ID NO: 268484 - DNA, 319 bp, Glycine max
cccacgcgttcgacttaaactacattctatttgtttaagctttttgagactacaggaggctgtttttatggattccgttttacgacttaaatggaaattcatggatgagaactaatgaataatgctatacgtattgtattgctatgttgtacgatgaactacaatccaactaaggacatgcggttcactggctccgtctatttgccccacatccctggtcccatgatgaaaatctgcatgcttgtagatgctaagcatgtagaataggcagagaatataggactggactggatcgatctagatgccttgacaaaactaa

SEQ ID NO: 268485 - DNA, 441 bp, Glycine max
attcccggtcgaccccgcgtccgcccacgcgtccgaatttagccacttttatgtctaatatctccgaattccaagcgccgggggataggttctcccaccctaaccaagccagatcccgttttcaattccttctcagtttccttttctgtgaaaaaacatgttgagggttgcacctagaaggctctcttcttctctctcatcttattctccgttgcggcccaatcacgccgctttcgcttttctctctctaaacgacgtcatcatcgatgaccgcagatctgctacttcctcccatacccttcttcccttcagaggttatgctactgaatccctgatccacacaaaagaaaacagcattacttctgagattccgccaactgttactgctgttaagaaccctacttctaagattgtctatgatgatcacaaccatgaaagatt

SEQ ID NO: 268486 - DNA, 424 bp, Glycine max
cccacgcgtccgcccacgcgtccgtttttttcctttctctctctacaaagagtgcgggggagagtgagagagagagagagaggcattcggaactttggatatctatagcgaaagcgtgacaccaccaaaaaccgaactgttcccagatctctctctcactcttccaacaatcgaaatccaaaaccctaccgacaccacactcaatcgaaattcttcattctcttctcatcgatggggcagaagtctatgatctacgcgttcgtgtcgcggggaacagtgattctcgcggagtacaccgaattcagcggaaacttcaactccatcgacttccagtgccttcataagctccctgccaccaacaacaagttcacctacaattgcgacacacacaccttcaattacctcgacgacaatggctacacat

SEQ ID NO: 268487 - DNA, 422 bp, Glycine max
cccacgcgtccgcccacgcgtccgttcttgcgtccgagaaaatgaaggccatagtgatggcgaggccaggaggtcccgaagtgctccaacttgaggaagtggaagatccccaagtcggagacgacgagcttctcatcggagtccacgccacttcccttaacagagccgatacctttcagaggaaaggctcctaccctccccctaagggcgccagcccttacctcggtctcgaatgttccggaactgtcctttccctgggtaaaaacgtttccagctggaaaatcggtgatcaggtgtgtgctcttctcgccggaggcggatatgccgagaaagttgcagttccggtaggacaagttcttccggttccagccggtgtttctctcacggatgcagctagttttcctgaggttgcttgcactgtc

SEQ ID NO: 268488 - DNA, 426 bp, Glycine max
  unsure (1)..(426): unsure at all n locations
cccacgcgtncgcaaatagccatataattcttttttatttgaaataatgtccgggatcggccggaagattgaggagaccctccatgtgggagggcacaagaaagaggagcacaaaggagaacaccatggtgagcacaaaggtgaacacaaaggagaacaccatggtgagcacaaaggtgaacacaaaggagaacaacaccatggggagcacaaggagggacttgtggataagatcaaggacaagatccatggtgatggccatgacaagggtgagaaaaagaagaagaaggacaagaagaagaaggagcatggacatgaccatcatggtcatagcagcagcagtgacagtgattagatcttatatgttaagcaggtgtacggtacgatggtagtgaggagccaaaaatcctcttcctgctttatgat

SEQ ID NO: 268489 - DNA, 418 bp, Glycine max
ccacgcgtccggtaattctaattacttgttcctgaatcattttatccgctagacgtcgtacagaatgcagaattctaatttgtttaaatccaaataatataaatagtatgcatagaaacacaatattttataatccaaataaagtccaaaatggttttccacttttgactaaaaaaagaaaatattttgagaaagataaaaaaaaactaatgaatttcaaaatttttctttggccaaaatatcgattagaagatttagcttgtataaatcgatattggtttaatacccataatggaagccgcttcagtatagtaaggatacatatgtatccgcgaatgaaaattcgttaatccaaatttgtcttctatttaccatatttatatggtaaatagaagacaaattaatatctatatctatc

SEQ ID NO: 268490 - DNA, 424 bp, Glycine max
  unsure (1)..(424): unsure at all n locations
cccacgcgtccgaaacagtgtgattaatttgaaggtccttgttttcttcgttgctgacgggtttggtagcatggcaatgccatgcgtacgatatgttccctctccgaatgaacactggctatggtgcccgtactccggaggtgaaatgcgcaagttggaggcttgctgtggaagcacacaacatctttggctttgagaccattcctgaagagtgcgttgaagcaacaaaggaatacatccatggcgaacaatatagatcagactccaaaacagttaaccaacaagcttacttttatgccagagacctcgaagtccatcccaaggacacatttgtgttcagtatagatggcaccgtactctctaatattccatactacanaaaacatggatatggggtggagaaatttaactcgaccttgtatga

SEQ ID NO: 268491 - DNA, 429 bp, Glycine max
  unsure (1)..(429): unsure at all n locations
agctagttcacagcttcagttcggttttgttgatcctgngaacttatggctgacggggtgggggtgttggatacatgggccagcatgtttgggatgagggttaggattgcattagctgaaaaaggtgttgagtatgaatacaaggaagaaaatctcaggaacaagagtcctttgcttttgcaaatgaacccaattcacaagaaaattccagttctgatccataatggcaaaccaatttgtgaatctgcaattatagtgcagtacattgatgaggtctggaatgataaagctccaatcttgccctctgacccttatgagagagctcaagccagattctgggtagattacattgacaaaaaggtgtatgacacttggaggaaaatgtggctttctaaaggagaggagcatgaggcagggaagaaggagttt

SEQ ID NO: 268492 - DNA, 427 bp, Glycine max
atcacccaccccacatctaaagccacttttaagtccaccacacacaacactttgcctacggaccggctacttactactatagtgtctgattcacaggccagagggcaaagattttgagcacaatggcctcgacacaatgctttttgcaccaccacgccctcaccactccagctagagcttcaacacagcgcctagttgtgagcaccaaaccaaaccacattgtttgcaaggcagcacagaagcaggttactgtccaagagggtgaggacactactactggccttgtctctcgcaggttggccctcactgtgctcattggtgctgctgctgttggctctaaggtggcacctgctgatgcagcctatggagaagctgccaatgtgtttggaaaaccaaagacaaacacagacttcctttcatacaatgg

SEQ ID NO: 268493 - DNA, 244 bp, Glycine max
aggagacacaccttcagcagcagcagctttggttctcaaaaccgaactatgccgattgagcggtgccaagatctacccagggaaaggcatcacatttgttcgtggtgattctcacgttttcctgtttgctaactcgaaatgtaagaggtatttccacaacaggttgaagccatcaaagctcacctggactgcaatgtacagaaaagcacacaagaaggacattgctcaagaagctgtgaagaaa

SEQ ID NO: 268494 - DNA, 340 bp, Glycine max
caccctacaatcatggacaacgttgctggtcagctacatctccgttctagtctttcatctggtattagaagttatgatggagcctaccgccacccagctatgtaccaaagaccctgttttgggaattactccaatgctgcattgcagattcctgtgatgcccacatgcaaagctaccatggatttgtctgctactgcaacatctgcctcacccgtctatgttgctgctccagcagagaaaggccattttcttttagactttctcatggcacgtgtttcagcatctgtctccaaaactgctgctgctcccattgaacctgttaagcttttgatccagaacc

SEQ ID NO: 268495 - DNA, 398 bp, Glycine max
gaaacacgcacatgtttgaaagcttttttagcccatggtgcagttcatccgccaggaaggtgatgaaaaggccaacgagatctctgtctactccgaaaaggaattcactatcaagaagctacacttcgtctaagccgacaataaaaacatcatgctagaatacgaacgcagagatccccaaattgaaattcccaagaagattgagtactcgatgcagctaaatgcttgtcgaattaaagttcttcaagctcaatatgacatgatcagatacatgaaagaagctgcattcaacgaactgcagaatgtgagtcatcatatgcatgcgaatctactgagtcatcatcatcatgagtacagaaaccttctgaaagatcttattgttcattgtttgcttagac

SEQ ID NO: 268496 - DNA, 377 bp, Glycine max
  unsure (1)..(377): unsure at all n locations
ccccacgcgtccgaaaataaaaaaaaaatttttttttaaaaaaaaaaaaaaaaaaaaaaggggggggttatttaaaaaaaaaaaaataataaaatatatttttntataantgtgnnantttttaaaaaaaataaaattaaaataaaaattgggccccccccttttaaaaatcccaattttcctcccccttccttccaccgttttactttttttttaggccccccaaattaaattcccccccccccctttttccccccccttccctgaaaaacccctcccttcccccactttattccctttcaaaccatcccccttttccccccttgccttattaccaaaaagcccccccccatcccccttccccaccatttcccccc

SEQ ID NO: 268497 - DNA, 431 bp, Glycine max
caaagccatggccacctccaacttctctattgttctctccgtctccctagccttcttttgggtgctacttaccaaggcacactcgaccgataccgtttctttcaccttcaacaagttcaacccagtccaaccaaacattatgctccaaaaagatgctagtatttcatcctctggggtgttacaactcaccaaagttggcagcaacggcgtgcccacctcgggatctctcggtcgtgccctttacgctgccccaatccagatttgggacagcgaaaccggcaaggtagccagctgggctacatcctttaaattcaacattttcgcacccaacaaatcaaactcagctgacgggcttgccttcttcttggcacccgtcgggtctcagccccaatccgacgatggatttcttggtcttttcaacagtcccttaa

SEQ ID NO: 268498 - DNA, 412 bp, Glycine max
  unsure (1)..(412): unsure at all n locations
tgttgatcgagataactagaaacagtgtgatgaaaatgaaggtccttgttttcttcggtgctacaattttggtagcatggcaatgccatgcgtacgatatgttccctctccgaatgaacactggctatggtgcccgtactccggaggtgaaatgcgcaagttggaggcttgctgtggaagcacacaacatctttggctttgagaccattcctgaaaagtgcgttgaaccaccaaaggattccatcctggcgaacaatatagatcagactccaaaacagttaaccaacaagcttacttttatgccagagacctcgaagtccatcccaaggacacatttgtgttcagtatagatggcaccgtactctctaaatattcatactacanaaaacatgggatatgggtggagaaatta

SEQ ID NO: 268499 - DNA, 398 bp, Glycine max
cccagacaaaaactaatgatttcattacttccctctaacacatgccttgaaacagcggagggtctcttaaacccttcaaagctaggcatctctacacaaacatgctagctcgcaccaacgaagacatcacgtaaaatacaagtgaaatgcaactgtgcacaaaacaagggtgtgagaccaacgtatttgacactataagaagctgctttgcttgaaatatcacgtttgagcacacatgaacgctatctatgccgcgtaacgatatcttacctgaacttgctaagagtgatatcatatcacgaatgatgtgcaattgaggagctcaacgctaacaacatatgcgattggttgctcacagataagctgacaagagaacagaacttaggctctacggttct

SEQ ID NO: 268500 - DNA, 424 bp, Glycine max
gttgaataccgtgttggcaagttcccgttcatggctaatagcagagctaaggcaatggacaatgctgaaggactggtgaagatattggctgaaaaggagacagacaagatattgggagtgcacattatggcacccaatgcaggagagcttattcatgaagcagcaatagcactacagtatgatgcatctagtgaggacattgcacgtgtgtgccatgcacatccaacaatgagcgaggctgtgaaagaagccgcaatggccacttatgacaagcccattcacatttaaaaggagccggttgctacttcttgttttcatttttgtccaagaattttacaatgacttggagatgatacatcctgtgttaaatttagattcaggtttttaaatgcaaattagccccttgtttacttgtttgcataat

SEQ ID NO: 268501 - DNA, 320 bp, Glycine max
aaaaaacacacatgtttgcaagctttttttgaccatgaagcagttaattcgccgggaagcttaggtaaaggacaacccgatctctggctactccgtaacggaattaatatcactacctactatcgctcgaagttcgcactaataatatcatgctggaataccaaagcagaaagcgtccagatgctattcacaagaagattgactactccatgcagcttaatgattatagaattaaagttcttcaagttctagatgccgtgatcagtactatgaaagatgctgcacttcaagaattgcagaatgtgtgttatcattggcat

SEQ ID NO: 268502 - DNA, 259 bp, Glycine max
  unsure (1)..(259): unsure at all n locations
agaggtgatttcagtgagtgatcgggttcacttgatctcatcataatcgcagcgtgatggaagaagatgccgatcagaaacatcgccgtcggaaggcctgaagaggcgactcaccccgacacgttgaaggcggctttggctgattcatctcaccttatcttcggttcgccggctcggctccggcatcgctacaacagctcccgacnacgggcttgccccctgcggcctatcttcgcttcattgccatgcattcgccctt

SEQ ID NO: 268503 - DNA, 327 bp, Glycine max
taaaaaaaaaaattagaaaacaatatagatacgatcttttatcctataattttatcaatgatgcagataagaaagactcatatatttatggatatagatccctatttcaagtaaaaaaaaaccaagtgatttcttctaattacaacacgtataaaaaagaattattggatatcatagataatctctttatcaagaattatatatcggaagatgcgattctagatatggaaaaaaatatgtatagaaagtattttgattggatgggaatcaatagagaaatactaaatcgttccatattgaattcagaattttggttctttttaaaaa

SEQ ID NO: 268504 - DNA, 354 bp, Glycine max
  unsure (1)..(354): unsure at all n locations
cacgtgtatatgctgaagaaaatggtttgtttttcatggagacctctgccaaaactgcgtccggcgtgaatgatatattctatgaaatagccaagaggttaccaagggctcagccagctcagaacccagcaggaatggttcttgttgacagacccgccgaaggaactagggctgcatcatgttgttcataagtatttgagctgtatttgcacccnccaatccttnttaataatcatgttttctttgggtggatggactacacacttgattgcactgtattgggagctccaacaagtggtatgggctgcaatttacaaaacacaacaacttgatggtgcaaaatatatcctttgg

SEQ ID NO: 268505 - DNA, 425 bp, Glycine max
  unsure (1)..(425): unsure at all n locations
gtcgaagcgaggtcgcggaggatcgtgtttaaacaagttccgcatgtcgctgggtctggcggtggcggcgacggtgaactgcgccnacaacaccggcgcgaagaacctctacatcatatcagtgaaggggatcaagggtaggctgaaccggttgccgtcagcttgcgtcggagacatggttatggccaccgtcaagaagggaaagcccgatctccgtaagaaggtgctgcccgccgtcatcgtccgccagcgcaagccttggcgccgaaaggacggtgtttacatgtacttcgaagataatgctggtgttatcgtgaatcccaagggtgaaatgaaaggttctgctatcactggtccaattgggaaggagtgtgctgatctgtggcccaggattgcaagtgctgccaatgctattgtttaagcta

SEQ ID NO: 268506 - DNA, 427 bp, Glycine max
gcttaatctctctcattccccatttcctcacctccttcaaccgctgctaaattctaggggtccgaaatggacgctggcggaaagatcaagaagggcgccggaggtagaaagggcggcggcccaaagaagaagccggtttcaaggtccgtcaaagccggtctccaattccccgtcggaagaattggccgttatttgaagaaaggaaggtacgctcagcgtgtcggtaccggtgctcccgtatacttggctgcagttctcgaatacctagctgccgaggtgcttgagttggctgggaatgccgcacgtgacaacaagaagaacaggattattccaagacacgtgcttttggcagtgaggaacgatgaagagttggggaaattgcttgctggagtgacaattgcacatggtggcgtgcttccaaacatca

SEQ ID NO: 268507 - DNA, 286 bp, Glycine max
cacgacggtcatcgagccgatcatgacgcgcgatcatacggaaaagatgctgcagggcgttggcgccaaccttaccgtcgagacggatgcggacggcgtgcgcaccatccgcctggaaggccgcggcaagctcaccggccaagtcatcgacgtgccgggcgacccgtcctcgacggccttcccgctggttgcggccctgcttgttccgggctccgacgtcaccatcctcaacgtgctgatgaaccccacccgcaccggcctcatcctgacgctgcaggaaatgggc

SEQ ID NO: 268508 - DNA, 367 bp, Glycine max
ggcaatccttgaaggcttaaaccttctttttaggctggagaaccgatatcaaaaggtggggcacacacaacacaacacaacagcgtggaacgagacaactaagtacgaaaatcgttatccgccgcaacagccactaagatgttctttgagtcttggcacgccacgtgtcagaactgccaacagatagccccatctctttctccttctccctaaacctcgaactcagcacccccatccactggtgattgtttgattgcaccttgaagaaatggaccacagcgctgatgcacatcgcacggacttgatgaccataacgcggttcgtgctgaacgagcaatccaagcaccccgagtcacgcggcgatttc

SEQ ID NO: 268509 - DNA, 435 bp, Glycine max
aagtagttgagaactaagaaggagaagcaaatggcttcctcaatgatctcttccccagctgtggccactgtcaaccgtgccggtgccggcatggttgctccattcactggcctcaagtccatggctggcttccccaccagaaagaccaacaatgacattacctccattgctagcaacggtggaagagtgcaatgcatgcaggtgtggccaccatttggcaagaagaagtttgagactctttcctacctgccagaccttgatgatgcacaattggcaaaggaagtagaataccttcttaggaagggatggattccttgcttggaattcgagttggagcacggtttcgtgtaccgtgagcacaacaggtcaccaggatactacgatggacgctactggaccatgtggaagctgcctatgtttggttgcactgatgct

SEQ ID NO: 268510 - DNA, 337 bp, Glycine max
tcgcaattctctgtgaactttctagaatctcgatcttcctttcttctctcagattccccctttgcctgcttcttcaaccccttttctttctctctctgtctttcgcactttcattctctcttaaaaatctaaatcccttttgggcttcatccttgcctctgacccaagtatggcttctaaacgcattcttaaagagctcaaaggttttcaaaagggtcctcctacctcatgcagcgcaagtcccgttgcttaaaacatgttttactggcaagcccccatcatgggacctgctgattacccatatgcaagtggtgttttcttaggttcaattcatttt

SEQ ID NO: 268511 - DNA, 305 bp, Glycine max
aacattgttgggatcattggagaccaatggagcgatctcctcggaggccacagaggcgaaagcgggacctttaagcttcctaatgccctgtactacattcagtagttccttcacctctcaacaatctagcttgctcctatctatctatatgtaataagatgcgttcaaataggggcactagcttcactttatgtcgtttcagctgtgtgtcaacaagtcatgtaagagacttcactatgttgctttctctttcgtggctttaataaattatgcgcccttgttgcaaaaataaaaacacaaatgga

SEQ ID NO: 268512 - DNA, 461 bp, Glycine max
  unsure (1)..(461): unsure at all n locations
cccacgcgtccgaccacgcgtgcgcacaaaccgaaaaggcgaaaggggttttccgagtgagatctangggttccatcgattcggagagaggatattgatagaacgacctcaacgagcaaggtcaggaggtggagtactagaacatggattcggtgccttcgaattcgcatggaaacctcgatgagcagatttctcagctcatgcagtgcaaacccttgtccgagcaagaggtaagggtcttgtgtgataaggcaaaagaaattttgatggaagagagcaatgtccagcctgtgaaaagtcctgttacaatttgtggtgatattcatgggcaattccatgatcttgcagagctttttcgcattggagggaagtgtccagatacaaattacttgcttatgggagattatgttgatcgtggctattattctgttgaaactgttacgcttttggttgcccttaaa

SEQ ID NO: 268513 - DNA, 209 bp, Glycine max
tccatccacacgtccgcacgaacattcaatgaaaaccaattttactcctctatgatctcttatacaactcatgcctatgtttacacgtgcctcggggctgaatggatgctacatatactggcctcaagctcatctatggcttcagcaatcaaatagaccaacaatgacattaccttcattgctatcatccctgagaagagatcaatgca

SEQ ID NO: 268514 - DNA, 430 bp, Glycine max
gtttctgctgtaataagaaagagaaaggcaaatggtggatttattatgagtgcaagccataatcctggcggacctgaatatgattggggtattaagtttaattacagcagcggacaacctgcaccagaatccatcactgacaagatttatggaaataccctgtcgatctctgtgataaagatagctgacattcctgatgttgacatatcaaaagttggggttacaaagtttggaagcttcagtgtggaagtaatagacccagtctctgactatctggagctattggagacagtattcgattttcagctaatcaaaggtcttctttcacgtccagattttaggtttatatttgatgccatgcatgcagttactggtgcttatgctaaacccatcttggttgataaactcggtgctagtctggattcaattt

SEQ ID NO: 268515 - DNA, 455 bp, Glycine max
  unsure (1)..(455): unsure at all n locations
agagtttgttgtgagctataagctagtttatcgtgaggagaatatgaagttgtttgttatctttgttgctgcagtagttttggtagcatggccatgccatggcgcaggctaccaaaggttccctctccgaatgaaaactggctatggtgagcgttcttcggaggtaaaatgcgcaagttttaggcttgctgtggaagcacacaacatccgagcctttaaaaccattcctgaagagtgcgttgaaccaacaaaggactacattaatggcgaacaatttagatcagactctaaaacagttaaccaacaagctttcttttatgctagtgaacgcgaagtccatcacaacgacatatttatattcggcatagataacaccgtactctctaatatcccatactatgaaaaacatggatatggggtggaggaatntaatgaaaccttatatgatgaatggg

SEQ ID NO: 268516 - DNA, 436 bp, Glycine max
gcgggcctaatccctgaaaatgcacttaatacaagtattcttgatggtctcttaagggctggggttcttggtgtgaagtcttttatgtgtccttcaggaatagatgacttccccatggctactattgaccatatcaaggcaggattgtctgtgttggcaaaatatagaaggcctatagttgtgcatgctgagattcaacaagattttgaaaatcatttggagcttaatgaggataaccttgatccacgtgcttacttgacctatctcaataccaggccaccttcatgggaggaggcagccattaaacaacttgtaagtgttacgaaggacacaagaaaaggtggccctttagaaggagcacatgttcacatcgtccacttgtctgattcaagtgcttccttacatctgattaaggaagcaaaaagtcatggtgaca

SEQ ID NO: 268517 - DNA, 423 bp, Glycine max
cacactttgtactctccgtccttccttcttcgatccagatctctctccttctccgtgaaatggcttcccttctgcaatgttccatgcccctcgtctctctttccaatcgagctctggtacccggtaccaggatctccaacccaagttcagtttccctttcaattaagggaagaagtttcccatccgttacattgcagcccagaaggcgtcggtttcagcttagatgtgcggcaaaaccagagacagtgaagaaggtgtgtgacatagtcaagaagcaattggcactgccagatgaatcagctgttactggagagtctaaatttgctgcacttggagctgattctcttgacacggttgagattgtgatgggacttgaggaggaatttggtattaccgtggaagaagaaagtgcccagagtatca

SEQ ID NO: 268518 - DNA, 425 bp, Glycine max
attaaacattcagcctgtgcgttttggaagcagagaccggattacttagagatggcccgtacaaagcaaactgctcggaagtcaactgcaggaacagctcccaagaagcagcttgcatcctaagctgcacgtaagtctgcaccagcaactgctggagtgaaaaagcctcatcgttatggatcttgaactagtgctactcgtgagactatgaaataccagaatagcactgagctcctaatcacgaagcttgctttacagaggttggttcgagaatattgccactatttcaagactgatctgcggtaacagagccatgctgagctcgcattgcaagaggctgatgaggcatgacccgtatgagctcttgaggacactaactcgtgtgccattcacgccaagcgcgtgactattatgcccaaggatat

SEQ ID NO: 268519 - DNA, 377 bp, Glycine max
ggagacgaagaagtgaagagaagagaagagaatggatttggatctgaaaagagaatatttctggaggaatggattcatacaagatcatgtccatagaggattgtagcacagccagagagtaattggagttatatctttgttgaactttcagtatctcatactcattgatcagatctttgtctttgcatataattgttcaagattgtatttccatttgtatacgaatcctatttgcaatattttatttattgttctctcatatttgtagttcatgatatttattatacttggttacttgttatgtgttcttatttttttttattgtaattctagtttatttttatttattttttttatttacatttttatctaatttt

SEQ ID NO: 268520 - DNA, 435 bp, Glycine max
gccatggccacctccaacttctctattgttctctccgtctccctagccttcttttgggtgctacttaccaaggcacactcgaccgataccgtttctttcaccttcaacaagttcaacccagtccaaccaaacattatgctccaaaaagatgctagtatttcatcctctggggtgttacaactcaccaaagttggcagcaacggcgtgcccacctcgggatctctcggtcgtgccctttacgctgccccaatccatatttgggacagcgaaaccggcaaggtagccagctgggctacatcctttaaattcaacattttcgcactcaacaaatcaaactcatctgacgggcttgccttcttcatggcacccgtcgggtctcagtcccaattcgacgatggatttcttggtctttttaacagtcccttaaaggacaag

SEQ ID NO: 268521 - DNA, 450 bp, Glycine max
cactctcccacttcaaacttcatgtctccctcttccctccacgcgctcctcatcattctcttcctaggttccgcacacgcgctcaaggtccccttccgagtcaacgatgttctccccgttctcccccacggaatctcctggccgctcctcaacaacctccacagcgccgtcgacttgctcccttccttcgtcgccgccgtccctcccgataacgattccgttcagtggagagccgcatgcttttacgataatcaagcctccctcgaattcaccgtccccggccacgacgacgccgatggcttgggcggtgccgtgctccgtctcaagacagaagctgcacacagttggacctgcatggatctgtatgtatttgcaacgccttataggattacatgggattactatgtctctgcgcgagaacatactttgaagtttgattcatgggaagat

SEQ ID NO: 268522 - DNA, 409 bp, Glycine max
ttgagaactaagaagaaggaaatggcttcctcaatgatctactccccagctgttacgaccgtcaaccgtgccggtgccggcatggttgctccattcaccggcctcaaatccatggctggcttccccacgaggaagaccaacaatgacattacctgcattgatagcaacggtggaagagtacaatgcatgcacgtgtggccaccaattggcaacaagaacttcgagactctatcctacttgccagaccttgatgatgcctaattggcataggacgtcgaataccttctaatgaaaggatggattccctgcttggaattcgagttggagcacggattcgtgtaccgtgagcacaacatgtcacctggatactatgatggacgctactggaccacgtggaagctgcctatgt

SEQ ID NO: 268523 - DNA, 455 bp, Glycine max
cagtttcaccgcacgaatatcttgttgtttggagcgatccgagaaaaactctgtaaacatgttggtttaccaggacctccttacaggtgatgagcttctctctgactccttccgttacaaggaaattgagaatggaatgctgtgggaagttgaggggaagtgggttgttaaaggagcagttgatgtagacattggtgcaaacccttctgctgagggtggaggagaagatgagggagttgatgatgcagctgttaaggttgttgacattgttgacacattcagacttcaggagcaacccgcattcgataagaagcagtttgttaccttcatgaagaggtttatcaagaatttgactcccaagctcgatgcagagcaacaggagttgtttaagaagcacatcgagggagcaactaaatacctgctctctaagattaagatttccaattttttgttgg

SEQ ID NO: 268524 - DNA, 432 bp, Glycine max
gcgattggttttgccatttcaaagcttttaaagaacattcaagtactttcaagttccgttgtggataagcaagaccaatacactgtggaaggagtgcagaatcttggagacaaagcagtgatgtgtcataggctaaatttcagaactgcagtattttactgccatgaagtccgtgaaacaacagctttcatggttccattggtggctggtgatggaaccaaaactcaggcacttgctatttgccactcaaatacttctggaatgaatcatcaaatgcttcatcaacttatgggagttgatcctggaactaaccctgtttgccatttccttggaagcaaggccattttatgggtacccaatttatctgtggacactgcctatcagaccaacattgttgcttaattagtccatgcatcttgagcaccatgagaa

SEQ ID NO: 268525 - DNA, 412 bp, Glycine max
gtcatggtgtaccctcagggcttgttgcacttccagatcaacgatggagagtctgaggctttggcttttgtgagcttcagcagtgctaaccctggcctccagattctggacttttctttgttcaagagtgatttccccactgagcttatcacgcaaaccactttcattgatgctgcagttgtcaagaagctcaagggtgttcttggagggtcaggttaattaaatataattaacgcgtgttgatgtgtttttaattaaacggagttgttcattcaaaacacaagagtctagagtgtgttgtgttgtgtcatttttggtaaaatttgttggtttggttttgtactggtttggcattagcagcatgcatgtaatttgtaaaagtatgaaggtatgggtttcttcttcgatcttt

SEQ ID NO: 268526 - DNA, 372 bp, Glycine max
cccacgcgtccggcgcctcaaagagacttgatgtgacagaattctctgggctaagatccactggatgtgtgacatatgctaacggtgctagagaatcttccttttttgatcttgtagcttcccaactcactcccaagaccaatggatcatcaactcctgtgaggggagagacagtggccaagttgaaggtggcaatcaatggtttcggacgcattggtagaaacttccttcgctgctggcacggccgaaaagactcaccccttgacgtcgttgatgtcaacgacagtggtggtgtcaagaatgctttgcacctgcttaaatatgattccatgctgggaacttttaaagcagatgtgaaaatactggacaatt

SEQ ID NO: 268527 - DNA, 453 bp, Glycine max
cccacgcgtccgctctgtatcatttcatttcgataatcatccatagttactgaagaaaatggcgaccatctccgctgctatcacaaccccatcgatcacccgcgcatgtctagtgcaaaaacgttctcttgggttctcatctcccgttcttggtttgccagcaatgggtaacgtgggaagagtgagttgctccatggaggaaaagccttcttctgtgaaggaaagcagctcaagcatgttggggatgggggcatctttgatggcagcggccagcgccgcagccatgtcaggcccagccatggccttggtggatgagagacttagcactgaaggaaccgggctacccttcggcctcagcaacaaccttctcggttggatcctgttcggcgtcttcggactcatctgggctctctattttgtctacacttcctctcttgaagaggatgaagagtc

SEQ ID NO: 268528 - DNA, 431 bp, Glycine max
agcgaacacacacattgaaacccaacatcaagaatgaagaagatgattctaaccctcttcttcgatatcagtctatctctcctctgcctctgccacgcctccgtggtggatttctgcgtagcagactacacaggccccaatggccccgcatggtactcatgcaagagcccagcaaaggtcacggtggacgacttcgtatacttcggccttggcaccgtcggctacaccttaaacatcatcaaagccgtggtgacgccggcgttcgacgcgcaattccccggcgtcaacgggcttggaatctccaatgcacgcctagacctagcagccggtggagtcatccctcttcacacgcaccctggtgcctcagagctgctggtggctgtgcacggaacaatctgcaccggctgtcttgcttcggacaacactgtgta

SEQ ID NO: 268529 - DNA, 405 bp, Glycine max
cccacgcgttcgatgctttggaacttaatggcgttaccatacatgaaacagctaaatgaggcccttgcccagagaagcctattgaaatatatgaatttgagagctgtccattttgccgaatggttagagaaattgttgccattttggatctcgatgttcatatctatccttgtccaagaaatggcccaaatttacgtcaaaaggttctagacgggtggcaaactgcagtttccctacatggttgacccaaacacaggcgcttgaatgtatgaatcagatgacataattaggtattcgggagacaaatatggcgatggaaacgttcctttatcgttatcacttggcattttaacgacactaacggctggtcttggtatgcttagtcttatttcaaaggggactact

SEQ ID NO: 268530 - DNA, 348 bp, Glycine max
cccacgcgtccgcccacgcgtccgttggaaacaacatgggaagcttgcatggaaaggacttgtgaagccagctgagattctagcgcgtagagggtttaaagtatcaccataccttcacaagcagatggaagaaacagagtcagatatattggaagacaagggtcttcgtagcatatttgccccatatggaaaactcttaaagataggtggcatttgctacaatatgaaactagccaagactctcagaacaatatcagagtctggaccaaaagccttatatgaaagattgattggtcttaatttagttaaagatgtccagaatgctggagggatatcgagcatgaaaga

SEQ ID NO: 268531 - DNA, 269 bp, Glycine max
accaagcgtccgatgcggcgataggataaggcttaacgtggagtgtaagactttggctaccaggaactcgttagacatcggctaagcactcaagctgttctagagccattcgtgatacaatctaatcgacatgtaacttggactgatcctatttaaaaactgtggcttacttactatagtaccaccatgaaaatgaattgaattgaccgctaatactcgttcattgtttacggcataacggataaaccattttggcgaggaatctacac

SEQ ID NO: 268532 - DNA, 390 bp, Glycine max
ttttcttctcgcagagcgaaatcttaatcccacacaaatggcatgctcagccacgtctgcgtctctcttctccgcaaaccccacacctctcttctctcccaaatcctccctctccctccctaacaactctctccacctcaaccctcttcccacgcgcccttctctcttcctcacgcgcccctcgcacactcgccgctccttcgtcgtcaaagcctccttcagcgagcttccgctagttggaaacaccgcaccggatttcgaagcagaggctgtgtttgaccaggagtttatcaacgtgaaactatctgattacattgggaagaaatatgttgtgctcttcttctacccgttggacttcacttttgtttgtcccacagaaatcactgcttt

SEQ ID NO: 268533 - DNA, 402 bp, Glycine max
cccacgcgtccgaaaaaaaaaaatttaaaaaaaaaaaaaaaaaaaaaaaaaacaagaaaaataaaaagatcccaaccttaaaatacgacatccattctaccatcgcaaatattctatgtgtcacttaactacaatttactctacatccatttacatcgccgtcactttacaacccctagacttacaaaactcaatcgcctctcatcatattcccctttcaccacatgccattttacccaactggcatactcccaacgaccttcccaacaattgcccttcctaaatgttgaacagtacgcaccctgaatcggaccctccatttcgcggcacattaagctcacccgctgttttacctacacacttagcaaccccttaactcaccatccttttactttcttctct

SEQ ID NO: 268534 - DNA, 390 bp, Glycine max
cccactcgtcctaaaaaaaaatatatataatacacaaaaaaaaaaactcaaacacgaaaaattaaaaaattctccacaaaccccacacctctcttctatcccaaatcctatctatccctccctaacaactctatccacctcaaccctctatccactcgcccttctctctacctcacgctcccctcacacactcgcctctccttagtcttcaaagcctccttcatctagcttccactacttgtaaacacctcaccagatttctaatcacaagctgcctttgaccaggattttatcaacgtctaactatctgattacattctcaaaaaatttgtttagctcttcttctacccgtttgacttcactttttgttgtcccacataaatcacttct

SEQ ID NO: 268535 - DNA, 469 bp, Glycine max
aaaaaaaataaaaaaaaaaaaaaaaaaaaaataatataaattcaaataaaaaataatataaaattaaaaaatgatacaaaaaaatatgtgaaatgaaaaaaaaataaaataataatatattatatttttattttttttattatttatattttctatttatctattattattatttatattatatatgctacttttttttatatttcattttttatatctctattttttttttaatatatttttttattgttttattctttttatattattttatttttatttattattcattttatttttataatctttttttttaaatatttaattttatttttatatttttttttattttattatattttatttaatttaataatcttatcttttattatattattttaatttttttaatatttctttatttttattttttttttttttatatatatttttttattatatttttttt

SEQ ID NO: 268536 - DNA, 408 bp, Glycine max
cccacgcgtccgcttcatccatagacatggccaccgtcacttctgcagccgttgcgtgttccctgattcactggcctcaaggcaagcgcaggcaaagtgagtgccgcagttaaagtctcagctccccaagccacaaggttgggcatcaaggcttcgctgaaagacgttggagtcgctgttgtggccactgccgcgagtgcagtgctggctagcaacgccatggccattgaagtgttgctgcgtggtgatgacgggtctctggctttcgttcccaacaatttctccgtggcctctggggagaagatcgtgttcaagaacaacgcatgtttcccccacaacgttgggttcgactaggaccagattcctagcggcgttgattcagggaaaatcttcatgagcgattaatac

SEQ ID NO: 268537 - DNA, 252 bp, Glycine max
gaaaagggtagtgacattgatccacaagaagcacagcaaactcttgaaatagcagaagctaatgtgaataaggcggaaggcaagagacaaacaattgaggcaaatctagctcttagacgaactaggacacgagtagaggctatcaatgtgatttcataacaagttgatgcgtccgaatatcggaataactaaaaagataaaaaatgaaaaaaaataaaagaagaaagtaaaacgtaaaaaaagatacaacat

SEQ ID NO: 268538 - DNA, 413 bp, Glycine max
  unsure (1)..(413): unsure at all n locations
gtacgcagaatatgctactttctttgacactgtggtgtttctgagctgggtaaggtttagtccttctcgcgccaacccagttgcgagcttggaggagaagatccttgccgtggccaacgagtataaggccgtgaaggcctttctggtcgcttacagcaccgttgctgacgattgggctaatttttcgccacctatcttctttatcactctccatggccttctgggtaactctgcggttaagggagcgtccattaaggtcattagtgacgccaccgnctgctttccgccaagtggatcccttgaattttaattgttggctgcctctaattaatgacgtatgacatgaanggtgaacacgtatcttacaagtgttatgtgatatgtatgatgtgtgaatctttgaaataatatct

SEQ ID NO: 268539 - DNA, 404 bp, Glycine max
attgtttgttgttgtaactcgttcttcttcttttgttgttctgtgtttgtgtgtgttttttctctcacctgaaaatgtcttgctgcggtggtaactgtggttgcggaagctcctgcaagtgcggcaacggctgctgaggctgcaagatgtacccagacttgagctacactgagtcaaccaccaccgagaccttggtcatgggagtggcacctgttaaggctcaatttgaaggtgctgaaatgggtgtgcccgctgagaacgatggctgcaaatgtggaccaaactgctccttgaacccctgcacttgcaagtgaggtgttgggaaaacaagcttcaagcaaaaatagcccttaattaagaataatgattaactattaatgtgtaactaaaaacttatgtattat

SEQ ID NO: 268540 - DNA, 433 bp, Glycine max
gcgcccacgcgtccgcttcatccatattcatggccaccgtcacttctgcagccgtttgtattccctcattcactggcctcaaggcaagcgcaggcaaagtgagtgccgcagttaaagtctcagctccccaagccacaaggttgggcatcaaggcttcgctgaaagacgttggagtcgctgttgtggccactgccgcgagtgcagtgctggctagcaacgccatggccattgaagtgttgctgggtggtgatgacgggtctctggctttcgttcccaacaatttctccgtggcctctggggagaagatcgtgttcaagaacaacgcaggtttcccccacaacgttgtgttcgacgaggacgagattcctagcggcgtggatgcagggaaaatctccatgagcgatgaagaccttctcaatgcgcctggtgagac

SEQ ID NO: 268541 - DNA, 421 bp, Glycine max
  unsure (1)..(421): unsure at all n locations
cccacgcgtccgagcgaatccctctctctatctctcacacacactttctctctctctctctctgacccagatcttgtagcaatggcgagcgctcccactccacgcgaagagttcgtgtacatggcgaagctggcggagcaggccgagcgctacgaggagatggtggagttcatggagaaggtctccgcctccgccgagagcgaggagctgaccgtggaggagcgtaacctcctctccgtcgcctacaagaacgtgatcggcgctcgccgcgcctcctggcgcatcatctcctcaatcgagcagaaggaggagagccgcggcaacgaggaccacgtcgccgtcatccgcgactaccgctccaagatcgaggccgagctctncaacatctgcgacggaatcctcaaactcctcgacacgcgcc

SEQ ID NO: 268542 - DNA, 391 bp, Glycine max
cccacgcgtccgggcgaagatgttgtagaagttgttgtgagccctccttttgtgttccttcctggtgtaaaaagtttgctgctccctgatttccatgtctcggcccaaaattgttgggttcgcataggtggtgcttatactggagaggttagtgctgaaatgcttgttaatttgggaattccttgggttattattggtcactctgaacggacgcagcttttgaatgaatcaaatgagtttgtgggagatacagttgcctatgcactttaacaaggtctgaaagttatagcatgcattggcgaaactcttgaacagcgtgaaacttgtacaacaacggctgttggtgctgatcaaactaaaacaattgcagctaaaatatcaaattgggaca

SEQ ID NO: 268543 - DNA, 353 bp, Glycine max
cccacgcgtacggtagaagatgatgtcaaagtcgttgtgagccctactttcgcgtgccttcatttagtaaaaagtttgctgcgccctcatacacatgtctaggcccagaatagttgtgttcacaaacgtggtgcttatactggacaggtcagagctgaaatgctagttaattactgaatcactttggtcattattggtcactctgaactgagtcagcttatgaatgaatcatattagcttgttgaatataaagttgcctatgcacttcaacaaggtctgaacattatagcatgcattgaggaaactatggaacagcttgaacctgttacaacaactgatgttgatgctgagca

SEQ ID NO: 268544 - DNA, 443 bp, Glycine max
cccacgcgtccgaaaggacccagttttacatttttttttgttcctgagttccaatggctcttcaggctgcttccttggtttctgcttctttttctattgctaaagagggaaagtctggtgtatctctcagggacaccacaatgtttggtgtttcattgtcggatactctcaaatctgacttcagctctccctcatcgacttgcaaaagggaattccaacaaaaatttggccctttgagggttcagtcagtggcaacaacaactccaggagtcaccaaggcttcaccagaaggcaagaaaactttgaggaaaggcagtgttattatcactggggcttcctctggattaggcctggccactgctaaggctttggctgagacaggaaagtggcatgtgataatggcctgcccggatttcctcaaagccgaaagggctgcgaaatct

SEQ ID NO: 268545 - DNA, 418 bp, Glycine max
cccacgcgtacggccccatacagctatacccctaacacacaaccgtactgactaatgcagacgaggagacaaaccacctcgtccgcgtcaaacatctccttcacaagactctccttcagcaccatgcactctatcagcacatacttgaaaccagtgtacatccaacatagcacgagtgctcgaaagacatccgcatgatgactcgacaacacccactgaacatcacggcatcaccagcctaccaaccacaacttataagcatgcttgccaagctgacgaattcaaagaacgccttgcaaactgctgccttaactgcgtactctatgctctccactgcccttagttttccctctgatgcaaagatctcggctcttaatgagacatctcgaatactatcagctctgattgccaattattt

SEQ ID NO: 268546 - DNA, 450 bp, Glycine max
ctttctctctcgctcgcaaacgcaaataataaaaaacaaggttttagccatggcatcgaagcggatcttgaaggaactcaaggatctccaaaaggatcctcctacctcatgcagcgccggtcctgttgctgaagacatgtttcactggcaagcaacaattatgggtcctccagacagtccttatgctggaggtgttttcctagtcactattcatttccctccagattatccctttaagccacccaaggttgcattcaggacgaaggtatttcacccaaatataaatagcaatggaagcatttgccttgacatattgaaggagcagtggagccctgcgctaactatttcaaaggtgttgctctcaatttgttccctgttgacggaccctaatcctgacgatcctttggtccctgaaattgcccacatgtacaagacagacaggaacaagta

SEQ ID NO: 268547 - DNA, 428 bp, Glycine max
gcgcccacgcgtccgcccacgcgtccttccactcgtccgacaaaattgagtaatcacggtgccgaccacggttgctgtctccgtacctcaaaatcaaaacactaaccatggagtcgaatcccccaagaagaacaaaattcaggtttctaacaccaagaaaccccttttcttttacgtcaatcttgccaagaggtacatacaacagcgcaatgaggttgtgctttctgctcttggaatgggtataaccacagttgttacaattgcggagattttgaagaacaatggacttgctattgagaagaaagtttcgacatcttcagttacaatgaaagatgagaccaaaggtcgcctggttcaaaaggctaagattgaaattgttctggagaaaactgagaagtttgacagtctgacggcttgtgcaaacactg

SEQ ID NO: 268548 - DNA, 429 bp, Glycine max
  unsure (1)..(429): unsure at all n locations
cccacgcgtccggccctatacaaccaaaccctaacacacacccatttgattcagtttccatggctagcctcaaggttgcatttttggctgcagtgctctgcatggttgtggtgagtgcacccatggcacatgcagctatcacgtgcgggcaggtgacgagtagcctggccaattgcatcggttacctccagaagggaggaacgccgtcgtcgggatgctgcaacggagtgaagagcctcaatgccgtcgccaagaccaccgccgaccgccagacggcgtgcaactgcctcaagtcggccgccagccaaatctccggcttcaacgccaacaacgccgnctcgctccccggcaaatgcggagtctccatcccctacaagatcagcaccttcaccaactgcgctaccatcaaggtttgaagagaaagtcatg

SEQ ID NO: 268549 - DNA, 434 bp, Glycine max
cccacgcgtccggtcccaaagagctaacaagagattcaagaccggcatggctaatgaagaggaacagaaaaaccacctcttcggcatcaaagatctcggtcacaagactctccttcagagtgatgcactctatcagtatatacttgaaaccagtgtctatccaagagagcacgagtgcttgaaagagatacgcaagatgactgcaaaacacccactgaacatcatggcaacaccagcagacgaaggacaacttctgagcatgcttgttaagctcacgaattcaaagaacgccttggaaattggtgtattcactggttactctctgctctccactgccctggctcttccccctgatggaaagatcttggctttggatgtgaatcgcgaatactatgagttaggattgccaataattcaaaaagctggagtggctc

SEQ ID NO: 268550 - DNA, 450 bp, Glycine max
gaacgagggacgtgttcccgccatgtgaatggagcgagtgcagtgtgcctatgcctgtgtggacgaagcgttcgaaatagggaaagaggcgtatcatgggcagcagtacagccagatttacttcgcgcgccttcatttgatgcgaacacttttatattccctcgttcctcattggaaacccaattttcccgtgtgcacagtgctgggattggaagaggggaaggagtgtgtcattgttggaaccctctataaacacatgaagctcaaaccttgcattcttgatgagtattccaaggagagatcagtggttccacttgtcaagccacataacttcatacacccggatgatcacctagttttggaagatgaaagctggcaggttaagctcagtgggagtatcattttgccatctgaatatgtaacacgaattgggggtgctatacttggaaa

SEQ ID NO: 268551 - DNA, 244 bp, Glycine max
agggttttcgctgaccggtgcgcagtctggcctgcagaagacgaatcgaaaatgccgtctcggaagacattcagaatcaagaagaagttggcgaagaagatgaggcagaacaggcccattccctactggatccgcatgaggaccgataacaccatcaggtacaacgcgaagcgccgtcactggcgtcgcaccaagcttggattctgaggtgtatgctctgcctaggttcaatttatccaattaa

SEQ ID NO: 268552 - DNA, 422 bp, Glycine max
ctggaaaatactgtggtttgtggtggcacttcttctatggcaggttttgaagagagatttcagaaggaatctagcttaagttcatctgctgttcaacctacactcgttaagcctccagaatatatgccagaaaatttaaccatgtattctgcatgggtgggaggtgccatacttgccaaagtggttttccctcaaaatcagcatataactaaggcagactatgatgaaactggaccttccattgttcaccggaaatgcttctaacagtatctatccacatggtttcaacaactatttattcctctgcatctactggtactgtaacatgctgtaatagctgtatattccaagtgctagatgtcgtgtatatcttaaaagctgcagcgatctccattaatgcaatcttctcactctgcatgact

SEQ ID NO: 268553 - DNA, 425 bp, Glycine max
aatttttagtggctggggctattgctctcaagggccttggagggattcttttcgtgctcagcagctcttttggagctttccttttgcttttgcatcaagtgatcactactccaatactgtatgatttctacaattatcacagcgaggacaaagaatttatccaacttttcatcaaatttactcagaatatggctctcttcggggcattgttgtttttcattgggatgaaaaactctattcctagaaggcaacccaagaagaaggctgccaaaacaaaaacatattagttgaaaggacttctcggattgttcctggttgctcattatacccattttccatttctccaggattttggctttggtctctgtctggttcagaacgaatgtaccttctgtccgatggattatgtataatttataattatt

SEQ ID NO: 268554 - DNA, 434 bp, Glycine max
gcgcccacgcgtccgctaaaaacgtgtatttgaattcatccatccctaggcactccaggtgtcgatttcattccatgtgtaacctctctctctcccttcactacacttcattcattcattcaccattcagaggcagaggccagagagtgtgacgtgtgtgtgtgtctctctctttctctgctactgagtaattaaatgagagcaaaaatgacgctcaaaacagcggcggtagctgcggctatagtgtgcatttctgcctttagcatcactgcggtggctgaagatccatacaggttcttcaactggaatgttacatactgagacattcatccacttggtgatcgccaacagggaatacttatcaactgtcaattcccacgtccagacattcattctgttaccaacgacaacctcatcatcaatgtcttcaacag

SEQ ID NO: 268555 - DNA, 455 bp, Glycine max
ctcgtgcttcttcgcagttatcttcttcttttgttggttgagtgcatgcattttctctcacctgaaaatgtcttgctgcggaggagactgtggatgcggaagcgcctgcaagtgcggcaacggctgcggaggctgcaagatgtacccagacttgagctacaccgagtcaaccaccaccgataccttggtcatgggagtggcaccagttaaggctcaattcgagagtgctgaaatgggtgttcccgatgagaacgatggctgcaaatgtggagctaactgcacctgcaacccctgcacttgcaagtgaggagtttgagagctaaagcttcaagcagagatggcccttagaaataatgagtaaaactatatgtagtttcaaaacttcaaaattatgtagtatgtattatgttgcactctggtgttttgtgtctaaacaaacacccttagaataaagt

SEQ ID NO: 268556 - DNA, 445 bp, Glycine max
agtttgctgtgagctataagctagtttatcgtgaggagaatatgaagttgtttgttttcttggttgctgcagtagttttggtagcatggccatgccatggagcaggctaccaaaggttccctctccgaatgaaaactggctatggtgagcgttcttcggaggtaaaatgcgcatgttttaggcttgctgtggaagcacacaacatccgagcctttaaaaccatttctgaagagagcgtttaaccaacacaggactacattaatggctaacaatttacatcagactctaaaacagttaaccaacaagctttcttttatgctagtgaacgcgaagtctatcacaacgacatatttatattcggcatagataacaccgtacatcataatatcccatactatgaaaaacatggatatggcgtggatgaatttaatgaaaccctatatga

SEQ ID NO: 268557 - DNA, 449 bp, Glycine max
caaaaataaaaaggaaaaaagaaaaagtaaagacctctcaacacatggctgcttcaatcccatttacaggtatcaactcctcaagggtgcttcccattcctagagaaccacaccacccattttcccatttgctctcaaacatgtcaaagtttgcatctttgagaaccccttcttcttcttctgcttcttcttcttcttcttctgtgtcttgctctctcaccaaagacccttactctgttgtgccattggaggaacatagcaaaatggataatgggtcggttctgcttcagagacccgattcgtttgggaggtttggcaagtttggagggaagtatgtccctgagactctgatgcatgctctcactgagcttgaggctgctttttattccctctctgctgatgaagagtttcagaaagaactagctgggattctaaaagattatgttgga

SEQ ID NO: 268558 - DNA, 403 bp, Glycine max
cccacgcgtccgcccacgcgtccgcccacgcgtccgcaggtgaattccttgtgctgttggatgtgtcagctgataataaggtactgcctacaacatatggtgaattgagacctacgcttggcaagcaccacataattagagcaactggtaaagatggaaaactgttcatttgcaaagctcaagctggagacaagaggtggttcaagggagcaagaagatttgtggagagtgcagcaagttctttcagtgttgcttaaaaatcttcaataatagctggttatatatatctgctatgcgtaaatctaccttaagtgctatctatgtttgaagttgtctaaaaaaaagactctgatgcatgctcacactgagcttgaagctgttttaaatcgcctctctgctgatg

SEQ ID NO: 268559 - DNA, 421 bp, Glycine max
cacaaacacactacactgcgtctctgttctgtgtgtgcgagaaatggcgatggcgatggcgcttcgcaggctatcatcttcaattgacaagcctctgcgccctctcttcaatgccggttccctctactacaagtcgactttgcctgatgaagctggttacgacacggagcgacccggagttacatggcctaagcagttgaatgctccacttgaggtcgatgatcctgagattgctgatattattgagcttgagaaagctaggcaatggaaggggctagaattgataccgtcagataatttcacctctgagtctgtgatgcaagcggttggatcggttatgaccaacaaatacagtgaggggtaccctggtgcaagatattatggcggaaatgagtatattgacatggctgaaacactgtgc

SEQ ID NO: 268560 - DNA, 428 bp, Glycine max
cccacttctcaaccaacaatggcaatggcaacccaagcctctctcttcaccccacgcctctccggtctcaaacccagcgaccgagccaccgcgccatggaaacaatcctccaccctctccttctccacctcgaagcccctcaagttctcgcgaacaatcagagcagcagccaccgaccagaccacagaggcaccggttgggttcaccccaccggaactggacccaaacaccccttccccgatcttcggaggcagcaccggcgggctcctgcgcaaggcccaagtggaggagttttatgtcatcacatgggactccccgaaagaacagatctttgaaatgcccactggcggcgctgccatcatgagggagggtcccaaccttctcaagttggcgaggaaggagcagtgcttggctctggggactaggct

SEQ ID NO: 268561 - DNA, 377 bp, Glycine max
ctcaatttttctctcaaccggcccaatttagcataagcccagcatgggcaccgcatcagcagcagccacctcgtccttcatggggacgcgcctactggaggcccattccggggcggagcgggtgcaggcccggttcgggtttggcaagaagaaagccgtcggcccgaagaaagtttccagggggtcgggctctagctccgataggcccctgtggtatccgggcgccaaggcgcccgagtacctggatgggagccttgtcggagactacgggttcgacccatttgggctagggaagcccgccgagtacctgcagttcgagttggactcgctggaccagaaccttgcgaagaacgtggctggggacatcattgggacca

SEQ ID NO: 268562 - DNA, 416 bp, Glycine max
gcttttccttatcccgacctaccaaagtaataccaatccgctctcatctctgtctctgtctctatgtctctatgtctcgaatcttctccgcatggagcaagacgaagctgcacctcatcttaatccccactcttttctcttcttcccccatcaacttcaatagcgggcttctacagcaatggggagttaccagaggattggcctcacgatcacgacgctgcttcggctatgcaaactccaattggaccctgggacgacatcaaagctgggtgggtcggagggtccaatttgcgtacggattttccaactccgaaggaaatcttcaagggtctcgacaagtttgttattggccagcacatggccaagaaggtcctctctgtagctgcttataaccactatcaaagaatctaccacgg

SEQ ID NO: 268563 - DNA, 350 bp, Glycine max
actacgtggcagtgagccatcctcagacctgcgtgttaagaacgaaaggactcgattgcttctgtggtacaatcttggtagcatgcggatgccatgcctacgatatgctgcctctgtcgacgaacactgcctatggtgcccggactccgcgagggcaatgcgcaaggtcgaagcttgctgggggaacacacaacatctttggctttgttaccattcctgaaaagtgcgcttaagcaactaaacgtttcattcatggcgatccatatgagttcgactccataaccattaaccaacaagcttacttttatgccacaaacctcttcttccatgcccatgacacatttgtgttc

SEQ ID NO: 268564 - DNA, 405 bp, Glycine max
agaacatagccaagcgaccgttctccatgtttggtttctttgttcaggctattgtcactggcaagggccctattcagaacctttacgaccacgttgctgatcctgttgccaacaatgcttgggcttatgccactaactttgtccctggacaatgaggatgcctacatgcaatgcaatcttctgctcccttttgcagttcccttgtgtttaactccattttcactaatgtaactacacctgtgtagcagaaaaatctgtatgagaaccattatatttttataaaaaaaaaaaaaaactataaaatcaaaaaaaaaaagaaatcaatgaaacaaaacccttgagagaaacttggattggaacaaaaaaaaggggcggccgttttaaaggatccaagtttacttaccc

SEQ ID NO: 268565 - DNA, 360 bp, Glycine max
acgagtacgcgtgcgagtcaacccgcgaggcgcccggaaacggactgggaagatgcctgtggggatcgcaccgtcgaccgaacctgataccgtgcgtaagcttctagggagagcatacgtgtcagcacacgtgtcatgaccagctataccttgaactatgcatgaccgaggcaactccggaggaagccctgatggatgctcacatggatactgacctgctgaccggtcgattgactcgaatgactgatcgaacgacttagcaaaccgtttagtacctagtttccttcaagatatccgtaacgctaggtcgagccctatcgcgaaaagtctatgattaaaggcatgattagcggaatgggc

SEQ ID NO: 268566 - DNA, 462 bp, Glycine max
  unsure (1)..(462): unsure at all n locations
tgttgatcgagataactagaaacagtgtgatgaaaatgaaggtccttgttttcttcgttgctacaattttggtagcatggcaatgccatgcgtacgatatgttccctctccgaatgaacactggctatggtgcccgtactccggaggtgaaatgcgcaagttggaggcttgctgtggaagcacacatcatctttggctttgagaccattcctgaagagtgcgttgaagcaacataggaatacatccatggcgaacaatatagatcagactccaaaacagttaaccaacaagcttacttttatgccagagacctcgaagtccatcccaaggacacatttgtgttcagtatagatggcaccgtactctctaatattccatactacaaaaaacatggatatggngtggagaaatttaactcgaccttgtatgatgaatgggttaacaagggcaatgcaccggcac

SEQ ID NO: 268567 - DNA, 411 bp, Glycine max
caagttcacgagttgaatgttaaccctgatgtacatggtatattggttcagcttccgttgcctaagcacataaatgaagagaaagttctgactgaaatcagccttgagaaggatgtagatggctttcatcctttgaacattggcaagcttgcaatgaaaggcagagaccccctattccttccctgcactcccaaggcatgtattgaactattacagcgaagtggtgtaagtataaagggaaagaaagcagttgtggttggcagaagcaacatagttggactaccagcttcattgctgcttttgaaagcagatgctacagttactattgttcattcacacacaagtcaaccggaaagtatcatacatgaagcagatattgttattgcagcagcaggacagccgatgatgatc

SEQ ID NO: 268568 - DNA, 430 bp, Glycine max
gaagaaaatgaaagtccatgatttctttgttgctatagttctagcagcatggcattgccatggctcagaccatgaccatgaccatggccacacctaccaaattttacctctgagaatgaaaactggccatggtggccactacattccggaggtatcatgccaaagttggaggcttgtgcgtggaaagcacacaacgtcattgtactggaaaaccgttcctgaagattgcgagggatatattgcgaactacatgcttggcgaacaatatagatcagactgcaaaatagttaaccaacaagcttatttctatgctaaaaccctcaatatcactgacaaaaccgcatgggtgttcgacatagatgagactacactctctaatctcccttactatgctgaccatggatttggggttgaggtatataatgaaaca

SEQ ID NO: 268569 - DNA, 404 bp, Glycine max
cccacgcgtccgctctctctccaatggccaaagacctcgaaacggagattcaaagtgggttgcctcacaaggactaccacgacccacccgccgccccattctacgaccccgccgagctccgaaagtggtccttcttccgagccctcatcgccgagttcgtcgccaccctcctcttcctctacgtcaccatcctcaccgtcatcggctacaaccaccagacagccaccgccgccgagccctgcagcggcgtcggcgtcctcggcatcgcttgggcctttggaggcatgatttttgtcctcgtctattgcaccgtcggcatatcagggggacacataaacccggcggtgacgttcgggttgtttttggcgaggaaggtgtcgctgacaagagcttgtgggtacatg

SEQ ID NO: 268570 - DNA, 430 bp, Glycine max
cccacgcgtccgcccacgcgtccgaaaagaaaatcctcacccattttcttcgtagccaaacactctgaaattctcagttatgtcgtggcaagcgtatgtggatgatcacctactgtgtgaaatcgaaggtatccacctcactcacgccgctatcatcggccaagactgaagcgtttgggctcagagcaccaacttccctcagttcaaacctgaggaaataactgccatcaataatgactttaatgagcctggatcacttgctccaactggattggatatcggtggcaccaaatacatggtcatccagggtgagcctggtgctgtcattcgagggaagaagggtcctggtggtgttactgtgaagaagaccgatgcggccttgatcattggcatttatgatgaaccaatgactccaggtcaatgcaacatg

SEQ ID NO: 268571 - DNA, 466 bp, Glycine max
cccacgcgttcgcccactcgttcgcatccattctaaggcgtggacctgaatggtttgccagttttggtaggaagaacaatgctgggacaaagttgttttgcgtgtcagggcatgtgaacaagccttgcactgttgaggaggaaatgagtattccactgaaggaattgatagagaggcactgtggaggtattcgaggaggatgggataatctacttgcagtgattccaggaggatcatccgttcctctgattccaaagcatgtatgtgatgatatcttgatggattatgatgcattgaatgctgttgggacagggttggggactgcagctgtaattgtgatggataaatctacggatgttgtggatgctattgcaaggctttcctatttctacaagcatgaaagctgtgggcagtgcaccccatgcatagaggggactggttggctttggacgatcatggaaagaat

SEQ ID NO: 268572 - DNA, 492 bp, Glycine max
taccgatctcccaattccaggtacgcgtcacgcgtacccattgaattcactctggaatcttccatctgtgtatcgttttccttccttgtgtgcccgtcctaattcactttacagggctgtaccagatcctttctgcttaaatcctcgtatggtcgatcatcatgcagttctctatgaagtgaaattatcactgaaagaattgatagagaggcactgtggaagtattcgaggaggatgggataatctacttgcactgattccaggaggatcatccgctactatgattccaaagcatgtatgtgatgatatcttgatggattatgatgcattgaaggctgttgcaacagcgtcgtatactggtgccgcatttgctgatggataaacctacggatgttgtttatgctattgcaaggctatcctatttctacaagcatgaatactggtgtcagtgcaccccatgcatagaggggactggcttgctttggaccatca

SEQ ID NO: 268573 - DNA, 378 bp, Glycine max
acggcggcaactgcgactgcgctgacaagactagctgcaccaagggaaacatctatggtgttattgtagagactgagaagagttacatcgagactgttgtcatggatgttccagcagctgagcatgatgggaagtgcaagtgtggcactaactgcacttgcacggactgcacctgtggccattaaggaatatgtatgaaaatgtaatcgccatgtgtttggcaatacaaatatgcatataatgtaatcgtcgtatgaataaaaagcggagctgatatcctacttcacgtatgcgtagtcatgcagtctgaatcatttcaagttcctgtcttagttaatataacagccatggttgtggcattctatggcggattagact

SEQ ID NO: 268574 - DNA, 438 bp, Glycine max
tccacgcgtacggccacgcgttcgtaaccattctatgtgcgcggacctgaatggattgggagttttggtaggaagaacaatgctgggacaaagtcggtatgcgtgtcagggcatgtgaacaagccttgcactgttgatgaggatatgagtattccagtgaaggaactgatagataggcactgtggaggtattcgaggaggatgggataatctacttgcagggattccaggatgatcatccgttcctctgattccaagacatgtatgtgatgatatctagatggattatgatgcattgaaggcttgtgagacagggttggggactgcatctgtaaccgagatggattaatctacggatgttgattatgctagtgctaggctttcctatttctactagcatgaaagctgttggcagtgcaccccatgcatagaggggact

SEQ ID NO: 268575 - DNA, 446 bp, Glycine max
  unsure (1)..(446): unsure at all n locations
acgcccacgcgtacgcccacgcgtccgaccacattcacctgaggcttccaaagcaatggcttcccttgcagcatccactgctgctgcttcccttggcatgtcagaaatgcttggaaaccccatcaacttcagtggtgccacaaggccagctccatctgcttctagtcctgcctccttcaagactgtggctcttttctccaaaaagaaggctacaccaacacctccaaaaaaagctgctgctgctgctcctgccaatgatgagcttgccaagtggtatggtcctgacagaaggatcttcttgcctgagggtctcttggaccgatccgaaatcccagagtacttgaccggagaagtccctggagactatggttatgacccatttggtcttagcaagaagccagaagactntgccaaatatcaggcatttgagttgattcatgccagat

SEQ ID NO: 268576 - DNA, 350 bp, Glycine max
gtgagggttagtgtgctgaacgatgctctgaagagcatgtacaatgctgagaaaaggggaaagcgccaagtcatgattcggccatcctccaaagtcattatcaaattccttttggtgatgcagaagcacggatacattggagagtttgagtatgttgatgaccacagggctggtaaaatcgtggttgaattgaacggtagactgaacaagtgtggggttattagtccccgttttgatgtcggcgtcaaagagattgaaggttggactgctaggcttctcccctcaagacagtttgggtatattgtattgactacctctgccggcatcatggatcacgaagaagctaggag

SEQ ID NO: 268577 - DNA, 371 bp, Glycine max
cccacgcgtccgcccacgcgttcggtattggaccttggaaagatggacaaagctgatgactctggacttgcttcatatgttgccggtcaaattgatcgtactcttagctggaaggatgtgaagtggcttcaaacaatcaccaaactgccaattctggtgaagggtgtgctgactgctgaggacacaaggatagctgtacaaagtggtgcagctggaattatagtgtccaatcacggagctagacaacttgattatgttccagccactatatcagccttagaagaggatgtcaaagctgctgaaggtcgtgttcctgtatttttggatggtggtgctcgccgcggaactgatgtcttcaaggcattggcact

SEQ ID NO: 268578 - DNA, 251 bp, Glycine max
aaattaacaacatggcacaagggatacaaacccttaatcccaattccaatttccataagccccacgttcctaaatcttcaagctctcttgtttttgcatctaaaaaactgaaaaattcaacaaattctatgttggttttgaaaaaagactcaatctttatgcaaaagttttgttcctttaggatttcagcatcactggctacagcctgcatgcttcacagtgcaagcagccggcccgcaaccgcccgcaaa

SEQ ID NO: 268579 - DNA, 397 bp, Glycine max
  unsure (1)..(397): unsure at all n locations
cccacgcgtccgcccacgcgtccgttgactctcacaaaccttgcatccatccacacatggctggcatgaactctagcgtattggcctgtagctatgccatatctggtgcagcatgctccgagctcaatgggaaggtcacttccgtggcctctgttgcatcctctggctacaagttgccattgatcaaatgtgaggccagagttcccaaagccaaagaatctgaaggaaggagaggtgcccttgttctcttggcagctacccttttcatctctgcagcctccaattcttctgccaatgctgggatcattgatgattancctgagaggagcaaggctaacaaggaaatgaatgacaagaagaggttagctactactggagcaaactttgcaagagcata

SEQ ID NO: 268580 - DNA, 444 bp, Glycine max
  unsure (1)..(444): unsure at all n locations
cttggtgagaagctgaccgatgaggaagtcgacgagatgattcgtgaggctgatgttgatggtgatgggcagatcaactacgaggagtttgtcaaagtcatgatggccaagtgaggaccaatcaaccataacaaaaacatttgaaagcacatgaacagaaaagggacagggcagataagttttgatgaaaattctattttcattaggacaatcttcatttggggtcattagtttttgttggtcggatttgtgtttgcttttatttattggtattgctcattagtattttctacttgtttgctctgtcccttgttttagtagcttggattagctgtgtctcaccatgcatttgtacttcacttttcatgttttttgggttactactatgaaactggaacaattggttgcaaatagtgcttttacatatgggtgactnatactgtt

SEQ ID NO: 268581 - DNA, 262 bp, Glycine max
gcgaccacgcgtacggtgtcggcacgtttagcaataaccaaaccctctctactctgtggtcttctccttctcttcgctaggggtgtagcttcttcctcttcacttcgttctttgtcgcctctaccatgagcaacgacttggacacattcaacgtcgacgatctcacttctgctctcaacgaggacaatagagcagaccttgtcaacgctcttaagagcaagatacagagtttggctggacaacactcggatattctagagtc

SEQ ID NO: 268582 - DNA, 432 bp, Glycine max
tcggttgagaactaagaaggagaagcaaatggctttctcaatgatctcttccccagctgttaccactgtcaaccgtgccggtgccggcatggttgctccattcactggcctcaagtccatggctggcttccccaccaggatgaccaacaatgacattacctccattgctagcaactgtggaagagtgcaatgcatgcaggtgtggccaccagttggcaagaagaagtttgagactcttttctacctgccagaccttgatgatgcacaattggcaaaggaagtagaataccttcttaagaagggatggattccttgcttggaattctagttggagcacggtttcgtgtaccgtgagcacaacatgtcaccaggatactacgatggacgctactggaccatgtgggagctgccctatgttggatgcactgatgc

SEQ ID NO: 268583 - DNA, 448 bp, Glycine max
tcgcttggtgagaagctgaccgatgaggaagtcgacgtgatgattcgtgaggctgatgttgatggtgatgggcagatcaactacgaggagtttgtcaaagtcatgatggccaagtgaggaccaatcaaccataacaaaaacatttgaaagcacatgaacagaaaagggacagggcagataagttttgatgaaaattctattttcattaggacaatcttcatttggggtcattagtttttgttggtcggatttgtgtttgcttttatttattggtattgctcattagtattttctacttgtttgctctgtcccttgttttagtagcttggattagctgtgtctcaccatgcatttgtacttcacttttcatgtttttttgggttactactatgaaactggaacaattggttgcaattaatgcttttacatatgggtgacttatactgtt

SEQ ID NO: 268584 - DNA, 445 bp, Glycine max
caaaaacgaagtactactacaagggaagaaaaacttagctactaaggaaggatcaaagagaatggctcaagcaatggcatcaatggctggcttgcgtggttcctctcaggctgtgttggaaggtagccttcaggtgagtggctccacacgcttgaatgtggggagtggaagcagggtggcctcagtcacacgtgcagggttcacagttagagcacaacaacaacaagtgagtggtgaggtacaaagcagccgtagggcagtgctttcacttgttgctgctggtttggccactggctcttttgttcaagctgtgcttgctgatgccaaatctatcaaagttggaccaccttccccaccttctggtggattgcctggaacgttgaactcagatgaagcatgagaccttcagctgccattgaaagataggttcttccttcaaccattg

SEQ ID NO: 268585 - DNA, 404 bp, Glycine max
cccacgcgtccgatcgagataactagaaacagtgtgatgaaaatgaaggtccttgttttcttcgttgctacaattttggtagcatggcaatgccatgcgtacgatatgttccctctccgaatgaacactggctatggtgcccgtactccggaggtgaaatgcgcaagttggaggcttgctgtggaagcacacaacatctttggctttgagaccattcctgaagagtgcgttgaagcaacaaaggaatacatccatggcgaacaatatagatcagactccaaaacagttaaccaacaagcttacttttatgccagagacctcgaagtccatcccaaggacacatttgtgttcagtatagatggcaccgtactctctaatattccatactacaaaaaacatggata

SEQ ID NO: 268586 - DNA, 394 bp, Glycine max
attctcacaaacaactcttgagaaagaaagaatggctgccaacacattgatgagttctgccatctcagccttcccatctctcctttcctcctcaaaatccagatttgccgcagcagttcctctttccagctttgttgtcaccaatgcctcttcttctcgcttttccatgagtgctgattggatgcctggccagcctagacccccctaccttgatggttcagcacctggtgactttggattcgaccctcttcgtcttggtgaagtaccagagaatcttgagaggttcaaagagtcagaactcattcactgcagatgggccatgcttgctgttccagggattttggttccagaggcattgggcttatgcaactgggtaaaggctcaggaatgggct

SEQ ID NO: 268587 - DNA, 358 bp, Glycine max
acgtacatacgaaaaatcgaatactaacacaaagggaagaaaaacttaactactaaggaaggatcaaagagaatgagctcaagcaatggcatcaatggctggcttgcgtggatcctctcaagctgtgttggaaggtagccttcaagtgagtggctacacacgcttgaatgttggggagtggaagcttggtggcctcagtcacacgtgcatggttcacagtttgagcacaacaacatcaagtgagtggggaggttcataacagccgtagggcagggctttcacttgttgctgctggtttgtccactggctctattgttcaatctgtgcttgctgatgccaaatctatcagagctggacc

SEQ ID NO: 268588 - DNA, 392 bp, Glycine max
gtgagctataagctagtttatcgtgaggagaatatgaagttgtttgctttctttgttgctgcagtagttttggtagcatggccatgccatggcgcaggctaccaaaggttccctctccgaatgaaaactggctatggtgagcgttcttcggaggtaaaatgcgcaagttttaggcttgctgtggaagcacacatcatccgagccttttaaaaccattcctgaagagtgcgttgaaccatcaaaggactacattaatggcgaacaatttagatcagactctaatacagttaaccaacaagctttcttttatgctagtgaacgcgaagtccatcacaacgtcatatttatattcgggatagataacaccgtactctctaatatcccatactatg

SEQ ID NO: 268589 - DNA, 420 bp, Glycine max
gaagaagagaagactttcatcagttgcgttgagagaaggaaagggaaaatgggtagggatctgagcgaggaacaagtgtcttccatgaaggaatgccttctctctattcgacactgacggagacggtcgcatcgctccgtcggagctggggatcctgatgaggtgtctgggaggtcacccgtcgcaggcccaactcaaagacatcgtggctgaagagaacctaacggtccccttcgacttcccccgattcctcgatctaatggccaaacacattaaacccgaacccttcgatcgccaactccgcgacgccttcaaggtcctcgacaaggactccaccggcttcgtcgccgtcttcgagctccgccacatactgaccaacatcggcgagaagatcgagccctccgagttcgaccagtggat

SEQ ID NO: 268590 - DNA, 363 bp, Glycine max
ctagatcacgtggctttggctttgtcacaatgtctgatgagacggaaatgaaagatgcggttgctgctcttgatggtcagagtttggacggaaggccaattagggtgagtgttgccgaggacaggccaaggcgtggttccttttgagcgttatctcatgtagttccccatgtcagctgctggagttatcttgcatttttttaatagctgaggatatactatagtgtcaatttttgttcaaaggaaaatcctttcttggggcaccaatttcagattagatttacgtattttgttgttattagtttaatgccctgatgaaaattaagttgtaatttcggactcctgagattggagaaaagtatac

SEQ ID NO: 268591 - DNA, 381 bp, Glycine max
acgcccacgcgtacggcgaagatgtcgggtcgtggaaagggaggcaagggtttgggaaagggaggagccaagaggcacaggaaggtgcttcgtgacaacatccagggtatcaccaaacccgcaattcggcgtttggctcgcagaggtggtgttaagagaatcagtggtctcatctacgaggagacacgtggcgtcctcaagatattcctcgagaacgttattcgcgacgctgttacctacaccgagcacgctagaagaaagaccgttaccgctatggatgttgactatgctctcaagaagcatggcaggactctctacggtttcggtggttaatttctagggtttgcatcggcgtatcagctgcttattggttattgctgt

SEQ ID NO: 268592 - DNA, 425 bp, Glycine max
acgaattagttcattctctttgcgcagttccctacctctcctttcaagatgcagatcttcgtcaagaccctcaccggaaagaccatcacccttgaggtggaaagctctgacaccatcgacaacgtcaaggccaagatccaggacaaggaaggaattcccccggatcagcaacgtctcatcttcgccggaaagcagctcgaggactgccgtaccctcgccgactacaacatccagaaggagtcaacccttcaccttgtccttcgtcttcgtggtggcatgcagatcttcgtcaagactctcactggcaaaaccataaccctagaggtcgaaagctctgacaccattgacaacgtcaaggccaagatccaggacaaggagggaatacccccataccagcaacgtctcatcttttccggaaagcaact

SEQ ID NO: 268593 - DNA, 440 bp, Glycine max
atattcactccaaaaaaaaaaaataagctcagagagagagaatggggaaaagacaaatcccagaccctccgaactttaagaaatacggcgttccttgtctactccgttgcgtggattccccaacacgttgtcaaatcgcgccaaatcgaaaccgccggtaactacctgctgttcgccggcggcggcggagcaggccacagcggtatccccaatgcttcggttattgcgcacttcgatgtcgcgtcgaattctctctctgatcaaccggtgtgtaagctaggaactgattctgaattgccttataggatggcacttaactctaatggtgatggccttatttgtgcaatggaaacgcccatggtttgcagatggtttgactgggatcaaaacaagagctctgaaattcataagttgagtctgaagctgtcagagaaagtgct

SEQ ID NO: 268594 - DNA, 261 bp, Glycine max
acattaacaacatggctcacgggatacaaacccttattcccaattccaatttccataatccgcaagttgctaaatcttcaagtgttcttgattttgcatcttataaactgaaaaattcagcacattgcatgttggctttgaaaaatgatacaattgttatgcccaaggttcgctcctctaggacttgagcatccatggctacagcctgcatgcttcacggtgcaagctgccggaccgtatgcggccgaaaatgctttgggc

SEQ ID NO: 268595 - DNA, 423 bp, Glycine max
cccacgcgttcggatccgtaaggaaggcgacacctggatcatcgatggcgtcggcaatggcggcctcctggcgcctgaggcgccgctcgatttcggcaatgccgccacggtctgccgcctgaccatgggcctcgtcggggtctacgatttcgacagcaccttcatcggctactcctcgctcacaaagcgcccgatgggccgcgtgttgaacccgctgcgcgaaatgggcgtgcaggtgaaatcggaagacggtgaccgtcttcccgttaccttgcgcggtccgaagacgccgacgccgatcacctaccgcgtgccgatggcctacgcacaggtgaagttcgccgtgctgctcgccggcctcaacacgcccggcatcacgactgtcatcgagccgatcatgacgcgcgttcatacggaatagat

SEQ ID NO: 268596 - DNA, 309 bp, Glycine max
aaaaaaaaaaaaacatacaaaaaaaaaaaaaaagctataaacaaaaaaataaaaaaaaagaaaaaaaggacgaacagatatataagatgctagcttaaattctgcatgcatgcgacattccatggtacaagcataccgaaaagttacctctccgaatgaaaaactggctttggtgcgcgttctttgggggtaaaattgccctgcctttaagcttgctgtggaagctcacatcatccgatcctttaataccattcctggagagtgcgttgaaccgacaaaggactacatcaatggcgaacaacttatatc

SEQ ID NO: 268597 - DNA, 449 bp, Glycine max
tccactcgtccgtgttgatcgagataactagaaacagtgtgatgaaaatgaaggtccttgttttcttcgttgctacaattttggtagcatggcaatgccatgcgtacgatatgttccctctccgaatgaacactggctatggtgcccgtactccggaggtgaaatgcgcaagttggaggcttgctgtggaagcacacaacatctttggctttgagaccattcctgaagagtgcgttgaagcaacaaaggaatacatccatggcgaacaatatagatcagactccaaaacagttaaccaacaagcttacttttatgccagagacctcgaagtccatcccaaggacacatttgtgttcagtatagatggcaccgtactctctaatattccatactacaaaaaacatggatatggcgtggagaaatttaactcgaccttgtatgatgaatgg

SEQ ID NO: 268598 - DNA, 428 bp, Glycine max
acgaccacgcgtccgagaggttgttgcgagctatgctctagatgatcgcgaggagaatatgaagatgcttgttttctttgatgctgcattactaccgatagcatggccatgccatggcgcctgctaccaaagggtccctctccgaatgaaaactggctatcgtgagccgcacttcaaggttaaacgcacaacctgcaggcttagctgggaagcacacagcatacgagcctttacaaccattgctgaagagtgcgttgcaccaacaaaggactacattaacggcgaacaacttagatcagactctaaaacagtttaccaacaagcattcacttatgactttgaacgcgaagtgcatcacaacgacatatttatattctgcatagattacaacgtactgtctaatatgccatactatcaaaaacacggat

SEQ ID NO: 268599 - DNA, 439 bp, Glycine max
  unsure (1)..(439): unsure at all n locations
catcaatacgggcaaggccatgcatgccatgggcgccaggatccgtaaggaaggcgacacctgcatcatcgatggcgtcggcaatggcggcctcctggcgcctgaggctccgctcgatttcggcaatgccgacacgggctgccgcctgaccatgggcctcgtcggggtctacgatttcgacagcaccttcatcggcgacgcctcgctcacaaagcgcccgatgggccgcgtgttgaacccgctgcgcgaaatgggcgtgcaggtgaaatcggaagacggtgaccgtcttcccgttaccttgcgcgggccgaagacgccgacgcccgatcacctaccgcgtgccgatggcctncgcacaggtgaagtccgacgtgctgctcgacggcctgaacacgcccggcatcacgaccgtcatcgagccgatcatgacgcgcgatca

SEQ ID NO: 268600 - DNA, 337 bp, Glycine max
aaagcattgaattcaaaaacttaagttcattccttgtgttttgctttcttcctgaaaaccaaacatgtcgaacacatgcggcaactgcgactgcgctgacaagactagctgcaccaagggaaacagctatggtgttattgtagagactgagaagagttacatcgagactgttgtcatggatgttccagcagctgagcatgatgggaagtgcaagtgtggcactaactgcacttgcacggactgcacctgtggccattaaggaatatgtatgaaaatgtaattgccatgtgtttggcaatacaaatatccaaataatgtaatcttcgtatgaataaat

SEQ ID NO: 268601 - DNA, 396 bp, Glycine max
cggacgcgtgggcggacgcgtgggttgccattctcatcctcctctgtctctctctctgcaccattgccatggatccttacaagctccggccatccagcgccttcaattctcccttctggactacaaattctggtgctcctgtttggaacaacaactcctctttaaccgttggagctagaggtccaattctgcttgaggattatcatcttgtggagaagcttgcaaactttgacagggaacgtatcccagaacgtgttgtccatgccaggggagctagtgcaaagggtttctttgaggtcacacatgacatttctcacctgacatgtgcagatttccttcgagcccctggagttcagacgcctgtaattgttcgtttctcaactgtcattcatgagc

SEQ ID NO: 268602 - DNA, 444 bp, Glycine max
gagataactagaaacagtgtgatgaaaatgaaggtccttgttttcttcgttgctacaattttggtagcatggcaatgccatgcgtacgatatgttccctctccgaatgaacactggctatggtgcccgtactccggaggtgaaatgcgcaagttggaggcttgctgtggaagcacacaacatctttggctttgagaccattcctgaagagtgcgttgaagcaacaaaggaatacatccatggcgaacaatatagatcagactccaaaacagttaaccaacaagcttacttttatgccagagacctcgaagtccatcccaaggacacatttgtgttcagtatagatggcaccgtactctctaatattccatactacaaaatacatggatatggggtggagaaatttaactcgaccgtgtatgatgaatgggttaacaaggggcat

SEQ ID NO: 268603 - DNA, 386 bp, Glycine max
agaaagagaagcattagcaaaagcaagaagaactagtctaagcagaaatggcctcttcagtgatggcatctgtggccctcaaacctgcccctttcactgttgagaagtcctcagttagaggccttccctccctctcaaggaactcctcttcattcagagttgtggccagtggtggcaagaagatcaagactgacaagccttatggaattaatggtggcatggctttgaaggaaggagttgatgcatctggcaggaaaggaaagggaaagggcgtttaccagtttgtagaccaataccgtgctaatgtcgatggttacagtcctatctacgacaccaaggacttggtctcaacccgtgatgtctacgctggcggtacgactggcttg

SEQ ID NO: 268604 - DNA, 429 bp, Glycine max
agagtacaaccttttcaactccgaaggcgagccacgatgtcaggaagaggaaagggaggcaagggtttgggaaagggaggagcgaagaggcaccgtatggttctgagggacaacatccaggggatcaccaagcctgcgattcggcgcttggcgaggcgtggcggcgtcaagcgtatcatcggtctcatctacgaagagacacgtggcgttctcaagatcttcctcgaaaacgtcattcgcgacgctgttacttacaccgagcacgctcgccgcataaccgtcactgccatggacgttgtttatgccctcaaaagacagggcaggaccctttacggtttcggtggttagttaggacattatggtaggctcttactcttattagtatcgaatcatatgttgctagatggatcttcacattgtaatggctgg

SEQ ID NO: 268605 - DNA, 409 bp, Glycine max
tttacagcgaaatggtatacaaagtcaacagatctaaatgaataaaaaatagtatttatggctacgcaaaccgttgaggataattctagatctggtccaagacgaactgttgtaggggatttattgaaaccattaaattcagaatatggtaaagtagctccggggtggggaactactcctttgatgggtgttgcaatggctctatttgcgatatttctatctattattaacagtaccctttttggagaatgttaataaattccaaaacccatttcgccgtccagtatcaaccaccatctttttgattggtactgtaattgccctttggttatgtattggagcaacattacctattgagaaatccctaactttaagtcttttttaaacttataaaattgattccattttg

SEQ ID NO: 268606 - DNA, 433 bp, Glycine max
gaaagatgtcgaagcgtggtcgtggtggttcggcggggaacaagttccgcatgtcgctgggtcttccagtggcggcgacggtgaactgcgccgacaacacgggggcgaagaacctctacatcatttcggtgaaagggatcaaaggccggttgaaccgtcttccctcggcctgcgtctgcgacatggtgatggccaccgtgaagaagggaaaacccgatctgaggtagaaggtcttgccagctgtcatcgttcgccagcgcaagccatggcgccgaaaggactgcttctacatgtacttcgaagataatgctggtgttattgtcaatcccaagggagaaatgaaaggttctgctatcactggtcccattggaaaagagtgtgctgatttgtggcctaggattgcaagtgcagctaacgccatcgtttgagtgga

SEQ ID NO: 268607 - DNA, 417 bp, Glycine max
caaaaatggcatcattcaccatgacagcttccatccttggcagcccagccgtcaccaaccggtcggcagtagcaacgcagaggagatcactcgtagtgaatgctgccaaagctgttgaagcagaaaaggtcagttatgacaatgacatggatggtagcaatggaaggaggaacttgatgttcgccgcggcggcggctgctgtttgctctgttgctgggatggcagtggcagatgagcctaaaccaggaaccccagaagccaagaaaaagtatgctccgatttgtgtcaccatgccaactgctaggatttgtcgcaattgagggactttggtttttattttacttctgatgattggaaatgtacaatggggttgttgtaatgctttgatgatttcacttgatcctcactgtacaagat

SEQ ID NO: 268608 - DNA, 440 bp, Glycine max
gataatcatagctatggcaacggcgagtgcaagtcgtgcggcatcatttagaaacagcttcagtgtgagtaaaccctcggatcttgggttcttgagctctcgtctgaacggtctcagaatctgcttacccaaatcgccacccacacccatcactgcttctcccttccccacacccatacctatcgttgccaagagagtgtgtcccttcactggaaagaaatcaaacagggccaacatagtatcattttcaaaccacaagacagagaacctgcagctcgcgaaccttcagtactagagaatttggtgggaagcagggaagcgctacgtaaagcttcgtttgtcaactaaggcattgaagacgatggagaagaatggacttgatgcagttgcaaagaatgctggaactgatctcaggaagacatgagcctatctaataatta

SEQ ID NO: 268609 - DNA, 404 bp, Glycine max
gcggccactcgtgcggtcacaagtcacaactcgcaaaccactatgcctaagcagatccacgagattaaggattttcttctgacggcgcggaggaaggatgcgacgtcggtgaaaatcatgaggagcagggatgtcgttaagtttaaggttcgatgctccaagtacttgtacacgcttcgtgtctttgaccctgagaaagccgataagttgaagcaatctcttgctcccggtttgagcgttcaagacctgtagagctgttgagcgtggcagcatgcgtttgtttctcttcttgttacctgatgctctagattttgtggcttggatttatatgttggtgatttttacgaggacatttctggtttaaattggtacgaaatgtgaaagtttgatactgagcacacttg

SEQ ID NO: 268610 - DNA, 396 bp, Glycine max
cccacgcgtccgggaaaactttggacaaaaaatggagtgctacacaaggccaaacaggagtgacatccacctctcagcagaggaagaagccaccatagaggcaaagaccagagagtactttgatggggtcgcaccacaacgccacacaaagcctcaacgaagtgactattcagctcaatatgtcgatgctttctccaatgcccatcactcttctttaactataccagaattaacacaattccaactcctccagaacgatccccaagagaagaaattggtgtacaatggaagtcaagtaccggaagaacttgtggaaacagagtattaccaagatctcaacagcgtggacaaacaccaccatacgactggaacaggatttatcaaagtagagaaaaa

SEQ ID NO: 268611 - DNA, 422 bp, Glycine max
attacgcgtgcgaggacccgtagcgccacgcgcgctctttgtgtttggggatgctgttggggataatgggaacaacaactttttggcaactacagctcgagcagatgctcctccttatggcattgatttcccaaccggaagacccactggccgcttctgtaatgggtacaacattcctgacttcatcagtcaatcacttggggccgaatccacattgccttatttagatcccgagctcgacggggaaagattgcttgttggtgccaactttgcttctgctggtattggaattctcaatgacactggaatccaatttgcaaacataatcagaatatatagactgttggagtactggcaagaataccagcagagggtgagtgctctgataggaccttaccatactgaacgcttaataaatggag

SEQ ID NO: 268612 - DNA, 404 bp, Glycine max
cttttgagttgcattgttgcatcaccgcaagtccacaacatggctgccactgccgctgcaggcatagcttccttggtttcttcttctattaacagcgtcaaatgtcttcgttcctccaagaactgctccattatagacccccttataaccacagtgccctcaaaccgtggcatgtttgtgtcacacttggtggaacctttgtccattgggggtgccattaattcgcacaagttgtgggggcctagaatttctgctgctgttgcacaagaagaggctgttgttgtggctgatgatgaggtagatgatggtgctggcttacttgaagaagagaaagtggaggagaatgaaagagaagtagttgcagaacaagactctgattcctctgccaccaagctttattttgg

SEQ ID NO: 268613 - DNA, 345 bp, Glycine max
ctccattggtgttgtcaaatagtgacaacatggagattcagaaaatgaataatggtcacagtgttgttactgctactgttactgctactgctactcctactcctactactactttcgttgctgctgctactgctattactactactccttcttcattgagttctttatcttcttctaggtggccaaagacagaagttcatgctttgataagactgaggacaagtcttgaaaccaagtaccaagaaaatggaccaaaggctccattgtgggaggatatatcagcaggaatgctgaggctcgggtacaacaggagtgccaagagatgcaaagagaaatgggagaaca

SEQ ID NO: 268614 - DNA, 443 bp, Glycine max
aagaaatggctcttgttctcaacgtctcattgtgttccatttctaaaccccatctttctgtctcaacctccaatcccaacagagcttcttcaactcttcctcttcctattctgggacttaaaacaaagcaaagtctccaaccatctcagaaactcacattttcattgggtgaatcagtggctggtgccaccctcgttgctctcctctctgcttctttcatctttgttgatcccgcacttgcattcaagggtggagggccatacgggcaggaagtgacaaggggacaagatctcactgggaaggactttagtggcaagactctgatcaaacaagacttcaaaacgtccattacccttttggggaagggaacaccccaaagagggggcccccccaaaaaatttttttttttttaaaaaaaaaaggggggtgttttgggccccccc

SEQ ID NO: 268615 - DNA, 212 bp, Glycine max
cccacgcgttcgacgaaaccctaggttttagtgagtggcgaaaatggcggtgattttttgaagtgcaataccaggagggggagcaccagcagcaatcgagcaagtgcagtgcttcgggcggaagaagacggcggtggcagtgacctactgcaagcgcggccgatgcctcattaagatcaacggctgcccgatcgagctggtggagccggaga

SEQ ID NO: 268616 - DNA, 288 bp, Glycine max
  unsure (1)..(288): unsure at all n locations
ggaagtcacactttcagcctgcaagtccgttagctcgccttctgttcccgtcgcangtttgtttgcggngaatggaggagttaagagctcgcaatgcagtttcttagcgggagcgagcaaagtgaggtttcctaggcaagtaggtcaagttagccaccttcgcaaacagcgccaaacgcgtcactgcggtgctctccacgcgacttgcagcggtgacaagatcctgatcgcgaacagaggcgagattgccgtccgcgttattcgaaccgctcatgaattggggattcc

SEQ ID NO: 268617 - DNA, 386 bp, Glycine max
  unsure (1)..(386): unsure at all n locations
gataactagaaacagtgtgatgaaaatgaaggtccttgttttcttcgttgctacaattttggtagcatggcaatgccatgcgtacgatatgttccctctccgaatgaacactggctatggtgcccgtactccggaggtgaaatgcgcaagttggaggcttgctgtggaagcacacaacatctttggctttgagaccattcctgaagagtgcgttgaagcaacaaaggaatacatccatggcgaacaatatagatcagactccaaaacagttaaccaacaagcttacttttatgccagagacctcgaagtccatcccaaggacacatttgtgttcagtatagatggcaccgtactctctaatattccatactacanaaaacatggat

SEQ ID NO: 268618 - DNA, 392 bp, Glycine max
gttgtgagccagcttatcggactcccaagtgtgttaaaaagtgtgtaagtggaaaccaagtttggaagaagtcaaagcactatagggttagtgcatacagagtcaactctgatccccatgatatcatggcggaagtttacaagaatgggccagttgaagttgcatttaccggttatgaagattttgcttactacaaatcaagagtttacaaacacatcactggttatgaactaagtggtcatgccgtaaagctaattgggtggggaacaactgatgatggggaggactattggcttctcgcaaatcaatggaacagagaatggggagatgatggttacttcaagatccgaagagggacaaacgaatgtgggattgaagaggatgtaacagct

SEQ ID NO: 268619 - DNA, 445 bp, Glycine max
cattcccatttttcacaccaccaacacaagatgtttctccacattgtgttcctccttttcctgctctcatccacttcccatgccactgtccaagacttctgtgtggcagacctcaaaggtgcagacacccctgcaggctacccctgcaagccacctgctaatgtcacttcagatgactttgtgtacactggcttagctgaagctgcaaatgtcacaaacataatcaatgctgctgtgaccccagcttttgttgctcaattcccaggtctcaatggccttgaactatctgcagcaagggtggaccttggtcctagtggtgttatcccactccacactcatcccggtgccaatgaactactcattgtgcttcaaggtcacattcttgctggattcatatcttcaggtaacatagtttatcagaaggtgctgaaaaagggagagctca

SEQ ID NO: 268620 - DNA, 449 bp, Glycine max
  unsure (1)..(449): unsure at all n locations
tcgcccacgcgtccgtggagcataatgtttggttggactggggtgttacaactcaccaaagttggcagcaacggcgtgcccacctcgggatctctcggtcgtgccctttacgctgccccaatccagatttgggacagcgaaaccggcaaggtagccagctgggctacatcctttaaattcaacattttcgcacccaacaaatcaaactcagctgacgggcttgccttcttcttggcacccgtcgggtctcagccccaatccgacgatggatttcttggtcttttcaacagtcccttaaaggacaagtctctccaaaccgtggcgattgagttcgatactttctcgaacaaaaaatgggatcctgcaaaccgacacatcggcattgacgtgaactcgatcaagtccgtcaaaacggcatcgtggnggttgttcaatggacaagtggcgga

SEQ ID NO: 268621 - DNA, 338 bp, Glycine max
gatcgagataactagaaacagggtgatgaaaatgaacgtccttgctatcttcgttgctgcgattttggtagcatggcaatggcatgcgtacgatatgttccctctacgaatgaacactggctatggtgcccgtactccggaggtgaaatgcgcaagttggaagcttgctgtggaagcacacaacatgctttggctttgagaccattcctgaagagtgcgttgaagcaacagaagaatacattcatggcgaacaatatagatcagactccagaacagttaaccaacaagcttactcttatgccagagacctcgaagtccataccaaggacacatttgag

SEQ ID NO: 268622 - DNA, 344 bp, Glycine max
cccacgcgtccggatcgagataactagaaacagtgtgatgaaaatgaaggtccttgtttggttcgttgctacaattttgggagcatggcaatgccatgcgtacgatatgttccctctccgaatgaacactggctatggtgcccgtcctccggaggtgaaatgcgcaagttggaggcttgctgtggaagcacacaacatctttggctttgaaaccattcttgaagagtgcgttgaaccaccaaaggattccatccatggcgaacattttggatcagactccaaaccagttaaccaacaagcttacttttatgccagagacctcgaaatccatcccaaggacacat

SEQ ID NO: 268623 - DNA, 340 bp, Glycine max
cccacgcgtccgaaaccacattgtttgcaaggcagcacagaagcaggttactgtccaagagggtgaggacactactactggccttggctctcgcaggttggccctcactgtgctcattggtgctgctgctgttggctctaaggtggcacctgctgatgcagcctatggagaagctgccaatgtgtttggaaaaccaaagacaaacacagacttcctttcatacaatgggaatggattcaaactctcaattccctcaaagtggaacccaagcaaagaggttgagtacccaggtcaggttcttagatatgaggacaattttgattcaaccagcaatgttgct

SEQ ID NO: 268624 - DNA, 415 bp, Glycine max
  unsure (1)..(415): unsure at all n locations
agatttttgacttatttgatctcaagcgcaatggggtcattgagttcggggaatttgttggatcattgggtgtttttcacgcaaatgcagctttagaagacaagattacttttgcttttaggttgtatgatctgaggcagacagggtttattgaacgagaggagttgaaggagatggtattggcacttttgcatgaatcagatcttgagctttcggatgatatgattgaaaccattgtggataagacttttagtgatgctgatataaacggtgatggaaggatcgatcaagatgagtggaaagaatttgtgtccaagcatccatccttgataaagaatatgacacttnncatttttaaaattttttttggggaaaaaagggggggaattttaaattttttaaacccccctttttt

SEQ ID NO: 268625 - DNA, 335 bp, Glycine max
  unsure (1)..(335): unsure at all n locations
caaaaaatgaagagcactaccttgttcgctctctttctactttgtgccctcacttcatcgtacctaccttcagccaccgctgatgtggtgctggacatggatggtaatcctcttggaaacggttggcaaaatgaatatttcatgttgccagttacaagaggaagcggtggtggaatagcactagctgcaactggaaatgaaagatgccctgtaactgtcgtgcaatctcacattgagcgcgataaggngtatgcggcaacttttagagctccattccacctcccttttatcgcagaaggccttcctttgacgatttcattcgataactttgaagt

SEQ ID NO: 268626 - DNA, 448 bp, Glycine max
agcttatattgtgaactatatgtcaagaaatggtgctctcaggcagcagctttacaaggagattgaggttgctagcgttgattcctttcaaggaagggagaaagactacatcattctgtcttgtgttagaagtaatgaacatcagggcattggatttctgaatgatcctaggaggctcaatgttgctttgacacgagcaagatatggcattgttattttgggaaaccctaaagttttgagcaaacagcctctatggaatagtttattgactcactacaaggaacatgagtgcttagttgaagggcctttaaataacttgaagcaaagtatggttcagttccagaaacccaagaagatttacaatgaacgaaggcttttttatgggggtggacctggaattgcggctaatgataattttggtagtgttggatctggaagctgcacaagt

SEQ ID NO: 268627 - DNA, 429 bp, Glycine max
tgattttgttgggttcatattctttgacttcaattccctcatctcctatatctctccgcccccagtcctctgttgcccatggaagaatggtgcagtgttcgcgcagatgcgagcttttcgatctgcatcaggaactgatcccttatgacgtggcatggtcttggcaaaaagacatcgtcagggaaaagaaatcacagattgagaacgaaggagattgcagcgacacacttattattctgcaacacccttctgtttacacattgggtaccgctagtacacaccacaacctcaactttgacatcgaaaatccaccctttcctatttatcgcactgaacgcggcggagaagttacgttccacggccctggccagctaattatgtaccctattatcaacctccgaagacacaagatggatcttcattggtacc

SEQ ID NO: 268628 - DNA, 302 bp, Glycine max
aaaaaaaaaagaacaaaaaaaaaaaaacaaaaaaaaaaaaaaaaaaaaagacaaacagatgggaatgtgtaggctctcaaatgggggcggccagcgtactaggtcttagctcgtgtaaactttaatctaattacaagtcagtggtttacaatgtaccacctggaaaaacgcatggccttgtaaaatcactcgtattgcgaaatatacgcctttccccagctggcgtgtttgggaaaatggccgaatagagcaccgttccaaactgtttagaattctcaagggtgaatgggacacgatctgta

SEQ ID NO: 268629 - DNA, 367 bp, Glycine max
catcatcaaagtttcttcctttctctgctctttgccttctctgacacatttggtgccttggagagcgtgttttggcaggaaggtggtatggcgaaggacgttgaggttgctgagcggtagctccttctctgggaaggactaccaggacccgtgcaccagcaccactcattgatgctgaggagctcacaaagtggtccttttacagggctctcattgctgaattcattgccactttgctcttcctctacattactgtgctcacagtcatagggtacaagcaccagactgacctcaaggaaaatggtgaaatctgtggtggggttggcattcttggcattgcatgggccctttgggggggggggtgggg

SEQ ID NO: 268630 - DNA, 393 bp, Glycine max
  unsure (1)..(393): unsure at all n locations
gctctatccggaaccatggtgagcacctccttcatgaggaagcaacctatgacgaccaagagcctaaagacattccccaacgctctttttggtctgaaaggtggacgaggtggtcgtgtaacttgcatggcctcgtacaaggtgaagctcataaccccagaaggagaagtggagtttgaatgcccagatgatgttttcattgttgacaaggctgangaagaaggcattgaacttccctactcgtgcagggctggttcttgcgtttcatgtgttgggaaaattgtgaaaggtgacgtggaccagtcagatggtagcttccttgatgatgaacaaatagaaagtggatgggttcctttttttaaaaacccccttttgggttgggttttttggggc

SEQ ID NO: 268631 - DNA, 351 bp, Glycine max
gaggtctttaagatgaaaacaaaaaatgcaaatgtaggttcctttttttgaacacaaaagatttttacttccattttttgagtgaaagaataaaaaaatgatatgattcaacctcaaactcatttgaatgtagctgataatagcggagcacgcgaactgatgtgtattcgaatcctaggagctagtaatcgacgatatgcttatattggtgacattgttgttgctgtaatcaaacaagcagtaccaaatacgaacttagaaagatcagaagtgatcagagctgtaattgtacgtacttgtaaagaactcaaacgtagcaacggtataataattcagtatgaatgataaaaa

SEQ ID NO: 268632 - DNA, 356 bp, Glycine max
tcgacagtatctatctaaataaaggtgcgatggctctatgggcatcattataaatgcaaaaaaaaagaaaaaaaaaaaaaaaaaaaaagggaaaaaaaaaaaaaaaaaaaaaaaaaaaaaaaaaaaaaaaaaaaaaaaaaaaaaaaaaataaaaaaaaaaaaaaaataaaaaaaaaaaaaaaaaaaaaaagggggggcccttttaaagaatcaaattttaattaccggtgtttggaaattaataatttttttttaagggacccaaaatcaaattaattgggagtgtttttaaaaagtcttaattggaaaaaacttggggttaccaaattttatggttttgaaaaaaatcccctttt

SEQ ID NO: 268633 - DNA, 447 bp, Glycine max
tggcacttccccttcttcgaatccccgggattccacttgccaagcaacaccaatcattcccttgcaatacccgccgcaaagccacgacggcgcaggcggagctcgagacagcggtggcgcggacgggcggaaccggttaccagtctccgtccgtcgatgttcccacgcataaggtcatagtccacgacagacaacgaggaatcgttcacgaattcgtcgtgcctgaggaccagtatatattacatactgctgaggcccagaatattacccttccattcgcctgcaggcatggttgttgtactagctgtgctgtacgtataaagaatggaaagattaggcaaccagaggcactagggatatcggccgaattgagagacaagggttatgcacttctttgtgtggggcttccaacctctgatgttgaagtggaaactcaagatgaagatg

SEQ ID NO: 268634 - DNA, 392 bp, Glycine max
  unsure (1)..(392): unsure at all n locations
cacaaacacctcgtccgtcacaatgcagctagctgtggcggccaacgctgtcgtttcaccgtcgccgttccgacctcatccccttctccggtcatccttctccggcgtctccgttaagctcactccccaatccataacgttttcacgcttgaagcccctcaccgtcttcgccgccaccaagaaggccgtcgctgtcctcaaggggacctccgccgtcgaaggcgtcgccactctcatccaagaagacgatggcccgacgacagtttctgttagcatcactggccttactccggggcttcatggttttcacctacatgagtatggtgataccacanatgggtgtatatcaaaccaaagggggggaaaaggccccaaaccccaaattttttttt

SEQ ID NO: 268635 - DNA, 148 bp, Glycine max
tgacattcgtccggaacatgtgaatgtgtatggttgtccttcctttgtgtttgctttcctggtgaatcggtggccgttgagcgtttgggtggatggacgatgatcctgaagttttcttttaagttaatttaattatcattttgtgcaa

SEQ ID NO: 268636 - DNA, 346 bp, Glycine max
cccacgcgtccgcctccctcaaatcccaaaccagcaaaaacctttcttcacaaaatggccgtgaacaactctaacaaccctcaccctccgcacgctatcttatcctacaccctcctcttcttaccctacgcacctctccgccaaaccctcctccctccaattccccaatctctcccaccgcgccgccaccacgcgccgcccccgtgtcgtcgtctccgccgttgaggcgccggagaaaatcaccaagctcggcgacgaaatcgccggactcacgctcgaggaggccaagaacctcgtcgacttcctccaggacaagctcggcgtctccgcggcggcgttcgcccct

SEQ ID NO: 268637 - DNA, 424 bp, Glycine max
  unsure (1)..(424): unsure at all n locations
gtttgtggaatctagtgagagagagcagaggaaaaggggaagaaaaatgttgagtgcgacggcgatcggcgcgttattgggtttgggaacccagatgtactccaatgctctccgcaaactcccctacatgcgccatccgtgggagcacgtggtcggaatggggttgggcgcggtgtttgtgaaccagcttctgaaatgggaggcccaagtggagcaagacctcgacaagatgctcgaaaaggccaaggccgccaacgaaagacgttatatagatggagatgatgattaatgcatgtcttcatggattgtggcagttggtgaaaataatcatgaaatatgttgnaaccccttttttggggttttttgggcccccctttttttttggggttttttttttcccttttgggaaaattttttttttggg

SEQ ID NO: 268638 - DNA, 448 bp, Glycine max
cccacgcgtccgcccacgcgtccgtttctctctcccttagctagtttttaccaatggctgctgcggttagtgctgcagtctgcttttcatccaccaaatctccctctctcccagccagacctccatcattaccccagagagagttgtattcaagaaggcttcattgcaatacagagatgtttgtagcagtggaagggtagtttccatcagagctcaagtcaccactgaagcttcagccaaggttgaaaaagagtccaagaaacaggatgaaagtgtggtttgagaacaagttcacaccaaagaccccttacgttggtagatgccaaatgagtggaaagttgctcgtggtttttttttagggaaaagtttttttttcgggcccctttttatttaaaaggttttaaaaagaggaaaaaaaaatttccccccctccccctttttttttttt

SEQ ID NO: 268639 - DNA, 195 bp, Glycine max
tcctacgcgccactataattcttcttttatttgaaataattttctttatcattcacaatattgatgataccgttcattttttaaggctcaagagagattatcacctattattacaccattgttagcacatatgttaacacatagtataacaccattgttatcacaaatgtgaacacttattataacaactccatt

SEQ ID NO: 268640 - DNA, 444 bp, Glycine max
  unsure (1)..(444): unsure at all n locations
ctcaccgattgctagaatggaatttcgatgctcagtcatctcttttaccattctcttctctcttgctcttgcaggagagagccatgtccatgcatcgctacctgaggaagattattgggaagctgtttggccaaacactcccattcccactgcactgcgagagcttctaaagcctctccctgcaggtgttgaaatcgatgaactccctaagcaaattgatgatacacagtacccaaaaacattcttctataaagaagaccttcatccaggcaaaacaatgaaagtacaattcaccaagcgtccctatgcacaaccttatggtgtatatacatggttaacggatattaaagacacctctaaagaaggatatagttttgaagagatatgcatcaagaaagaagcgtttgagggagaagagaagttttgtgcanaatccttgggaac

SEQ ID NO: 268641 - DNA, 313 bp, Glycine max
  unsure (1)..(313): unsure at all n locations
ggtagaacccttccacggtggtgactgcgcgatgggtgcctacaagtatgtttcagaggtatggcgcaagaagcagtctgatgtcatgcgcttcttgcagcgggtgaggtgctgggagtataggcagcaaccttccattgttcgcttgacaaggtcgacccgccctgacaaggctcgtcgcttgggcttcaaggctaagcanggctatgtgatataccgtgttcgtgttaggaggggtggccgaaagaggccagttcccaaaggtattgtttatgggaagcccacaaaccagggtgttacccaactgaaattt

SEQ ID NO: 268642 - DNA, 385 bp, Glycine max
cccacgcgtccgcccacgcgtccgcccacgcgtccgtccatatggaggtttaatcttgagcaggccaaccattagcaggagattcatgcctgagaaagggtctgctgagtatgctgctttggctaagaaccctgagaaggagtttttgaaaactattactggcaagaaggagaccctcattgaccttacaattatagaaatcctgtcaaggcacgcatctgatgagttctaccttggggagagagatggtggtgacttctggacttctgatgctggtccactagaggccttcaagaggtttggaaagaagcttcaagagattgaacataagcttatacagaagaacaaggaattttgggaaaagggaacccggggtttttttggg

SEQ ID NO: 268643 - DNA, 444 bp, Glycine max
  unsure (1)..(444): unsure at all n locations
cgacgcagaaggttcatccaatctccgaatcctttaatcgcattgcaaccatgtcgaggagaaaggtcagagagccaaaggaggaaaacgtgactcttggcccagctgttagagatggcgaacatgtctttggcgtcgctcgcatatttgcctcctttaatgataccttcattcatgtcactgatctgtctgggagggaaacgcttgtccgcatcactggtggaatgaaggttaaggctgacagagatgaatcatctccttatgctgctatgcttgcagctcangattttgctgccagatgcaaggaacttggcattactgctcttcatatcnaagctcgtgcccaaaaccgggggggggtttttggggggggggaaaaaccccacaaaaggggaaccccataattaaaaaaaaaaccccttttttttcccccgcggggggggg

SEQ ID NO: 268644 - DNA, 391 bp, Glycine max
  unsure (1)..(391): unsure at all n locations
cccacgcgtccgggaacaagaacaagaacaacaaagtaacgtgaaagagagagagatggaggcgattgttccagtggtggatttccagaggctttcagaggaagaggagcgcatgaagctgagaaaaacatgtgagaaaccagggtgtttcagaatcatcaaccactcaattccactaacactcatggctgacatgaagtcagtggttaaatacttgcatgaccttcccacggaaatcaaaatgcgcaacatacccttcgtccctgagagtggctatagngcggcaatgcaacaagtnctctatacgagggcatgggaatatatgacatggcattgcttaccacaaggcccccccttttttttttgggggaaaaagggggaaatttttttt

SEQ ID NO: 268645 - DNA, 341 bp, Glycine max
cagcagagagaagagaagggctacacaaacacaatctctaatggcactcaggatgtgggcttcttccactgccaatgcactgaaactctcttctgtctccagacctcatctcttgcctcctttttctttctccagatgcttatcttccgtcttggatggacttaagtacgctgattcacatgaatgggtcaagcacgaaggctcagtcgccaccattggtatcactgaccatgcccaggaccatcttggagaggttgtgtatgtggagctgccagaaccaggtggcacagtttccaagaagtctggcttcggagccgttgaaagtgttaaagcaacaagtg

SEQ ID NO: 268646 - DNA, 422 bp, Glycine max
ctagaaacagtgtgatgaaaatgaaggtccttgttttcttcgttgctacaattttggtagcatggcaatgccatgcgtacgatatgttccctctccgaatgaacactggctatggtgcccgtactccggaggtgaaatgcgcaagttggaggcttgctgtggaagcacacaacatctttggctttgagaccattcctgaagagtgcgttgaagcaacaaaggaatacatccatggcgaacaatatagatcagactccaaaacagttaaccaacaagcttacttttatgccagagacctcgaagtccatcccaaggacacatttgtgttcagtatagatggcaccgggtaaaacccttttcctttccttttttaaaaaatttaaatttttttcccccaattttaaacccttttttaacccccc

SEQ ID NO: 268647 - DNA, 452 bp, Glycine max
tcggaaagccaccaaatggatcggctttcatcagcagctacgtttgaaagcatgcactatggcagtgcaagccaaatgggtttgatttggcaacaagccagggcacccctggtggttccattgatgaaattgctagtggttttgtgcctagccatgtcacttatgttatttgtggagagagtttatatgggtatagtcataatctttgtgaagttgtttaggtacaagccagaaaagaagtataaatgggagccactcagggatgaccttgagtttggaaactctgcataccctatggtcttggtgcaaattccaatgtacaatgagaaagaggtgtatcaattgtcaattggagctgcatgtgggctatcatggccatctgatagggttattattcaagttcttgatgattccactgacccaatcattaagaatatggtggaggtggaatg

SEQ ID NO: 268648 - DNA, 460 bp, Glycine max
caaggcagaaagcaagctcatcctagagttttaaaaatggcagcagcctcctccatggctctggcttccccatccttggctggcaaggccgtgaagctgggcccatcagcccccgaagtcgggagggtcagcatgaggaagaccgtcaccaagcaggcctcctccggaagcccatggtacggcccagaccgcgtcaagtacttgggcccattctctggcgagcccccgtcctacctcactggcgagttcccaggtgactacggctgggacactgctgggctttcggccgacccagaaaccttcgccagaaaccgtgagctcgaagtgatccactccaggtgggccatgctcggggccttgggctgcgtcttccccgaactattgtcccgcaacggggtcaagtttggagaagctgtgtggttcaaggccgggtcccagatcttcagcgagggtgggctgg

SEQ ID NO: 268649 - DNA, 433 bp, Glycine max
  unsure (1)..(433): unsure at all n locations
ccttcacaagattctcacaaacaactcttgagaaagaaagaatggctgccaacacattgaggagttctgccatctcagccttcccatctctcctttcctcctcaaaatccagatttgccgcagcagttcctctttccagctttgttgtcaccaatgcctcttcttctcgcttttccatgagtgctgattggatgcctggccagcctagacccccctaccttgatggttcagcacctggtgactttggattcgaccctcttcgtcttggtgaagtaccagagaatcttgagaggttcaaagagtcagaactcattcactgcagatgggccatgcttgctgttccaggggatttttttttggggggtttttttccccccaaagggnaagaggggcccccattttttggggggggggcccctttttttaaaaaggg

SEQ ID NO: 268650 - DNA, 413 bp, Glycine max
ctttgtcttttgcttgcgaatctgaatcgaataataatcaatcaatcatcatggcgtcggcgaagaagatcacactgaagagttcggacggcgaggctttcgaggtggacgaggcggtggcgctggagtctcagacgataaagcacatgatcgaggacgactgcgccgacagcggcatccctctgccgaacgtgacgagcaagatcctggcgaaggtgatcgagtactgcaagaagcacgtcgaggccgcgaatcccgaagacaaaccctacgaggacgatctcaaagcctgggacgccgatttcgtcaaggtcgaccaggccacgctcttcgatctttatcctggctttttggccccggaaaaaacccctttaaacccttttttgggaaaaacccaatttttccaaaaaggg

SEQ ID NO: 268651 - DNA, 252 bp, Glycine max
cccacgcgtccgaaaaaaaaaaaaaaaaaaaaaaaaaaaaaaaaaaaaaaaaaaaaaaaggaaaaaaaaaaaaaaaaaaaaggaaaaaaaaaaaaaaaaaaaaaaaaaaaaaaaaaaaaaaaaaaaaaaaaaaaaaaaaaaaaaaaaaaaaaaaaaaaaaaaaaaggggggccctttttaaaggtcccaattttttttccctttatttgcaatgttaaaatttttttatgggtcccctaaatttaatttatt

SEQ ID NO: 268652 - DNA, 443 bp, Glycine max
aaacaccctttgagttcattaacctcttcagaaaaaacaacaacaacaacaaaaaaaaacatcatcatcaaaaaaacttccgagaggttaatggcaacacgcgtgatccctccaagaatcctcaagaagctccgttacaacacaacaaccaagccactcaacgctgcccacccctcaatctctccagtcatcgccccaccgtcactcttcgagaggtcgccgtcccctgtcgcggatgctgtttcaacaacatccacgactatggagacggcgaatctcaacctcgacgacgcggagcggcttttcgcgtcagtatcgacggaaaagctgctccggtcgtccgcggttttgcatgcgacggcggtggggcccatggtagacctgggaatgtggttgatgaagtctccggtgttccagaccgggctgccgaaggatctcatcat

SEQ ID NO: 268653 - DNA, 449 bp, Glycine max
cccacgcgtccggacacgcgttcgcttgaaaatatatcagcgaagatcaacctgaacggcatcacttggcgcgcgaccagttcttgccgctgcattaacttccatctccgacccacctgctcttttcgatggcacgcaccagcggtggacatacagctatcttatgaccctatgcacaacgtgcgtggatcgctaggaactacaaggggctacaagataagatcaatttggtccctattaaccttcaagacaggccagcttggtataaggagaaagtctaccctgaaaataaggtgccatccttggagcacaatggcaaggtgttgggagaaagtcttgatttgatcaaatatgtagatgcaaactttgaagggacacctttgtttcccagtgatcctgccaagaaagagttccgtgagcaattgatatcccatgttgatacattcagc

SEQ ID NO: 268654 - DNA, 424 bp, Glycine max
  unsure (1)..(424): unsure at all n locations
cttccctttgttctcaaaccttatcccttatcctcccaaaaccaaaccatgtctacctccgcagcttctctcgcactcccaaccctcactctccgaactcgacaacctctctgttctccccaatgcttctcctcgtccctctccctcacccctaactccaaacccatttccatttccgccgttttcctcaaaacaacgctgtcgtcgtcgtcgccgttgtcgctgtcgtctcgcttcgttccccgtgtctctgtgttggagcaggaggaggacaccttcggcgacggagacggccccagcttctcccgcgaccttaagctctttgtcgggaatctccccttcagtgtcgacagtgcgcggctcgcggagctcttcgagagtgccgngaantgtgaggtggttgaggttatttatgataagacta

SEQ ID NO: 268655 - DNA, 353 bp, Glycine max
gccagttgtatctgtagattggctttatgataacctgaaggagccagatatcaaggtactagatgcttcgtggtacatgccggatgagcagaggaatccaattcaagaatatcaggttgctcacattcctggtgcccttttctttgatgtagatggaatagcagatcggactacaaaattaccacacatgctgccatcagcggaagcgtttgctgctgctgtttctgctcttggcatagagaacaaagatgatttggttgtttatgatggaaaaggattatttagtgcagctcgtgtttggtggatgttccgagtatttgggcatgacagagtttgggtattagatggtgggg

SEQ ID NO: 268656 - DNA, 337 bp, Glycine max
cccacgcgtccgcccacgcgtccggattgctagaatggaatttcgatgctcagtcatctgttttaccattctcttctctctggctcttgcaggagagagccatgtccatgcatcgctacctgaggaagattattgggaagctgtttggccaaacactcccattcccactgcactgcgagagcttctaaagcctctccctgcaggtgttgaaatcgatgaactccctaagcaaattgatgatacacagtacccaaaaacattcttctataaagaagaccttcatccaggcataacaatgaaagtacaattcaccaagcgtccctatgcacaaccttat

SEQ ID NO: 268657 - DNA, 352 bp, Glycine max
cccacgcgtccgggcggtttattttcttattcatcacttcccgaggaggagagtcctgacgtgaaagcattccactccgcggagagctggcagagccacttgaaagagatcaaagagtcccctaagctagttgtgatatatttcacggcgtcctggtgtggcccttgcaaattcatcactccagtgtttaaccagatagccgcagagtttgcaaacgctgacttcgtcaagatcgacgtggacgaattatctggtgtggcgaaggagtttaaggtggaggcgatgccgacgttcgtgttgtggaaggaaggaaaggaagttgagagggttgtgggagccaagaaggggaaaa

SEQ ID NO: 268658 - DNA, 438 bp, Glycine max
  unsure (1)..(438): unsure at all n locations
ctgggcttagttgataagcataattgggtgaggaagagagaaagagagtgaagaagatggcgtcgagcggagcggtaccgttttggagggcggcggggatgacgtacataacatactcaaacatatgcgcgaatctgctcaggaattgcctcaaggaaccctacaaggccgaatccctctctcgtgagaagctccattttgttctctccaaatgggtcgacgccaagcctgaaaaacctactattcgttcagacaccccagagcagtgatctggaatagttggaagctataaatgcataaatctttgagatctggaagttcattgtcattttggaccctttctgtgattggnntnttttttttaaaaaattttttttctccccctttttttttgggggtttttttttttttttttttttttcccctttttcctttttt

SEQ ID NO: 268659 - DNA, 444 bp, Glycine max
aaaaacaaaaacaaaaatcttagccgcagaggcagaggaggagatggagacgatgatgatgagtggcgtatcgattccgagttcagttccaaaatcaagaccttctattagcttgggtttgggaactcccaagttgttcaattcagtttcagtaagggtagccgtgaacgtgaatggtcggggaagaaacaaaggtttgagttgcaacgccatgttcggtctgggcgtgcctgaactggtcgttattgccggcgtggccgccctcgtttttgggcccaagaaattgcctgaagtcggccgcagcatcggcaaaactgtcaagagctttcaacaggctgcaaaggagtttgagtcggagcttaagaaggaaccggattccaccgaatgggactcatctgagaaatctattgtagtcagtgagaagcagcagcagcaggacaatga

SEQ ID NO: 268660 - DNA, 298 bp, Glycine max
tcgaacctccctacaactcaagggaaagccatccctgatgcctccgactacaagggccgccccggcgagcgctctaaaaccggtggttggaccgcttccgccatgatattaggaggagaagtgatggagaggttgacaacactaggcatcgcggtgaatttggtaacatatttgactgggaccatgcatttgggtaatgctgcctctgccaacgttgtaaccaacttcttgggaacctccttcatgctctgtctgctcggtggcttcctggccgatactttcctcggaagataccgga

SEQ ID NO: 268661 - DNA, 316 bp, Glycine max
tgcacgcgttcgaacgagcgtaccactctgcgaacattccgtaccctggaataaacttagcgagccgatgtccactcaccgggagaccctgttacacaatctcccctagaagcgcgcagactcccatactgtcaacaggaactagattatgacccttttgtaaaggatcgtaactcaaggcacaggcaccctgctacaccaccacatcattgcttagtttgacggaatgcctgacgataacaggctgatgcttactgataaggcctttagagaagtcttgacatactcacacgacgccatagttgtgccaccatgg

SEQ ID NO: 268662 - DNA, 430 bp, Glycine max
  unsure (1)..(430): unsure at all n locations
caactctgcgttctcagtgtttccagcggaagcatgcgaaactgttggaggggaagcctgcatggcagaaatgtaccctgaagtgaagctacagccagaaactaagacaccacgagttgttacagagaacgttgagagagagtatctngaatacgaataatcctaaaacggttttaaaagagaggcttgggaagaactgggggaacctttttgtgagaaccaatttcaaaaggtggctaattgaggaaaaaagaaaacctttttaatggcctgggttactgcgtttttaaaggctaccagtaatgattgtagtggtgaatgtacattaggttaggctatggatctaagttttaaaattattaaatttttgggaaaaaggtttttttttcaaaaaatttttttttttggcgcggcgttttttttttttatt

SEQ ID NO: 268663 - DNA, 447 bp, Glycine max
cgacggcatcgcgtcaggcgttctgcgatgtgagcgattgcagcggaagcatgcgaatctgtaggaggggaagcctgcatggcagaaatgtaccctgaagtgaggctacagccagaagctaagacaccacgagttgttacagagaacgttgagagagagtatcttgaatacgatgatcctaaaacggtatttagaggagaggcttgtgatgatcttggaggaactttttgtgagaccgagtatcataagggtgtctactagagagaaaagaaaaccctttttattgccatggctactgcgtttttaatgtctaccagtaatgattggagtggtgaatgtacataggtttaggctatggagctcaattttaaaatttttaattttttggggaaaaaatttttttttttccaaattttttttttttggcgggggctttttttttttttt

SEQ ID NO: 268664 - DNA, 418 bp, Glycine max
cccacgcgtccgcaaaagagtagtggcctttaggtggtgaagaacaagagctcaaatcaaatcgaatcgaaaaaagaaagaaagagcatattcatggcgatggcaagcctggctcgacggaagggttacgccgtcgttttgtcgtcgaggtcgtcgttttgtctgacaagctggaggggattcgcgtccggatctgacgaaaacgacgtcgtcgtcatcggcggcggtcccggcggctacgtggccgccatcaaagccgcgcagctcggtctgaaaaccacttgcatcgaaaagcgtggcactctcggcggtacctgcctcaacgtcggatgcatcccttccaaggcacttctgcattcttcccacatgtatcatgaggctaaacatgcatttgccaaccatggggtcaagttttcat

SEQ ID NO: 268665 - DNA, 393 bp, Glycine max
cccacgcgtccgaaagattctaaagaaatataactaatattctttagaataatcaaaaagaatgttaaattcaaataaattttagatagaaaaaagacttaaaaaggaggatttgaaatgcgagatctaaaaacatatctttccgtggcaccagtagtaagtactctatggttcggggctttggcgggtctcttgatagagatcaatcgtttttttccagatgcattgatattcccttttttttcattctagttattgacacggaaaggggtgaagaagattatagatccaattaagtattaaatatatgtaattaatatgtaattaatctcctcttctttatttcgtcttttatttcttcttttttttacaattgtaatagaataagttagg

SEQ ID NO: 268666 - DNA, 308 bp, Glycine max
acgctttctattccatattcctaacaattcaattcattcatccttcactactacaccaaattaatagaaattaaagatatatcattccacaaaacaaattaaagttagtgagacgtacccttattatggccaaagaaggtcttggacttgaaatcactgagctaaggttgggtctacctgatgcggagcatcaagtaagtgtggtcaataagaaaaatgagaagaagagggcattctcggaaattgatgatggtgttggagatgaaaatagctcctccggcggaggcgaccggaaaatggagacgaat

SEQ ID NO: 268667 - DNA, 382 bp, Glycine max
cagcgttgttgcattgtagaaggcgatggccgcgcgagctctgttgaccagaaaaaccctagccaccgtgctccgcaacgacgcgaagcccataatcggagttggcataacagcagcggctactcattcacgcgggttgcacgtgtacacgctacccgatctggattacgactatggcgcactggagccagccatcagcggcgacatcatgcagctgcaccaccagaagcaccaccagacttacatcaccacctacaacaaggccctcgagcagctccaagacgccatcgccaagaaagattcctccgccgtcgttaagctccagggcgccatcaagttcaacggcggaggtcatgtcaaccattctattttctggaaaaat

SEQ ID NO: 268668 - DNA, 456 bp, Glycine max
cccacgcgttcgcccacgcgtccggtggccaccagttggcaagaagaagtttgagactctttcctacctgccagaccttgatgatgcacaattggcaaaggaagtagaataccttcttaggaagggatggattccttgcttggaattcgagttggagcacggtttcgtgtaccgtgagcacaacaggtcaccaggatactacgatggacgctactggaccatgtggaagctgcctatgtttggttgcactgatgcttctcaggtgttgaaggagcttcaagaggctaagactgcataccccaacggcttcatccgtatcatcggattcgacaacgttcgccaagtgcagtgcatcagcttcatcgcctacaagcccccaggcttctaagtgtgaaaaatttgcaaagcattgtagccgccaccccactttgtttggttgtacttaaactacattcc

SEQ ID NO: 268669 - DNA, 366 bp, Glycine max
cccacgcgttcggagaaacaaagttagaagtaaagaagatcatggcttctctagcaaccttggctgctgttcaaccagctacgatcaatggccttgctggaagttccctctctggaactaagctctctttcaagccctctcgccacagtgtcaaatccaagaacttcaagagtggtgccgtggtagcaaagtatggtgacaagagtgtgtactttgatttggaggatctgggcaacactacagggcagtgggacttgtatggctcagatgcaccttcaccctacaaccctcttcagagcaagttcttcgagacatttgctgctccattcacaaagaggggattggtactcaaagttctgatattgg

SEQ ID NO: 268670 - DNA, 271 bp, Glycine max
gcgggtgagaactaagaaggagaagcaaatggcttcctcaatgatctctttcccagctggtaccactgtcaaccgtgccggtgccggcatgggtgctccattcactggcctcaagtccatggctggctttcccaccaggaagaccaacaatgacattacctccattgctagcaaccggggaagaatgcaatgcatgcaagtgtggccaccaagtggcaagaagaagtttgagactctttcctacctgccagaccttgatgatgcacaattg

SEQ ID NO: 268671 - DNA, 433 bp, Glycine max
gttccaatttaacaaatttataaaccggttcatcgtataaatgaattaaaaaagaactaataaccaacgcatcgcttcggattatctagatctaaagaactagtcaaaacaaaaaaaaatataaaaaaagatatattatagcaactgaactattgtgaagcataaaagaacaaaaatcttatttagttgtaaagcaataaaaatatacagataaatgaagaggtgaaagaaagagagaaaaaaaatcaatgatatagaattctaatatgtaaaggtctatgggttatctcataaaaggtagtgtaataaagcatcaatctaaatcaattcatatctatttatatatgaattaatttataacgtaaacaaattaaggagctctgaatcaataaaaactgagaatattgttcacgaaaaaaacaattcatattcg

SEQ ID NO: 268672 - DNA, 307 bp, Glycine max
aagatgcttatcttttctagcgaatgttgtaatagcagaatgcttgctagaagtattctcttttgtgtaacttgggtttgtatgattgcttaaattagctaatacttttagctataattggaactcttgcaccctcttgtgcgtgcgtgctgtgttgcttacatcttgtttgtttgatttttgattgaatatatttccatgcgttttgttcttgaaaagttcactaatttttcagtttaaaagatcggttttgtccggttttccaaacattgataattaattgtgtaaacaaactgttgggaccttt

SEQ ID NO: 268673 - DNA, 431 bp, Glycine max
  unsure (1)..(431): unsure at all n locations
ccattttctatctatcgtcaacgttagtgctttgtttaggtgaactaattcggagaccttgcaagacttcatcaatggctgtcaaagtttatattgtgtactactccatgtatgggcatgttgagaaactagcagaagaaataaagaaaggggcttcctctgtggaaggtgttgaggccaagttatggcaggtacctgagacactgctggatgaggtgcttggtaagatgagtgcaccacccaagagtgacgtaccagtcattacccccaatgaactatccgaggctgatggctttgtattcggcttcccaacaaggtttggaatgatggctgctcagtttaaagcctttctagatgctactggaggcttatggagagcacaacaacttgcangcaagcctgctggctcttctacaacaccggttcacaag

SEQ ID NO: 268674 - DNA, 99 bp, Glycine max
aaaaaaaaaaaaaataaaaaaaaaaaaaaattttatttataaaaaaaaaaaaaaaaaatattaaaaaaggataaataaaaaataaaataagggtatatt

SEQ ID NO: 268675 - DNA, 427 bp, Glycine max
cccacgcgtacgtggacgcatgggcagacttttggacccgctacgtcaataagaagcacgtgaaattgtatgaatggcgtatcaaacacaaaagaaacagaattgctacatagcaaaaactccttcaaacttctacggttatggcgtgcacgttgagcacttcttaaattgcgattctgactctccgctgtatatcatgtaacacttgcaagccttgcattcacacactctctctaacttcagggcagagctatgggcggaaattttatggaggaattggaattcatggcatcaagggaaggtctcagctctcagttgccaatgttgccactgaagttaactctgtagaacaagcccaaagtattgcttctaaagaaagccagaggccagtatactcatttctgccatagtttgacaagatgagatg

SEQ ID NO: 268676 - DNA, 425 bp, Glycine max
  unsure (1)..(425): unsure at all n locations
caaggagactagttctgtattcagattacattgcaaaaatggcatcattcaccatgacagcttctatctttggctgcccagctgtcaccaaacggtcggcagtggctgcgcagaggagattactcgtagtgagtgctgccaaagctgaaggggaaaaggtcagttatgacaacaatgatagcaatggaaggaggaacttgatgttcgctgtggctgctgctgctgttttctctgttgctgggatggcagtggcagatgagcctaaaccaggaacctcagaagccaagaaaaagtatgccccggtttgtgtcaccaatcctacagctaggatttgtcgcaattgaggatctcctgtttcattntacctctgatgatcggaaatgtacgttgggggatgaagtatgtttttgatttaatatgatcct

SEQ ID NO: 268677 - DNA, 435 bp, Glycine max
  unsure (1)..(435): unsure at all n locations
cacacacacacacaacaacactctgaaactaacaacaacaataaaagaccatgtcggtgaaggagtgcgagcaccacaaggggaagaagaggaagatcttccggcaagtgttctggtgcttagtggtgttccttttcatcgtgctggtcacaattcctttgatatgggcaatccttagacccaccaaacccaccttcacgctccaagacgtcaccgtctacgccttcaacgccaccgtggcgaacttcctcacttcgaattttcaggtcacgctcatctcgcgtaacccgaacgaccgcatcggtgtttactatgatcgcctcgaaaccttcgtgacctaaccgagccagcangtcacgtaccgaaccgccatccctccgacatatcaaggccaaaaaagagataatgttgggtctccgtttgttaatgcaccaa

SEQ ID NO: 268678 - DNA, 438 bp, Glycine max
  unsure (1)..(438): unsure at all n locations
atcacagtgaaacgaagaagccctaactacgcacgcactcattcttgagaaagctcaatattcattcgtccatggcactctcttctcgtctcttttccaaatccaaattgatctatggctgtcaaatacttctgcaaaaggagcatgctattccagttcgtcactttgctaaagagtctgcccctcctgcccttaagggagatcagatgctgaagaacatttttgtggaggtgaagaacaaatttgagactgccataggaatattaaagaaggagaagatcaccattgacccagaagatccagctgctgtttctcattatgcaaaagtcatgaaaacagntagagagaaggcaagcttgttgtcggagtcccaagacatactatccaccattgaaattgagactcangtattccagatgctcggacctatcttctgac

SEQ ID NO: 268679 - DNA, 443 bp, Glycine max
  unsure (1)..(443): unsure at all n locations
tagaaacagtgtgatgaaaatgaaggtccttgttttcttcgttgctacaattttggtagcatggcaatgccatgcgtacgatatgttccctctccgaatgaacactggctatggtgcccgtactccggaagtgaaatgcgcaagttggaagcttgctgtggaagcacacaacatctttggctttgagaccattcctgaagagtgcgttgaagcaacaaaggaatacatccatggcgaacaatatagatcagactccaaaacagttaaccaacaagctttactttatgccagagacctcgaagtccatcccaaggacacnattgtgttcagtatagatggcaccgtactctctaatattccatactacaaaaaacatggatatgggggtggagaaaattaactgaccttggatgatgaatgggttaacaagggcaatgcaccgg

SEQ ID NO: 268680 - DNA, 433 bp, Glycine max
  unsure (1)..(433): unsure at all n locations
cccacgcgtncgcacaaatcacaatgtgctccgataactacaatctctcaattccccattaattaaaatcaaaatcaaaatctaatctgggtttctcccatcagaagacaaagcttccgactttgcgggattcgttcgtatttgtttcagtgctgtgatggggaaggtcgcggtgggagctgccgttgtctgcgccgccgccgtatgcgctgcggcggcgctggtggtgcgccaccgcatgattagttcccggaagtggagtcgcgccatggcgatactgaaggagtttgaggagaagtgtggcaccccaattgtgaagctaagacaagtggctgatgccatggatgttgagatgcacgcgggtctcgcatctgaaggtggtagcaagctcaatatgttgacagttttgtcgataatctcccaactggggatg

SEQ ID NO: 268681 - DNA, 75 bp, Glycine max
cttatttcctcacgatgtaaaacttaatctcatacttgtacttcagcatcaataaacataccccttatatttgag

SEQ ID NO: 268682 - DNA, 451 bp, Glycine max
cccacgcgtccggaaaagaaaatcctcacccattttcttcgtagccaaacactctgaaattctcaggtatgtcgtggcaagcgtatgtggatgatcacctactgtgtgaaatcgaaggtaaccacctcactcacgccgctatcatcggccaagacggaagcgtttgggctcagagcaccaacttccctcagttcaaacctgaggaaataactgccatcaataatgactttaatgagcctggatcacttgctccaactggattgtatatcggtggcaccaaatacatggtcatccagggtgagcctggtgctgtcattcgagggaagaagggtcctggtggtgttactgtgaagaagaccggtgcggccttgatcattggcatttatgatgaaccaatgactccaggcaatgcaacatggtagttgaaaggcttggcgattatctcattgat

SEQ ID NO: 268683 - DNA, 427 bp, Glycine max
gcgagagagagagatggatactggtatgctatgaagatgggatctcagactcagcgtcatcaccactctctttgattctcttcaatcttgagtctccagtattactttgagtaccacttcaacaaactggtgctgctttgaaaaagtctgatgggttcaagattcccatctcatcagctcagcaatggcctgtatgtatcaggccggcctgaacagccaaaagaaaagactcccacaatgagctcagttgccatgccctatactactggtgacatcaagaggtcgggagaattaagcaaaatgtttgatatcccaatggatggctctaaatctagaaaatccggtcccataagtaatgctccttcaaggacaggatcatttgcaggtgcttgctcacactctggactatcatgcaaaatgctgcagc

SEQ ID NO: 268684 - DNA, 450 bp, Glycine max
ctcattcttgttgttagggtgtgtcatttgtgaaactatcaacaacacgaggccatcatcatggcagctgcttccccaatggcaagcgcaactcaagtccaccttcactaggactcttgtagctcccaagggcctctctgcctcttgaccacttcacctcgtgccttctagaaggcaacttagcttcactgttaaggccatccaatcagagaagccaacctatcaagtgattcagccaatcaacggtgacccattcattggaagcctggaaaccccagttacatccagccctttgatcgcatggtacttgtccaacctgcccgcatacagaaccgcagtgagcccactactaacagggatcgaggtgggcctggcccacggataccttctggtgggcccattcgtgaagccgggcctcttatgaacaccgagatcgccgggcaagcaggc

SEQ ID NO: 268685 - DNA, 450 bp, Glycine max
ccaaagtccaaattttctagttccaccaaaccaaaccaaaccaaaatggcagcagcctcagcctcatccatgatatcaacaccagccttatctccaaccatccaaaagcaccatcatttgaagccatccaacgtgtgcttccaaggtcttagacccctcgcaaggttcaccaaagcctcatcaaccaaagtgagcaccaccaccaaaagggttattccaaagggtggtgttagagctgaactcaactcagcccttgtgataagcctcagcactggcctctccctcttcttgggaaggtttgtgttcttcaacttccaaagggagaacgtggcaaagcaagtgcctgagcagaacggcctcacacactttgaggctggtgatacacgtgccaaggagtatgtcacctcctcaaatccaatgaccctgttggattcaacattgttgatgtct

SEQ ID NO: 268686 - DNA, 444 bp, Glycine max
cccacgcgtccggagcagcagcacattcctcgtgactcgtgaggttcgttactagcgtgtgtggattttaaatcaggtgcgacgcggtgtagagagtggcggtggtgtcgccgtggcggaagtgagaatgacttcggacggagcaacgtcggcggcgactaaccggaggaagccgtcttggagggagagggagaacaaccggaggagagagagaagaaggagagccatttcggcgaagatatactccggtcttagggcgcaagggaactacaatttgcccaaacactgcgacaacaacgaagtcttgaaggctctctgcgctgaagctggttgggccgtcgaagaagacggcaccacctatcgcaagggatgcagggcaccatatccaggtgatggtgtaggacctccaccagaaacactcctttctcatcacaaaatccaagt

SEQ ID NO: 268687 - DNA, 378 bp, Glycine max
gagatgcgattgaacaatggtgaatgctgtttctcaacttggcactcagaaatgggttactggaactattcacttagaacatgatgcgggtggttcaacaaccaggactagatttcttactgggcttaatgcaggtctacatggtttacatctccacacgtggagggacactaccaatggttgcctcttatctggatcacatgtcaatcctgataacaaggagcatggtgcccatgaagatgagaatcgtcatactggtgatcttgacaacgataatgtcggcgatgatggtactgtcaagttcactattactgacagccagattacgctcactggaccaaacaacatcataggaagggcgggtgttgacatgctgat

SEQ ID NO: 268688 - DNA, 390 bp, Glycine max
gttgatcgagataactagaaacagtgtgatgaaaatgaaggtccttgttttcttcgttgctacaattttggtagcatggcaatgccatgcgtacgatatgttccctctccgaatgaacactggctatggtgcccgtactccggaggtgaaatgcgcaagttggaggcttgctgtggaagcacacaacatctttggctttgagaccattcctgaagagtgcgttgaagcaacaaaggaatacatccatggcgaacaatatagatcagactccaaaacagttaaccaacaagcttacttttatgccagagacctcgaagtccatcccaaggacacatttgtgttcagtatagatggcaccgtactctctaatattccatactacaaaaaaca

SEQ ID NO: 268689 - DNA, 432 bp, Glycine max
caggataggtgttttggtagaagtaaactgtgagacagattttgtctcacgaggtgaaatttttaaagagcttgtcgatgatatagccatgcaagtggctgcatgccctcaagtagagtatcttgttactgaagatgttcccgaggaaattgtgaacaaagaaaaagaaatagaaatgcagaaagaagatcttttgtcaaaaccagagcagataagatcaaagattgttgaagggcggataagaaaaagacttgaggagctggcattgctcgagcagtcctacattaaggatgataaggtagcagtaaaggacttcatcaagcaaactattgcaactattggagaaaatattaaagttaagaggtttgtgcggttcaaccttggagagggtttagagaagaaaagcaggattttgctgctgaagtagcagca

SEQ ID NO: 268690 - DNA, 432 bp, Glycine max
aagccaagtgaaagtgagaaaaaataaaaatcaaagagcataatgtcagggatcattcacaagattggggagacccttcatgtgggagggcacaagaaggaggaggagcataagggtgagcaccatgctggagaatacaaaggggagcaccatcgtgaacacagtagtgagtacaaaggagagcatcatggtgaacacaaagctggagagtaccatggtgagcacaagccagagcacaaagaggggttcctagacaaagtcaaggacaagatccatggtgagggcggcgccgccgagggcgagaagaagaagaaggagaagaagaagaaggagcatggccatgagcatggccatgacagcagcagcagcagtgacagtgattaaactgctgcatcacctatatatttaaaggtttatgggaccatagtagcg

SEQ ID NO: 268691 - DNA, 450 bp, Glycine max
aaacagtgtgatgaaaatgaaggtccttggtttcttcgttgctacaattttggtagcatggcaatgccatgcgtacgatatgttccctctccgaatgaacactggctatggtgcccgtactccggaggtgaaatgcgcaagttggaagcttgctgtggaagcacacaacatctttggctttgagaccattcctgaagagtgcgttgaagcaacaaaggaatacatccatggcgaacaatatagatcagactccaaacagttaaccaacaagcttacttttatgccagagacctcgaagtccatcccaaggacacatttgtgttcagtatagatggcaccgtactctctaatattccatactacaaaaaacatggatatggggtggagaaattaactcgaccttgtgatgaatgggttaacaagggcaatgcaccggcactgcccgagact

SEQ ID NO: 268692 - DNA, 451 bp, Glycine max
  unsure (1)..(451): unsure at all n locations
gccgctacatgaccgacatgataacctacgccgacaccgacgtcgtaatcgtcggagccggctcggcggggctctcctgtgcgtacgagatcagcaagaaccccgccgtgagcgtcgccataatcgagcagtccgtgagccccggcggcggcgcgtggctcggcggacaactcttcttcgccatggtggttcgcaagccggcgcacctctttctggacgagctcggcgtggcgtacgacgagcaagaggactacgttgtgataaagcacgcggctttgttcacgtccaccatcatgagcaggcttctagcgaggcccaacgtgaagctcttcaacgcggtggcggcggaggacttgatcgtgaaggaagggagggttgcaagggttgtgaccaactgggctctggtttgatgaaccatgacacgcagtctngcatggaccccaacgtgatg

SEQ ID NO: 268693 - DNA, 449 bp, Glycine max
gtgacaatggtggcgacgaacgtgaaggcagaaaccatgtctctgatggacaagcgcagcgccttggaggctgagatgaactccatcatcgcccgcctctcccagcccggcgctcctggcctctccggaaatctcgtcgactctgagggttttccccgttccgatatcgacatccccgttgttcgagccgaacgacgtcgcctggcagagctgcgcagtgaccacaacgaagtaactgagaaaattaacctaaatattcagattctccattcggcaagactcggaaataggtcattgcccttcaagaattcaggtaacgatgatggttcagatactcagatctcatcaaatatggacactcgtgcatcaacaccatcacaaaatgtccttctgatacgatctccaactcaatggatgtgaacgtgttgattagtagaccatgtgcaatg

SEQ ID NO: 268694 - DNA, 443 bp, Glycine max
  unsure (1)..(443): unsure at all n locations
atcattcattagctgggcggtttgtaaaggctaaattctaataacaccaacgtcttcatcttgtaagctccgtctcttgacaaaatcaacgtcccatttatgcaagctttgattaaccattttcattccctttttccttcgcactactccctcattctgtgccatgtcttcctctctcgttcttccttccactcccttcttcgcccatggaacaagaaccctccctctcactcgatctaggctttccatgaccgtctccgccggatctcagccttctctccgcgacgctctgttcgccgattacaaggcctccacttcattcctcttccccggccagggtgctcaagctgttggaatggngaaagaagctcagaatgtgcctactgctgcggttttgttcacaaggcaaacgacgtattgnggtttgatcttcttgatatatg

SEQ ID NO: 268695 - DNA, 327 bp, Glycine max
acatggcacaagggatacaaacccttaatcccaattccaatttccataaaccccaagttcctaaatcttcaagttttcttggttttggatctaaaaaactgaaaaattcagcaaattctatgttggttttgaaaaaagattcaatttttatgcaaaagttttgttcctttaagatttcagcatcagtggctacagcctgcatgcttcacggtgcaagcagccggcccgcaaccgcccgcaaatcctctggcctttccggaaccgtccgcattcccggcgacaagtcgatctcccaccggtccttcatgttcggcggtctcgcgagcg

SEQ ID NO: 268696 - DNA, 446 bp, Glycine max
cggacgcgtgggttcagttttaagttacatagtttttcattgttttacttaatctacaatggctgcttcaacaatggctctctcttcatcatcattggctggccaagctatcaagcttgccccctccacccctgagcttggtgttggaagggttagcatgaggaaaacagcctccaaaactgtttcctcaggaagcccatggtacggcccagaccgtgtcaagtacttgggcccattctcaggtgagcccccatcctatctcactggtgaattcccaggtgactatggttgggacactgctgggctttctgctgacccagagacttttgccaaaaaccgtgaactggaagtcatccactccagatgggccatgttgggagccttgggctgtgttttccctgaatcttgtcccgcaacggagtcaagttggcgaggccgtgtggttc

SEQ ID NO: 268697 - DNA, 430 bp, Glycine max
cttgttggtaaagaaagaaagagaagagaagaatcgaagacgaagatggaggacgcatcagcatcaaagttcattccacaccaaatcggaggggtccaaaacgacgcgcttcgattcggtctccatggagtcaagagcgacatcgttggttctcaccctcttcaatcttcactccaatctacaaggagaatggatgaagcgatgaagaggcaatgcaaagttaacctgtacggaactgcttttcccatgaaggaggagcttgacaggcaaatcctgtccaggttccagcggcctcctggaccaattccttcttcaatgctgggtttggagactgttacaagaagtgttgatcactttggttttgaggattgtctaaatgacccccgtgagtcagagactttccggccctagacatgcatcatgggatgga

SEQ ID NO: 268698 - DNA, 452 bp, Glycine max
cccacgcgttcgcgagataactagaaacagtgtgatgaaaatgaaggtccttgttttcttcgttgctacaattttggtagcatggcaatgccatgcgtacgatatgttccctctccgaatgaacactggctatggtgcccgtactccggaggtgaaatgcgcaagttggaggcttgctgtggaagcacacaacatctttggctttgagaccattcctgaagagtgcgttgaagcaacaaaggaatacatccatggcgaacaatatagatcagactccaaaacagttaaccaacaagcttacttttatgccagagacctcgaagtccatcccaaggacacatttgtgttcagtatagatggcaccgtactctctaatattccatactacaaaaaacatggatatggggggagaaatttaactcgaccttgtatgatgaatgggttaacaaggg

SEQ ID NO: 268699 - DNA, 361 bp, Glycine max
attccaattcccaattcccaattcccaattcgaaacccttattcctttcaaagaaccaaattgagtgatcgtgatggcaccaaaggcagagaagaagccagcggagaagaagcccgcggaggagaagaagtccacggtgggagacaaggctccggcggagaagaagccaaaggccggaaagaagcttccgaaggagggaggcgccggcggagaagggaagaagaagaagagaaacaagaagagcgtggagacatacaagatctacatcttcaaggttctgaagcaggtccaccctgacattggtatctcaagcaaggccatgggaatcatgaacagcttcatcaacgacatcttcgagaag

SEQ ID NO: 268700 - DNA, 384 bp, Glycine max
actcacaagagacaggctcaactaccagactaattttccaattccggcatgtgctccaaacctacggaccgcagataccctaaatgcggttcatacacataacacaacacaacctcgttcctttgctgaccaactcggatgtggctttgttctttcactttaacctatggttatggcttcgttgattcagtatgaccgaagtgccctctcctatgtgaccatcactacccgcttcagacggacccacaagcctcgacttcgttgctccttagatgctaaagtatgcgacatgagcgataacgcgcctaagggggggttttcttctgatccagaacattatcgaggacctgaactgaaagtggcaattattggagctggacttgc

SEQ ID NO: 268701 - DNA, 422 bp, Glycine max
cccacgcgtccgcccacgcgtccgagagtttgttgtgagctataagctagtttatcgtgaggagaatatgaagttgtttgttttctttgttgctgcagtagttttggtagcatggccatgccatggcgcaagctaccaaaggttccctctccgaatgaaaactggctatggtgagcgttcttcggaggtaaaatgcgcaagttttaggcttgctgtggaagcacacaacatccgagcctttaaaaccattcctgaagagtgcgttgaaccaacaaaggactacattaatggcgaacaatttagatcagactctaaaacagttaaccaacaagctttcttttatgctagtgaacgcgaagtccatcacaacgacatatttatattcggcatagataacaccgtctctctaatatcccatacta

SEQ ID NO: 268702 - DNA, 397 bp, Glycine max
ggataagctgaaactgaaacatggtatctctgggttccttcacttcttttgcatgtgacaacctttctctttctctttctcaggctctcaaaccgtcatcattgcctctcattcactctttcacacttccaagaaacactatcaggaagaagaacggtgctagtgtgaggcctctggtctgtgccctcaacaacaataacaacaacactgccttgcagtacagaaccctcggcgactccgacctcaacatcagcgaaatcactcttggtactatgacctttggggagcaaaacactgagaaagaagctcacgacattcttaattatgcattcgaccgtggaattaacgctctcgacactgctgaggcctacccaattcccatgaagaaagagacaca

SEQ ID NO: 268703 - DNA, 425 bp, Glycine max
cggacgcgtgggcggacgcgtgggctcggcggcacacacaaaaccctttctcagtcactcactcggcaaaagagaagcgtcgacggtctgcacggtgggtgcttcatcgacggcagcgacctgtggcggaggacagggttcccttcgctcttggagttcgcatcgggcagagaagcttctctgcattgcgctgggacgcaaaaccctggcagcaatcagcaccacggcgcagccgcacacctctgagacgccaccgcaatcaggatgagtgaacttctttttgatgacattttcaaggtcgagaaggtagaccctgatggtaaaaagtatgacaaggtttctcggattgtggcacggagtgagaagtgtgacatgaacatgcttctagatgtaaataccgagatttatcaatggggggaaaagaa

SEQ ID NO: 268704 - DNA, 386 bp, Glycine max
  unsure (1)..(386): unsure at all n locations
cccacgcgtncgaaacactatagcaatagaaacatttgcttttgaaaaacccctcactcttcatcactacactagctagccacatacaatgtcgaccaaatttaaggtgtttcgtgaattcacaagcgatgactcattcctaaaccaagttatccctgaaaacatcaccgaattccaagtgactctgtccctcgctagagactacgatggcaacaactcaaccaacggaaagttcattccttactgggacactgaaaaggtcactcccgaagtgataaaaaaattcaagaaaaaatacgaacccaccgcactgagggttaaggttcttgtcagcattggaaacaaaaacaaacaatttcctttcaccattggctcggactcgaaca

SEQ ID NO: 268705 - DNA, 446 bp, Glycine max
  unsure (1)..(446): unsure at all n locations
tttcttcatatcttccttgtcactgcccgtgtgtcgccgccatggccaccgtcaccacccaagcctgcgccgcaattttccggccatgtacctcgaaatcgaggtttttgaccggctcttccggtaaacttaaccgggaagtgactatgcggccaatggggtgccctccttctgcctctttcaaggttgaagccaagaagggagagtggttacctggcttggcctccccaacttacctcaatggcactcttcctggtgacaatggatttgaccctctggggctagctgaggacccagagaacttgaggtggtacgttcaagccgagcttgtgaatggacgttgggccatgttgggtgttgcaagaatgttgcttnctgaggttttcaccaagtttggaatcatcaatgccctcaatggtatgatgctgggaaatcagagtactttg

SEQ ID NO: 268706 - DNA, 251 bp, Glycine max
  unsure (1)..(251): unsure at all n locations
ttgctgttttcatcattaccgtgattctggtagggtgaaccgtaagctatgattgtttttggccttgttgccttagtgattcttgctgtttctttgttttgnttaagttaccaacacttcattttgcttcttttcgatgaagcaaagcttctccatattttggttaccctacatattatatgctcttttacttttgttaaaaaaaaaaaaaaaanaaaggaaaaaaaaaaaaaaannntttttaatttttt

SEQ ID NO: 268707 - DNA, 373 bp, Glycine max
ccaccctatgtgtaccatagtgtgggattcctttttgctccaattgtgttggcatggctgttgggcatcagcacacttggtttatataatatattcaaatggaatccgcatgtatataaagctctttcgccatattatatgttcaagttcttgaagaagacaaggataagtggatggatgtctttgggtggaatattgctgtgcataacaggctcagaagctatgtttgctgatcttggacatttctcatatatggctattcagattgcattcacctttctggtatatcctgcgcttatattggcctatatgggtcaagctgcttatttgtcgcatcatcatgattccgaactccaaatcaagttctatgtct

SEQ ID NO: 268708 - DNA, 379 bp, Glycine max
tcggccacgcgttcggtcattcaacatttctctctcccttaactaggttttaccaatggctggtgggggtagggcttcaatctctttttcattcaccaaagctacctctcttccaagcaagaacttcatcattaccccaaaaagagttgtattcaaaaaagcttcattgcaatacagagatgtttgtagcaagggaagggtagtttccatcagagctcaagtcaccactgaggctccagccaaagttgaaaaagagtccaagaaacaggatgaaggtgtggttgtgaacaagttcaaacccaagaccccttacgttggtagatgcctgctcaacacaaagatcactggggatgatgctccaggagaaacttggcacatg

SEQ ID NO: 268709 - DNA, 415 bp, Glycine max
  unsure (1)..(415): unsure at all n locations
cggacgcgtgggcggggaccagtactataacgagaagctgataacggaagtgcacgggttcggggtggaagtgggggccgcggaatggaacatttcgccgtacgaggggaagaagaaagtggtgagtggggagaggatagaaagtgccgtgaagaggttgatggatgatggagagaaagggaagagaatgagaagcaaggccaaagagatgcangagaaggcttggaaagctgttcaagaaggtggttcttcttacgacagtctcacggctctgattcatcatttcaagactcttgtgcctaatcatgtgaatgggaatgggaatatcgatcactgaatgaatattacattgattcgagtttcatgtttttgattattaggtatttatcaagtgaatgcatgaatgcataatttt

SEQ ID NO: 268710 - DNA, 353 bp, Glycine max
tatccatgtaacaacatagaagacacgtcgttttgtatcttcattttggttcctgcaataatggatttgatgttccctctgaaaccccactgtgttattctcaaggcaccactctcttcttctctcttgttcccttttcctctcaggtttcgggctgtcaccgctttcaagcatgccaatattcaatgcgagcttgaaggcagacccaatggtgctctctctggtgacttcgaccctcgcttcattgacaggcaaaaagcactggaagcagcgatgaatgatataaacaacaactttggaaagggcagtgttacaagactgggcagtgctggtggagctttggttgaaacttt

SEQ ID NO: 268711 - DNA, 453 bp, Glycine max
tctttgcgcagttccctacctctcctttcaagatgcagatcttcgtcaagaccctcaccggaaagaccatcacccttgaggtggaaagctctgacaccatcgacaacgtcaaggccaagatccaggacaaggaaggaattcccccggatcagcaacgtctcatcttcgccggaaagcagctcgaggacggccgtaccctcgccgactacaacatccagaaggagtcaacccttcaccttgtccttcgtctccgtggtggcatgcacatcttcgtcaagactctcactggcaaaaccataaccctagaggtcgaaagctctgacaccattgacaacgtcaaggccaagatccaggacaaggagggaatccccccagaccagcaacgtctcatcttcgccggaaagcaacttaggacgggcgcaccctcgccgactacaacattcagaaggaatc

SEQ ID NO: 268712 - DNA, 364 bp, Glycine max
gatcactcgtagtgaatgctgccaaagctgttgaagcagaaaaggtcagttatgacaatgacatggatggtagcaatggaaggaggaacttgatgttcgccgcggcggcggctgctgtttgctctgttgctgggatggcagtggcagatgagcctaaaccaggaaccccagaagccaagaaaaagtatgctccgatttgtgtcaccatgccaactgctaggatttgtcgcaattgagggactttggttttattttacttctgatgattggaaatgtacaatggggttgttgtaatgctttgatgatttcatttgatcctcactgtacaagatgttcataaaactatcgagctttgctttgtgtc

SEQ ID NO: 268713 - DNA, 303 bp, Glycine max
  unsure (1)..(303): unsure at all n locations
gaggcacgcgtcacgccacgcgtncggatagagacgacacagtgccttatggtaagtggattcataaattatagtcaacaaacagtccgagctgcaaggtacattggtcagggtttcacgattaccctatctcacgcaaataggttacccgtaactattcaatatccttatgaaaaaataatctcatcagaacgtttccgcggtcgaatacattttgaatttgataaatgcattgcttgtgaagtatgtgttcgtgtatgtcccatccatctaactgttgttggttgggaactagaaactgat

SEQ ID NO: 268714 - DNA, 411 bp, Glycine max
cccacgcgttcgcccacgcgttcgaaagaaagaaagtgcaacttcctctgttttgctcccctgtttaagccttatcataagcttagaatggcacacaaggaattttccattgccctagtgactctcattgttctctttgtcaacacgaacctccatggtgccatggctgactatggtggtggttggcagagtgctcatgccactttctatggtgggggtgatgcttctggcacaatgggtggagcatgtgggtatggaaatttgtatagccagggatatggaactgacactgtggctctaagcactgctttgttcaacaatggcttaagctgtggatcttgctatgaaatgagatgtgatgatgacccaagatggtgcaaacctggctctattaccgtcactgtactaact

SEQ ID NO: 268715 - DNA, 406 bp, Glycine max
cccatttttcacaccaccaacacaagatgtttctccacattgtgttcctccttttccttctctcatccacttcccatgccactgtccaagacttctgtgtggcagacctcaaaggtgcagacacccctgcaggctacccctgcaagccacctgctaatgtcacttcagatgactttgtgtacactggcttagctgaagctgcaaatgtcacaaacataatcaatgctgctgtgaccccagcttttgttgctcaattcccaggtctcaatggccttgaactatctgcagcaaggttggaccttggtcctagtggtgttatcccactccacactcatcccggtgccaatgaactactcattgtgcttcaaggtcacatccttgctggattcatatcttcaggtaacat

SEQ ID NO: 268716 - DNA, 424 bp, Glycine max
ctcatcttcctctttttctcaacaaaaaggggttcaattctagctagttctattacgtcgtccgcgaccatgaacatggcgatcgcgcttctgttcatggttttcgcagtttcatcagctttagacatgtcaataatatcacacgacaacgctcatgcggatagggccacgaggcgcaccgacgaggaggtgatgtcaatgttcgaggagtggctggtgaaacacgacaaggtgtacaacgcgctcggtgagaaggagaagaggtttcaaatctttaagcacaatctgcgcattatcgatgaacgaaactctctgaaccgaacctacaagttgggactcaacgtgttcgctgatctcaccaatgcggagtacagagccatgtacctgcgaaccctggacgagggtccgaggttgggcttggata

SEQ ID NO: 268717 - DNA, 414 bp, Glycine max
atctcttctcttctctttcccctcaccaacacgtcatttcatttctttcaaagtcttcccttctctcctcttcctcttcacttcttaaaccgtcgccccttaacgacgccgtttcctgttctctcatgtaagcgcggttcgagaaaaaaaaaagaaaatccgttattggcgttgctttatttttgcttccggttcggattatttgaatggatcgggcggcgttgacggtcggaccgggcatggacatgccgataatgcacgacagcgaccgttacgatctggtccgcgacatcgggtccggaaatttcggcgtggcgaggctgatgcaggataaacaaaccaaggaactcgtcgccgtcaagtacatcgaaaggggtgataagattgatgaaaatgtgaagagggaaattatca

SEQ ID NO: 268718 - DNA, 319 bp, Glycine max
gttgatttggtcacagaaactgataaagcatgtgaagaactcatatttaatcatctgaaacagctttatcccactcacaagttcattggggaagagaccacagctgcctatggcactacagaacttacggatgaacccacatggatagttgatcccctggatggaactactaactttgtgcatgggttcccctttgtttgtgtctccattgggctcacaattggaaaaactcctacaattggtgttgtatacaatccagtaattaatgagctgtttactggaattcatggaaaaggtgcctttttgaatgggaatccca

SEQ ID NO: 268719 - DNA, 347 bp, Glycine max
aaaaaaaaaaaaatgaaaaaacaagaaatatatgaagaaaaaaaaaaaagaaaaataaaagagggatggctcagtaccatgggcatgaccattgctctctcctgcctaattttccctctgtttttgttaactggccatggtggccactactttccggaggtgtcatgccaaagcttggaggcttggtggggattctcacccctttcatttactggaaaaccgttcctcaagattgccagggatatatttggaactacatgcttggcgaacattctttatcagactccgaaatagttaaccaacatgttgatttctatgctggaaccctcaatatcactgctcaaacc

SEQ ID NO: 268720 - DNA, 385 bp, Glycine max
cccacgcgtccgggtgtgaatactataccttagcatgaaattcaactttgtgggactacatgttgaagtttgattggtgaacgagatctgatctcttgatccacaaaaccatggctgaaaaggtgaccatcatgaaactcaaggttgaccttgagtgtgagaaatgctacaagaaggttaagaaacttctcggcaagtaccctcaaattcgggaccagaagttcgatgagaaggaaaacattgtgttcatcacagtggtgtgttgtagccccgagaagataagagacaagctttgctacaaaggtggaggctctatcaagagcattgagatactggaactgcccaagcccaatgccgagaagcctaaagcagaccctcccaaagc

SEQ ID NO: 268721 - DNA, 421 bp, Glycine max
caacagcaacaacacccttatcctctcaccacaacgaccacctctgaccataagcccctctcagtttccacactgcccagaaagttgctctgtaaaccacccaaaggaaagtacgtcagagaggactatcttgtgaaaaagttgtcagctcaggaaatccaggagctggtaaagggagaaagaaaagtgcctcttattattgatttctatgcaacttggtgtggaccatgcattttaatggcacaagaacttgaaacacttgcagttgagtaccaaaacaaggcgctgattgttaaagttgatacagatgacgagtatgaatttgcacgcgacatgcatgttcgcgggttggctactgtgttccttaatagccctgatctgaacaaagaaactattcgaaccgaaagacttcttccaatac

SEQ ID NO: 268722 - DNA, 387 bp, Glycine max
gccactctaaagaaaatggcggtgcctctactctcgaagaagatcgtgaagaagagggtgaagaagttcaagaggcctcagagtgacaggaaaatttctgtcaagacaaactggcgcagaccaaagggtatcgattcccgtgttaggagaaagttcaagggatgcactttgatgccaaacattggttatggttcagacaagaagacccgccactatctccctaatggttttaagaaatttgttgttcacaatgtgaaggacttggaactgctcatgatgcacaacaggacttactgtgctgagattgcccacaatatattcacaagaaagaggaaagatatagttgagagagccgcgcagtttgatgttggtgtgacaaacaaaaca

SEQ ID NO: 268723 - DNA, 414 bp, Glycine max
  unsure (1)..(414): unsure at all n locations
aacaggttgaacactgcatcgcaaattctttatggaaatgtgtggagccacagctctgacatggtctcacaccatctgtccatcgcttcaccttcctcgatccgtctctaccagggaggctaggaggagcttcagtgtttggtgtgtctctgatcaagaccccaagggaaataaaatgatcatatctgtaactggagcaacaggttttattggtagaaggttggtgcaaagattacatgcagacaatcacagtgttcatgtcttgacacgatccaaatctaacgcagaaacaatttttccggcaaaagactttcctggaatcaagatagcagaagagcccgaatggaaagatagcattcagggctcaacggnggttgtgaatttggctggactgcccataagtacccgatggtc

SEQ ID NO: 268724 - DNA, 413 bp, Glycine max
tccacgcgtccgggccactctttagattcttcttctccttattcctcttctccttcttcttcttcctctccttcttcttcttcttcttcttcttcttcttcttcttgctgtaattcttcaacttcaatcctgacttgtctctttctctctcgctctaaattttttttttgcttacctgcaaccggcttaagctgtggtaactccttcctttaattaatcactcttttgttacggctattactcttattcttaatggccttaccagtgtgttgctcactgagaaaccaccaattatcagcatgacaaacataagtcctgaagctgaaatcaggatgccaatgtaagcattatcaccactttcagctgatgtgagctctatttactaataatttttcctaaatacaaactggatg

SEQ ID NO: 268725 - DNA, 426 bp, Glycine max
cccacgcgttcgtccacgcgtccgggaaaaatggtttcgctgaaactgcagaagcggctcgccgcgagcgtgctcaagtgtggcagaggaaaggtttggcttgaccccaatgaagtcaacgaaatctccatggccaattctcgccaaaacataaggaagctggttaaggatgggtttatcatcaggaagcccaccaagattcactctcgctcacgtgctcgtcgaatgaaggaagccaagaggaaaggacgtcactctggatacggtaagcgtaagggtacaagggaggcaaggcttcccactaaaattctatggatgaggagaatgcgtgtgctcagacgcttgcttcgcaagtacaggggatctaagaagattgacaagcacatgtatcatgacatgtacatgaagggtaagggtaatgttttc

SEQ ID NO: 268726 - DNA, 388 bp, Glycine max
  unsure (1)..(388): unsure at all n locations
ggagggatctctctctctctctctttctctcctctcacacccccaaaagcttcttctgttccgtgcaggcaatttttctttggtttggttgcatcttttgatctgatcaacaagtttgagaattcagtttgggaaaggccattcctctttagtacaaaacagattgagggtgcctttgtgctgatggccactaatgaaaatcttccaccaaatgtaattaagcaacttgccaaggagttgaaaagtcttgatgaatcccctcctgagggcattaaggttgtggtaaatgatgatgatttttcgacaatattttctgacattgaatgcccagctggaactccttatgagaatggagttttccgaatgaagctgntgctgtctcatgatt

SEQ ID NO: 268727 - DNA, 407 bp, Glycine max
gtgaagttggagacaacgttagcttcttctctctccttcctccattcttgatcatcttgctctttcttattgtcaatttcacttcctaatcccaaaccctctcattccctacctttcgtgctcgaagccaaagacaggacccgtatggaagacaggtccgcgcgccacactcgcatcagaaagaaggtcgaagggacacccgagaggccgaggctgtccctgttccggtcgaacaagcatctatctgtgcaggtgatagatgacaccaatatgcacacgctcgcttcgatttggacaatgcagaagacgggtgctgaaaagttcaactactccgctggccctacacttgaagtagcaaagaggatggctgagatcattgcgaagtcctgattagagaaggggatcac

SEQ ID NO: 268728 - DNA, 416 bp, Glycine max
gctccttctctcatcactcatctatggctacctttccctcccctccttcaccatcttcttcttcttcaattccgtctccaagatctagaatgttttactatgctggaagtgaagaccactatgaggagcctcacttcctccaagcttgttttctttgcagaaaaccactaggccaaaatcgtgacatcttcatgtacagagggaacacaccattttgtagcaaagagtgcagacaggagcaaatagagattgatgaggcaaaggagaaaagttggaagctttctttcaaaaggggtgtgagacaatcagagaccaatcaaaatttcacacccaataaggctgtaagaacaggcacagttgcagtggcctaatcataatcaaacaaagaataatcatgacatgatgatgatgatgag

SEQ ID NO: 268729 - DNA, 408 bp, Glycine max
tgaaagtacaagttgcagggatggcctcaaccttctcctccacactctctatatcctcttcatccacccttgttgatgccaaggctccaagtccaagacaatccccacaatgtgtctcccctccacctgttcactctccttggaagaccactgctttctgtcgcaggattgcaagcaatgttatggcaatggctaccaccagagaggcacccgcagcagaagttgccacgaccgagctctctgttgccgagacgccagagattgtgaagactattcaagaagcttgggacaaagttgaagacaaatatgcagtgagttcacttgccgtagccggtgtggttgcattggttggctcagctggcatgatctcagcaattgataagctttctttaattcctggggttcttg

SEQ ID NO: 268730 - DNA, 407 bp, Glycine max
gcgacgcgtgcgacatggtcagctttttctctctgcttactccattcatgttcatcttcctctttcttatcgtcaattggacttcctaatccgaaaccctctcattccctacctttcgtgctcgaagccaaagacaggacccgtagggaagacaggttcgtgcgccacacttgcatgagaaagaaggtcgaagggacacccgagaggccgaggctggccgtgttccggtcgaacaagcatgagtctgtgcacgtgatagatgacacctagatgcacacgctcgcttctatctcgacaatgctcaagacggctgctgaagagttcaactacttcgctggccctacacttgaagtagcatacaggatgggtgagatccatgctaagtcctgtttagagaatgagatcac

SEQ ID NO: 268731 - DNA, 419 bp, Glycine max
cccacgcgtccgctatgctggtggtgttttccttgtgaccatccattaccctcccgattatcccttcaaacctcacaaggtagcattcaggaccaaggtgttccatcccaacattaacagcaatggcaatatttgcctggacatactcaaagaacaatggagtcctgctctcaccatatccaaggtgctgctctctatatgttctctgctaacggatccaaatcctgatgaccctttagtgcctgatattgctcatttgtgcaagaccgacaaattcaagtctgagtctactgctagaagctggacccagatgtatgccatgggctaaaactcgcttgcctcatgccttctgcaatacacgttttggaattgtctttctgctcttcaaataccttccgctttatggtattatatattaa

SEQ ID NO: 268732 - DNA, 398 bp, Glycine max
ctcatcttcctctttttctcaacaaaaaggggttcaattctagctagttctattacgtcgtccgcgaccatgaacatggcgatcgcgcttctgttcatggttttcgcagtttcatcagctttagacatgtcaataatatcacacgacaacgctcatgcggatagggccacgaggcgcaccgacgaggaggtgatgtcaatgttcgaggagtggctggtgaaacacgacaaggtgtacaacgcgctcggtgagaaggagaagaggtttcaaatcttcaagcacaatctgcgcattatcgatgaacgaaactctctgaaccgaacctacaagttgggactcaacgtgttcgctgatctcaccaatgcggagtacagagccatgtacctgcgaaccttgga

SEQ ID NO: 268733 - DNA, 416 bp, Glycine max
cctgagactaaatagtgctaagaactctaatggtggacaagatgaatatgctgatattcaagtcccttgtgatttcttggctgctagttttctctagcagacacaccacagcagaaaagaaaacccatcacactaaaaacacatacataattcacatggacaagttcaacatgccagaaagtttcaacgaccatctccactggtatgattcatcactgaaatcagtatcagactcggcagagaggctctacacatacaaaaaagtagctcatggcttctctacaaggctaactacacaagaagccgagttactatcaaagcaacctggagttctctctgtgatcccagaagttagatatgaactccacacaactcgaacaccggagtttctggggttggccaaatacaccactctt

SEQ ID NO: 268734 - DNA, 259 bp, Glycine max
accacgcgtccgcccacgcgtccgataattttttatttaaatttttcacctgatgttctactgtcaaaagctttacaattttaaccattgttgaaaatcaaaaaaaaaaaaaaaaaaaaaaaaaaaaaaaaaaaaaaaaaaaaaaaaaaaaaaaaaaaaaaaaaaaaaaaaaaaaaaaaaaagaataaataagaagtataaaaaatgcaaaaataaaaaatgcaatgcataacaaatttttagctaaacctaaataaat

SEQ ID NO: 268735 - DNA, 406 bp, Glycine max
cttggttttcataacccattctccatctcagaatggagaatgcgagaataagccagtggttgatccttctggtgtgtgcgctgctgttgctgatatcagaagcttcttatgtgccaatcactattgttcagaacgcggtagcaaaaggagctgtttgtttggatgggagtccaccagcttatcattttgataggggatttggatcagggattaacaattggttggttgcatttgagggaggaggatggtgcaacaatgtcactacttgccttgctcgcaagaccaatcgtttaggttcatctaagcaaatggccaagctaattgccttttcaggaattttgaataacagggaaatgtttaatccagatttctacaactggaacagaatcaaggttaggtattgtga

SEQ ID NO: 268736 - DNA, 366 bp, Glycine max
tgcacccttccacattctttctcgttctcgatctctctcgatttttccttcccttttctccataaacgaggtgcttcagatttgctcataataggagggaatcgaatcgaatcgaatcgaaaggaaagtgcagaatggatgacatgccgttgccggcgctctttgagcaagcccgcatgatccacgccgcagccaccgattccggcgccgaccaggaggttgtgaagaaggggtgcgaggctctgcatagatgcgaggacatggtcaataatctaggtttgttctctcccaacgagaccaaagaagatatcagcaccacgaatctcaaatacattctggtgccattttatcttgcggagttgtcag

SEQ ID NO: 268737 - DNA, 429 bp, Glycine max
cccacgcgtccgctatggcccaagtttatcggtgtactgtgggtcgtgggtacgagatggtgagagcaattggcaagataggtgcagccctcagaaattgagtgggtctgggagaagaagcatcacctgcaaattcgagagtgtgagactcagtagagcatgcagtgtggcactgactaccttgctcacaaccgctgcggtgatagcttctgtggcagcagctgatgaacccgagactctatccaacataccccagactttgtccggtgagtgcacgttgcccaaagattgcaagaaagctagaatacagaaaccaaagtcaaggaaagcggaatcatgcacaatcaagtgtgtcaccacttgcatcagaggtggagatggctctcctggggaaggcccttttaacgtgataagacctctggttgtttc

SEQ ID NO: 268738 - DNA, 414 bp, Glycine max
gtgactcgagaatggccttgccagtggtcgtcgacgcagagtacctcaaagaggtcgacaaggctcgccgagatctccgcgcactcatcgctaacaggaactgcgctcctctcatgcttcgattggcctggcacgatgccggaacttacgatgctaagaccaagactggtggacctaacggttcgatccgtaacgaggaagagtattctcacggcgccaacaatggcttgaagaaggctattgatttctgtgaggaagtgaaggaaaaacatgctaaaattacatatgcagatctctaccagcttgcgggtgttgatgcagctgaggttaccgggggtgccacaattgatttcgctcctggtagaaaggattcacaaatatctcctaatgaaaggcggcttcctgaagctaaaa

SEQ ID NO: 268739 - DNA, 416 bp, Glycine max
cccacgcgtccggtcggaaagaataagaggatttccaagggaaagaagggtggcaagaagaaagccgctgatccctttgccaagaaagactggtacgatatcaaggccccttccctcttccaggtcaagaatattggcaaaaccctcgtctctcgtacccagggaaccaagattgcatccgaaggactcaaacatcgggtttttgaggtctcattggctgatcttcaaggggatgaagaccactccttcaagaagattcgcttgagagctgatgacgttcaagggaagaatgttctgacaaacttctggggaatggatttcacaactgacaagttgaggtctttggtgcgaaaatggcaaactttaattgaagctcatgtggatgttaataccactgataattatacattgaggat

SEQ ID NO: 268740 - DNA, 405 bp, Glycine max
accacgcgtccggctcgatcggacaggtctgccaggtcatcggtgccgggttcgatggcagattccacgaggttttgcctccgatcatgaccgtgctggaggttctgtatcactactagaggctcgggcaggatgtggataagcatatcagtgatagcgacagctcgaaccattgcacatggatgccaccgaacgggtcgctagagggatgcactcactcaacactgtctaacttattacctttccagctggaaggactaccctgtgacgtatggtatatgtctgtggcgagcctatagatgactggggtgacatcaataccgagcgttatttgcccattcatagagaatctatcgcttatagctgagcatgactctcgacagcacgattcttgttactggaatc

SEQ ID NO: 268741 - DNA, 416 bp, Glycine max
cccacgcgtccgatatagcccaagccctatacaaccaaaccctaacacacacccatttgattcagtttccatggctagcctcaaggttgcatttttggctgcagtgctctgcatggttgtggtgagtgcacccatggcacatgcagctatcacgtgcgggcaggtgacgagtagcctggccaattgcatcggttacctccagaagggaggaacgccgtcgtcgggatgctgcaacggagtgaagagcctcaatgccgtcgccaagaccaccgtcgaccgccagacggcgtgcaactgcctcaagtcggccgccagccaaatctccggcttcaacgccaacaacgccgactcgctccccggcaaatgcggagtcttcatcccctacaagatcagcaccttcaccaactgcgctacca

SEQ ID NO: 268742 - DNA, 419 bp, Glycine max
cacttccatcttcatcgtaaacaaacctcaaagttgcattccaccatgtctaaacaacccattgatccctttcgccacatcaacatagttctcaaccctaacggaaccctaaatcgcttgcgccatattcccagcaccgcaccctcttccgaccccactctcccagttctcaccaaagacatcaccatcaaccaacaaaacaacacatggctccgcttattcctcccccgaatagcactatccccaaaccctaagaagctacctctcatcgttttcttccacggcagcggcttcatcgtaaccagcgccgcctccactatgttccacgacttctgcgccgccatgtccgacgccgtccccgccgtggtggcctctgtcgaataccgactcgcgccggagcaccgtcttccggcggcgta

SEQ ID NO: 268743 - DNA, 275 bp, Glycine max
ccgacacattgtgggacgcctgtggaaatccatccttgactgacattctggatacaccgtcactagggaccatctgcacgctcacttttatttcttatacattcaatggcatcccactgacacatacgtgttcagtataaattgcaccgctctatccaatatcccatactataactcaacatgcttattgcgaggagaacattacaccctccttgtttgatgctttggtaaacacgggcagtgcaccgttgccgtggctgactcttacgaattac

SEQ ID NO: 268744 - DNA, 392 bp, Glycine max
  unsure (1)..(392): unsure at all n locations
cccacgcgtccgaagagttctttcaaaatgcaaacagccttaaccttcgctgcccccaacgttgtgccattggcacccacaaagagtgtctcccatattaccatctttcccaccaaattgaaagccccgcgctcctcacctcgttactctccgattagggttgcaaccgtggagcccgacacttcaactgtcgactacaactctgcgttctcagtgtttcctgcagaagcatgcgaaactgtaggaggggaagcctgcatggcggagatgtaccctgaaacgaagctacagccagaggctaagactccacgagtcgttacagagaacgttgagagagagtatcttgaatacgatgatcctaaaacggtatttcgaggagaggctngtgatga

SEQ ID NO: 268745 - DNA, 351 bp, Glycine max
accacgcgtccgatggtggtttaattctatgttgtttaataggaagttagaatacaggtgtgaattaagtaaatcaatggatagtcttggtcctattgaaaataccagtctaagggaagaccctaaaattttaaccgatatagaaaaaaaaattcacagggatttggattatttagaaatggaaggtttattttctagcgatctgaatactgtttctaagaatgatgatgatcattacatgtatgagactcaatttagttgtaacaataatattactagtttcattgataggtgcattgagagtttcaatttaggtgatattgacaaatacaatgatatttatatttatag

SEQ ID NO: 268746 - DNA, 413 bp, Glycine max
attcacccaacaaaatggctctgcttctgatagtacccatttcactggtaaccctctggctcggttacaccctataccagcggctacgcttcaagctccctcctggcccacggccctggccggtagtcggtaacctctacgacataaaacccgtccggttccggtgcttcgctgagtgggcgcagtcttacggccctatcatatcggtctggttcggttcgaccctaaacgtcatcgtttcaaactcggagttggccaaggaggttctgaaggagcacgatcagcagctggcggaccggcaccggagccggtcggcggcgaaattcaaccgcgacgggaaggatctcatttgggccgattatgggccgcactacgtgaaagtgaggaaagtttgcacgctcgagctttttacg

SEQ ID NO: 268747 - DNA, 361 bp, Glycine max
cggacgcgtgggcagacgcgtgggttcatataaaacagcagtgagagagaaactgataaggcagggatacaacattgttgggatcattggagaccaatggagcgatctcataggaggccacagaggcgaatgcaggacctttaagcttcctaatcccctgtactacattcagtagagtccttcacctgtcaacaatctagcttgctcctatctatctatatgtaataagatgcgttcaaataggggcactagcttcactgtatggtgtttcagctgcgtgtgaacaagtcatgtaagagacttcactatgttggattctctttcgaggctttaataaattatgcgcccttgttgcacaaaa

SEQ ID NO: 268748 - DNA, 415 bp, Glycine max
caccccatagggaaaaaatttctttacatttacaatgaatctatccactctattcctattgctattccacctggctcatgctgatctgtctgacgaagctactttcattagagatggcctcaaatcctattcccagcttgatctacctcactcggtttttggctctgaaagtgtagccttcgattgccatggtaaaagaccatatggtggcacgtctgatggtagaatcctcaagtggcacgagacacagagagagtggattgactttgcagctacctcgccacacaggaacaagaaattatgtgatgggttaacaaatgacaagatggaatcaatgtgtggaagacccttgcgcctcaaattcaacactctaacttgtgaactgtacattgccgatgcatactttgtgcttctg

SEQ ID NO: 268749 - DNA, 422 bp, Glycine max
ataagctagtttatcgtgaggagaatatgaagttgtttgttttctttgttgctgcagtagttttggtagcatggccatgccatggcgcaggctaccaaaggttccctctccgaatgaaaactggctatggtgagcgttcttcggaggtaaaatgcgcaagttttaggcttgctgtggaagcacacaacatccgagcctttaaaaccattcctgaagagtgcgttgaaccaacaaaggactacattaatggcgaacaatttagatcagactctaaaacagttaaccaacaagctttcttttatgctagtgaacgcgaagtccatcacaacgacatatttatattcggcatagataacaccgtactctctaatatcccatactatgaaaaacatggatatggcgtggaggaatttaatgaaacc

SEQ ID NO: 268750 - DNA, 404 bp, Glycine max
atcatatctttgattcagcttccaaacgcgccattcccatttctctctctctgcttcttcttcagatacctaacctaatctcccaaacaaacaaaccaactcaaccttatcaatatcgtttaaataaattttgatcgcgcacgcgctttgagatagatcatgctgcgtttgtgctacggccctctggattgctgcttcggacgccgtggtggccgcgccgccgactgacttctctggcacaccgacttgaatccccacgccttcggcgacttcttcatcgccgtcgcccaggcgaattacagtcttgaggatcagagccaagtcttcaccttcccctccgccacctacgtcggcgtctacgacggccacggcggccccgaagcttccagattcgtcaacaagcg

SEQ ID NO: 268751 - DNA, 254 bp, Glycine max
atccacatggattgatcaggaagtatggccttatgtgctgcaggcagtgcttccgtagcaatgccaaggaaattggcttcatcaagtatcgctaaaagagctgttgtcacctacggaccaatattatgttctggcactaggatgttttgaagatgttatgtttgaagaaacttgagacttgtttttttcatctattttattatcagacataatgtgtggaacgaagaatacttttatataaattgttttgcact

SEQ ID NO: 268752 - DNA, 414 bp, Glycine max
cccacgcgtccgctcggtgaaactcaagtacgtgaaactagggtaccaatacctggtgaaccacattctgactctcactctcatacccatgatgatcgccatcttcatggagattctacgcttaggccctgaagagatcctgaacctctggcactccctccacttggaccttgtccaaatcctctgctccgccttcctcatcatcttcatcgccaccgtctacttcatgtccaaaccccgcaccatctacctcgtcgactacgcctgcttcaagccacccgtcacctgccgcgtccccttcgcaaccttcatggaacactccaggctcatccttaaagacaaccctaagagcgtcgagttccaaatgcgtattctcgaacgttccggtctcggtgaagaaacatgttttccccc

SEQ ID NO: 268753 - DNA, 413 bp, Glycine max
atcaaaagtggaaaatctctcagtctcttatagtgatgagtttccataatattatggataacattgtattaaagatgactagtttatacaccttggttctcctactttttctttttctatcttatagacctgctctttcattttcttctagacataggcaatattggggtggtggtgggaggatattgagctctggtgagcataatggtgatcttgtgactaatttgcctggtcagcctagggtgaattttcagcactatgctggatatgtcacagtcaatgaaaccaatggaagagcactcttttactggttctatgaggctatcacccagccaaaagagaaaccattggtgctttggcttaatggaagtcctgggtgctcttctgtgggatatggagcaacacatgagatt

SEQ ID NO: 268754 - DNA, 418 bp, Glycine max
gtcacttctgcagccgttgctattccctcattcactggcctcaaggcaagcgcaggcaaagtgagtgccgcagttaaagtctcagctccccaagccacaaggttgggcatcaaggcttcgctgaaagacgttggagtcgctgttgtggccactgccgcgagtgcagtgctggctagcaacgccatggccattgaagtgttgctgggtggtgatgacgggtctctggctttccgttcccaacaatttctccgtggcctctggggagaagatcgtgttcaagaacaacgcaggtttcccccacaacgttgtgttcgacgaggacgagattcctagcggcgtggatgcagggaaaatctccatgagcgatgaagaccttctcaatgcgcctggtgagacttacagcgttactttggatgct

SEQ ID NO: 268755 - DNA, 418 bp, Glycine max
cgattacaacggcggcgacggtctccggctgccgataaaggtcttcgtcgaacacgcggatgtttctccgtcgccgtcggaggcgacgacgccggcggaaggaacatactgcgagtggaatccgaaagcggcggtgaagagcaactcgacgggattctcgaagctgtggaggttccgagacgtgaagctgcggagcaacagcgacggaaaagacgcgttcgtgttcttgaaccacgcgccggcggcgaagccggcggagaaggcgagcagcgtcgtcgtgaagaaggttgaggtgaagaaggggaaaacgacgacggcggcggcgtctgcgcacgagaagcattacgttatgagcagagcgaggaaagagagcgataaacgcaagtcgtatttgccgtataagcaagatctgttcggg

SEQ ID NO: 268756 - DNA, 415 bp, Glycine max
gtttgttgtgagctataagctagtttatcgtgaggagaatatgaagttgtttgttttctttgttgctgcagtagttttggtagcatggccatgccatggcgcaggctaccaaaggttccctctccgaatgaaaactggctatggtgagcgttcttcggaggtaaaatgcgcaagttttaggcttgctgtggaagcacacaacatccgagcctttaaaaccattcctgaagagtgcgttgaaccaacaaaggactacattaatggcgaacaatttagatcagactctaaaacagttaaccaacaagctttcttttatgctagtgaacgcgaagtccatcacaacgacatatttatattcggcatagataacaccgtactctctaatatcccatactatgaaaaacatggatatggg

SEQ ID NO: 268757 - DNA, 374 bp, Glycine max
gaagaaacttaatcgatcatcacttcacttcactaatacatcatggcagactagacccagaacaagtatgagagctctgaggttgaggtccaggatcgtggtgtttttgactttctcggtaagaaaaaggatgaagaagacaatcctcatcctcaggaggaggtcatcgccaccgagtttcaaaaagtcactgtctcagaccaaggagagaacatgcacagcctcttagaaaagcttcaccgatctgacagcagctctagctcttcaagtgaggaggaaggagaagattgagagaaaaggaagtagaagaagaatgaaaagaaagggctgcaagagaagatcgaggagaaaatagagggtgatcatcatcatca

SEQ ID NO: 268758 - DNA, 360 bp, Glycine max
  unsure (1)..(360): unsure at all n locations
cccacgcgtccgtaccaatcgccctgttggttacaagtgtggaccttacactctgccttgaaagagttgaggttgttgctgaaaacaaagatgacagggcgtaagtgcactatggctgttggctactacaaactgtgactacatgtttgttgtatcgtcttgtaactttctagtgaataagagctagctgctcactagtgtaccctataataaaacatgtactttcggtgtnnaaaaaaaaaaataaaaaaaaacaaaaaaaaaaaaaataaaaaaaataaaaaataaaaaaaaaaaaataaagaataaatttttacaaaaaaatatgggggggccgttttaaaggttcaaagtttactt

SEQ ID NO: 268759 - DNA, 434 bp, Glycine max
ggttgagtagttcttcatcatagtcttaaacattaaaccttagcaaaactcaacaatgctagacatcaaaggctacctcgtactcttcttcctatggttcatatcaaccattctgatacgttccatcttcaagaaaccacagcgtctaagactcccaccgggtcctccaatttcaatacccttgctgggacacgcgccatatctccgttcactgctccaccaagcattgtacaagctatcactgcgctatggacccttgatccacgtcatgatcggttcgaagcacgtggtggtggcgtcgtcggcggagacggccaagcagatcctcaaaacctcggaggaggcattctgcaaccgtcccttaatgatagcgagcgagagcctaacctacggcgcggcggactacttcttcatcccctacggaacatactggg

SEQ ID NO: 268760 - DNA, 431 bp, Glycine max
agacaaactggcgcaggccaaagggcatagattctcgtgttaggagaaagttcaagggatgcactttgatgccaaacattggttatggttcagacaagaagacccgccactatctccctaatggtttcaagaaatttgttgttcacaatgtgaaggacttggagctgctcatgatgcacaacaggacttactgtgctgagattgcccacaatatatccacaagaaagagaaaagatatagttgagagagccgcgcagcttgatgttgttgtgacaaacaaaacggccagattacgcacacaggaggatgaatagtcactcattggtagtgaatcctgatgacacttgttgcgacattgattggattttgatctttttttatgcttctataaattgcagcatgatatacatttaacatggtcttttacccct

SEQ ID NO: 268761 - DNA, 419 bp, Glycine max
cttggcttcaagattgtattcttgtcaggaagatatcttgacaaaatggccgtaacagaagcaaacctaaagaaggctggcttccacacatgggagcagttaattctcaaggatccacatcttatcactccaaatgcactttcatacaaatcagcaatgagagagaatctgttgaggcagggatacagaattgttggaatcattggagaccaatggagcgatctgcttggagaccacagaggcgaaagcaggacctttaagcttcctaatcccatgtactacattgagtagtaccttcacctctctcaacaatctagctagagtttgctcctatctatatgtaataaggtatgctgatatgcactattcaaataggagcattagctatgtttggtaatgtcactttatgttatgtgggt

SEQ ID NO: 268762 - DNA, 426 bp, Glycine max
ccttagtttcgaaagcatggcttccctggcggcttccaccgcggctatgtcagaaatccttggaaaccccgttaacctcagatgcgcaaccaggtctgctccatcaccaactacacctgccaccttcaagaccgtcgcacttttctccaagaagaagccagctccacctccaaagaaaaagcctgccgctgtatcccccgccaatgaggaactcgccaagtggtatggtcctgacagaaggatcttcttgcctgagggtctcttggaccgatctgagatccccgagtacttgaccggagaagtgcctggagattatggttatgatccgtttggtcttagcaagaagccagaggacttcgccaagtaccaggcgtttgagttgattcatgccagatgggcaatgcttggtgctgctggattcatcat

SEQ ID NO: 268763 - DNA, 399 bp, Glycine max
gttgagaactaagaaggagaagcaaatggcttcctcaatgatctcttacccagctgttaccactgtcaaccgtgccggtgccggcatggctgctccattcactggcctcaagtccatggctggcttgcccaccaggaagaccaacaatgacattacctccattgctagcaacggtggaagagtgcaatgcatgcaggcgtggccaccagttggcaagaagaagtttgagactctctcctacctggcagaccttgatgatgcacaattggcaaaggaagtagaataccttcttaggaagggatggattccttgcttggaattcgagttggagcacggattcgtgtaccgtgagcacaacaggtcaccaggatactacgatggacgctactggaccatgtg

SEQ ID NO: 268764 - DNA, 417 bp, Glycine max
aaaaaaactttccaatttcgtaggagatgctcaggagcagcacgctaacacagagtgttacagtcacctgtgttcatcacagtcacagacaatggttccaatcaattcccgtaaattatagattctgtgacgctgctcggaactctctatcatccaactccgccatcttcaagtggaaaagaacggctaattataatcgtaaccgttctggaatgggaaccttcaccacgcgcgcgttggcgcagccgctccagaacgccgacgaactcatcgattccgtcgagacatttattttcgattgtgacggagttatatggaaaggtgacaaattaatagaaggggtgcctgaaacgcttgacatgcttcggtcaaagggcaaaagattagtttttgtcaccaataactcaacaaagtcta

SEQ ID NO: 268765 - DNA, 412 bp, Glycine max
gggtttttgagtgcggcggtccaaacactcttctctgcagcttttgcctacaactcccttcaccatggctgaacaaaccgagaaagcttttctgaagcaaccaaaagtgtttctcagcacaaagaagactgggaagggaaagagacctggaaaaggtgggaaccgcttttggaagtccattgggcttggatttaagactcccagggaagccatcgaaggaacctatattgacaagaagtgccccttcactggcaatgtttccatccgtggccgtatcttggctggaacatgtcacagtgctaagatgaacaggactattattgttagaaggaattatctccattttatcaagaagtaccataggtacgagaagaggcactcaaatattcctgctcatatatcacctgccttc

SEQ ID NO: 268766 - DNA, 293 bp, Glycine max
gtttcacaaactaaagaacaacaatatgcctccaatcttgccggatttctccaactcggtgaaactcaagtacgtgaaactagggtaccaatacctggtgaaccacattctgactctcactctcatacccatgatgatcgccatcttcatggagattctacgcttatgccctgaagagatcctgaacctctggcactccctccacttggaccttgtccaaatcctctgctccgccttcctcatcatcttcatcgccaccgtctacttcatgtgcaaaccccgcaccatctacc

SEQ ID NO: 268767 - DNA, 433 bp, Glycine max
attattttatattatttcttgcctatagttagtttgaaaattaggtactacatcatatgcatgatcagcatttgttactgctcctctgaatttgtctgagtctgagctgttgattctcccaacacaactaaaaaaaagaagaaaaacttatagtggtcgttgtaggaaagcaagaacagtgaagtgttctcctaattcagtgagtgaggttctgaattctttaacttgagatgatggcatcacttgcagggactactcagaagtgcaaagcatgtgagaagactgtgtatttggtggatcagctcactgctgacaacaagatctatcacaaatcatgtttcagatgctaccactgcaagggtacccttaaattgagtaactatagttcctttgagggtgtgttattactgtaagcctcattttgatcaactct

SEQ ID NO: 268768 - DNA, 372 bp, Glycine max
cccacgcgtccgattcacctgagctttttgtgaggattccaaagcatggcttcccttgcagcatcgactgctgctgcttcccttggcgggtgagaaatgcttggaaaccccatcaacctcagtggtgccacaaggccagctccatctgcctctagccctgcctccttcaagactgtggctcttttctccaaaaagaaggctgcacctccaaaaaaagctgcagctgctgctcctgccaatgatgagcttgccaagtggtatggtcctgacagaaggatcttcttgcctgagggtctcttggaccgatctgagatcccagagtacttgaccggagaagtccccggagactatggttatgacccatttggtctt

SEQ ID NO: 268769 - DNA, 401 bp, Glycine max
aagtagttgagaactaagaagaaggaaatggcttcctcaatgatctcctccccagctgttaccaccgtcaaccgtgccggtgccggcatggttgctccattcaccggcctcaaatccatggctggcttccccacgaggaagaccaacaatgacattacctccattgctagcaacggtggaagagtacaatgcatgcaggtgtggccaccaattggcaagaagaagttcgagactctttcctacttgccagacctcgatgatgcccaattggcaaaggaagtcgaataccttctaaggaaaggatggattccttgcttggaattcgagttggagcacggtttcgtgtaccgtgagcacaacaggtcacctggatactatgatggacgctactggaccatgtg

SEQ ID NO: 268770 - DNA, 418 bp, Glycine max
  unsure (1)..(418): unsure at all n locations
gcaagatgtacccagacttgagctacactgagtcaaccaccaccgagaccttggtcatgggagtggcacctgttaaggctcaatttgagggtgctgaaatgggtgtgcccgctgagaacgatggctgcaaatgtggaccaaactgctcctgcaacccctgcacttgcaagtgaggtgttgggagagcaagcttcaagcagagatagcccttaattaggaataatgataaactattaatgtgtagctaaaaacttatgtattatgtctgtgatggttttcgtgcactctggtgttttgtgttaaacaaacatccttagaatanagtggtcatgtcttgcctttcagcaagttcaagtgttttggacttgtgatgggtgtgtaagctcatgggtggcttctttttttttttttttaatgt

SEQ ID NO: 268771 - DNA, 344 bp, Glycine max
ctctgctctcacccttattcctctctttcctttctttcttctgcaacaaaaatcatgtctgggtccttgggattcttctttgtgggtcttacgttgttgttgttggtcggggtggctaatgctgtggccaacacttccaacaaatttgatcaactcttccaaccaagctgggcttttgaccacttcattcatgaaggggatctcctcaaactcaaactagacaatttttccggcgctggttttacttccaagagcaagtatatgtttgggaaagtcaccatccagcttaagcttgtggaagggtgactctgctgaacagtcactgctttctatatgtcatcgga

SEQ ID NO: 268772 - DNA, 296 bp, Glycine max
tgaaacagcacatgctgaggaaaagaaggggttcctcgacaagattaaggagaagctaccagggcgacaagaagacagaggaggccggggctactactcctcctccaccaccacctgttgcatcattggagcatggtgaaggtgctcatcatgaaggagaggccaaggagaagaaaggtatattagaaaagataaaagagaagcttcctgcgtatcactccaagacagaggaggaaaaggaaaaggaaaaagagaggtgtgctcattgatatttaagattgagacaaggctttttt

SEQ ID NO: 268773 - DNA, 384 bp, Glycine max
  unsure (1)..(384): unsure at all n locations
catatctctctctcacacacacagtctcttcttcttgctattccttcctcgttatggagtcgcgagtgctgtcacgcgccggaaccttgtcctccctccctcacctccgcaagccgccgcgggaggccgtctccagcgccttcctcgtcgccgtgaaagccgtgggctccgtcgcggacggcggaaacctgatttgggggaggcagctgcgcccggagctctgctcgccggtgctgaaaagggaggctgtcctncttcggccatgcctcgccgnncgcttctngncggncgagggtagtgattccgccggagaagcaaaggttgctccggcggggttctttgacaagtacccggctctggtcaccggatttttcttcttcacgt

SEQ ID NO: 268774 - DNA, 412 bp, Glycine max
ctccttctctgatattcgcactgcctaccgcaaactcgctatgaggtggcacccggacaagtgggctctgaatcccgcagccgccggcgaagccaagcgccggtttcagcaaatccaagaagcctactcagttctctccgatcagtctaaaaggtcaatgtacgatgcggggctctacgatcctttggaggaagaagaccaagatttttgtgacttcatgcaagagatgatctcgatgatgaacaatgtgaaagacgagggggacagtttggaggacctacagaggatgttcgtggatatggtggggggagatcatggccatggaatcggcgttgacttgaaccaagatcgaacggctggaaagcgaagacgagtatatggatcgaagggcaacgcgcccaagcgcagcaac

SEQ ID NO: 268775 - DNA, 381 bp, Glycine max
cgccatgggcttcaatattctgagaaccacttccatctccactcctatctcttcctccaaatccagacccattttctcaactcttctggttcttctccttccaccattttccccccaaagtccgttactcccaccactcttttcgtttctgccacccccttcttcactctccatcccaagcttggttttcgtggtgggattgtggccatggccgcacctggctctctccgcaaatccgaggaagagtggcgcgcaattctctcccctgaacagtttcggatcctcaggcaaaagggcaccgagttccctggaacaggagagtatgacaagttctatgaagagggagtttacaactgtgctggttgtgggactccactctac

SEQ ID NO: 268776 - DNA, 446 bp, Glycine max
  unsure (1)..(446): unsure at all n locations
ggacgtcatcaatacgggcaaggccatgcangccatgggcgccaggatccgtaaggaaggcgacaggtggatcatcgatggcgtcggcgatggcggcctcctggcgcctgaggcgccgctcgatttcggcaatgccgccacgggctgccgcctgaccatgggcctcgtcggggtctacgatttcgacagcaccttcatcggcgacgcctcgctcacaaagcgcccgatgggccgcgtgttgaacccgctgcgcgaaatgggcgtgcaggtgaaatcggaagacggtgaccgtcttcccgttaccttgcgcgggccgaagacgccgacgccgatcacctaccgcgtgccgatggcctccgcacaggtgaagtccgccgtgctgctcgccggcctcaacacgcccggcatcacgacggtcatcgagccgatcatgacgcgcgatcata

SEQ ID NO: 268777 - DNA, 389 bp, Glycine max
gtgtgatgaaaatgaaggtccttgttttcttcgttgctacaattttggtagcatggcaatgccatgcgtacgatatgttccctctccgaatgaacactggctatggtgcccgtactccggaggtgaaatgcgcaagttggaggcttgctgtggaagcacacaacatctttggctttgagaccattcctgaagagtgcgttgaagcaacaaaggaatacatccatggcgaacaatatagatcagactccaaaacagttaaccaacaagcttacttttatgccagagacctcgaagtccatcccaaggacacatttgtgttcagtatagatgggaccgtactctctaatattccatactacaaaaaaacatgaatatgggggggaaaaatt

SEQ ID NO: 268778 - DNA, 328 bp, Glycine max
tgctattacgagacgacgcagatttagttcggattgttcgattgcgatggctaggaagatgcttatcgatggtgaagctgaattggctcaaggtggtggagaagaagtgtcgaattttgacttcgacttgtttattattggggctggaagtggtggcgttcgtgccgctagattttcatccaattttggagctaaggtggggatttgtgagcttccatttcatccaattagttcagaaacaattggaggagtcgggggaacgtgtgttattcgtggttgtgttcccaaaaagattttggtctatggagcatctttttggaggtgatct

SEQ ID NO: 268779 - DNA, 377 bp, Glycine max
acccacgcgtccgcccacgcgtccgcttttacttctcagcagcttcggctagggttcagaaacgaagaagggttcggtgttctgttcgcgatgagagccaagtggaagaagaagcgtatgaggaggttgaagaggaagcgccgaaagatgagacagagatccaagtagtgcgttaaacctagtttgtttctgttgcttttacaattgcttatgttgtcgaatgggacacccagttgttagtggcactggtttctcctttttgatgtttgatacattttgttggattcaagtagtttatgttcgtcttatgttattagctcaaaacaatgttgttactgcttttgctaatcaacatgatctcctatttgcatctctga

SEQ ID NO: 268780 - DNA, 439 bp, Glycine max
gacaagataagtgagaagaagatgcttactccaatagaggtcttatgcaagtcatatccattggagtttacatcatacttccactgctgccgaacgttgcggtttgaagataagcctgattattcttatcttaagagactatttcgggacctattcatccgagaaggttatcagtttgattatgtatttgattggactatgctgaagtatcctcaaattggatccagttctagagcccgaccaagtgggaaaccagtcataaaccccggacaatcatgagagagaatagaacggccttcagggggtttctcaggtgctgttgaggcatttgcaaggaggaatggctctggacttgttctgcaaagtgagcattctaggcataagtcttcagatgatgtgccatcttccaaagacgtgcaagctgattctgagaggcctc

SEQ ID NO: 268781 - DNA, 212 bp, Glycine max
aacagcgagcagtgcagactaagatgcttactccaatagaggtcttatgcaagtcatatccattggggtttacatcatacttgcactggtgccgaacgttgctgtttgaagataagcctgattattcttatcttaagagactatttcgggacctattcatccgagaaggttatcagttagattatgtatttgattggactatgctgaagtat

SEQ ID NO: 268782 - DNA, 343 bp, Glycine max
cccacgcgtccgaaacaatgatggctggtgttagtggcagtagcactactcccttattgtgctctttgttctttatttcttccttactttttgcttcctgcacccatgcctcctcccaggcacctcctccaattgtggatggactttcatgggatttctataggacgagctgtcccatgcttgaagggatagtgagcaagcatctccagaaggtgttcaagaaagacaatggtcaagctcctgccttactcaggatcttcttccatgactgctttgttcagggttgcgatgggtcgatattgttggatggaagtccaaatgaaaaggatcaaccggcaaacat

SEQ ID NO: 268783 - DNA, 485 bp, Glycine max
gatttattgcctggaacagtgattttattgaggagtgggtcaaaattggcttgcctgcaaaggcggaggtgaagacacaacatggggatgcaccttttgctgagttgtgctcacactgtgagaaggaagctgtgaatgtttcccttggaaaccttctaacatacccatttgttagagatggcttggtgaacaagacattgtcactaaaaggaggatactatgactttgttaagggatcttttgagctctggggccttcagtttggccttgcatcctctttctccgtatgaacatcaaccattatcaatgacctcatcttggttccctaagtattctcctatctaaaatgtactctgaaattaatattgcccttgttatgaatgcatgcatgtgctgaatttcctaataataaaagtggatatggagatttctccatcaccctctattccaaatttgaagttcaatccattttgatcaaagaaaca

SEQ ID NO: 268784 - DNA, 439 bp, Glycine max
gtctcaagcaaccatggcaatggcaacccaagcctctctcttaaccccacccctctccggtctcagagccagcgaccgcgcctccgtgccatggaagcaaaactccagcctctccttctccagcccgaagcccctcaagttctccagaacaatcagagcagcagccgccgacgagaccacagaggcaccagcaaaagtagaggctgcaccggtcgggttcaccccaccagaacttgacccaaacaccccttccccgatcttcgggggcagcaccggcgggctcctgcgcaaggcacaggtggaggagttttatgtcattacgtgggactcacccaaagaacagatctttgaaatgcccactggcggcgccgctatcatgagggagggtcctaaccttctcaagttggccaggaaggagcagtgcttggctcttgggact

SEQ ID NO: 268785 - DNA, 380 bp, Glycine max
cccacgcgtccgaaaacaaacccactaagatggcttcctttgtatccttcctagtgctgcttcttgcagcccttatcctcatgcctggagggcttgctacttactacaaaccaattaagaagccaccagtgtacaagcctccagtgtacaagccaccagtgtacaaaccaccggtttataagccaaaaccaccggtttacaagccgaaaccaccggtttacaagccaccatataagaagccaccatacaagaaaccaccttatggaaagtaccctccagtagaggacaacacccatgcctaaagcaagcaatgaggtctattatctacttaataaataagaagaactgctttgtgttttctagcattgtgaattacaact

SEQ ID NO: 268786 - DNA, 376 bp, Glycine max
  unsure (1)..(376): unsure at all n locations
cccacgcgtncggaaaatgtggaagagaacgggttttgaagaagaagcagttcaattgatcaactgagatttcagggacctaagtctagctgctaatagactcgcccatcatgccatcaaacttggtggcattggctttggagcctcttttttcggattgtttgctgccattgctgctatttatctgttgattttggatcgtacaaactggaaaacaaatattctcacagcactactcattccatacattttcttcagcttgccttcattaattttcgacgtcttcaggggagagcttggaaaatggattgctgcagttgctgttgtattacgccttttccttccaagacacttccctgattggcttgaattggct

SEQ ID NO: 268787 - DNA, 485 bp, Glycine max
  unsure (1)..(485): unsure at all n locations
gattgctagaatggaatttcgatgctcagtcatctcttttaccattctcttctctcttgctcgtgcgggagagagccatgtccagtgcatcgctacctgaggaagattattgggaagctgtttggccaaacactcccattcccactgcactgcgagagcttctaaagcctctccctgcaggtgttgaaatcgatgaactccctaagcaaattgatgatacacagtacccaaaaacattcttctataaagaagaccttcatccatgcaaaacaatgaaagtacaattcaccaagcgtccctatgcacaaccttatggtgtatatacatggttaacggatattaaagacacctctaaagaaggatatagttttgaagagatatgcatcaaaaaagaaacgtttganggagaagagaagttttgtgcaaaatccttgggaacagtaattgggtttgccatttcaaagctgggaaagaacattcaagta

SEQ ID NO: 268788 - DNA, 414 bp, Glycine max
cccacgcgtccgcccacgcgtccgtgttgatcgagataactagaaacagtgtgatgaaaatgagaggtccttgttttcttcgttgctacaattttggtagcatggcaatgccatgcgtacgatatgttccctctccgaatgaacactggctatggtgcccgtactccggaggtgaaatgcgcaagttggaggcttgctgtggaagcacacaacatctttggctttgagaccattcctgaagagtgcgttgaagcaacaaaggaatacatccatggcgaacaatatagatcagactccaaaacagttaaccaacaagcttacttttatgccagagacctcgaagtccatcccaaggacacaattggtgttcagtatagatggcacccgaccttcttaatattccatactacaaaa

SEQ ID NO: 268789 - DNA, 481 bp, Glycine max
aaaaaacagcgccctagatttgctcttctttgcttcggaagaaagagaaaaacaaataacaatggcgtgcgcttctttcctcggcagaggtctcttcgcttccgtcttcatactctctgcttaccaagaatttaacgaatttggagttgatgggggacctgcagcaaaagcactcagacctaagtttgatgcctttacacatcgagtgcattctcaagttggctttcaacttcctgagattgatctgaaatttttaattgctggggctattgctttgaagggccttggaggggttcttttcatatttggcagctcttttggaagctttgcttctgctcctgcaccagctgattgctaccccaatccattatgatttttacaattatgacagtgaagacaaagaatttactcaactgttcatcaaatttacacagaacatggctcttttcggggctctattgtttttcattggcatgaaaac

SEQ ID NO: 268790 - DNA, 287 bp, Glycine max
tgggtgcaagaatatgtctcattctactacaagtcagatgaggaactccaaaaagaccctgaactccaagcttggtggaaagaacttgtagaggtgggtcatggtgatttgaaagataagccatggtggcaaaagatgcaaactcgtgaagagttggttgaagcttccgctatcctcatatggattgcttcagcccttcatgctgctgttaactttggacagtatccatatggaggtttaatcctaaacaggccaactattagcaagagattcatgccctaaaaggg

SEQ ID NO: 268791 - DNA, 483 bp, Glycine max
cccacgcgtccgcaaaaactttcatcttatttacaagtatttttttcagaaccttcacttctcaagtgtcaacacatacaacaatgggttttcgtttacctggtatcagaaaggcatcattaaaccaagcatcatcaaaagccatggacgtgccaaagggataccttgcagtctatgttggagagaaaatgaagcggtttgtcatccccttatcatacttgaagcaaacgtcgtttcaagacttgctgagtctagccgaggaagaatttgggtataaacatccaatgggtggtcttacaattccttgtggagaagatgtgttcttagatattacttctcgcttgaacaataggtgctaaccctgcgatgataagactgacctagacatatagtacttaacacaatttttgtaactcacttttttgcttgaaaatattttctctttttggtattatactcaagcaagtgtaaaaaatgttatac

SEQ ID NO: 268792 - DNA, 463 bp, Glycine max
atttgcaaagtgttatttttccttttttctcatttgcactgcaaattgcaatggcttccaacgaggttattgccaccatcatggtgctttctctccttgcctactcaacatcattcaccaatgcatgtggcacatgccacccaaaacctaccccttctcctcctcctccatcaagaaagtgccctaaggacacattgaagctaggggtgtgtgcagatattctaagtcttgttactgatgatgttggctcccctgtctccagcaagtgttgtgcattgcttgaaggtttggctgatttggaggctgcactttgcctttgcactgctattaaggccaatgttcttggaatcaacttgaatgtgcctatcacactcagtgtgctactcaatgcttggcaaaaaaaactgtccttttggtttccaatgtgcataagcttccatcatgttacgttcattccatcact

SEQ ID NO: 268793 - DNA, 504 bp, Glycine max
ctaagaaggagaagcaaatggcttcctcaatgatctcttccccagctgttaccactgtcaaccgtgccggtgccggcatggttgctccattcactggcctcaagtccatggctggcttccccaccagaaagaccaacaatgacattacctccattgctagcaacggtggaagagtgcaatgcatgcaggtgtggccaccagttggcaagaagaagtttgagactctttcctacctgccagaccttgatgatgcacaattggcaaaggaagtagaataccttcttaggaagggatggattccttgcttggaattcgagtttgagcacggtttcgtgtaccgtgagcacaacaggtcaccaggatactacgatggacgctactggaccatgtggaagctgcctatgtttggttgcactgatgcttctcaggtgttgaaggagcttcaagaggctaagactgcataccccaacggcttcatccgtatcatcggattcgacaacgttc

SEQ ID NO: 268794 - DNA, 502 bp, Glycine max
ccacaaccctccggcccctatataaacacgagctttctgtggtgcaccagtgtgctatcttatgggtgtgcctcaagaaataggtgtggttccgagctgaaacaagatggctggtgataaacaaaaactctttaacagactgaagccattcataggtgtagtgttcttacagtttggatatgctggtatggatattctatccaaagctgcactgaacaagggaatgagtaactatgtatttgtcgtgtaccgtcatgtttttgcctttgttgtcatggccccttttgcactgatctttggagaagaaagtaaggccgaagatgacattttcaatcttcatgaagataatgattctcaacttggctagagcctgttattgaccaaaatttgatttttttggcatgaatacaccacagcaacctttgctgtttccatgtacaatgttcctcctgccattacctttgtcatggcttggattctaggcttgagaaggaaaactaaa

SEQ ID NO: 268795 - DNA, 257 bp, Glycine max
accacgcgtccgctgtaaccaccccactttgtttgttgtacttaaactacattcccatttgcgggggcgtttattagatttcatgggcgctgtattcatggcttctgttttcagacttcaatggaacattaacggatgagaactattgagcaacagtggaagagtacaatgcatgcaagtgtggccaccaattggcaagaagaaagtcgagactctttcctacttgccagacctctatgatgcccaattggcaaagg

SEQ ID NO: 268796 - DNA, 437 bp, Glycine max
cccacgcgtccgagccagctgggctacatcctttaaattcaacattttcgcacccaacaaatcgaactcagctgacgggcttgccttcttcttggcacccgtcgggtctcagccccaatccgacgatggatttcttggtcttttcaacagtcccttaaaggacaagtctctccaaaccgtggcgattgagttcgatactttctcgaacaaaaaatgggatcctgcaaaccgacacatcggcattgacgtgaactcgatcaagtccgtcaaaacggcatcgtgggggttgtccaatggacaagtggcggagattctcgttacctataatgccgccacgagcctcttggttgcttctctgatccacccttcaaaagaaaacaagttacatcctctctgacacagtgaacttgaagagtaatcttcccgaatgggtgagc

SEQ ID NO: 268797 - DNA, 354 bp, Glycine max
cccacgcgtccgaatgaaaattggaagagggtgatgaggatttatttgacatggtgggttttgtggcgattagccggtccgtgagtgagttggttgaatggcgagtagccggaaaagaacgtttggcaacatgaggtcattcgtaagcaattcgatgggaggtctcaggggcggaagcaaccttgcttcttgggtcgtcgccggaaccctagcctacttcctctggatcaaaccctcccaagacttcaagcgtcaacaacaggagaaggccactcttgccgccgctgagtctgattcttatcgtaaacccattcccgaccctcaggttacgggtttgatatatggaaacaagaa

SEQ ID NO: 268798 - DNA, 384 bp, Glycine max
ctagaaacagtgtgatgaaaatgaaggtccttgttttcttcgttgctacaattttggtagcatggggggccatgcgtacgatatgtgcggctctccgaatgaacactggctatggtgcccgtactccggaggtgaaatgcgcaagttggaggcttgctgtggaagcacacaacatctttggctttgagaccattcctgaagagtgcgttgaagcaacaaaggaatacattcatggcgaacaatatagatcagactccaaaacagttaaccaacaagcttacttttatgccagagacctcgaagtccatcccaaggacacatttgtgttcagtatagatggcaccgtactctctaatattccatactacaaaaaacatggatatg

SEQ ID NO: 268799 - DNA, 264 bp, Glycine max
attgctacgaagggctatatagcataaacatttgagtcttcattgcacaatgtcgacctcttggagtaacgggtggtgcctctcgtggcatctccccagccaaaacctctctcaagaaggccacattaggcccttctgtcttcgcaaccgttagcactccttcttctccttcttcttcttcttcttcttccttcccttctctcattcaagacaggcctgtctttgctgcacccgcccccatcattacccctactgtgagagagg

SEQ ID NO: 268800 - DNA, 457 bp, Glycine max
gtttgagactctttcctacctgccagaccttgattatgcacaattggcaaaggaagtataatagcttcttatgaagggatggatgggttgcttggaattcgagttggagcacggtttcgtgtaccgtgagcacaacaggtcaccaggatactacgatggacgctactggaccatgtggaagctgcctatgtttggttgcactgatgcttctcacgtgttgaaggagcttcaagaggctaagactgcataccccaactgcttcatccgtatcatcggattcgacaacgttcgccaagtgcattgcatcatcttcatcgccttacaaccctcaggcttctaagtgtgaaaattttgcaaagcattttttgccgccaccctacttcgtttgcttgtacttaaactacattcccatttgtttttgctttttgaagattcatcattcctgatttttggtttc

SEQ ID NO: 268801 - DNA, 301 bp, Glycine max
gagataactagaaacagtgtgatgaaaatgaaggtccttgttttcttcgttgctacaattttggtagcatggcaatgccatgcgtgcgatatgttccctctccgaatgaacactggctatggtgcccgtactccggaggtgaaatgcgcaagttggaggcttgctgtggaagcacacaacatctttggctttgagaccattcctgaagagtgcgttgaagcaacaaaggaatacatccatggcgaacaatatagatcagactccaaaacagttaaccaacaagcttacttttatgccagag

SEQ ID NO: 268802 - DNA, 500 bp, Glycine max
cccacgcgtccgcccgtccaacgcatgatttatgatgaaattcatggctactctttaacttcaatcaatcctttcttggatgattcaagcccaagggatcatgcctttgttgatgaattcagctgcataggctgcaaaaattgtgccaatgtagcccctggtgtgtttgcaattgaggaagactttggaagagccagagcatacaaccaatgtggggaccctgaattagttcaacaggcgattgacagttgccctgttagctgcattcattggacatcttctgcacagctatcattactggaagatgagatgcgccgtgtagaaagagtcaatgttgccctaatggtatcaggaatgggaacagcatcaattgatgttttcagaatggcaagttccaaatgggaaaaggaggcagcaaaagtcttgggtagaactcttatattcaatgccttcattttttggttaatatgtgaagcgtcactttattacatgcaattaaa

SEQ ID NO: 268803 - DNA, 406 bp, Glycine max
caggggttggagctgcttggaatacagctaatgtgcattcgggttcaactgtagctgttttcggcttaggagctgttgggctcgctgttgctgaaggggcacgagctagaggtgcatccaaaataataggtgtagacatcaaccctgacaaattcatcaaagctatgggagtgacaaacttcataaaccccaaggatgaagagaagccagtatacgagagaattagagaaatgactgatggaggtgtacactacagttttgaatgtactggaaacgtggacgttcttagggatgccttcttgtctgctcatgagggttggggattgactgtagtattgggaattcatgcatcaccaactttgcttcccatccacccaatggagctcttcgatggtcgcaacattgt

SEQ ID NO: 268804 - DNA, 375 bp, Glycine max
  unsure (1)..(375): unsure at all n locations
cccacgcgtncgnccacgcgtncgcttacttaaaatgggtcccatcagccaggtcttttctatgctggcaggatttagtgctgaattgatgccaaaaggccgtgagaaggaaagccaggcaaaaattaaacgttacatgacaatgatggactcgatgacaaatgaagagttggatagttcaaacccaaagctcatgaatgagtcccgaatgatgcgaatagctcgaggttctggtcgtccagttagggaagtaatggaaatgttagaagagtacaaacgtcttgcaaagatatggagcaaaatgaaagggcttaaaatacctaagaagggtgaaatgagcgccttatcccgaaatatgaatgctcaacacatgag

SEQ ID NO: 268805 - DNA, 425 bp, Glycine max
caaagagaaaaaagtagagcaggttttatcagtaaattagcaaacaaagagacggattacaatgacaatgaaggtgacattatctgcataaaaattatccttcccaaattcagaattccttgtccctaataagattatcaagtaacaaccataaaactgtttcccttcagcccttatcaaagtctgctcatatattctgcaactgggaaaaggagatgcgaacaactgatccagaaagtggacttgcatgcttgcacacaagggcttcagtagcctgctcctcagtctcaaactgaacaagtgcctgtttttttccattcatctcaaagaccttgctgttgacaatggttccatgctcctccaaaaggcttacaacctcctcttcagttatgtcttgcgggagggtggacaagtggaccattttt

SEQ ID NO: 268806 - DNA, 383 bp, Glycine max
  unsure (1)..(383): unsure at all n locations
cccacgcgtacgctgtagccaccccactttgtttgttgtacttaaactacattcccatttgtttgtgctttatgagatttcatcatcctgtatttttggtttctgttttcggacttcaatggaaattaatggatgagaactaatgttnaaaaaaaaaaataaaaaaaaataaaaaaaaaaaaaaaaaaaaaaaaaaaaaaggaaaaaaaaaaaaaaaaaaaaaaaaaaaaaatattaaaaaaaaaaaaataattaagggggggccgttttaaaggatccaagtttacttacgcgtgcatgcaaggtaatagtttttttttagggccacctaaattcaattcattggccggcgttttaaaacgtcgggattgggaaaaccttgg

SEQ ID NO: 268807 - DNA, 432 bp, Glycine max
aattaccacccctgtgctgaacacttctgcctacttttttaagaaaaccgctgatctcattgggttcaaggagaatcgtcaagtgagttatgaataccggcgctatggaaacccaacgactgtggttctggaggagaagataagtatattggagggggctgaatcaactgtgataatggcatctggaatgtgtgctagcgtagtcctatttatggcactggttccagctggtggacatcttgtgaccactacggattgttacaggaagactagaatattcattgagacttttcttccaaagatggggatcacgaccactgtaatttaatccagcagatgttggagccttggaatctgcattggagcagcacaatgtgtctctattcttcactgagtcgcctaccaatccattcctgagatgtgttgacatta

SEQ ID NO: 268808 - DNA, 435 bp, Glycine max
  unsure (1)..(435): unsure at all n locations
gagagagtataaggttgatgcttcagttggaaaaccccgtgttaacttcagagaaactgatagtgagcgtgctgattttgactatgtgcataanaaacaaagtgtatgacaaggtcaatatggacgggtaattgggtatattgaaccacttcctgcagggtcatcaactaagtttgcatttgaaaacttgcttgtgggtcaagctattccatcaaattttatccctgcaattgagaaaggttatcaaagaagctgccaactctggtgccttaattggacatccaggtgaaaatctttgagttgtcttgacagatggtgctgcccatgcttgctgattacagagaacttgcatttaagttggcttctatctatgctcttagacagtgttatgcagcttccagaccggttatattagaacctgttatgcttgttgag

SEQ ID NO: 268809 - DNA, 506 bp, Glycine max
  unsure (1)..(506): unsure at all n locations
ctattattttattcttcatccaatgactatacattcattatatttttgtgtaaatagaggaaaaactcgatggaaaaatggtggtttaattctatgttgtttaataggaagttagaatacaggtgtgaattaagtaaatcaatggatagtcttggtcctattgaaaataccagtctaagggaagaccctaaaattttaaccgatatagaaaaaaaaattcacagggatttggattatttagaaatggaaggttttttttctagcgatctgaatactgtttctaagaatgatgatgatcattacatgtatgagactcaatttagttttaacaataatattactagtttcattgatagttgcattgagagtttcaatttaggtgatattgacaaatacaatgatatttatttttatagttacattntttttgaagggcagacattgtagtgaaagcgataattctagtactagtataataactagtacgaatgatacaaatgatagtg

SEQ ID NO: 268810 - DNA, 294 bp, Glycine max
  unsure (1)..(294): unsure at all n locations
tcttcccgaatgggtgagcgttgggttctctgccaccaccgggttgcatgagggctcccttgaaacccatgatgtgatttcttgggcttttgcttccaagttgtcagatggtagcagcaatgatgctttggatcttccaagctntgtgctcaatgaggccatctaacttcaaacatcgtagttaaatgtgacaaaagaaaaatgtaataacgccctagcttgctagaggctggtgctactaataatgtttgtcacaaaaattatataataataggtgttttactccgtctaaaa

SEQ ID NO: 268811 - DNA, 335 bp, Glycine max
cccacgcgtccgagcgtgtattcgatgtatcaattcaaggttttaaatatctgaaagattttaacattgcgaaagaagctggtggagtgggtaagggaatcactagggagtttaatgttaatgttacagaaagcaccttggaaatccacttatcctgggcaggaaaaggaactaatgccattcctataatacgtgtatatggacctctcatatctgctatcactgagaccccaaactttaaagtttatgcacatgggttctctactggaacaattgttggaattgttgctggggcatgtgtgattgtcatattgatgctctttgctctttggaag

SEQ ID NO: 268812 - DNA, 415 bp, Glycine max
cccacgcgtccggcgacgacgatccaagtgatagacactcgtcgcgatggaacgtgtagctgaatgcgagcgaactctgtacccatacgtgactggatcctctgtagtcgctatcaaatacaaagatgggattctaatggccgctgacatgggaggttcgtatggatctaccctgcggtacaagagtgttgagcgtatcaagcctattggaaagcattctcttcttggtgctagcggggagataagtgactttcaggagattctgcgttaccttgatgagcttatcctatatgacaacatgtgggatgatgggaattctctagggccgaaggaggtgcataattatttaacccgcgtgatgtataatagacgtaacaagttcaacccattgtggaatgcacttgtacttggtggg

SEQ ID NO: 268813 - DNA, 474 bp, Glycine max
  unsure (1)..(474): unsure at all n locations
cccacgcgtctcgtgaagaagagggtaactgcaaacaaagcaagcaaaacaaaagacgcantgatggagaggatgaagagggtgcttctgctgcttctggccttcactgttcttctcatgttgccagaagcttctgctacaaagtttactgttggaaacaaccagttttggaaccccaatattaactacactgagtgggctaaaggcaaacatttctaccttggtgactggctctattttgtgtacgataggaaccaagcgagcgtgttggaagtgaacaagacagattatgaaacatgtaactctgatcatccactcacaaattggactaggggagctggaagagacgtggttccattgaatgtaacaaaaacttactacattatcagtggccgagggttctgcttcagcggcatgaagatagcagttcatgttgaaaagctgccaccttcaccaaaagctgcccctgtaaag

SEQ ID NO: 268814 - DNA, 357 bp, Glycine max
cttcgctgtcaatgtatcctacatttgatgttggagatcgaattgttgctgagaaggtttcatggtattttagaaaaccatgtgcgggtgacatagtgatatttaaaagccctccggtgcttcaagaagttggatatagcgatgatgatgtttttataaagcgtgtggttgcaaaggcaggtgatattgtggaggttcgtaaagggcatcttgtagttaatggggttgagaggaatgaagagtacatccttgaaccacctgcttatgagatgaaacccacacgtgtgccagagaactacgtctttgtaatgggagacaaccgcaataacagctatgactcccatgtgtggggtcccc

SEQ ID NO: 268815 - DNA, 390 bp, Glycine max
ctttttctcaaccaaaaggggttcaattctagctagttctattacatcgtccgcgaccatgagcgtggccatcgtgcttctgttcatggttttcgcactttcatcagctttagacatgtcaataatatcacatgacaacgctcatgcggatagggccacgaggcgcaccgacgacgaggtgatgtcaatgttcgaggagtggctggtgaaacacgacaaggtgtacaacgcgctcggtgagaaagagaagaggtttcaaatcttcaagaacaatctgcgctttatcgatgaacgaaactctctgaaccgaacctacaagttgggactcaacgtgttcgctgatctcaccaatgcggagtacagagccatgtacctgcgaacctgggacga

SEQ ID NO: 268816 - DNA, 420 bp, Glycine max
agcacactcctcccagggtttctccaccaagagggaaatggctcccaaaccgcctagtacgggtctgtttgttggactgaacaagggacatgtcgtcaccaagaaggaattgcccccacgcccctcggatcgtaaggggaaaacaagcaagagggtgcactttgtgaggaacctcataagagaggttgctggttttgcaccctatgaaaagcgtataactgagttgctgaaggttgggaaggataagagggcacttaaggttgcaaagagaaagcttggaacccacaaacgtgcaaagaagaagcgtgaggaaatgtccaatgttcttaggaagatgagggctggtggggctggagacaagaagaaataagtcttatttactcttttctagtttcactagatggacctgtgtattgatgg

SEQ ID NO: 268817 - DNA, 369 bp, Glycine max
  unsure (1)..(369): unsure at all n locations
agcagcagcgtcaatgtgtatgagcttaacctgcggcagcattcaaagggtctctcttgttcttcttcctcatcgntcttcgctggaagtggtagttattctctccgcgcgggtcccacctcggtggtgtcgcttgcccggcgcttgccgctgaccatagagaacgcccacaagaaaggggcgggcagcaccaagaacggccgcgactcgcaaggcaagcgtctcggagtcaagatatacggcgaccaggtcgccaagcccggctccatcatcgtccgccagcgcggaaccaagtttcatgcaagaaagaatgtggggcttggcaaagattataccattttctccttgattgatggagttgtaaaaatt

SEQ ID NO: 268818 - DNA, 350 bp, Glycine max
cgctcttgaaagagagagggagatggagggaatatagcacaagacaggtgaaagtaatggcataaagatgcacattgcaaaaaaaggggaaagcccttgggtgttgtttctccacggctttcccgaactctggcactggtggcacaaccagattgtggctcttggttccctcggataccatgcggtggcaccagatctccgaggctacggtgacaccgatgcaccaccttcaatagacagctacacatgctttcatatagtggctgatctcgttgcgcttattgattctcttggtgcagagcaagtgttccttgtggctcatgactggggagccatcataggttggtacc

SEQ ID NO: 268819 - DNA, 331 bp, Glycine max
tacttacacttgataaattattggtctctctctttttgtaaaaataaaataaaatagacaagatgtttataaagagaactgtgtttgatgtcagattagttggaaatgggatcttatgtttttgaattttgtagttgagtgagggagaggatgtctggtggcacacagaagagtctgagaaaagcacttggagcccttaaggacaccacaacagtctcgttggctaaggtcaacagtgattacaaggaattggacattgctatagttagagccacaaatcatgttgaacgtccggctaaggaaaaacatataagagctatattttcagcta

SEQ ID NO: 268820 - DNA, 378 bp, Glycine max
gtgaggctgacctcagagcagtagatggcttccacttccatagttccattccagctcttaacaattacatgagacagagaaagggttgacggacagagaacccaccttttgttgtattgcagatccatccgctctgccaccaggtgaatggaaggaagtggcggtggcggtgcttcaccgtctgcaccggtgaagcagtatttgcacgatttctcgaagctgtttcagtactatctggataaatccactccacattccacgtacagatggattgggactttcgtgatagcatccatctacgttttgcgcgttgtttatgtgcagggtttttacattggctcttatggactcggaatctaccttctgaatctcttggat

SEQ ID NO: 268821 - DNA, 395 bp, Glycine max
acgggtggtgcctctcttccatctccccagccaaaacctctctcaggaaggccacattacgcccttccgtcttcgcaacccttaacactccttcttctccttcctcttcatctttcttcccctctctcattcaagacaggcctgtttttgctgcccctgcccccatcatcaccccaactgtgagagaggatatggcaaaggaatacgagaaagctattgaagaacttcagacattgttgacggagaagagtgaactcaaagtcgcagctgctgaaaaagtggagcagataacagcttctctagggacatcatcatctgatggcatcccatcatcagaagcctcagacaggatcaaagctggtttcattcacttcaagaaggagaaatacgacaag

SEQ ID NO: 268822 - DNA, 271 bp, Glycine max
  unsure (1)..(271): unsure at all n locations
cccaactgcagatgtcgtgttttaaagttaatattttaaattctttgctcattgagttggtggaatttgttgtgactagttaatttgcttcactttcctatttcatttgtagtgtgacacttaaaaaggatatcttgattagatgcggatagattatcacaacagcttgatcatttgcngnnnaaaaaaannaaaaaaaaaaaaaaaaaaaaagaatnnntttataaggaacaaatttaaaaacagaagcatgcaacagcatataataaaa

SEQ ID NO: 268823 - DNA, 110 bp, Glycine max
tccacgcgttcgagacgagccgtttctaattaatgataggtgtcaagtggaagtgcagtgatgtatgcagctgaggcatcctggcagaccagtagacttgattggtttgc

SEQ ID NO: 268824 - DNA, 432 bp, Glycine max
tcgcccacgcgtccgcttcctctttttctcaacaaaaaggggttcaattctagctagttctattacgtcgtccgcgaccatgaacgtggcgatcgcgcttctgttcatggttttcgcagtttcatcagctttagacatgtcaataatatcacacgacaacgctcatgcggatagggccacgaagcgcaccgacgaggaagtgatgtcaatgttcgaggagtggctggtgaaacacgacaaggtgtacaacgcgctccgtgagaaggagaagaggtttcaaatcttcaagcacaatctgcgcattatcgatgaacgaaactctctgaaccgaacctacaagttgggactcaacgtgttcgctgatctcaccaatgcggagtacagagccatgtacctgcgaaccttggacgatggttcgacgttgggcttgga

SEQ ID NO: 268825 - DNA, 315 bp, Glycine max
cccacgcgtccgtggagcgatatattaggaaccaacacaggccttaggaccttgaagttgcctgatcccatgtactacattagtcgacgactctaggctcttatgaatgaaatgagatatgtagtaactaataatggagagacttaacctaggggcactcgttattgctatgattcatatgtatgtgactttgtgtgagacagtagttacgtgagactgcacaagctcaactgaacgtagttttatctttcgtggttttagtatgattttgattttcagaattgattatgcgtctataatcaactttaggtctag

SEQ ID NO: 268826 - DNA, 390 bp, Glycine max
cccacgcgtgcgaccacgcgtacggccacgcgtgcggcggtttcacagaccgagggatcccaatcctatggcagaggaggggaaacccgatgaacagctctttcagcttctctccaatcttctccaccaggtggaatcactgactaatcaagaagacgttgagctgcgttctaaaatcgaaactcttggattagaggttacaaaagttccttcaaagtcaacgcatcaccttaacgagttggaaatagctgacgagttggataaattatcagcaagattggataatcttgatgagatgatatcatcatcaatggcttcagatccacaagcgccatcactcttgagtgaaacaactcgatgtgtggatgccaggtatcactgctacttctg

SEQ ID NO: 268827 - DNA, 430 bp, Glycine max
caaaagggaagattttggctgttggtaatggatttgacaaagaggataagccatcaaagggtgaaggtggggcaaaaaatcaaactgaaaaagaaattattcctccacctcccataaagaaaaatcctcttcattcaagagagaaacaaggcccagctgttgctagagcagaagatgatgacatttttgtaggtgaaggggttcactatgatgtacctggtaaagacttgagccaaagtccggtctctgaggacatggaagagtctcctaggaacaaagaaaaaccttcatatgtcacagaacctacttatggtcctgtcccaccttcaatggttcctcaagggtggcaagaaacaaatggatatgatgtaatgcaaacacaagcctttgatgctggctaccaaggagagtggcaggaataccattatgc

SEQ ID NO: 268828 - DNA, 449 bp, Glycine max
gcattgcacaagttctagtggccgcttatagaaaacgaaaagttgagctaccacgtgagaagcatgttgatggggttttctatgatcctccacttattgggacaaacgttttgtcaaagctaccattgaccaaccaatttaggggtttgaataaagcagctgtaataatggagggggagctaaaccctgataggagtagagcaaataagtggaaacttgtcagcatccaacaagtggaagaggttaaatgcttggcaaggattttcccaatttgggctgctgggatcctaggttttacttccatggcacaacaaggaacatttactgtgtcacaagccttgaaaatggacagacaccttggaccaaaattccaaatcccagccgggtcacttggggtcatatcattcatcaccataggtgtgtgggttccattctatgacagaatcatg

SEQ ID NO: 268829 - DNA, 453 bp, Glycine max
cccacgcgtccgcaagatggttctgctagagaagctctgggatgacgttgttgctggccctcaacctgagcgtggccttggcaagctcagaaaactcaccaccctcaaaactattgatgaaggagacagtagcaagctgcagaagacgttgtcgatgccgtcgacaccgacaatcccgatgactcccacgactccaacgacaccgggatccgcgcgtaaagctgacaacgtttggaggagcgtcttccatcctgggagcaactccgccacaaagaccatcggtgctcagatgtttgacaaaccactttccaacactcccactgtctacgactggctgtacagtggggagaccagaagcaggcaccgctgaaaggataagctaagaaaaccgcgggttgcatgtaaatattgtcgtttttcgttaagcacctgccacgtttgaatctactacta

SEQ ID NO: 268830 - DNA, 432 bp, Glycine max
ctagttctagatgagtggccgccttgggtataaagggatacatatattctagtggtagcagattggcgcaaaggctaatattgggaaagaccaaccatggggacctaagaaaatatttatctgggttttttgacactacagtggggaacaaaagagagacacgcagttatgttgaaatttctgagtcactcggtgttgaaaaaccatcagatattctatttgtcactgatgtatatcaagaagccacagctgcaacggctgcatgtttggacgtgataatttctattcgacctggaaatggaccccttcctgacaatcatggcttcaagacaatcaaatcccttctcggagatctaagaccaattgcagtcttatggaatgacattaaatgtgttatcattactaagaatagtgtaacggtcactttttaat

SEQ ID NO: 268831 - DNA, 233 bp, Glycine max
cggacgcgtgggtgaaattttaaaaatgactgggataaacttaagaattcaattagtgaaattgaataagtaaacagtttaattggattggtcgaatggtatcaaaaaaatggagtactaactcccatttcttatttattattgaattaaccgatcaacttgctttgttatcgaacatttcttctttgatttcaaaaattttccggaaaaaatttgaatctatttttatatgc

SEQ ID NO: 268832 - DNA, 428 bp, Glycine max
tcggaatgtcctattcctggcgaaaggagggaggcgataagacatgataatcaggtgcttaggagcctattggagtgaccctggccatcccaagctatacaaacacgtgtatatgactagttagcatagttcctatgaaccgggacagagctgactacgaggaagcatgagaaagctatgacgttaaaagattatataaggaatattaagatctgcatacacactagactctaccagtttggatattacactgccataaattgacgctgctacttatcttatagataaactagctctgaaggctggcaatgagaatgatgatgatgaagctgataccgttggatactgcacattcatcgtccagaatgtgacatgagtacccgacaactgacttaagtttaactttcttggtaaagaatctatcaagt

SEQ ID NO: 268833 - DNA, 428 bp, Glycine max
aaccagtccaatttcctttcctttcctttctctccattggacactgcctcttgtctctctgaattggcttttcttcccttttgctttattggggcagcctctctgcaatccacagataacttagattacttccacatgctcatctcatcattcccagcttttcatctgagtgggagatgagaagaactggccgagctttaaaaaaaaaaaaaactgctcttgttttttctctgaatttcggtgtgatggagttcccttcccctactatgcgagtttggacccttttcttgttcctgctacttctgaagagtgatgttgtgcaatcggcttctgattccttgattggtcttggaagctatgacattaccggtcctgcagctgatgttaacatgatggggtatgccaacactgagcaaattgcatctggg

SEQ ID NO: 268834 - DNA, 438 bp, Glycine max
atttaatttcatatgaaaatgatttcatctgcctccaacgaaaacaagacggtggtggacatggacgaccacctcgccggcctgggatacaaagtccgttcatcggagctgtgtcaagtggctgcaaacatggagcgtttagaaaacgtgatttcatccaccgacctatctcaactcgcatcagacacaaccctctacgatccttccaacatagggttaggttcgtgggtggacacgctcctctccgagttcgaccaaacggcgtcgttaccgttacaatacgatttcgccacggatccaaaccataacaagcaattagcgctggtcaccaccgtggaagaagactcggggataagactggttcacatgctgatgacgtgtgctgattccgtgcaacgtggtgacttctcattcgctggctccctcattgggaacatg

SEQ ID NO: 268835 - DNA, 320 bp, Glycine max
gtgatttcagtgagtgatcggtgttcacttgatctcatcataatcgtcagcgtcaattgaagaagatgccgatcagaaacatcgccgtcggaaggcctgaagaggcgactcaccccgacacgttgaaggcggctttggctgagttcatctcaaccttcatcttcgtgttcgccggctcaagctccggcatcgcctacaacaagctcacacgtcaacggcgctgccacccctgacggcctcatctacgactacatcgtccatgcattcgccctcttcgtcgacgtctacgtcggcgccaacatcttcggcggccacgtcaa

SEQ ID NO: 268836 - DNA, 428 bp, Glycine max
gagaaaatcaagaaccccaactataaaggaaaatggaaggcaccattgattgataacccagagttcaaggatgaccccgacctgtatgttttccccaacttgaagtacgtggggattgaattgtggcaggtgaaatctggtactttgtttgacaatgtcttaattactgatgatcctgagtatgctaagcagctggttgaagaaacatggggcaagcacaaggatgctgagaaggcagcatttgaggaggccgagaagaagagggaagaggaggaatcaaaggatgacccagttgactctgatgctgatgaggaagaggaagatgctgatgaaactggcaatgactccgatgctgaatcaaagacggaagctggagaagacaccaaggaagagggtgtacatgatgaactctaggaagttgcaaaacg

SEQ ID NO: 268837 - DNA, 432 bp, Glycine max
ctagaaacagtgtgatgaaaatgaaggtccttgttttcttcgttgctacaattttggtaggatggcaatgccatgcgtacgagatgttccctctccgaatgaacactggctatggtgcccgtactccggaggtgaaatgcgcaagttggaggcttgctgtggaagcacacaacatctttggctttgagaccattcctgaagagtgcgttgaagcaacaaaggaatacatccatggcgaacaatatagatcagactccaaaacagttaaccaacaagcttacttttatgccagagacctcgaagtccatcccaaggacacatttgggttcaatatagatggcaccgtactctctaatattccatactacaaaaaacatggatatggggtggagaaatttaactcgaccttgtatgatgaatgggttaacaagg

SEQ ID NO: 268838 - DNA, 455 bp, Glycine max
ggcttccttaagctccttagtgctgctccttgcagctctaattctatcccctcaagttctggcgaactatgagaatcccccagtgtacaagcctcccactgagaaaccaccagtttataagcccccagttgagaagcctcctgtttacaaacctgcaggtgaaaaccccccaatttataagcctgcagtggagaagccaccagtgtacaagcccccagttgagaaacccccagtttataagcccccagttgagaaaccaccagtgtacaagcccccagttgaaaaaccaccagtgtacaagcccccagttgaaaaacccccagtgtacaagcccccagttgaaaaaccaccagtgtacaagcccccagttgagaagccctcactttacaagcccccacttgagaagccaccagtttacaagcccccagttgagaagccaccagtatacaagcccc

SEQ ID NO: 268839 - DNA, 444 bp, Glycine max
cccacgcgtccggggagaaagttaatatttctcctttcaaatccttcgtaacaatacaaggggaaggtgcagataagaccatgggtcaatggggtgacactgctcaaagccagccattaggaacctatggttctgcaacttttgctgtgaattcaccttatttcatagccaagaacatcacattcaaaaacactgccccaattccagcaccaggagcagttggaaagcagggagtggcattgagaatttcagcagacacagcagtattcctaggctgcaaattcttaggagcacaggacacactctatgatcatattggtaggcattactataaggattgctacattgaaggctctgttgatttcatatttggcaacgctctctctctctttgagggatgtcacgtgcatgccatagcacaacttacaagggccttaacagcgc

SEQ ID NO: 268840 - DNA, 416 bp, Glycine max
accgattgctagaatggaatttcgatgctcagtcatctcttttaccattctcttctctctggctcttgcaggagagagccatgtccatgcatcgctacctgaggaagattattgggaagctgtttggccaaacactcccattcccactgcactgcgagagcttctaaagcctctccctgcaggtttattaattttatgagaattatcaattctagattattgattcttgaacatgggttcttatcttcctatcatgccttggcaagtttaaaacgttaattaggtttggctgtgtaacaaagtagcaaagacaaaatttaaaaggaaaatgcttaaagtattaaatgttagagtgcaagacatgcgaaaagtctgcttacaaattcattcataagggtgacttacccagttatata

SEQ ID NO: 268841 - DNA, 412 bp, Glycine max
ctccggaactcgtttctaccttcacttcgcacatctcgaaccctctctttccggcaactaggttaaagttcatcaatggcaggtcgtggcaaaaccctaggatccagcgccgccaagaaggccacctcaaggagcagcaaagccggcctccaattccccgtcggccgtatcgcccgtttcctcaaagccggaaaatacgccgagcgcgtcggcgccggtgctcccgtttacctcgccgctgtcctcgaatatctcgcagccgaagttttggagttggctggaaacgctgcgagagacaataagaagactcgaattgtgccgcgccacattcaattggcggtgaggaacgacgaagaattgagcaagcttcttggtgacgtcaccatcgctaacggtggcgttatgcccaaca

SEQ ID NO: 268842 - DNA, 439 bp, Glycine max
aggcacgctgctgccaaggttttcagccatcctgatgttgttgctgaagtgccatggtacgggattgaacaagaatacacctggttgcggaaagatatccaatggcctcttgggtggcctgttggtggtttccctggacctcagggtccatactactgtggtgttggcgctgacaaggcttttggccgtgacattgttgacgcacactacaaagcctgtatttatgctggcatcaacatcagcggaattaatggagaagtgatgcccggtcagtgggaattccaagttggaccttcagttggaatctcagctggtgatgagatttgggcagctcgttacatcttggagaggatcactgagattgctggtgtggtggtttcctttgaccccaagccaattaagggtgattggaatggtgctggtgctcacacaaactaca

SEQ ID NO: 268843 - DNA, 441 bp, Glycine max
cccacgcgtccgggtcaagcagtttggaaggggcacccagagcgtcgaattcagcagagagagcaacaatctctacaacctcaattcgtgcaagtactctggtttggcaaacaagaaaactgttactgttcagcctgagggcaaagatcaggctgtgttgttggctacaaccaagacaaagaagcaaaacaagcccgctgcattgctccacaaatctgtgatgaagaaggagttcaggaggatggcaaaagctgttgaaaaccaggtggccaaaaattactacaggcctgatctcaagaaagcttgccttgcaaggatgagtgctgttcacagaagcctcaaagttgccaagtctggtgtcaagaagaagaatagacagggcgtgagagtcgctggtaggaagtgaaaaggaattgagaaagaatctgctgttcaatcttc

SEQ ID NO: 268844 - DNA, 388 bp, Glycine max
atcgagataactagaaacagtgtgatgaaaatgaaggtccttgttttcttcgttgctacagggttggtagcatgggaatgccgggcgtacgatatgttccctctccgaatgaacactggctatggtgcccgtactccggaggtgaaatgcgcaagttggaggcttgctgtggaagcacacaacatctttggctttgagaccattcctgaagagtgcgttgaagcaacaaaggaatacatccatggcgaacaatatagatcagactccaaaacagttaaccaacaagcttacttttatgccatagacctcgaagtccattccaaagacacatttgtgttcagtatagatggcaccggaactctctaatattccatactacaaaaaacat

SEQ ID NO: 268845 - DNA, 426 bp, Glycine max
cccacgcgtccggtttcatttgtgaaactaacaacaacacaaggccatcatcatggcatctgcttccccaatggcaagccaagtcaagtccaccttcactaggactcttgtagctcccaagggcctctctgcctcttcaccacttcacctcgtgccttctagaaggcaatttagcttcactgttaaggccatccaatcagagaagccaacctatcaagtgattcagccaatcaacggtgacccattcattggaagcctggaaaccccagttacatccagccctttgatcgcatggtacttgtccaacctgcccgcatacagaaccgcagtgagcccactactaagagggatcgacgtgggcctggcccacggataccttttggtgggcccattcgtgaaggccggcctcttatgaacaccgagatc

SEQ ID NO: 268846 - DNA, 414 bp, Glycine max
cccacgcgttcggcgttggtgcaaagcatccttcgtttcaatttctctctctcagcgctttgtgcaatcgaacctttcatctccaaagggatccacaggccgaaggagaaatggggctgacattcacaaagcttttcagtcggcttttcgcgaagaaggaaatgcgaattctgatggttggtcttgatgctgctggtaagaccactatcctgtacaagctcaagctcggagagatcgttaccacaattcctaccatcgggttcaatgttgagactgtggaatacaagaacattagcttcactgcttgggatgttggtggccaggacaagattcgtcccttgtggaggcactacttccagaacacccagggtcttatttttgttgtagacagcaatgatagggacagagttgttg

SEQ ID NO: 268847 - DNA, 434 bp, Glycine max
  unsure (1)..(434): unsure at all n locations
tcgccgaaaatggctgtttcggctatcactggagcgaggctaactctagggatgtctctttcctgttccacgcgatcacgaaccgtcgcaatggccgtatctatcgaccccaagaccgataacaaactcactcttaccaagtccgaggaagctttcgctgcggccaaggagctgatgcctggaggcgtgaactccccagttcgtgccttcaaatccgtgggtggtcaaccaattgtgattgattcagtcaaagggtctcgtatgtgggatatcgatggcaatgagtacattgactacgttggttcctggggtcctgcaatcattggtcacgctgatgatcaggtgcttgcagctctgggtgaaaccatgaagaaaggaaccagctttggtgcaccctgtctgctggaaaacactntggcagagctggttatcga

SEQ ID NO: 268848 - DNA, 388 bp, Glycine max
acataatgaaaattttacttccaaacccaaccaaatcaaagaaatgcaggatcacgagacagtccctattgcgaaaaatgaagcctctgattcaagcttattcggaagacgaagctacaaattctgggcactagctgacatactgatcttggcattctggtgcatgttcaccggcacattctatctgcgctggtacggcaccctcaacactttctcccacgcgtcccttgacgaccaccttgacgtgctcgaaatcgaggagcgggagaagctggtgaggcacatgtgggacgtgtacacgaataaccgtaggatcaggttgccgcggttctgggaaaaggccttcgaggctgcctacgaggatttgaccagcgacgccggcgatgtt

SEQ ID NO: 268849 - DNA, 382 bp, Glycine max
tctccctacactacaggaagatttgtgatgggtggaagttctattggtgatgactgggagggcacttcctcatctaacgaggggcggacagtggtcttagttggacgaactggcaatggcaagagtgcaacaggtaataccattcttggaaggaaggtcttcaagtcaagggctagctcctctgctgtatccacctcatgtgaattgcagacaacagaattaaacgacggacaaattgttaatgttattgacaccccaggattatttgatttgtctgtcggatctgagtttgttggtaaggaaattgtcaaatgcattgatttggccaaggatgggatccatgctgtcattgtagtgttctcggttagaacacgctttactg

SEQ ID NO: 268850 - DNA, 374 bp, Glycine max
cttatcctcttcctgcaaaaccctgattcacacccaaagagaaaagaaaaaaaaaacaacagtggtgcgtgatgccaccgaagttcgatccctcgcacgtggtggacgtgttcgttcgagtcaccggcggcgatgttgttgcggagagttctttctccccaaacatcggtcccttgggactcttcccacataaaattggggaggatattgcgaaggaaacctcgaaggactggaaaggcctccgcgtgacggtgaagctaaccgtgcataaccttcaggcgaaagtgacggtggtggcatacatcgccgcgctggtcatcaatgcgctgaaggaacccgaaagggacaggatgaagacgaatgacatcaagcac

SEQ ID NO: 268851 - DNA, 268 bp, Glycine max
gttttggtttgaagaaaaatgaatctaaaggattcaaagttgatttgctctttcatactgcttaattttcttttcttcagttgttttgcagctgataatctcccgtgccctccaaaatctactatcccaccttcctcttcaccgcagaaatgccccaaagacacgctcaagtttggtgtgtgtggaagttggttaagcttggttaaagaagtaattgggacaaaaccaagtgaagagtgctgcatccttttgaaaggtctcgctgatc

SEQ ID NO: 268852 - DNA, 432 bp, Glycine max
aaatcacacactctcttcaatttctagggttttgctattgctttgcctccgttccccctttgtcacaaaaacaacgccttttgtcttctgcttcgtatctgcattcacagcgtaattcgttgctgcattttaatcgatttatctaaccaggactgaatgacctaatggagtctaaaggtgggaaaaagaagtctagtagtagtagtagtaaatcaattttttacgaagctcccctcggatacagcattgaagacgttagaccaaacggtggaatcaagaaattcagatctgctgcttactctaactgttctcgcaaaccatcctgatacacatccggattgatagttcgttgcatgcaaccatagttttattaggattgtttcttctttgttttcaattaagtgtttttggtgctctccttcaaactccatc

SEQ ID NO: 268853 - DNA, 349 bp, Glycine max
cccacgcgtccgcccacgcgttcggaagtgttcggattgcggcgacgtgagcggttcgctggccgcgacgttgtgagaagtccactgaaccttatcatttagaggaggaggaatacatccgacctgccccagttttggctgctaataatgatattgaggtccctgtccctgtcgcatgaaatgttatacactggagcagtaattcatagtagctgagtgcctagtttttcttgtgcaatgttttttgacaagttcaaaattttgtagtttcttaaattttgaagaaattttcatactcggttacaagtattttaagtaatttgctttatctttttcaaaaaaaaaaaga

SEQ ID NO: 268854 - DNA, 277 bp, Glycine max
gtacaactgaagtcacaacaatctgggccatgactgaactaataaaaaatccaagcattatgaagaaagtgcaagaagaaattagaggcttaagtggtaagaaagatttcttggatgaagatgatattcaaaagttttcctacttaagggcagtgataaaagagacacttagattgcacttaccagcaccactacttataccaagagaaacaaataaaaaatgcatggtagatggctacgaaatttcagccaagacattattatatgtgaatgcttg

SEQ ID NO: 268855 - DNA, 426 bp, Glycine max
aaagcattaaaggtcacactgccacctttcagatttgacttcctctccggcgctgccattctcttccacggcagtgtttctctttctctctctctatcttcaatttcgagaagtagctccagtattatatggcctccttcagagcattctggaacagtccagttggtcccaaaacaactcacttttggggacctattgccaactggggatttgtagcagctggattggctgacctgaacaaacctccagaaatgatctctggcaacatgacaggagcaatgtgtgtctattcagcattgttcatgagatttgcatggatggttcagccacgcaactatctactttttgcttgccatgcctcaaatgagactgttcaactctatcatttttcccgatgggcaaaggcacaggggcttctgtcggaaa

SEQ ID NO: 268856 - DNA, 435 bp, Glycine max
ggccgtcctttttttttttttttttaaaataaaagaagaaatccattcagagtgccacaaatacaatcaaggaagtaatcatgtcataatttacatccatacaatggattaacacaaaggcaaaaagattgacatgaattttcaaaatgaagaagacaccatacacataaataacaactaatacaagcaagcacatacaaaaacaagagcctaagcccttgtcttgaaaggaatggctcggatgactatctggtgatacacagcatcaagggcagctccaatgaaaggtccaacccagaaaatccattggtcatcccatgcatggtctctgttgtagatgatggcagctccgaaactcctagctgggttaatgccagttcctgtgatgggaatggtagccaagtggaccaagaacacagcaaatccaatgggaag

SEQ ID NO: 268857 - DNA, 456 bp, Glycine max
ctaatatcactgagttaggaaaatggggaagaagaagaagagaagtagggtttccgaagacgaggaaatcgaatccgataccaaccccttcgataaaaacgaaaactctctctatcaggttcttggtgtggagaaaacagcatctcaacaggaaataaagaaggcatactacaagttggcattgaggctgcatcctgataagaaccctggtgatgaggaagctaaagcaaagtttcagcaattgcaaaacgttattgctattcttggggatgaagaaaaacgggccgtttatgatcagactggttgtgttgatgatgctgaacttgcaggggatgttgttcaaaatcttaaagaatatttcagagcaatgtacaagaaagtcactgaagctgatattgaggaatttgaagcaaactatagggggtctgacattgagaaaaatgaattgattgatct

SEQ ID NO: 268858 - DNA, 433 bp, Glycine max
gtcagaatcagaatcagaagaagcgagcaaagatgtcgggtcgtggaaagggaggcaagggtgtgggtaagggaggagccaagaggcacaggaaggtgctccgcgataacatccagggaatcacaaaacccgccattcgccgtttggctcgcagaggcggcgtcaagagaatcagtggcctcatctatgaagaaacccgcggcgtccttaagatcttcctcgagaacgttattcgcgacgctgttacctacaccgagcatgctaggaggaagactgttaccgctatggatgttgtttatgctctcaagaggcagggcaggactctctatggtttcggtggttaaattttaaggttttgatgggcttagcagctggttatttttgtaaatggtcgtttgtttgggaggatttgattttgtgcttttttgttttt

SEQ ID NO: 268859 - DNA, 444 bp, Glycine max
gagaacgtttccgattctacttacgacatgattggtggtttagaccagcaaattaaagaaataaaagaggtcattgagttaccaatcaaacatcctgagctgtttgaaagtcttggaattgcacaaccaaagggtgtcctgctctatgggccacctggtacaggaaaaacattgttggctagggcagtggctcatcatactgactgtacattcatcagggtgtctggttctgaattagttcagaaatacattggagaaggttctagaatggtcagggaactttttgttatggccagggaacatgctccatcaattatcttcatggacgaaattgacagtattggatctgcccggatggaatctggaagtggcaatggtgatagtgaggtacagcgtactatgctggaacttctcaatcacttggatggatttgaagcttcaaac

SEQ ID NO: 268860 - DNA, 336 bp, Glycine max
ggaccatgtggaagctgcctatgtttggttgcactgatgcttctcaggtgttgaaggagcttcaagaggctaagactgcataccccaacggcttcatccgtatcatcggattcgacaacgttcgccaagtgcagtgcatcagcttcatcgcctacaagcccccaggcttctaagtgtgaaaaatttgcaaagcatttgtagccgtcaccccactttgtttgcttgtacttaaactacattcccatttgtttttgctttttgagatttcatcatcctgtatttttggtttctgttttcggacttcaatggaaattaatggatgagaactaatgaata

SEQ ID NO: 268861 - DNA, 431 bp, Glycine max
  unsure (1)..(431): unsure at all n locations
cccacgcgtccggacgacgccgttttgacccggcgaccgggaaatggtggagccggtggaggttcgctgcgaggagcagctgtggcttctgtcagattcgagcaatggtgatcggtcgtggcggttgaacttcgacgggtttcagctatcttcggagcacgcggagaagcaagtgaaaccccctcgcggactccacgactgttacggggttctaggtcaagaagataatattgcagagtactatcagcagcaggttgaagtgcttgagggctttactgaaatggatgctttagcagagcgtggttttattcctggaatgtcaaaggaagagcgagacaagttagcaagaagtgagacatttgccatcagagtgtcaaatgcagcaaacatggttctttttgttgccaaagtttatgcatcaatcangagtg

SEQ ID NO: 268862 - DNA, 369 bp, Glycine max
cccacgcgttcgagaggcggttaggtggatctgctcttgcccaggcgtttgaccaagttggagatgagtgtcctgatcttgatgatgttccttaccttaaaaaggcctttgaaggtgttcaagaccttctttctgatgaattgatatctgctggtcatgacatcagtgatggtgggctgctagtttgtgccttagagatggcatttgctggtaactgtggtcttagtttggacttggcgtctcaaggtaccagccttttccaaacactctatgctgaagagcttgggttagttcttgaggtaaacaagaaaaatctggctttgggtatggataaattgagtaatgtggggagtttaactgaaatcattg

SEQ ID NO: 268863 - DNA, 400 bp, Glycine max
tcgaacccactaagatggcttcctttgtatccttcctagtgctgcttcttgcagcccttatcctcatgcctcaagggcttgctacttactacaaaccaattaagaagccaccagtgtacaagcctccagtgtacaagccaccagtgtacaaaccaccggtttataagccaaaaccaccggtttacaagccgaaaccaccggtttacaagccaccatataagaagccaccatacaagaaaccaccttatggaaagtaccctccagtagaggacaacacccatgcctaaagcaagcaatgaggtctattatctacttaataaataagaggaactgctttgtgttttctagcattgtgatttacaacttcgtagcaatgcatattcttgactcttgcatgcac

SEQ ID NO: 268864 - DNA, 412 bp, Glycine max
  unsure (1)..(412): unsure at all n locations
tccacgcgtccgctcaatcatccatagacatggtcaccgtcacttctgcagcaggttctatggcctcattcactggcctcaaggcatgcgcaggcaaagtgagtgccgccgcagttaaagtctcagctccccaagccacaaggttctgcggcatcaaggcttccctcaaagacgttggagtcgctgttgtggccactgctgcgagcgcagttctagctagcaacgccatggccattgaagtgttactgggcactgatgacgggtctctggttttctattccaactctttctccgtggcccctggggaaaagatcgtgttcaagaacaacgcatgtttcccccacaacgttgagttcgacgaggacgagattcctagcggcgtggatgcagggaaaatctncatgagcgaaga

SEQ ID NO: 268865 - DNA, 431 bp, Glycine max
caggaacccgtgtgcatgtcttccattttgaccagaatttggatctccttcccattggtgagagtcttgagcttaataaaaagatcacacccggtttaagtgcttacgaggatgatcccgagcaagctgcagaatctctgattccacttttggaggaagcagaaagtgtagttcctgaggacttgcgtcccaacacacccgttaggctaggggcaactgcaggcttaaggcttttgaaagggaatgcttctgaacaaatattgcaagcggttagggatatgctgagtaacagaagtaccctgaacctacaatctgatgcagtaactattcttgatggaaaccaagaagctgcttatatgtgggtggcattgaactatctattgggcaatttgggaaaagtgatttcaaagacggtgggagtagctgatctt

SEQ ID NO: 268866 - DNA, 431 bp, Glycine max
gtcttttacatggaaggttcttgctccatactctggcacccttgctgttcttgggactgggctctatgtcctatccttctctcttggtgctggtcctgtgcctgcccttcttctaccggagatatttgcttctagaattagagcaaaagcagtttctttgtcattaggcacacattggatctccaacttcgtcatcggcctctacttcttgagtgttgtaaacaagtttggtatcagctccgtgtacttgggattctcggctgtctgtgttcttgctgttttgtacatagctggtaatgttgttgaaacaaagggtcgatcattggaggaaatagaacgtgctctcagtgctttaacatgaaaatcttgcaggaaatgctgttgttcataattcctatgctgctcaaagaactggtgtatgctcttactac

SEQ ID NO: 268867 - DNA, 447 bp, Glycine max
cccacgcgtccgctacgggatgaagaagctaggagattgagagcagctggtaaagctaatgctgatggtgtcaagaaatctcgtccacgtgagcgagttgggaggggaattgcagttccagaggccaatgccgaactgcaagcaaatattgatagacgacggctgatcacacattcaaatgctaagagcaagagtgagaagtttcctcctccccaccaagatggagctctaggctatcctttgggttcttcacatcacatggatccagtttttgatccccctgatgttccatttagttctacaaacttctcacaacctaaagcaaatatccaaacctggtccggcccattggtagatccttctggtgtgggcgtgccgaggagaaagaagaaacatggcaagtgatgagcatcatatacaatcaaattcatcaaaggaggactcaaa

SEQ ID NO: 268868 - DNA, 344 bp, Glycine max
gtgagtttgttgatcgagataactagaaacagtgtgatgaaaatgaaggtccttgttttctgggttgctacaattttggtagcgtggcaatgccatgcgtacgatatgttccctctccgaatgaacactggctatggtgcccgtactccggaggtgaaatgcgcaagttggaggcttgctgtggaagcacacaacatctttggctttgagaccattcctgaagagtgcgttgaagcaacaaaggaatacatccatggcgaacaatatagatcagactccaaaacagttaaccaacaagcttacttttatgccagaaacctcgaagtccatcccaaggacacatt

SEQ ID NO: 268869 - DNA, 158 bp, Glycine max
cccgggccattttttacttggaaaggaaaattggtactaaacggggccccaaaggtttgttgcaggaaacttgggtccacattttttcctcaaatgacctccatgttaattaggaaaaaagaccttggaaggggcaaagctttaataattggagcttt

SEQ ID NO: 268870 - DNA, 452 bp, Glycine max
agccttcaatcatatagcattctaagaaatgaagagccctaccattttcattctctttctacgtttctgccttctacacctcagtcctaccttcagccaccgctcaagtcgtggttgacatggaaggtaatgatcttcaaaatggtgggaaatattatgtgttgccagtaatagagtcatcatatggtggaataagagtagccgcaactggaaaagaaagatgccctctcactgttgtacaatctgccgatccgtatgataaggggattgcaacaattatttcaaccccatatcgagttcctgttatccgcgaaggctttcctttgaacattacgttcggtaattttgcagttatactgccttgtgtccaccttcgttctgagtggaccgtcgttaatggccaaccagaaagacccgcagttaaaattggttcgcccccaaatgcagaaaat

SEQ ID NO: 268871 - DNA, 423 bp, Glycine max
atcgaagatggctctgcccaaagctaaggacatcgtgtcgtccaattgcgtcgtcgttttcagcaaagcctattgccctttctgcgtcgatgtgaacaagctcttcggtgacctcggtgccaattacaaggccatcgaactcgacactgaatccgatggaaaagagctccaagcagcattagttgagtggacggaccagcgaaccgtgcctaatgtgtttattggtggaaaccacattggtggctgtgactcatcaactgccctgcacactcaggggaagctggttcctctgctgatatctgctggagctgttgccaaatcaactgcttaaaggatctcccatttctaggttatgcagttgaatcaaacataaaacccaagtagctgggtcgggtatataattcaggtcccagaaactaatgt

SEQ ID NO: 268872 - DNA, 424 bp, Glycine max
attgaataaagctcagcgtaacgtcctcacgcacatcacattacaacacattgcaggcacctgaattatggataatgcaattgggggacacagagttctgattgaacatcttcaaccaatttcttacacgagaaatgtctcctctcaaacgcatcaatctacagatctctgagctatcattatgtaatgctgggaattctacgcatggtcaaacaagtggatcagatgaagaagtggagatagaacatgcatatcggactgacatctgcaaagcagagcgtgggggctttaaggatacccttccatatgacctgattgacacaactctcaacgctgtactacagaatacaaatgttgaccctgcagaagaaggagatattgtcgccggcacagtactggcacctgaatcagatagacgaatcga

SEQ ID NO: 268873 - DNA, 388 bp, Glycine max
tcgcccacgcgtccgcttttgctttaccaaattccaatttccaattcaaaaccctaactccgttggaagcaccaaatcgtgatggcgccaaaggcagagaagaagccagcagagaagaagcccgcggaggagaagaaatcgacggtgggagacaaggctccggcggagaagaagccaaaggccggaaagaagcttccgaaggagggaggcgccggcggagaagggaagaagaagaagagaaacaagaagagcgtggagacatacaagatctacatcttcaaggttctgaagcaggttcaccctgacattggtatctcaagcaaggccatgggaatcatgaacagcttcatcaacgacatcttcgagaagcttgcccaggaatcttcta

SEQ ID NO: 268874 - DNA, 379 bp, Glycine max
gttgatcgagataactagaaacagtgtgatgaaaatgaaggtccttgttttcttcgttgctgcaattttggtagcatggcagggccatgcgtacgatatgttccctctccgaatgaacactggctatggtgcccgtactccggaggtgaaatgcgcaagttggaggcttgctgtggaagcacacaacatctttggctttgagaccattcctgaagagtgcgttgaagcaacaaaggaatacatccatggcgaacaatatagatcagactccaaaacagttaaccaacaagcttacttttatgccagagacctcgaagtccatcccaaggacacatttgtgttcagtatagatggcaccgtactctctaatattccatac

SEQ ID NO: 268875 - DNA, 349 bp, Glycine max
gggaaaagaaaaatcagctttcttcaagcaccctagatttcctctctctctctctaaaatggcgttctcttcttttctcggccgagtcctcttcgcctctgttttcatcctctccgcttaccaagaatttaatgcttatggagttgatgggggacccacagcaaaagcactcagaccgaagtttgatgcctttgcacatcaagtacattctaaagctggctttcaacttccagatattgatatgaaaattttagttgctggggctattgctctcaagggcctctgatggattcttttcatacttggcagctcttttggagctttccttttgcttttacatcaaatgatt

SEQ ID NO: 268876 - DNA, 399 bp, Glycine max
ccgtaaaagtggacaaggaaatatatttattaagaatttggatagggcaattgaccacaaggcattgcatgataccttttgtacatttggaaatatcctttcgtgcaaggtagctacggattcatctgggcaatcaaaaggctatggctttgttcaatttgataatgaggaatctgcccaaaaagctatagagaagctgaatggtatgctgttgaatgataacaagtgtacgtgggacccttccttcgcaagcaagagagagaaagtgctgctgacaaggcaaaattcaacaatgtttttgtgaagaatctatcagaatcaaccaccgatgatgagttgaagaacacttttggtgaatttggaactattactagtgctgtagtaatgagggatggggat

SEQ ID NO: 268877 - DNA, 417 bp, Glycine max
tccactcgttcgcgccgaaggttcattcaatctccgaaggccttcaccggattgcaaccatgtcgaggagaaaggttagagagccaaaggaggaaaacgtgactctgggcccagctgttagagatggtgaacatgtttttggagtcgctcgcatctttgcctccttcaatgacaccttcattcatgtcactgatctgtctgggagggaaacacttgtccgcatcactggcgggatgaaggttaaagctgacagagatgaatcatctccatatgctgctatgcttgctgcgcaggatgttgctgctagatgcaaggaactgggcataactgctcttcatatcaagctccgtgccacaggtggaaacatgacttaaacaccagggttccccctttggggtttgggccccttttttcccc

SEQ ID NO: 268878 - DNA, 383 bp, Glycine max
tcgtccacgcgttcgtccacgcgttcgtccactcgtccgatgcggtacataagtagatgatgctgtcctgcttgtggggtatggtacagaaaatggtgaagattattggatagcaaagaattcatatagtgataaatggggagataatggctatatcagaataaaaagaaaactgagcacttgtaaatttggaatcgagggttactatcccattataagagtcaccgatcaacaagcccccaaatattcgtgacaatggcatcggctaactgagcccattgaggctttggaagtcattaataacgaggccaaagtttgatggagactatctttgagctattttatctttatacaagtatcgtaatttctgttccctaaatcat

SEQ ID NO: 268879 - DNA, 197 bp, Glycine max
tcgtccacgcgtccggttgagaactaagaaggagaatcaaaatgcttgctcaatgatcggttccacagctgttaccactgtcaaccgtgccggttcctgcatggctgcaacatgtcactgtgcctaaatgcatgtctgtctgttgaacgaggtatacccactatgacagtaccttctgtgctagcaacggttgatga

SEQ ID NO: 268880 - DNA, 357 bp, Glycine max
cccacgcgtccgtccacgcgtccggaagaacaagtagttgagaactaagaaggagaagcaggtggcttcctcaatgatctctgtgcccagctgttaccactgtcaaccgtgccggtgccggcatggttgctccattcactggcctcaagtccatggctggcttccccaccaggaagaccaacaatgacattacctccattggtagcaacggcggaagagtggcaatgcatgcaggtgtggccaccagttggcaagaagaagtttgagactctttcctacctgccaaaccttgatgaagcacaattggcaaaggaagaaaaatatcttcttaggaagggaggatttccttgcttggaa

SEQ ID NO: 268881 - DNA, 267 bp, Glycine max
attttcccttggcacattgctgtgaaaattattgatcctcttatggagtgccttggggagtggaatggagctcctcttccaatctcttaaatttattgtaactcttaacaaatattttatttgtacctatgcaagaaaaaccataatcatttggtttgtctatcatttaacaaatcagtttgaaaagcctaatttcaatgttccttcaatgtcaaataggaccttgtaattttaatattttaatggaatttcatattcacatgttct

SEQ ID NO: 268882 - DNA, 416 bp, Glycine max
gaaaatgtcttgctgcggtggtaactgtggttgcggaagctcctgcaagtgcggcaacgggtgcggaggctgcaagatgtacgcagacttgatctacactgagtcaaccaccaccgagaccttggtcatgggagtggcacctgttaaggctcaatttgagggtgctgaaatgggtgtgcccgctgagaacgatggctgcaaatgtggaccaaactgctcctgcaacccctgcacttgcaagtgaggtgttgggagagcaagcttcaagcagagatagcccttaattaggaataatgataaactattaatgtggagctaaaaacttatgtattatgtctgtgatggttttcgtgcactctggtgttttgtgttaaacaaacatccttagaataaaggggcatgtcttgcctttcaac

SEQ ID NO: 268883 - DNA, 448 bp, Glycine max
aaaatatagaacacactaccctcaacatagtaaagcagctggtgcaagtgaagcgggggctcaaaccatgttgctcatgtctagtgtctctagcagttattccgtggatttgaagaaagaccttttcctccaattgcagagtcaaagtttaaggcctaagttctctcaactctcattcaacccacttccaccatcaacttcttccttttcttcaccccgtacattcacaaccctggctctcttcaaatctaagacaaaagccgctcctgctaagactaaggttacaaagccaaagcaaaaggttgaagatggtatctttggcacttctggaggatttggttttactaagcagaacgagctctttgtgggtcgtgttgctatgcttggttttgcagcatcatttgtgggtgaaggaataactgggaaaggaatcctagcacaattaaac

SEQ ID NO: 268884 - DNA, 384 bp, Glycine max
ctgcttcctcgtagtacttcattgagagagacatggacactgtactaagtactacgctgctgctcatgttggcatgctccatcgtgcatgttcttcgttcactacaagcaagaatgagaagaaaatcaaactacaatcttccaccaggaccctctcttctcaccatcattagaaactctaaacaactctataaaaagccacagcagacaatggccaagcttgccaaaacctatggccccataatgcgtttcaccataggccaatcaaccaccatagtaatctcctcaatagaagccacccaagaggttctccaaacccatgactcattattctcggacagaacaaaccccgacatcacaacctcgtacaaccacaaccgttaca

SEQ ID NO: 268885 - DNA, 388 bp, Glycine max
tcggttgtgggatacagctgggcaggaaagatttagaagtcttattccaagctacatcagggactcatctgtagctgttattgtatatgatgttgcaagccggcagactttcttaaatactgctaagtggattgaagaggtgcgaacagaaagaggcagtgatgtcattattgttcttgttgggaacaaaactgatcttgttgagaaaagacaagtctctatagaggaaggagaagcaaaagcacgtgagctcaatgtcatgtttattgaaactagtgctaaggctgggtttaatataaaggccctatttcgaaaaattgctgcagcattacctggaatggaaacactatcttctgcaaaacaagaagacatggttgatgtaaaactt

SEQ ID NO: 268886 - DNA, 443 bp, Glycine max
gggatttcggccgtttgctccccaaaaaggaaagaagcagattctgtcctttgaaatcaacaagaaaagatgtcaggtgaagaggtagctgttgcagttgaggtacctgctacttcaattccaggtgagccaatggacatcatgactgctctacagcttgtgctgagaaaatctctggcctatggtggtcttgcacgaggtcttcatgaaggtgccaaggtgatcgagaagcatgctgcacagctctgtgttctagcagaagattgtgaccaacctgattatgtgaaactggtgaaggctctttgtgcagagcacaatgttagtcttttgacagttccaagtgcaaagacccttggagaatgggctggtttgtgtaaagatttggatatttttcccaaattaaaaaggggggggggggggaaaaaaaaaaaaaaggggggggg

SEQ ID NO: 268887 - DNA, 247 bp, Glycine max
tcggatagagataactagaaacagcgcgatgaacatgaaggtgcttgttttcttcgttgctacaattatggcagcatggctgtgccattcgtactatctggcacctgttcggatgaacactggctatggcgcccgtactcctgacgtgaaatgctcagattggaggcttgctggggaagctcacaacaactcttgctttgagaccatttctgaaaactgccttgaagaatcacatgaatacacacat

SEQ ID NO: 268888 - DNA, 339 bp, Glycine max
  unsure (1)..(339): unsure at all n locations
agcccaatgtcaattattttttccaaatagaacataaattgtatcattaccaatcaggaacataaaattttcaaattaaaaattccttacaactacaaaaatatgagtacaaaccccaagtcaataatcatcaagggtggatggataagtgagatttatcaatttgcaaaagtcagctggctctactctgctgttggtacttaaactacattcccatttgtttttgctttttgagatttcatcatcctgtatttttgggttctgttttcggacttcaatggaaattaatggatgagaactaatgaataagctctcncncaaaaaaaataacaattaggg

SEQ ID NO: 268889 - DNA, 428 bp, Glycine max
  unsure (1)..(428): unsure at all n locations
cccacgcgtccgaaccaaactaacaaggatcattcatggcttggttaagaaacctctcaaagtttgccaccatgaaaagagcatcatcatcatcatctcaaagacccaaaaacactgacccattttgtctattaccctccttcacttttttttccaacttcagcactaacaccattgaggagaagccctgtgtgaagccagttgagtataataattattcgggcttgcagccaacaaggcctcatgagaagccacgtgtggtggtgctgggctcaggttgggccgggtgcaggctcatgaagggcttggaccctcgtgtgtatgacattgtttgtgtctcacctcgcaaccacatggtcttcacccctctattagcctctaaacttgtgggttttttgggggganaaaaacccccttttttccctttt

SEQ ID NO: 268890 - DNA, 406 bp, Glycine max
attcgactctctctgcactcacttctagggttttctctgcgctataagcaatcatggcggatgaaacaccaaatgagatgaaggaggaggttccagaaattgatccttttgatcctaccaagaagaagaagaagaagaaaattacaattgtagatcctgctgatgaacctgtggagaaattggctgagaagacagaaaacctctcagtttccgagggggttgagactgcatttactggtttgaaaaagaagaagaagaagcctgttgaaatgggtaacttgaatgatgagagtggagatgcaattgaagatttggatgatcaccctgaagatgatgaaggagaaatggttgttccccaggctcgttatccttgggaagggagtcgaatcggtttaaaaatttttta

SEQ ID NO: 268891 - DNA, 422 bp, Glycine max
  unsure (1)..(422): unsure at all n locations
tcgaaaaaaaaaaattagaaaacaatatagatacgatcttttatcctataatcttatcaattatgcagatgagaaagactcatatatgtatggatatagatccctatttcaagtgaaaaaaaaccaagtgatttcttctaattacaacacgtataaaaaagaattattggatatcatagataatctctttatcaagaattatatatcggaagatgcgattctagatatggaaaaaaatatgtatagaaagtattttgattggatgggaatcaatagagaaatactaaatcgttccatatcgaatccagaattttgggtcttttcaaaatttgtgatattttatgacgcatataggggtaactcgcaggttataccaatcaaaattactttttttngtgtttttttttttccccttttttttt

SEQ ID NO: 268892 - DNA, 437 bp, Glycine max
atcactttcgtcaccttcacagatacattcgttgcaatcatccatctcacttccacaaattcctccaaattctaaccaaacccttcactactccaaattccaaaacttcttcacactccttcttttccctcttctgttgcccgatcttctgcctccaagattttggtatttgggattgatcacctggagttggaaatggttaaaagttatggagtgttctgatttgcaaaagatatcatgttgcggtgcttagagggacttaagcctttatttgcttccatattacgatgttgtgacctggatatatataaccagccaagaggccttgaagatcctgaacttcttgctagagagactgtgttcagtgtaagcgaaatagaaaagccaaaccttttttttttaaccccccggaaaaataggggccccccttttttccc

SEQ ID NO: 268893 - DNA, 356 bp, Glycine max
cccacgcgtccgcccacgcgtccggcagaactttgtttcccaatttccattgcctccgcttgcacctcgcaaccatgatcatgccggagaagaaccgcaaggagatctgcaaatacctcttccaagagggagtttgcttcgcgaagaaggacttcaatttggccaagcaccctgagatcgacgtgccgaatctgcaggtgattaagctgatgcagagtttcaagtctcgcgagtacgtgagagaaacttttgcttggatgcactattactggttcctcaccaacgatggcatcgagtttctcagaacttaccttaaccttccttccgaaattgtccctgctactttgaagaaacaa

SEQ ID NO: 268894 - DNA, 372 bp, Glycine max
caagtagttgagaactaagaaggagaagcaaatggcttcctcaatgatctcttccccagctgttaccactgtcaaccgtgccggtgccggcatggttgctccattcactggcctcaagtccatggctggcttccccaccaggaagaccaacaatgacattacctccattgctagcaacggtggaagagtgcaatgcatgcaggtgtggccaccagttggcaagaagaagtttgagactctttcctacctgccagaccttgatgatgcacaattggcaaaggaagtagaataccttcttaggaagggatggattccttgcttggaattcgagttggagcacggtttcgtgtaccgtgagcacaacaggtcacc

SEQ ID NO: 268895 - DNA, 447 bp, Glycine max
gttttaatgaaggatgccattcaccctacccttatgcagactctggaaggaactgctgttcttgttcatgcacgtccatttgcaaatattgctcatgggaattcttctattgtggctgataagattgcactaaagttagttggaccaggtggatttgtagttactgaagctggttttggtgctgatattggagctgaaaagtttatgaacattaagtgtcgttatagtggtttgacacctcaatgtgcgattattgtggcaactataagagcactaaaaatgcatggtggagggcctgcagttgttgctggaaaacctcttgaccatgcatatttgactgaaaatgttgccctggttgaggctggttgtgtgaatatggcacgacatatatcaaatacaaagtcttacggtgtaaatgttgtagttgctatcaacaagttttcaact

SEQ ID NO: 268896 - DNA, 392 bp, Glycine max
attttcgtggcattcgtcactctcgtgtcgggtgaaggcgaaaaccaaatcaagatgctgagagtgggcgcaaagaggcttttgggaacgacatctttgggcgttagggttccggcgaggctgtaccacgagagggttgtggatcactacgacaactccctgaacgttggatcgttagacaagaacgacccgagcgtggggacgggtttggtgggggcgccggcgtgcggcgacctgatgaatctacagattaaggtcgacgactaaaccggaaaaatcgtcgatgctcgattcaagactttcggttgtggctcctgcattgcttctttctacgtggatactgactgggggaagggaaagcaaatggaggaagttctgactataaaaaatac

SEQ ID NO: 268897 - DNA, 450 bp, Glycine max
cccacgcgtccgagtctttcttggaactttgttactctcacacatgtctcgctccgtgcctttggtttcaaccatttgtgtcttgcttctgcttctggtggccactgagatgatggggccaacaatggtggcagaagcaagaacttgtgagtctcagagccaccgtttcaaggggccatgtttgagtgacaccaactgtggctctgtttgccgaaccgaacgtttcactggaggacactgccgtggcttccgtcgcagatgcttctgcaccaaacattgttaattttaaaaaattaattaagagtgctttgatagaagatgatagatctatcatctttctactcgtgttgttaattaaccactttgtgtttgagaataagggttacccattctactatgggtttctttgtttgcctcttactttatctagttagagatccttttatgaaa

SEQ ID NO: 268898 - DNA, 405 bp, Glycine max
aaaaaagaagagaccaagagagagagagagagatggggcgcaagaacacaattttcttggcattggttgttactttgatcacgaaggagacaatggcagaacaacatgtagttggtggaagccaaggttgggatgaatcaacagacttcaattcttgggtttcaggccaaacatttaaggttggcgatcaacttgttttcaagtactcttctttgcatagtgtggttgaactaggtagtgagagtgagtacaagaattgtgatcttggcaatgcagtgaactcaatgagcagtggcaatgatgttgtgaaactgaacaagcctggcacacgttactttgcatgtggtacaatgggccattgcgatcaaggcatgaaggtgaagatcacaacagtgtctggctctg

SEQ ID NO: 268899 - DNA, 417 bp, Glycine max
ctctaccggtgcaaatttctactatttttcaatggcttctgcagatgttgagttccgttgctttgttggtgggcttgcttgggtcaccggcaacgatgccctcgagaaagccttttcaatctacggcgacatcgttgaatcgaaggttatcaacgaccgtgagactggaaggtccagaggattcggatttgtgaccttcgcctcagagcagtcaatgaaagatgcgatcgcaggaatgaacggccaggaccttgacggccgtaacatcactgtcaacgaagctcagacccgcgccagccgtggtggtggtggaggcggtggtttcggaagtggtggtggatacaaccgcggtagcggtggatatggtggtggtggtggcggcggccggtataatcccggggtttggggggtttttcc

SEQ ID NO: 268900 - DNA, 379 bp, Glycine max
tatagcccaagccctatacaaccaaaccctaacacacacccatttgattcagtttccatggctagcctcaaggttgcatttttggctgcagtgctctgcatggttgtggtgagtgcacccatggcacatgcagctatcacgtgcgggcaggtgacgagtagcctggccaattgcatcggttacctccagaagggaggaacgccgtcgtcgggatgctgcaacggagtgaagagcctcaatgccgccgccaagaccaccgtcgaccgccagacggcgtgcaactgcctcaagtcggccgccagccaaatctccggcttcaacgccaacaacgccgtctcgctccccggcaaatgcggagtctccatcccctacaagatca

SEQ ID NO: 268901 - DNA, 385 bp, Glycine max
caattaacatattctcctctcattctcactcaaaacacaaaatcctaactaaggtgaaaatgaaggcatcacgcattgctttgttcactttggtggtgcttctttttgtggctgaagttcaagtgtcaaaggcagtgacctgcagcccagtgcagctgagtgcatgtgtgagtgcaataacctcttcaacccctccatcaaacctatgctgctccaagatcaaggaacagaaaccatgcctttgccaatatctcaagaaccccaatctcaagaagtttgctgactctcctaatgcaaggagagttgctaacacttgtggaactcccttcccaaggtgctaaggtgttactaaatttgaagtggttttaatttctctgccttgatt

SEQ ID NO: 268902 - DNA, 375 bp, Glycine max
gttggtgtgcccaccctcactctctaatctctaagactctctactcttctcttagtgctctaatctaattattattatcaacataagtcacaacaccaccattcttccattctctctctttcttctacactattcattcaatccatgccggtcaacgtgaggtgctgaaggtcaatcgtggtctttcgaaatggggaacgggagcagaagctactcggcgaaccggagcgactacaagcttctagaagaagtcggttacggcgccagcgccaccgtctaccgtgcaatctacctcccctacaacgaggaggtcgccgtcaagtgcctggatctggatcgctgcaatataaatctggacgacatacgtagggaggc

SEQ ID NO: 268903 - DNA, 419 bp, Glycine max
cattgactcatcaaattataacccattaattgggtggatgcatggagctcagatggttgcatttaatatgcagggatgtgggagatctctttggttgatgcatggaatgttcagagccaatggagggtgcggttatgttaaaaaaccaaattttctattggagactggtccagatgacgaggtcttcaatcctaaagctaagttacctgtgaagactactttgaaggtgactgtatatatgggggaaggatggtactatgatttcaagcatacacactttgatcaatattcacctgcagacttctacacaagagtggggattgctggagtccctaatgatactataatgaagagaactaatgcaatagaagataattggttacctacatggaatgaggcatttgagttccctctcactg

SEQ ID NO: 268904 - DNA, 439 bp, Glycine max
  unsure (1)..(439): unsure at all n locations
ggatatgctcggaatgggtttggtgaagaggccacaagcttctttcgattaatgaagatgaaaagaatacatgttaataagttgacagttttaagtgtcttgatggcttgtggcacaattaagtctttgctatttggaagagaagttcatgcacagataattaaaagtaatatccataccaacatatatgtaggaagcactttggtatggttctattgcaaatgtaaagaatactcctatgctttcaaggtgctccaatatatgcctttcagggatgttgtttcatggactgccattatctctggttgtgccaggctcgggcttgaacatgangctctggagtttttgcaggaaatgatggaagaaggcgtgttgcctaattcctatacttactcgtcagccttgaaagcttgtgcagaactggaagctccaattcaag

SEQ ID NO: 268905 - DNA, 448 bp, Glycine max
  unsure (1)..(448): unsure at all n locations
cccacgcgtccgcccacgcgtccggtaggttaatgactttgtgtgcatatcagacaatgcttatgttagtgaacaagtgttgatgatggagaaaacaatccttaggaagcttgaatggtacttaacagttccaacaccctatcacttcttggttaggtataccaaagcctccactccgtctgacaaagagatggagaacatggtgtttttccttgctgaacttggattgatgcattatcctactgtaatcttgtaccgtccttctctgattgctgcttctgctgcgtttgcggctcgatgtacccttggaaggagccctttctggacaaacactttgatgcactacacaggctactctgaggagcaactaagggattgcgtccaaanaatttccaaatttggggggccccccccccaaaaaaaaacccctcccccctttttttttttt

SEQ ID NO: 268906 - DNA, 386 bp, Glycine max
  unsure (1)..(386): unsure at all n locations
tcggtccactntgttntaaaagaacttgtgcggaagtcaatttcagaaactgaggaactaaaaagatttcccacactttcaaatgatatagcaactgctgcaaatgaagctctggaaaaattccgagaagaaagcaggaagacagttttacggttggtcgatatggagtctagctatttaacagtggaatttttcaggaagattcattttgaaccagaaaagaatccaaatggaccaccaaatccaaatcggaatggtccccccaatatggatagttatactgacaatcacctgcgcaaaattggatcaaatgttaattcctatatcggtatggcttgcgatacacttaagaatactataccaaaggccgtggttcattgtcaaag

SEQ ID NO: 268907 - DNA, 452 bp, Glycine max
  unsure (1)..(452): unsure at all n locations
tcggaccaagccttccgccaacccgtccgatcagttttgcctatggagccttgaggaaatttttgcctgaaaagaaggttgaggccgtgaaaggcctttcaatcactgctgatggaaatggcgttgtttttgatgtagcagctaaagatttagacttatatcttaacggtcaggaaaatgcctcgaatgtaagtttagagatagtgaaaaaattgccacagttgcaacagatggagcaccaccaaagaggtggcagatttggtgatggtggtggtcgtggttaccgcgttggtggaagaggtggaggaggcaggaatggtaggttctccaatggtggcggaagacgttnaccgtggcggcaactggggtggaaagagatggtgaagctgacaaagggacttttaaagggggggaagggtttttttttggggtcaaaagggtctttttttttt

SEQ ID NO: 268908 - DNA, 365 bp, Glycine max
tccacgcgttcgatctgaatgcatgtctgctattgctggttcttacggatacatagctccagagtatgcctacactttgaaagttgatgagaaaagcgacgtgtacagctttggagtggttcttttggagcttgtaacaggcaggaaaccggttggcgagtttggcgatggtgtggacattgtacaatgggtgagaaaaatgacagactcaaacaaggaaggagttctaaaagttcttgatcctagtacttcctcggttccacttcatgaggtgatgcatgttttctatgtagccatgctgtgtgttgaggaacaggcggtggagaggccaactatgcgcgaagttgttcaaattctgaccgagc

SEQ ID NO: 268909 - DNA, 385 bp, Glycine max
cttttaatttcctagatctcccaaacaaattgtagcataagtcccatggccaaagagactagtgttgtttatctatatcccagcaaatcacaagtttggggtgagaattttgatcataaaaaacttgtaataacaacactagctgctaatggaaagaaggaggagagtaatggagcacctaatgacacatatcctgcgtttcccgggtggtatgctgatgtttcctggccaggagaagcacacacatataaaatagaaaagattctattccacgggaaatcagaattccaagagcttcttgtatttgagtcttctagacaaggcaaggttgcaattcttgatgggcatatccagctgacagaaaacgatgaatttgctttaaccc

SEQ ID NO: 268910 - DNA, 385 bp, Glycine max
ctcacgcgtacgtactgccactaagaaggatgccgctggatccttgctagagctgctacgtgcagcccttatactcatgcgctgaagggctagctacttactacataccagttaagaagccaccagtgtacaaggctacagtgtacaagccatcagtgtacagaaccaccaggattatgagccagaaccaccggcttacaagcctgaaccacggtgttactagccaccatatttgaagactccatactggataccaccgtatggaacgtaccctgcattttaggacagcaaccattcctaaagcatgcaatgacgtctattatctactcaattgataagaagaactgctttgagttttatagcatcgtgatttacaacttcttat

SEQ ID NO: 268911 - DNA, 419 bp, Glycine max
  unsure (1)..(419): unsure at all n locations
gataactagaaacagtgtgatgaaaatgaaggtccttgttttcttcgttgctacaattttggtagcatggcaatgccatgcgtacgatatgttccctctccgaatgaacactggctatggtgcccgtactccggaggtgaaatgcgcaagttggaggcttgctgtggaagcacacaacatctttggctttgagaccattcctgaagagtgcgttgaagcaacaaaggaatacatccatggcgaacaatatagatcagactccaaaacagttaaccaacaagcttacttttatgccagagacctcgaagtccatcccaaggacacatttgtgttcagtatagatggcaccgtactctctaatattccatactacaaaaaacattgggantaaatttggggggggggnttttggggggggg

SEQ ID NO: 268912 - DNA, 376 bp, Glycine max
cccacgcgtccgcccacgcgtccgtccacgcgtccgcccacgcgtccgcgctctcgctctcgcgtcgctgctctattccgttcttcacgtgacatcacggcctcaagaaacgtcgtcgtattagagaaaggcgcgtaacgcatgaagagacaaatgttgcatgatctgattgagaatgcaggaggctgcgctgtcaccgatggaggattcgccacgcagctcgaaaagcatggagcctccatcaacgatcctctttggagcgccatctatttgatcaaagacccacatcttatcaaacaggttcacttggaatacttggaggctggtgctgatatatcggttacttcatcataccaggctacacttcctggatttt

SEQ ID NO: 268913 - DNA, 417 bp, Glycine max
tcgtcttaatccaaatatcatcatctgaaacgatggctgccatggcaaccacaaccctgtcttcaaacccgaaactctcatttttccacggaaagcccgttacatattcttcccgcgtcgcacccaccaccaagttattctcatccaaacaaggcacaatctccatgtccctaacccaacccccatacgacctccaatccttcaaattccaacccatcaaagaatccatcgtctcacgcgaaatgacgcgccgctacatgaccgacatgataacctacgccgacaccgacgtcgtaatcgtcggagccggctcggcggggctctcctgtgcgtacgagatcagcaagaaccccgtcgtgagcgtcgccataatcgagcaagtcccggttggaaaagggcccccccccccctgggggg

SEQ ID NO: 268914 - DNA, 393 bp, Glycine max
gagatttggttcaaaataatgctcacctgcaaaagctcatccacttcaaaaaaaaggccaattctcctttcctttcatttgcacgtatacacattacaacaagtttttttttttttgaggcccatctaactttgtctctattccaccacgtatttatcagcccttgctatttttcacttcacttccgttctgtttctatccctcactaggagctcttctccattggttcttcatctgcatgcacacacttgcatagttttggaaaccaagaatttttgaagggtagcatcaacaagaagttctggaaatggagatcaccaatgtcagcgagtatgaagctattgcaaagcagaagttgccaaagatggtgtttgactactacgcatctggtgc

SEQ ID NO: 268915 - DNA, 291 bp, Glycine max
attctacttaccttttctcttaatccaaatatcatcatctgaaacgatggctggcatggcaaccacaaccctctcttcaaacccgaaactctcatttttccacggaaagcccgttacatattcttcccgcgtcgcacccaccaccaagttattctcattcaaacaaggcacaatctccatgtccctaacccaacccccatacgacctccaatccttcaaattccaacccatcaaagaatccatcgtcttacgcgaaatgacgcgccgctacatgaccgacattgataccta

SEQ ID NO: 268916 - DNA, 451 bp, Glycine max
gtctgagatagaagcatagaataaattttacacttagaacatagaagcaaagtgtttggtgtgagaagagagataatggcgcagagagctcaaccagcgttggccaccacggatgtttttcagaagggagatattcattggaagcaattcaatgttgaaacatccactgcttcttcctcacctccaaaaccattgcttatttttacaccaaccgtgcctggcttataccctgtaatattgttttgccatggcttttgtattcgcactagctactactctaagctcctagcccacatagtttcacatggattcatacttgttgctcctcagctgttttccattggggtgcctatgtttggaccagaagaagttaagtgtgaaagaagagttgtggattggctagataacgggcttcaaccattgctttccgagagcgttgaagccaaattgg

SEQ ID NO: 268917 - DNA, 439 bp, Glycine max
aagaagagcatcactgaactaacaaagcaaccctatgtcgaaggtggtttgtgtcaccggagccagcggcgccatcggatcatgggtggtcctcctcctcctccagcgtggttacaccgtccatgccaccgtccaagatatcaaggatgaaaatgagacgaaacatttggaggaaatggaaggagcaaagagtcatctccatttttttgaaatggatcttcttgacatcgactccattgccgctgccataaagggttgttccggcgtaatccaccttgcatgtcctaacatcattggtcaagtcgaagatcccgagaaacagatattggaaccggcgataaaaggaacggttaatgtgttgaaggcggcgaaggaagtcaggggtgtggaaggcccggtccggtttttggggggggtttttgggggggggggccccccc

SEQ ID NO: 268918 - DNA, 440 bp, Glycine max
agcgtcctagtcgcaaccctaataagaagaaccacagcttcaagcgagtgacatccaccagccatgggtcgtatgcacagccgcggtaagggtatatcctcttctgctttgccctacaaaaggacaccccctagctggctcaagatctcttcgcaagatgtggaagaaaatatctgcaagtttgcgaagaagggtttgaccccgtctcagattggtgtcattcttcgagattctcacggtattgctcaggtcaacagcgtcactggcagcaaaatccttcgcatcctcaaagctcacgggcttgcgcctgaaattccagaggatctttaccatttgattaagaaggcagtttcaattaggaagcatcttgagaggaacatggaagggaccataagggggggaacctttttttccccccaaaaaaaagggggttttttttt

SEQ ID NO: 268919 - DNA, 440 bp, Glycine max
tcgtccacgcgttcgattctcttcttctcactcaaactttccctctctgcgccgttcctctcaaatggatgcaccaatggagttttggggtgttgaggttaaggttgggcagactgtgacggttgacccaatggatcctgtggattcatacatacacatttctcaggttgcgctcggagaggcgaaaaaggacaaacctaatgaacctgtggttctgtacttgaaagttggtgaacagaagattgttttgggaaccctttctagggatggcatccctcacctatcattggatttggttctggactccgattctgagctttcccacacttcataaagtgccagtgtctttttctgtggatacaaagttctaactggcaattgaacaaaaatttggccctttttttcccttttttggggaaaaccacttttttttttttttt

SEQ ID NO: 268920 - DNA, 94 bp, Glycine max
tcgcggtctcgtgggaaaaaaaaaaatataaaaaataaaaaaaaaaaaaaaaaaaaaaaggaaaaggaaaaataaaaaaaaggacaaaggaaat

SEQ ID NO: 268921 - DNA, 369 bp, Glycine max
gcaaaagatgtgactgaattaattggcaaaactccattggtatatctcaaccacatcgtggatggttgtgttgccaaagttgctgccaagcttgaaatgatggaaccttgctccagtgtcaaagacaggataggatatagcatgattgtagacgctgaggagaaaggactcatcacaccgggtgaaagtgtcctcattgaacctaccagtggaaacactggcataggtttggcattcatggcagctgctaagggttataaacttattataaccatgccttcttcgatgagtcttgaaagaagaaccattcttcgtgcttttggagctgagttagttctcactgatcccgccaagggtatgaaaggagct

SEQ ID NO: 268922 - DNA, 450 bp, Glycine max
tcaaaagaggagaaaaaaagaagaaaagaatggtaacaatagctggtggtgtgagtctttcaagccctagcagggtatttgctaatgctaagggaatagactcagcacaaaaggcccaggccgtgaggtttccagctctgtcgaggcccattcaaaagtggcctggtttggtgaagacccggcccgttcgggcgacgccggagaagatatcggagaaggtagaggagagcataaagagcgcggaggaggcgtgctcgggaggcggcggtgacgcggaatgcgcggcggcctgggacgaggtggaggagctgagcgcggcggcgaaccacgccagggagaagcaaaagcaggctgacccgctcgaaaattactgcaaggacaatccagagactgatgagtgccgcacctatgataattgatgactgaactcagtcattccaaagttacatg

SEQ ID NO: 268923 - DNA, 444 bp, Glycine max
gtctcattctactacaagtcagatgaggaacttcaaaaagaccccgagctccaagcggggtggaaagaacttgtgggggggggtcatggggatttgaaggataagccatggtggcaaaatgcaaactcgtgaagagttggttgaagcttccgctaccctcatatggattgcttcagctcttcatgctgctggtaactttggacagtatccatatggaggtttaatcctgaataggccaactattaccaggagattcatgcctgagaaagggtctcctgaatatgatgcgttagctaagaaccctgagaaggagtttttgaagactattactggcaagaaagagaccctcattgaccttacaattatagaaattgttataaggcacgcatcttgatgagttctaccttgggcagagaaatggtggtgactacttgacttctgatg

SEQ ID NO: 268924 - DNA, 380 bp, Glycine max
accacgcgttcgggaaatggcttcctcaatgatctcctacccagctgttaccaggggcaaccgtgccggtgccggcggggttgctccattcaccggcctcaaatccatggctggcttccccacgaggaagaccaacaatgacattacctccattgctagcaacggcggaagaggacaatgcatgcaggtgtggccaccaattggcaagaagaagtgcgagactctttcctacttgccagacctcgatgatgcccaattggcaaaggaagtcgaataccttctaaggaaaggatggattccttgcttggaatacgagttggagcacggcttcgtgtaccgagagcacaacaagacacctggatactatgaaggacgctact

SEQ ID NO: 268925 - DNA, 398 bp, Glycine max
cccacgcgtccgggctcgactacttgggcaacccaagcctgatccacgcccagagcatcctggccatctgggccacacaagtgatcctaatgggtgccgttgaaggttaccgtattgctggtggccccctcggtgaggtcactgacccaatctacccaggtggcagcttcgacccattgggccttgctgatgacccagaggcttttgctgagcttaaggtgaaggaactcaagaacggacgattggccatgttctctatgtttggcttctttgttcaggccattgtcaccggaaagggtccattggagaacctcgccgatcaccttgctgaccctgtcaacaacaacgcctgggcctatgccaccaacttcgtccccggaaaagtgtaaggccccggt

SEQ ID NO: 268926 - DNA, 427 bp, Glycine max
ctcctctttaaccgttggagctagaggtccaattctgcttgaggattatcatcttgtggagaagcttgcaaactttgacagggaacgtatcccagaacgtgttgtccatgccaggggagctagtgcaaagggtttctttgaggtcacacatgacatttctcacctgacatgtgcagatttccttcgagcccctggagttcagacgcctgtaattgttcgtttctcaactgtcattcatgagcgtggtagccctgaaaccttgagggaccctcgaggttttgccgtgaagttttacaccagagagggtaactttgaccttgttggaaacaacctttccgtcttctttgtacgtgacggcatgaaatttccagatatggttcatgctacttaataaacccccccccaaaatattttccccccccccccc

SEQ ID NO: 268927 - DNA, 393 bp, Glycine max
ctagtgcatagcatattccagtgtttgtcatttcatcgtgcattcaatggccaccacagcagctctatccggaaccatggtgagcaccttcttcatgaggaggcaacctatgaccaccacaagcctaaagacattccccaacgttggtgaagctctttttggtctgaaaagtggacgaggtggtcgtgtcacttgcatggcctcgtacaaggtgaagctcataaccccagaaggagaagtggagtttgaatgcccagatgatgttttcattgttgacaaggcacaggacgaatgcattgaacttccctactcgtgcaaggccggttcttgccgcttccgtgttggcaaaactgtggaaagtaacgtggaccagtcagatgggtaggccttttt

SEQ ID NO: 268928 - DNA, 342 bp, Glycine max
gtaaagaagaagaaaagtatcgtgcgtttagcttaggaagatgaggctgcatactcttgtgtgaccaaaaagatgagtgaagacgtggagatgaaagatcaggcaacgccttcacactcgctttcttcagttcctccatctgcattgcagcatttgaaggaaatagcatcaattattgaaaccggttcgtactcaaaggaagttcgtcgaattgctcgtgccctgcgccttacatttgcattgaggcgtaaattgacagcaccagttctctcatctttcctcgattatgttcttccttccgcttctgaaccctacactaagttatcctcttttcttcctaat

SEQ ID NO: 268929 - DNA, 247 bp, Glycine max
ttctcctaaaacatctccagtgggttcttcttcttctattacaacaacgtcgtccaagaccatgaccatggccatgggcacgagcctgctcctgttcacggtcttcgcggcttcatcggccctagacatgtcgataatctcgtacgacaactcccacgccgccacgtcgcgcagcgacgaggagctgatgtccatgtacgagcagtggctggtgaagcacggcaaggtgtacaacgcgctcggggag

SEQ ID NO: 268930 - DNA, 379 bp, Glycine max
  unsure (1)..(379): unsure at all n locations
cggacgcgtgggcggacgcgtgggcggacgcgtgggcggacgcgtggggttaatgtgtctggattatcattagtggctgccaaattggttgacttccggagacagagtggagataccacatccatattttgtatgactagactcatgcttaattcttataacaatagtattctcttttccgaaaaaaaaaaaaaaaaaaaaaaaaaaaaaaaaaaaaaaaaaaaaaaaaaaaaaaaaaaaaaaaaaaaaaaaaaaaaaaataaaaaaaaaaaaataacaaaaaaaaaaaaaaaataaaaaaanggggggggccgttttaaaggatcaaattttactcccccgggtttgcaaagaaaaaatttttttttaggggcaccaa

SEQ ID NO: 268931 - DNA, 406 bp, Glycine max
ctcaaggaaagtgaagaaaaaaatgtttatttttgttttttcacgagagagagagagggagagagagaaataattcaattcaggtgctatgttttctcatgcatattttgtagtatggtctatagaaagtatctacctttcatagtttcatagagttgtggcaagtgagaatgaaaaactaccattgttaaattatggtcttaaattcacttctttgggtactttttggaattcttgaaaaggtgtcaagaaatattgatctggtttatggaggaggaagcattggtttgatggggttggtttcccacgctgtttatgaaggaggtcgccatgtaattggagttattcccaagacactgatgccaaaagagattactggagagacagtgggggaagtgatggcagt

SEQ ID NO: 268932 - DNA, 302 bp, Glycine max
aaaaaaaaaaaaaaaaaaaaaaaaaaaaaaaattttatttaaaaaaaaaaaaaaaaaaaaaaaagggagggggaaaaaaaaaaaaggggggggcggtaaatataaaaagggccggcctttttaaaggtgccactctatcgcacgcgtccttgcaacagaaaactttttttttagggtcccctaatttcatttaactgcccgccttttaaaaccgccgggactggaaaaaccctggcctttccaaacttaatccccttgcaacaaatcccctttttgcaaattgccctattttcaaaaaggcc

SEQ ID NO: 268933 - DNA, 453 bp, Glycine max
  unsure (1)..(453): unsure at all n locations
agctgatcaacctgtcaaggattactatatggttgtctctacaagatttaccagacggatactcacaacaacttccgttcttcattatagctattcaaaaacaggggtatctggtcctgttcctccagggcctacccttgatattgcatcgtctgtctatcaggctagaactatccggtggaacctgacagcaagtggaccaagaccaaaccctcagggatcataccactatggattgatcaaaccgagtcgaaccatcatgcttgcaaattctgctccttatatcaatggcaagcagaggtatgcggtcaacggtgtctcatacaatgaaccagataccccattgaaacttgccgactacttcaacatccctggagttttctacgttggaaagcattcctacctatcctaacgggggcaacaatgcctacctncaaacttctgtcatggggg

SEQ ID NO: 268934 - DNA, 432 bp, Glycine max
cccacgcgtccgctaaacgctcggcgcaccttagcatataggctggcaggagctctgtcttcgtcatccgcaagcgcgtctcgctgtcgcttcgcattggcgttgcaccacgccaaacaaaccgtacccattcctcacccggcgagttttgcggttcggactcaatcttcgggttcgggttactcgcccctgaacgacccctccccgaactggagcaaccgtcccccgaaggagaccattcttctcgatggctgcgactacgagcactggctcatcgtcatggagttccccgataaccctaaaccctccgaggaccacatggttaactcctatgtcaaaaccctagctcaagtcctcggaagtgaggaggaggctaaaaagaagatatactctgtttccacttctacgtacacaggtttcggcgccctcatt

SEQ ID NO: 268935 - DNA, 448 bp, Glycine max
tcttattattcctcttccatctctattcttcataacacccaccacaccacttgtgaagaaccggattaatatcacacactgacgtgtatctctgagctccaatccaatacaagaccacaccttgtcgtgttggacgaaccttggtgtctgttttttttttttttttttcattattttctccgaagagatgatgaagggcagaggtggaggcgccttggcggcggcggtggatgtgaacggattcattttaaaaggacccttggtaccggggcgtgaggaaaaaaccgtgggggagattcgccgtggacatcagagacccgttgaagaaagccagggtttggttgggaaccttcaattctgccgaggatgctggtcgtgcctacgacgccggcggtcggactttccgaggtccaaggccaaaacaaattttccccctctctaccttttt

SEQ ID NO: 268936 - DNA, 451 bp, Glycine max
gtgattgttgtgactcgttcttcttcgtcgttatcttcttcttttgttgtttgtgtgtttgttttttctctcacctgaaaatgtcttgctgcggtggtaactgtggttgcggaagcgcctgcaagtgcggcaacggctgcggaggctgcaagatgtacccagacttgagctacaccgagtcaaccaccaccgagaccttggtcatgggagtggcaccagttaaggctcaattcgagagtgctgaaatgggtgttcccgctgagaacgatggctgcaaatgtggagctaactgcacctgcaacccctgcacttgcaagtgaggtgttggagagctaaagcttcaagcagagatggcccttagaaataatgataaaaactatatgtagtttcaaaacttcaaaattatgtagtatgtattatgttgcactctgggtgtttgtgtctaaacaaa

SEQ ID NO: 268937 - DNA, 401 bp, Glycine max
  unsure (1)..(401): unsure at all n locations
cccacgcgttcgnccacgcgttcgnccacgcgttcggaacttcttaaagatgttgataccccggcaggattggcatcaaccaagcgactggcatttaaggacagcttacaacagagaattctcaaagctgagaagattgatgtctcatttgaaactttcccatattatctaagtgatacaacaaagaacgctttgattgcttctacatttattcatttgaagggcaaaggctttggaaaatatgcttcagacctcccatcagtgtctccacgaatagtgttatctggtcctgcagggtcggaaatatattacgagactttgtccaaagcacttgtgaagcattttggtgccaggctactaattgtggattctctttcactgcctggtggatcaccatcaaa

SEQ ID NO: 268938 - DNA, 445 bp, Glycine max
gacaaatcaagcttgaaggctatagagaaaaccatagttagctctgatcttggtatgactccgaatgatgatggagaatcgatacaattgagaatcccacagttgacatctgataggaggaaggaactatcgaagatagtggctaaacaagctgaagaagggaaggtggctttgaggaatataaggagagatgcattaaaagcttatgataaacttgagaaggagaaaaagctcttcggaagataatgtgaaggatttgtcaagtgatttgcagaagctgacagatgagtatatgaagaaagttgacaccatcttcaaacagaaagaaaaggagttgctgacagtttgatattttgatacaaaaagtaaatgcagagttctatctaaagagggtcaaattttgtgtctactttgctctaggtttggataattaatgcgcatatgt

SEQ ID NO: 268939 - DNA, 434 bp, Glycine max
  unsure (1)..(434): unsure at all n locations
cccacgcgtncggcagcaccccagaaagaagaactccactgcttttgagctgaaggctcctcggccacgtctcacactcagtgtgaggtcctataaagtggtgattgagcacgatggagagtccactgaggtggaagttgaacctgacgagaccattctgtcaaaggcattggactctggcttgtctgtgcctcatgattgcaagcttggagtctgcatgacatgccctgctcgtctcattagtggatctgttgatcagagtgatggaatgctcantgatgatgtggtggagcgtggctatgcactcttgtgtgcagcctaccctcaatccgattgtcatattaagattatccccgaggaggagcttttgtcattgcagttagccacagccaatgactgactactagtctgtttttgagttttgaatctagtct

SEQ ID NO: 268940 - DNA, 452 bp, Glycine max
cccacgcgtccgcctcaatgcttactctagctgttgagaatccagaagctgcaaatcagaccattttcaactgcgtaagtgaccgtgcagtgactctagacggaatagccaaactatgtgctcaagctgcagggcgccccgttaacattttgcattatgatccaaaagctgttggagttgatgcaaagaaggctttccctttccgcacctatcacttctatgcagaacctagagcagccaaagctaaattgggatggcaatcaaccacaaacctccctgaagacctaaaagaacggtttgaggagtacgtaaagattgggagagataagaagtccatccagttcgagctagatgataagatattggaggcgttgaaagttccggtgactgtgtgatccatttatatccaaaatgtgtaaaaacaattcagacaagactgtaagatttttttg

SEQ ID NO: 268941 - DNA, 186 bp, Glycine max
cccacgcgtccgattataataaacatctaaatacatcattcaattaaataaatatgagagtgaattgaaaaaaaaaaaggggaaaaaaaaaaaaaaaaaaaaaaaaaaaaaaaaaaaaaaaaaaaaaaaaaaaaaaaaaaaaaaaaaaaaaaaaaaaaaaaaaaaaaaaaaaaggggcgccccttt

SEQ ID NO: 268942 - DNA, 390 bp, Glycine max
gtgagttgaaatccatggtgcagctatgtcctcgctgctacattataatgattgccatgtcaaaactcataaggagcttagcttacatttgaattttagtctttgtcagttctggcatgctaagttctttcatgttggtatggtgcatagcaaaactattcaaattgggcaataagatttccatatgtggccgatgaatttctttctgtcagtaattatgaatttgttctccccccaccatcttgtcagaacttattgtctgtgcgttgccaaatttttttggctttgcagttggaatgcaacatatgaaagtttacttgggagcaacaagccattccatcagcctatccctcttgctgaaatggtagattttcttgtggacatatggga

SEQ ID NO: 268943 - DNA, 447 bp, Glycine max
atttaaagctggttatgattcagagattcgccttggctgggcatctctttgggttggagatgaaggtgggaaagccaaaacagctccgatgcagatgaaagttcaattcatgctacaagtgccacaggacgacataaaatcttctgctttgatgtttcggattaagaaaagatgggacttttaaggctctactggtgactttacctgttttttatatataaaaaatgggtatttgactttgggcagttccattgtgttttagttggttgcatccacagtccactctttgcaaaagggggtattgactatttgacaggttgatatttctccaagtcagctaattgcttcgtggtgtgacaagtaagaacaattttcaatcgtacaaaaatttgtaaggatgatttttctgatttgtaagttggcaggattatggttatcgaatgcaga

SEQ ID NO: 268944 - DNA, 386 bp, Glycine max
  unsure (1)..(386): unsure at all n locations
actcattctccatacctcaacgaagaggttaaagagacggcaacactttgctgtccgccttgaccgagcagagcttcgtcttggccctggattttgccctaaagtactctcagtcacaacagacaccgtcgtcgtcgtcgtcgtcatcaatggcaccgaagcagaccaaggctgagaagaagatcgcttacgatgcgaagctgtgcgacctaatggaggagtacggccagatcctcgttgtgaactccgataacgtgggatcgaaccagctccagaacattcgcaagggtctccgtggcgactccgtcgtcctcatggggaagaacaccatgatgaagcgctcagtcaggatgcacgctgagaaaaccgganacaacgcctatctc

SEQ ID NO: 268945 - DNA, 428 bp, Glycine max
attgaatatggacaatgggttgaagagcaacaaaggcggaacgaagaacttagacatgcatttcaagcgcaagcatctgatgtacagctgaatgtagtggttcagagtgtcttaaaccattactcaaatcttttcagaatgaaagcagatgctgcaaaggctgatgtcctctatttactctctggtgtgtggaaagcatcagtggagcgcattttcctttggattggaggctcccgtccatcacagcttctaaacatcatcgtgccacaacttgagcctttgactgatcaacaaattgttagtattagcaacctccgtctatcgtctcaacaagctgaagatgctctttcactaggattggaaaaacttcagcagagtttggtccacgacatggcagttgattcactgggtgtaggaaacttcggact

SEQ ID NO: 268946 - DNA, 324 bp, Glycine max
atgcttctgatgggctaaagagatggggatgccatcaaaggcggggtgcaagaatattgctcattctactacaagtcagatgaggaactccaaaagacctgcctgcagcttggtggaaagaacttgtagaggtgggtcatggtgatatgaaagataaaccatggtggcaaagatgcaaactcttgaagagatggttgaagcttccgctatcctcatatggattgcttcagccctttatgctgctgttaactttggacagcatccatatggaggcttaatcctaaacaggccaactattagcaggagattcatgcctgaaaaggg

SEQ ID NO: 268947 - DNA, 450 bp, Glycine max
aacggaggcagcttttaaatgaatcaaatgagtttgtgggagataaagttgcctatgcacttgaacaaggtctaaaaggtattgcatgcattggggagactctcgaacagcgtgaagctggtacaacaacggctgttgtttctgagcaaacaaaagcaattgcagctaaaatatcaaattgggacaatgtcgttttggcctacgagccagtttgggccattggaacaggaaaggttgctactcctgctcaggctcaagaggtccatgctgatttgaggaaatgggttcatgacaatgtgagtgctgaagttgctgcatctgtaagaattatctatggaggttctgtaaatggaggaaactgcaaagaattggccgcacagcccgatgttgatggatttttggttggtggtgcctccctgaagccggagttcgtggacatcataaatgctg

SEQ ID NO: 268948 - DNA, 380 bp, Glycine max
cccacgcgtccggaatttgcgggttttggatttggacttggtcgtcaacacagtctaattaagatctttttgctccttcgcttatgaatcttcttcttcttcttcttcttgttcctgcaacgcactgaattcgatcaatcaatccatcttcaattgctttgtttcgatcggaggaaaatggccgatcagttatcgaagggagaggaattcgagaaaaaggctgagaagaagctcagcggttggggcttgtttggctccaagtatgaagatgccgccgatctcttcgataaagccgccaattgcttcaagctcgccaaatcatgggacaaggctggagcgacatacctgaagttggcaatttgtcatttgaagttggaaag

SEQ ID NO: 268949 - DNA, 453 bp, Glycine max
  unsure (1)..(453): unsure at all n locations
cccacgcgtccgcccacgcgtccgctcattcttcatccatagacatggccaccgtcacttctgcagccgttgctattccctcattcactggcctcaaggcaagcgcaggcaaagtgagtgccgcagttaaagtctcagctccccaagccacaaggttgggcatcaaggcttcgctgaaagacgttggagtcgctgttgtggccactgccgcgagtgcagtgctggctagcaacgccatggccattgaagtgttgctgggtggtgatgacgggtctctggctttcgttcccaacaatttctccgtggcctctggggagaagatcgtgttcaagaacaacgcatgtttcccccacaacgttgtgttcgacgaggacgagattcctagcggcgtggatgcanggaaaatctccatgagcgatgaagaccttttcaatgcgcctggtgagacttaca

SEQ ID NO: 268950 - DNA, 452 bp, Glycine max
agaaggccacggggaagatcgtggctctgaagaagactcgtctccacgaggacgaagaaggtgtccctcccaccactctccgtgaggtttccattctgcgaatgctctctcgcgatccccatgtcgttaggttaatggatgtcaaacaaggtcagaacaaggaagggaagacagtgctctacttggtctttgagtacatggacaccgatctcaagaaattcattcgctctttccgtcaaactggacaaaccgttccaccccaaaccatcaaaagcttgatgtaccagctttgcaagggcgttgctttctgccacggtcatgggatcttgcacagggacttgaaacctcacaatctcttgatggacccaaaaaccatgatgccttaaaattgctgatcttggactcgctcgagcatttactgtgccgattaagaaatatacacatgagatact

SEQ ID NO: 268951 - DNA, 346 bp, Glycine max
cccacacgaccggtgagatctctggaaggatcgtgcgaaagatagaggggacaatggtggtgacgccgaagaatgtgccggactatgacgccgtctcctacgccataaaatgcagtgctaaaggcaccgctaccgacttcttgggcaaatgcttggacacatgatggcacgcatttggtgctgtcactgactttgttagtgatttcatttgccttcagattatcatggctactatcactgctgctcatactgaaggaaaaggtaaaagcaaagcctatttcgaaaaacattttgcgacccttcctacgatcgtagcaacgctggaagcattgcatgataactttga

SEQ ID NO: 268952 - DNA, 455 bp, Glycine max
cccacgcgtccgcccacgcgtccggtgagctacattctaactgggaaaaaccaattggttatacttatgaaaggaaaaactctaaacaagccaacaccagtgaatttggcaaaccatgcttactggaacctaggaggccacaacagtggcaacatcctaaatgaagtggtgcacatctttggttccaaaatcacacctgtggacagcaaactcattccaacaggcaaatttgcttcggtgaaaggaacagcttatgatttccttaagccacaaactgttggaagcaggatcaatcaattggctgaaaccaaaggctatgacatcaactatgttcttgatggtgagaagggccaaaagatcaagctagcagctatagtgcaggataagaaatcagggagagtgttggagttgttcacaaatgctcctggtttgcagttctacactggtaactatgt

SEQ ID NO: 268953 - DNA, 456 bp, Glycine max
tcgttccatttccccctttcctccgcccggcgagaaaatgagagaaatcctccacatccagggcggccaatgcggcaaccagatcggagccaagttctgggaagtaatctgcgacgagcacggcatcgaccacaccggaaagtacagcggcgactccgaactccaattggaacgcatcaatgtctactacaacgaggccagcggcggaaggtacgttcctcgcgccgtcctcatggatctggagcctggcacgatggactcggtcagatccgggcctttcgggcagatattccgccccgataattttgtgttcgggcagtccggcgccggcaacaactgggccaagggtcactacacggaaggtgccgagctcatcgattccgtcttggatgtcgtgaggaaggaggccgagaattgcgattgcttacaaaggtttcaagtgtgccactctttggg

SEQ ID NO: 268954 - DNA, 431 bp, Glycine max
cccacgcgttcgcccacgcgtccgatcaccaacaagtgtttctgtaaccatggcatccaccggtcgggccctacaaccccttgtgaggtatgctcaggaaaaagtgggattttcagttcctcacaggcacttcttgtgaagccagtgaagaggcagatgatggggaagagcaagggattgagaattgcatgccaagccaccagcattttcgctgatagagtccctgacatgggcaaaagacagctcatgaatcttcttcttcttggtgccattttactccccactgctggaatgcttattccctacacctacttttttgtccctccaggttcaaggtctttagctggcggtactgctgccaaagatgccgctggaaatgatgtaattgtcgagaattggctcaaggcacatggacctggtgaccgaaccct

SEQ ID NO: 268955 - DNA, 442 bp, Glycine max
gatcgagataactagaaacagtgtgatgaaaatgaaggtccttgttttcttccttgctacaggtttggtagcatggcaatgccgggcgtacgatatgttccctctccgaatgaacactggctatggtgcccgtactccggaggtgaaatgcgcaagttggaggcttgctgtggaagcacacaacatctttggctttgagaccattcctgaagagtgcgttgaagcaacaaaggaatacatccatggcgaacaatatacatcagactccaaaacagttaaccaacaagcttactttttatgccagagacctcgaagtccattccaaggacacatttgggttcagtatagatgggaccgtactctctaatattccatactacaaaaaacatggatatggggtggagaaatttaactcgaccttgtatgatgaatgggttaacaa

SEQ ID NO: 268956 - DNA, 400 bp, Glycine max
gatggcacaaacgctggcaatgcccgtggcaccttcgctagctatcatctccaattctcgcctctccaacacactctccgttcgcgttctgaacaaaccaaaggttcaagggtcaagcatcaagtgcgttcgtgttggcggtgtggagattccgaacaacaagcgaatcgagtactcgctgcagtacattcatggagttggaaggaccagagcgaaacagattctctgtgatatccaaatggataataaaatcacgaaggaactcactgaggaggagctaatcacactcagggacgaggtctccaaatacatgattgaaggcgacctgagacggttcaatgcggttaatataaagagactgaaggatattcagtgctacagaggaataaagcatattcag

SEQ ID NO: 268957 - DNA, 453 bp, Glycine max
cccacgcgtccgcccacgcgtccggggaagcagaatcagcgtgatggcgagaaactgggtgggtcgatccttggcgcttcgtcacgcaatgaagaatagggttctcacactctccttcaaccgaattcttccctcactcccatcaaaatcctctctcttagccaccaccgccgccgccactgcctcctctcctccgcctcagctccttccgacgttgtccttgttaattccgaggaagagttcaacaatatccttaccaaagtccgagatgactcgttgcacgcggtcttctatttcactgcggcttggtgtggaccttgcaggtttatttcacctatcgttggggagctcagtaagaagtaccctcatgtaacaacatataagattgacattgatcaggaagcacttcaaggcacactgggcaagttgcagatttcatctgtgccaacactt

SEQ ID NO: 268958 - DNA, 441 bp, Glycine max
gcgcccacgcgtccgcccacgcgtccggtatggtgaaaaggatcccaatgggatacgcattgacataccaatgatgctccccctaattgatatgtgcaatcatagtttcaatccgaatgctagaattgttcaagaacaagataccagtaactcaaggatgcaagtgaaggttgtggccgagacagcaatcaaagaagatgatcctctgttactttgctatggatgtttaaacaatgatcttttccttcttgattatggatttgtgatgcactcaaacccttatgattgtattgagctcaaatatgatggtgctcttttggatgctgcaagcacggcagctggagtttcttcaccaaacttctcagcacctgttccatggcaggaactgatcttatctcagctgaatctagctggagaaactgcagatctcaaggtgagctt

SEQ ID NO: 268959 - DNA, 449 bp, Glycine max
cccacgcgtccgcccacgcgtccgttcagcagctgtctcaaaaactgctgctgctcccattgaacgtgttaagcttttgatccagaaccaggatgagatgatcaaaactggtagactttctgagccctacaagggtattggtgattgctttaagagaacaatggcagatgagggtgttgtttctctatggagaggaaacactgcaaatgtcatccgttatttccctacccaggctttgaactttgcattcaaggactacttcaagaggctttttaactttaaaaaggatagggatggctactggaaatgggttgctggcaacttggcctctggtggtgctgctggtgcttcatccctttgtttgttactctcttgactatgcccgtacccgtctgccaatgatgctaaggctgcaaagaagggaggagagagacagttcaatggccttg

SEQ ID NO: 268960 - DNA, 454 bp, Glycine max
gagaagggaaaaactttaatttttttatggtaaaaaattcaattatacctgttatttcacaagaaaaaaaagaaaaaaacccaggatcggttgaatttcaaatattcaaatttaccgatagaatacgaagacttacttcacattttgaattgcaccgaaaagactatttatctcaaagaggtttacgtaaaattttgggaaaacgacaaagattgctgtcttatttgtcaaagaaagatagaatacggtataaaaaattaataaatcagtttgatattcgagagtcacaaattcgttaaattgaagagtaattctcaattattcgatttattagatcttgaattttgatgaacttttttttttaagcgattcataaaaaaataaatcgaggaaaaacctatgaatatctcaactacaagaaaggacttcatgatagtcaatatggggcctcacc

SEQ ID NO: 268961 - DNA, 360 bp, Glycine max
agaaaactaaggaaggaaggaaggattgaagattgagcgtgaaagatgccttctgcggggcgtgcatggtcaccaaggggggacgttgctattgacatgggcaatccatttcttaatctcactgttgatggatttcttaagataggagctgtcgcagccacgcgatcagctgctgaagatacttatcatattatccgaaacgggaatatttcatagcatgattttgagaaaaccgtttacaacatttgtaaagaatgtgtatattggggaactttatctggtgtttatcttggaatgtaatatggtggatagaggattcttggtaccatagattgtaagaatgccatgaattgtgggtgc

SEQ ID NO: 268962 - DNA, 404 bp, Glycine max
cccacgcgtccgcccacgcgtccgcccacgctttcgaaaaaaaaaaaaaaaaaataaaggtgaaaaatatcatataaaatggggttgtaataattaacctcctcttctttttattctttctttttctaatactaaccatcctaatttcttgccctcttcttttaaagttcccaaactttcttcccctttccttcccctttctacttctttctttttgttaccctatttctttttccatttccttcctcttccatcattttcccctttaacctcctttccttttccccccttaatcccctttcttatatattcccccttttcactctttcttcctctttttcttattaattcccccccctcttttctccttttctcactcttttttcccatttttttttttttct

SEQ ID NO: 268963 - DNA, 452 bp, Glycine max
ctgacgggcttgccttcttcttggcacccgtcgggtctcagccccaatccgacgatggatttcttggtcttttcaacagtcccttaaaggacaagtctctccaaaccgtggcgattgagttcgatactttctcgaacaaaaaatgggatcctgcaaaccgacacatcggcattgacgtgaactcgatcaagtccgtcaaaacggcatcgtgggggttgtccaatggacaagtggcggagattctcgttacctataatgccgccacgagcctcttggttgcttctctgatccacccttcaaagaaaacaagttacatcctctctgacacagtgaacttgaagagtaatcttcccgaatgggtgagcgttgggttctctgccaccaccgggttgcatgaaggctccgttgaaacccatgatgtgatttcttggtcttttgcttccaagttgtca

SEQ ID NO: 268964 - DNA, 401 bp, Glycine max
caggtgtgtgtctcatggcgtctgttattcctcgatgccttcctcccccaattccaattgcacaccgacgaaaggcgcacgtggtgaaatcgtgtcaccaaaacgagagctctgcttcggctcacacagaccactcctcaaatccaaaggaacttcgagtaacagtttccaggcgtaattgtctctcatgtttgtggtctactatagttttgattagtgattgcgccatgcctatttttttaccaaaggcatccgctgctgatggaaatggaatcatggaaaaacctgtgtgcacaaattgcttggggaagcggtgctgtgctttgtgatatgtgtggtggcacagggaaaatggaaagcttttaaccggaagcgagctaaagatgtttattaatttactt

SEQ ID NO: 268965 - DNA, 455 bp, Glycine max
  unsure (1)..(455): unsure at all n locations
cccacgcgtccgtctctctcaccaaattcttattagaacgaaaaaagaaaagaaaagaaaaaagagcgatttttccctcaccaaagaagaaccaaaacaatggcggatcaactcaccgatgaacagatctccgagttcaaggaagccttcagcttgttcgataaggacggcgatggttgcatcacaaccaaggagcttggaactgttatgcgttcattggggcaaaacccaactgaggcagaactccaggacatgatcaatgaagtggatgctgatgggaatggtaccattgacttccctgagttcctaaacctcatggctaggaagatgaaggacactgattctgaggaggagctgaaagaggcattccgggttttcgacaaggatcagaatgggttcatctctgctgctgagctccgtcatgtgatgaccaacctcggngagaaactcaccga

SEQ ID NO: 268966 - DNA, 410 bp, Glycine max
  unsure (1)..(410): unsure at all n locations
tcgcccacgcgttcgcccacgcgtncgcccacgcgttcgtgagaacaaaggagatcaagaatgggggggtggccatgttggctgtgatgggggcatggttccagcacatttacactggcactggtcctattgacaacctctttgctcaccttgcagatcctggtcatgctactatttttgctgctttcactcccaagtgagaagggttggaacaactctatgattgccagccttggagaaacattgggaaacttgtttaactaagttgtaaggcttaaatgtctttaggggggagtttttatgttggtgaaagcttgtaaaatggtacttctattgtcatgcacagattgattattcaatgtacacatacctatttaagtttagatgcatttaatgtacattcaagaagt

SEQ ID NO: 268967 - DNA, 441 bp, Glycine max
cccacgcgtccgaccacgcgtacgcccacgcgttcgatttcatcacaatcttcctcaatcatgtcttcagaaacaaaagcggagacacaaactttgaccaccccctcttactcctcagatgttgacaatggtatagtgaacgatgtcgtcctatggagaagaaagaaaataaatataagcgttcttgttgcggcaacagcggcatgggtgttgatggaaggagttgaattcaacttcctcactctcatatcatgggtggccatactcggacttgcttcaatattcctctatgccaatatgcttagacttttgggcaaggaaccaccgaacttgttggggttggaagtgagtgaaaaaacaacaacgagaatagcacacacagttcgagcatggattgaagaaggaataatgtggttgtttcttgtgggcgcacagaaagag

SEQ ID NO: 268968 - DNA, 452 bp, Glycine max
cccacgcgtccgttcgaaattcccatctttttggatgcacattaattcggcatccctcgaagaagcgcgtttgatctaaaaccataaacctctgtctcgttagatctccttcttccgttctctaaacctctcctccgatccgatctgatccaaaatggcgacgatgacgagcttgattggtctcatcaataagatccaacgagccttgcaccgttttgggagatcacggtggcgagggcttgtcgctctgggagggctcttcctctgtcgccgtcgtcggtggacagagttcagggaaatcgtcggtgctagaaagtgttgtcgggagagattttctgcctcgtggatctggtattgttacacggaggccactagtgctgcaacttcacaagacggaagaagggacacatgagtatgctgagtttcttcacataccgagaaggagattcacc

SEQ ID NO: 268969 - DNA, 444 bp, Glycine max
  unsure (1)..(444): unsure at all n locations
gtgaaccatagccatggctacttcatcaaccacattattgctatcatcactcatacctgcaggcatcccatcattcaactctggaaaccattcagtttttttgcttcaaaaccgttctttgaatcgacccaagaagagagtttccttcgttgttcaagcagccaagccccctattggtgtggaaattccaaaggtgcagcctcaatttaagcctccgtttcttgggttcactaagactgcagaagtatggaactctagagcttgcatgattggaatcattggagtttttattgtagagtttataataaacaagggcatacttcaagtgattggggttgatgttggcaaaggccttaatattcctctctgaacattatttttggctgtgctcgtaaatgttgtcatatataaagtcaatgttntaacctttttttttattgatct

SEQ ID NO: 268970 - DNA, 436 bp, Glycine max
aaaacaccatcagcatcttcactcaccacgaaggttccgttctctgtggatctatatgtctagggcacgttacgtggaaggaagctcttcaccgacttcaatcgaagaagatggattacagtgctggttcgagtctgtttccgttgcaccgttgcaaaaccattcacctggtgaggcacgcgcaggggattcacaatgtggagggtgacaaaaactacaaagcctacatgaaccccgattacttcgatgctcatctcactcccttgggatggcaacaggttgacaatttgcgtaagcatgttcgcgactctggccttatcaacaccattgatctagtcattgcatctcctttgatgaggactctacaaacaactcgtggggtatttggaggtgagggctacacagataaaacagacgtccttcctcttatggttgc

SEQ ID NO: 268971 - DNA, 394 bp, Glycine max
  unsure (1)..(394): unsure at all n locations
ctnttgttcctctcacttcggatgaacatgataatcgtctcactcaatggactaatccatccgctcgataccctccacacttgagggatataattaaagagtatgttgaagagatggaaaagctgtcctttaagttgatggagcttatagctttgagtttaggccttgaggcaaagaggtttgaggaatttttcatcaaagatcagactagctttcttagactcaactactatccttcatgcccttaccctcaccttgcccttgggtgttggtcgacataaggactctggtcccttaaccattcttgcacaagatgaagttggaggacttgaagtgagacctaaagcacatcaagactggataagagtgaaacctattccaaatgcttatatta

SEQ ID NO: 268972 - DNA, 419 bp, Glycine max
gtaggcagtgaactgaacatttcagattttgttagatgagacaggggaaagaagctactgaatcttgtgacgaatggtgtttgaatactctaaggagaataagagaagcctcccctttgagtttgaaagttactttacaatctatacgtgaaggtagatttgaaactctcgataaatgtcttatacgtgagtaccgcatgtccctacgtggaatttctaagcttgtctcctctgatttcttcgagggtgttcgagcacgaatggttgataaagattttgcaccaaagtgggacccacctagtttaaaagatatatcagaggacatgattgaatactatttctctcctttaagtgaagttcaatctgaactagtgctgccaacggctttgcgagaaccttacatgtgaaactagcatacc

SEQ ID NO: 268973 - DNA, 361 bp, Glycine max
ggaagttggaagtcatggcagcaacattgatggcagcaacaacaagttctggtactcttaaagcaactcctttccttggccaaggcaagggtgccaatgccaatgctcttagggatgttgtctccatgggaactgggaagtacaccatgggcaatgatttgtggtatggaccagacagagtgaaatacttgggacccttctcagctcagaccccttcatacttgaaaggagaattccctggggattatggatgggacactgctggcttatctgctgacccagaagcatttgccaagaacagggctcttgaggtgatccatgggcgatgggccatgcttggagcactaggatgcatcacccc

SEQ ID NO: 268974 - DNA, 445 bp, Glycine max
cactttttcagttctctctctctctctctaagatggccgacgatccaatgcccacgcgctggtctttccaggacttcaaattgtgttatgatgctaagtttggtagaaagaaagtcgcggagaacggagatgatgctgccggtaaagcggtcagcaatggaaatggaaattcagtgacagtggccattgtgtccaatggcaacaaaagggcatcggaaatggctgtttatgagcagtttcgaagcgaggggcagaatcagattcacacaaatggctttgtgccgacccttacagatgaaaggccgcagaagtctttgcttccaccctttgaatctgcggaaatgcgagctttagcagagagcttaagtagggatatcattcgtggaagtccagatgtgaagtgggaaagcatcaaggggttagagaatgccaaacgtttacttga

SEQ ID NO: 268975 - DNA, 450 bp, Glycine max
gagaaaagagagagaagggtaaggtaaccctagagtggtgaatcgaatctgcaaagatggaagctgtttctcgaagaagaggtggaggcattttcgaaagcctctacaaggtcgttatgcgtcgcaactctgtctacgttaccttcgtcatcgctggcgccttcctcggagaacgggctgtagattatggagtccacaagctctgggaggctaataatgttgggaaacgatatgaagacattcctgtgctagggcaaaggcagtcagaatagtgaccagcttgttagccattttgaagttttattattttcatgaaaatttgaagtgattaagagctggaagcagtttccatttctacaataaataccatatgcttgtctctttcaggcttaactcttatgcgtggtttcatttactggcccatggaaatattaaatattgaaccattgc

SEQ ID NO: 268976 - DNA, 443 bp, Glycine max
ctattttatactatacccacattttgataattatttttctagttgataagccatggctactggaggaaagcttgaggttgacggtgatctcaagtctaacgcagacaagtactggcaaacccttaggaactccactgaaatattccccaaggccttccccaatgattacaaaagcattgaggttcttgagggtgatggcaaatcacctggttctatccgccacataagttatggtgaaggttcaccacttgtgaagtcatcctttgagaagattgaggctgttgatgaagaaaagaaggtagtgtcgtacactatcattgatggagaactcctccagcactacaaaacattcaagggagacatttctgtgactccagttggcgatggatgcgacgtgaagtggagtgctgtgtacgaaaaggttagccatgatgtttctgatc

SEQ ID NO: 268977 - DNA, 444 bp, Glycine max
caggcaagccccactcaaccaccacacctctcctcgttcacgctacccctttctgctcttcgggtacctttcaagttttaaaagtgtaaagatggcagagacattcctatttacctcagagtcggtgaacgagggacaccctgacaagctctgcgaccaaatctccgatgctgtcctcgacgcttgcctcgagcaggacccagacagcaaagttgcctgcgaaacatgcaccaaaaccaacttggtcatggtcttcggagaaatcacgaccaaggccaacgttgactacgagaagatagtgcgtgacacctgcaggaacatcggcttcgtctcaaatgatgtgggactggatgccgacaactgcaaggtcctcgtcaacattgagcagcagagccctgatattgctcagggtgtacacggccaccttaccaaaaaacctgaaga

SEQ ID NO: 268978 - DNA, 385 bp, Glycine max
ctcattaccaacacgaaagcatagccaaaaccttttttcgaagtctctgattttcctaatggctccggcaaaggcagagaagaagccggcggagaagaagccagcggcggagaaggcaccggcggagaagaagccgaaggcggagaagaagatctcgaaggaaggagggagcgagaagaagaagaagcgcacgaagaagagcgtggagacctacaagatctacaatcttcaaggtcctcaagcaggttcaccccgacattggtatttccagcaaggccatgggcatcatgaacagcttcatcaacgacatcttcgagaagctcgcccaggaagcgtcgcgtttggctcgctacaacaagaaagccaccatcacctcgagggagat

SEQ ID NO: 268979 - DNA, 90 bp, Glycine max
acgttctttgagatgagagtgttgatgaacagtaccattctgatgtattgctttccttgaaagttaatgcatgcttcttatcttctgtct

SEQ ID NO: 268980 - DNA, 386 bp, Glycine max
tgtgtatttccctacctctcccttcaagatgcagatcttcgtcaagaccctcaccggcaagaccatgacccttgaggtggaaagctctgacaccatcgacaacgtcaaggccaacatccaggacaaggaaggaatccccccggaccagcaacgtctcattttcgccggaaagcaacttgaggacggccgtacccttgctgactacaacattcagaaggagagtactcttcacctcgtcctccgtcttcgtggtggcatgcagatcttcgttaagacactcaccggcaagaccataaccctagaagttgaaagctccgacaccatcgataacgtcaaagccaagatccaggacaaggagggtattcccccggaccagcaacgtctta

SEQ ID NO: 268981 - DNA, 413 bp, Glycine max
cccacgcgtatgcagacgcgtgggcggacgcgtgggtttcttgaaaagggcttgtatgtatgtggagggcttacgagaggaccgactggaattatctccacaaacctctattgtgcagaagaaactgtttcgagcatatcagcagaccttgaaaacggagggttgatttcgtcatcaaccttgcccaaacctggcagggacggacttctccagcttctgcatgatagaaatgtcagagtactttcattaagtgattgggaaaagatagactcttaagaaaggaggcttggaagttcaaggaacaaacctagggaaaaactagccacctgggatgaactatacaaaactacctcataatgaatcaattatttcacatgatacttcattattttagcttgataaacatcttatcg

SEQ ID NO: 268982 - DNA, 407 bp, Glycine max
gggagagtgacttacagacttgacaaagaagacaaagaaagccttagagttggactgaggaaggcattgaggattttggttgcagcagttgctatggaagtgggaacatacagaagtgatggccaaagaatcaagtgtaaggggatgaaggaggaagatttggaggagtttcttgacactgtgacaatagttgggggtccaaggtcaaggaatgaagtgtggacagtgtttaccactgcacatcagatgtcaagttgtagaatgggtgcctctgaagaagaaggtgcactcgatgagaatggtgagacttgggaagcagaacgcttgtatgtgtgtgatgggagtgttttgcctagtgcagttggtgtcaaccccatggtaaccattcagtctacatcttactgtat

SEQ ID NO: 268983 - DNA, 387 bp, Glycine max
cccacgcgtccgttattattattattattggattagcgtggtgatcagagaccctcaggtagagagccatgtcaagggagggaggcttggattggaggagaactaatggggtgtgtgattagccgagaagtgtcatcgggaatagtctccgaggtgaaggaggagaagaatttgagtgttgggtccaacaagaaagttgatgaagcgtccacaagcggagctgatgagaacgcggtagtcgctcagaatggtgagaaggataaggaagagaatggtggcggtgatgatcgcgttctgcggccgaagggtgaaagaagaagatcaaagccaaatccaaggttaagtcatccaccaaagcatttgcacggggagcaagtagcatctggc

SEQ ID NO: 268984 - DNA, 225 bp, Glycine max
cccacgcgtccggaaaagcaggtagagggaaacatatcttgaatcttggacatggcattaaaggaggtacgcctgaggagaatgttgcacatttttttgaggttgctaaatcaatcagatactaagaagctaattatgattaattaattcttttgtttaattgcacttttagtttctttactatgatcgatgtttggttttgattctctaatgcattttatcagt

SEQ ID NO: 268985 - DNA, 409 bp, Glycine max
gtggatccattattcatattgttgatcatattgatttagatgtctggagtgtacctgaagtgctgaggccgctgtatgaatcatgaaaaatcttggctcagaagttgacaattgctgccttgcaacatataagacagatagcactagaatcaagtggagaaattcagtatggtggtggacgccagcctgctgttttaagaacatttagccagagactttgcaggggctttaatgatgctgtgaatgggtttgttgatgatggctggtcactgatgggtactgatggagtggaagatgtgactatagccataaactcatctccaaacaaatttttgggctccaattacaacgcatcaatgtttccagcatttggaggtggcgtcttgtgtgccaaggcatcaatgctcct

SEQ ID NO: 268986 - DNA, 269 bp, Glycine max
acgaccacgcgtccgatcatcataaaccccctccagagaacaagaatcaaagaatggcaactatgactggtgtgagcctttcaagccgcagggttttcttcaacgcatcaccctcaccgcaaaacacgtacgccgtaaagttcgcagttccactcagccaagggatgcgacttggtagtgtcaggttgggtcgggtgatgaggatccgacccgttcgcgcagcttcagagcgcatttcggagaaggtggaggagagcataaagaacgcg

SEQ ID NO: 268987 - DNA, 409 bp, Glycine max
cccacgcgtccgtccacgcgtccgcccacgcgtccgctctctttctctctttctagttcgtgttcttcgtcgcaaatccgaagtttttcgcgatggcgtcgaagcgaattttgaaggagcttaaggatttgcagaaggatcctccaacatcttgcagtgccggtcctgttcatgaagatatgtttcattggcaagctacaattatgggtcctccagacagtccctatgctggaggtgttttcctagtgactattcatttccctccagattatccctttaagccacccaaggttgcattcaggacgaaggtgttccacccaaatataaatagcaatggaagcatttgccttgatatattgaaggagcagtggagccctgctctaaccatttccaaggtgttgctctcaat

SEQ ID NO: 268988 - DNA, 456 bp, Glycine max
aacaaatcccagggagccaccaaccatggcttccaagctctgcgactcatgcaaatcagccactgctaccttgtactgccgccccgacgcggccttcctctgcggcgcctgtgactctaaggttcatgccgccaacaagctcgcatcgcgccacccgcgcgtcgtgctctgcgaggtgtgcgagcaggcgcccgcgcatgtgacctgtaaagccgacgccgacgcgctctgccttgcctgcgatcgcgatatccactccgccaaccccctcgccagccgccacgagcgcattcccgtcacgccgttcttcgagtccgtacattcagtcaaggcctcctcgccgatcaacttccaccaccgcttcttctccgacgccgacgctgatgctgacgtcagcaccgatgaggccgaggccgcgtcatggctgctacctaatccaaagacagatctaaattc

SEQ ID NO: 268989 - DNA, 327 bp, Glycine max
gcgcgtggatcgagataactagaaacagcgcgatgaaaatgaaggacctcgctttcttccatggtacaattttggtagcatggcaatgccatgcatacgatatgttccctgtccgaatgaacactggctatggtgcccgcactccggaggagaaatgcgcaagtcggaagcttgctgaggaagcacacaacatctttggctttgagaccattcctgaagagcgcgttgatgcaacaaaggaatacatccatggcgaacaatatagatcagacttcaatacagttaaccaacaagcttacttatatgacagagaacttgaagtccatt

SEQ ID NO: 268990 - DNA, 337 bp, Glycine max
cttgcagtcgcagaggaaaaccctagctagtagtctcagttcgtttgagagagaaaaaatggcagagggtctcgttctccgcggaaccatgcgcgcccacaccgacgtcgtgacggcgattgccactcccatcgacaactccgacatgatcgtgacggcgtcgcgcgacaaatccatcattctctggcacctcaccaaggaggacaagacctacggtgtcccccgccgtcgcctcaccggacattctcacttcgtccaggacgtcgtcctctcatccgacggtcagttcgccctctccggctcctgggacggcgagctccgcctctgggacctcgcg

SEQ ID NO: 268991 - DNA, 284 bp, Glycine max
  unsure (1)..(284): unsure at all n locations
cccacgcgttcgatcgagataactagaaacagtgtgatgaaaatgaaggtccttgttttcttcgttgctacaattttggtagcatggcaatgccatgcgtacgatatgttccctctccgaatgaacactggctatggtgcccgtactccggaggtgaaatgcgcaagttggaggcttgctgtggaagcacacaacatctttggctttgagaccattcctgaagagtgtgttgcagcaacaaaggaatacatncatggngaacaatatagatcagactccaaaac

SEQ ID NO: 268992 - DNA, 432 bp, Glycine max
cagagcgagagagaatcgtaacagaaacgtcactggaagttgtctctaccaccctctcagccatggcaacaattccccctagccgatcatcatcacacgcgtttgttgccatggcaaccttcacgactctgttgttgtgcacggcggcggcgaaggagagcgtgtacgagatactccccaagtacgggctcccgagtggtctgttaccggataccgtcaccgactacaaactcgacgaggatggccaattcgtcgtcgttttgccgaagccctgctacatacagttcgattacttggtttactacgagagcaagatctccggcaagctcagctatggctccatcaccaatctcaagggcattcaggtccagcgcctcttcatctggttcaacgtcgacgagatcagggtcgatttgccaccctccgacagca

SEQ ID NO: 268993 - DNA, 427 bp, Glycine max
  unsure (1)..(427): unsure at all n locations
ggaagaagaagagaaaagagagagaagggtgaggtaaccctagagtggtgaatcgaatctgcaaagatggaagctgtttctcgaagaagaggcggaggcattttcgaaagcctctacaaggtcgttatgcgtcgcaactctgtctacgttaccttcgtcatcgctggcgccttcctcggagaacgggctgtagattatggagtccacaagctctgggaggctaataatgttgggaaacgatatgaagacattcctgtgctatggcaaaggcagtcaaaatagtgaccagcttgttagccattttgaaagtttattattttcatgaaaatttgaagtgatttaaagctggaagcaggttccatttctacaataaataccatatgctngtctctttcaggcttaactcttatgcgtgggttcatttact

SEQ ID NO: 268994 - DNA, 309 bp, Glycine max
ctttaaggatgatgagaagaaaagggaagttgtggttgagatgactggcgacccggctgagagccatgaggatctcgctgcatatcagcctgcagaatgattggacatatgctgcctttgaccattattgctgcactcctgagaactgacaaaagagcaaaaccttattcattgcatggtccccctcaacgtctggaatccgagccatgacgctctatgccactacttaagacaggtttagacgagagctagatggtgtccattatgaaattcaagatactgaccccacataaatggatcttgaagcac

SEQ ID NO: 268995 - DNA, 227 bp, Glycine max
cccacgcgttcgtggacgcgtgggcggacgcgtttgggaagtttggaacgattacctcgaggaggagttcgcgttgatccgtgaaatgcgggacaattattactacgtggcgatggataccgagtttcccggcgtggttctgcgcccggtggggaatttcaagaacattaacgactactactaccataccttgaaagacaacgtggacatgttgaagctgatccaat

SEQ ID NO: 268996 - DNA, 420 bp, Glycine max
gttcgtgcactttcactttaccaactcctaacaatttctctctgtatgcttcttcaccgcatcaatggagttggacggcgttctcctcggcatgtgcaaccctctcctcgacatctctgccgtcgtcgacgacgctttcttgcaaaaatacggtatcaagttgaacgatgcgattctcgctgaggataagcacaaacctatgtatgaagaattggctaacaatcctaatgtggagtacattgctggaggtgctactcataattcaatcagggttgctcagtggatgcttcaagcaccaggtgccacaagttacataggttgcatatgaaaggacaaatttggagaggagatgaagaataaatgtacacttgatggtgttaaggttaactattatgaaatcgacaatacacctactggaac

SEQ ID NO: 268997 - DNA, 454 bp, Glycine max
cggacgcgtgggcggacgcgtgggctcgccgaggccgccatgggaaatgccttcctcctgcagggcggagactgtgccgagagcttcaaggagttcaatgccaacaacatccgtgacaccttccgcatcatcctccagatgagcgtcgtcatgatgttcggcggccaaatgcccgtcatcaaggtggggagaatggcggggcaatttgcgaagccgaggtcggattcgtttgaggagaagaacggcgtgaagcttccgagttacagaggggacaacattaacggagactcctttgacgagaagtcgaggattccggatccgcagaggatgattagggcttattgccaagccgcggcgacgctgaatcttctcagagctttcgccaccggtggttatgctgctatgcagagggttactcagtggaatttggacttcacggatcacagggaacagg

SEQ ID NO: 268998 - DNA, 301 bp, Glycine max
aaaacaacacaaagcagcacaagaaggtgttccattttcaacactcatcagatcccagtcatcaattgcgttaacaactcgtaaggcaaccatgaggggcattctttctgtaaggacagccttggttcaacatcgtagtgagaaattgggccttggtttcaggctatttagcactcagggtgcttccactgctagtaccccacagtcgccgtcaccaccttcaccaccagagaaaacccattttggtggccttaatgatgaggacaggatatttactaacttatatgggctgcatgatccc

SEQ ID NO: 268999 - DNA, 413 bp, Glycine max
gtagaagaaaagaaatcctcacaatgcattcattcggctacagagccaatgcgttgctaacctttgccgtcaccattttggctcttatgtgcgccatggcctctgtatccgacaacttcaacacccccactccctctgcacaagtccaggtgttgaacatcaactggtttcagaaacagcccaatggcaatgacgaggtcagcatgacactgaatatatctgcagatttgcagtcccttttcacatggaacacaaaacaggtttttgtttttctagctgctgagtatgaaactcctaagaattccttgaatcagatatccctgtgggatggtatcattccctctaaagagcatgcgaacgtttggattcatacatcaaataaataccgcttcattgaccaagggagcaatttg

SEQ ID NO: 269000 - DNA, 417 bp, Glycine max
gttcttcttcttttgttgttctgtgtttgtgtttgttttttctctcacctgaaaatgtcttgctgcggtggtaactgtggttgcggaagctcctgcaagtgcggcaacggctgcggaggctgcaagatgtacccagacttgagctacactgagtcaaccaccaccgagaccttggtcatgggagtggcacctgttaaggctcaatttgagggtgctgaaatgggtgtgcccgctgagaacgatggctgcaaatgtggaccaaactgctcctgcaacccctgcacttgcaagtgaagtgttgggagagcaagcttcaagcagagatagcccttaattaggaataatgataaactattaatgtgtagctaaaaacttatgtattatgtctgtgatgggtttcgtgcactctggtgtttt

SEQ ID NO: 269001 - DNA, 382 bp, Glycine max
gccctaccattttcattctctttctactttctgccttctacacctcactcctaccttcagccaccgctcaagtcgtggttgacatggaaggtaatgatcttcaaaatggtgggaaatattatgtgttgccagtaatagagtcatcatatggtggaataagagtagccgcaactggaaaagaaagatgccctctcactgttgtacaatctgccgatccgtatgataaggggattgcaacaattatttcaaccccatatcgagttcctgttatccgcgaaggctttcctttgaacattacgttcggtaattttgcaggtatactgccttgtgtccaccttcgttctgagtggaccgtcgttaatggccaaccagaaggacccgc

SEQ ID NO: 269002 - DNA, 429 bp, Glycine max
tagaaacagtgtgatgaaaatgaaggtccttgttttcttcgctgctacaattttggtagcatggcaatgccatgcgtacgatatgttccctctccgtatgaacactggctatggtgcccgtactccggaggtgaaatgcgcaagttggaggcttgctgtggaagcacacaacatctttggctttgagaccattcctgaagagtgcgttgaagcaacaaaggaatacatccatggcgaacaatatacatcagactccaaaacagttaaccaacaagcttacttttatgccagagacctcgaagtccatcccaaggacacatttgtgttcagtatagatggcaccgaactctctaatattgcatactacacataacatggatatggcgtggagaaatttaactcgaccttgtatgatgaatgggttaacaa

SEQ ID NO: 269003 - DNA, 475 bp, Glycine max
tgcttgctcagactcaagggtgtccccatctcatgtgctagatttccaaccaggagaggcctttgtggtcagaaatgttgccaacattgtcccaccatatgaccagtcaaaatacgctggaactggggctgcagttgagtatgctgttttgcatcttaaggtgtcggagattgtggtcattggacacagtgcttgtggtggtattaaggggcttctgtctttcccatatgatggaacctactctactgattttattgaggagtgggtcaaaattggcttgcctgcaaaggcaaaggtgaagacacagcatggggatgccccttttgctgagttgtgctcacactgtgagaaggaatctgtgaatgtttcccttggaaacctgctaacttacccatttgttagagatggcttggtgaacaaaacattgtcactgaaaggaggatactatgactttgttaaaggatcttttgagctc

SEQ ID NO: 269004 - DNA, 383 bp, Glycine max
cattcctcctgcacccaggggtgttcctcagattacagtgtgctttgacattgatgccaatggtatcttgaatgtctctgccgaagataaaaccactggccagaaaaataagatcactatcaccaatgacaagggtagattgtcaaaggaagatattgagaagatggttcaagaggctgagaagtacacgtctgaggatgaagagcacaagaagaaggttgaggccaaaaacgctttggaaaactatgcatacaacatgaggaacaccgtgaaggatgacaagattggtgagaaacttgacccggctgacaagaagaagattgaggatgcaattgagcatgcaattcagtggttagacagcaaccagcttgcagaaacagatg

SEQ ID NO: 269005 - DNA, 459 bp, Glycine max
ggaaagttgtcgcgtgcagcaaagaagattacatcgtcttccattcaagaactgtcccagctcgctcagagatgcaacgccatcaacctcgccgagggcttccccgacttcccctcccctccccacctcaaaaacgccgccgtttctgccatcaattccgacttcaaccagtacaggcacgtgcaaggtgtgtgtgatctcttggccaagatggtgaagcaaatgcatggtttagacatcgaccctgttactgacgtagctatttgctgcggtcaaagcgaggcattcgcagctgcaatctttgcaacaattgatccgggtgacgaagtcatactttttgacccttcctatgaaacgtatgaaggatgtgttgccatggccgggggagtccctattcacgtgccacttgacccgcctcaatggactctggatccaagcaaattactccgatcatttact

SEQ ID NO: 269006 - DNA, 385 bp, Glycine max
cgagataactagaaacagtgtgatgaaaatgaaggtccttgttttcttcgttgctacaattttggtagcatggcaatgccatgcgtacgatatgttccctctccgaatgaacactggctatggtgcccgtactccggaggtgaaatgcgcaagttggaggcttgctgtggaagcacacaacatctttggctttgagaccattcctgaagagtgcgttgaagcaacaaaggaatacatccatggcgaacaatatagatcagactccaaaacagttaaccaacaagcttacttttatgccagagacctcgaagtccatcccaaggacacatttgtgttcagtatagatggcaccgtactctctaatattccatactacaaaaaacat

SEQ ID NO: 269007 - DNA, 468 bp, Glycine max
ggaagatcgtcgacgtacttgttgaccaaaacattgttcccggtatcaaggtcgacaagggtttggtgcccctagctggttcgaacgatgagtcatggtgccaaggtcttgatggtcttgcgtctcgctcagctgcatactaccagcaaggtgcccgtttcgccaaatggcgtactgttgtgagcatccccaacggtccctctgctctggcagtgaaggaagctgcctggggtctagctcgctatgctgcaatttcacaggagaacgggttggtcccaattgtggagccagagatcttgcttgatggtgagcatgggattgacaggacattcgaagtagcccaaaaggtgtggtcagaggtattcttctacctggctgagaacaatgtcctgttggaaggtattctcctcaagcctagcatggttactccaggagccgagtccaaggacaaggccactcctctgcaag

SEQ ID NO: 269008 - DNA, 408 bp, Glycine max
attgtttgttgttgtaactcgttcttcttcttttgttgttctgtgtttgtgtttgttttttctctcacctgaaaatgtcttgctgcggtggtaactgtggttgcggaagctcctgcaagtgcggcaacggctgcggaggctgcaagatgtacccagacttgagctacactgagtcaaccaccaccgagaccttggtcatgggagtggcacctgttaaggctcaatttgagggtgctgaaatgggtgtgcccgctgagaacgatggctgcaaatgtggaccaaactgctcctgcaacccctgcacttgcaagtgaggtgttgggagagcaagcttcaagcagagatagcccttaattaggattaatgataaactattaatgtgtagctaaaaacttatgtattatgtct

SEQ ID NO: 269009 - DNA, 369 bp, Glycine max
atgctttccacgcgtccggtatgtatctgtgaacagggtgacaatactgacagacaaattgggtcaactctaaagggtttggttatgtagagtttgttgagattgatgctgtgcagaatgctctcctgttaaatgaatcagaattacatggtcgacaactgaaggtgtctgccaagcgtacaaatgttcctggaatgaagcagtattttggaagaagacctgctggttttcgatctaggaggcctttcatgcctgctccattctttccaccatatggatatggaagggttccaaggtatataagacccactcgatacaggccatactagtgcacattctctgtttaataggtgatcacatatttaatta

SEQ ID NO: 269010 - DNA, 474 bp, Glycine max
atcaatgtatggataaaaataatttagtcaataagcaaaccataatgtacatgttttgctgggcctcgattggaaaatggacagaactgtagctggtggatggtggatcttggccaagatcatcaggaaaatcgatgaatgcagcttatgtgcaactactatactctgaggcaggacggttctaatgccttcccgagatgttggaatgttcagggctcacttgacggaaagagctggacaaacttgatagttcatgaaaatgatcggagtatatgtaaacctggccagtttgcctcttggcccataattgggcccaacgctctgcttcccttcaggtattttcgggttgtgctcacaagaaaccaccaccgatgccaccaatttcctggaaatttctgcatttgttacttggaattgtatgggtacttcctttaaaaagcctaaccatgccaataccataccttcttaaataca

SEQ ID NO: 269011 - DNA, 440 bp, Glycine max
gcaaattcacaatgcctaagcagatccacgagattaaggattttcttgtgacggcgcggaggaaggatgcgaggtcggtgaaaatcaagaggagcagggatgtcgttaagtttaaggttcgatgctccaagtacttgtacacgctttgtgtctttgaccctgagaaatccgataagttgaagcaatctcttcctcccggtttgagtgttcaagacctgtagagctgttgagtgtggcagcatgcgtttgtttctctttttgttacctgatgctctagattttggggcttggttttatatgttggtgatttttacgaggacatttttgttttaaattggtacgaaatgtgaaagtttgatattgagcacaatttgaaatgaaattgcccaaaagtggtttattttaatttataaaatataatttttttttttattataaaa

SEQ ID NO: 269012 - DNA, 184 bp, Glycine max
aaaaaaaaaaaaaaaaaaaaaaaaaaaaaaaaaaaaaaaaaaaaaaaaaaaaaaaaaaaaaaaaaaaaaaaaaaaaaaaaaaaaaaaaaaaaaaaaaaagggggcggccgccttaaaggatccaagcttaagtacgcgtgcatgcaacgtgatagctcttctataggggcaccaaaataaaatt

SEQ ID NO: 269013 - DNA, 359 bp, Glycine max
atggcaccgtactctctaatattccatactacaaaaaacatggatatggggtggagaaatttaactcgaccttgtatgatgaatgggttaacaagggcaatgcaccggcactgcccgagactcttaagaattacaacaagctggtgtctcttggcttcaagattatattcttgtcaggaagaacactggacaaacaggccgtaacagaagcaaacttaaagaaggctggctaccacacatgggaaaaattaattctcaaggatccacaagatccttccactccaaatgcagtttcatacataacagcatcgagagagaaactgataagcagggatacaacatttgtgggatcattggag

SEQ ID NO: 269014 - DNA, 153 bp, Glycine max
accacgcattcgacatactagtactcatacatgaactgagaaggctaaagagacctgtacgtcgtgctgtacgcctagaccgagccagagcttcgtcttggccctggattactcactgcagaaccaacaccagtcacaactgacaccgtcact

SEQ ID NO: 269015 - DNA, 371 bp, Glycine max
attttgctctacctgctcacttgtaggggtcgcagcttggctctcaaacaatggcgctgttccttctctacgaatccgcttcgggctacaccctgttcgaggttcacggcctcgacgaaatcggtcagaacaccgaatcggttcggaactccgtttcggacctcaacaggttcggcaaagtcgttaagcttcgctccttcaaccctttcacttccgctctcgatgctctcaaacagagcaacgccggctgtgaaggcatattaactgatgagctgaggactgttttggagactaacttgcctaaagtgaaggaaggtaagaagtccaagttcagtttatgtgggcccgatcctaacattgcgtcgcagata

SEQ ID NO: 269016 - DNA, 457 bp, Glycine max
gcgacaggtaggaaaggcagcgcatccatactctgcttcattagcgaagaaaaatggcaaccatcatcgccggcatcccaactacatcgatcactcgcgcaggtcttgtgctcaaacgacctgttggagcctcgtcctctaccgttcttggattgccagcaatggctaaggcagggaaagtgaggtgctccatggaggaaaagccttcaagcagctcaaatatagggatgggggcatccttgttagcagctgcagttgccgcaaccatgtcaagcccagccatggctttggtggatgagagactcaacactgaaggaaccgggcttccctttgggcttatcaacaacctccttggttggatcctgtttggcgtcttcggtcttatatgggctttctactttggctacgcttccacccttgaagaagatgaaaagtctggattggtcctctaaacccc

SEQ ID NO: 269017 - DNA, 382 bp, Glycine max
tactttgacccgtccgaacttatatttcctaccaatttctctcgagttaatgtctggacgttgataatgttgcaagggtttggtcaagggaggcgccaagaggcacaggaaagttcttcgcgatatcattcagggtattacgaaacctgcgattcgtaggttagcgagaagaggtggtgtgattagaatcagtggtttgatctactaggaaaccatgggggttctgaagattttcttggataacgtgattttagatgctgtgatctacactcgagcacgctatgaggaagactgtgactgccatggatgtggtttatgctctcaagatgcatgtaatgaccctttacgggttttggaggctaatgaatttaaacccttcttt

SEQ ID NO: 269018 - DNA, 418 bp, Glycine max
attaattgcaagaatggcacttcgttgcttggtgatgtccctttctgttctcttcactctgggtcttgcgagagaaagccatgccagagacgaagatttttggcatgctgtttggccaaacactcccattccaagttcattgcgagatcttctaaagcctggccctgcaagtgttgaaatcgatgatcaccctatgcaaattgaagaaacacagtacccgaaaaccttcttctataaagaagaccttcatccaggcaaaacaatgaaagtacaattcagcaagcctccctttcaacaaccatggggtgttggtacatggttaaaggaaattaaagacactactaaagaaggatatagttttgaagagctatgcatcaagaaagaagccattgagggagaagagaagtttgtgcaaaat

SEQ ID NO: 269019 - DNA, 342 bp, Glycine max
tcaaaccctaaccctagaagaaaaaaaaaaccacatccaccaccatctagggtttttctttttctcatggctagtttgtcaactaggattttcttcatcatgtcccttgtgtgcctggctctcggtccaatggcacaaggggaaatgacatgtggccaggttgtgagcaacctgaccccatgcatctcctatgtggtgtatggtggaaccaatgttcctgaacagtgctgcaatgggataagaaatctctatggcatggctcagaccaaaccagaccgccaagctgtttgcaactgcatcaagaacggtgttaggaacaagggcttcaactactctgacttc

SEQ ID NO: 269020 - DNA, 266 bp, Glycine max
cccacgcgtccgctaggattgtcagtgacttgagtcttatctgttgtggtaatccacattcgaaaagaaggtggggcgatcatctgctttcatagcttctacactcttggaagatgggggtgttccaaaagcagcatattcttctaccctctttggatgaggccatccatgttattacctggggtgtttaagataagacagaaggggggacagaagttgggtgagtatatggtcagttacctaatatattttaacaggttttaaga

SEQ ID NO: 269021 - DNA, 433 bp, Glycine max
aaatcaacgccccctaatcataaccctctttctttctcttccttttcatcattctcatatcctcaatcaccccccctcgcactcgctcttcccttcctctggtggcgacaatgtcgactcctgctaggaagaggctgatgagagacttcaagaggctgcaacaagacccgcctgcagggatcagtggtgccccccaggataacaacataatgctgtggaatgctgtcatatttggtcctgatgatactccatgggatggaggcacgttcaagttgacactccaatttactgaggactatccaaataaaccaccgactgtacgatttgtgtctcgcatgtgtcatccaaatatttatgctgatggaagtatttgtttggatatattacaaaatcaggggagtcctatttatgatgtggctgctatactcacatc

SEQ ID NO: 269022 - DNA, 398 bp, Glycine max
ccttgatcacaggaattgacaatgagaagtcatcactaatgtctcaatcgaagtttgagaagaagtttgggcaatcatctgttttcatagcttcgacactcttggaagatgggggtgttccaaaagcagcaagttctgctacactcttgaaagaggccatccatgtaattagttgtggttatgaagataagacagaatgggggaaagaggttgggtggatatatggctcagttaccgaagatattttaacaggtttcaagatgcattgtcatggttggagatctgtatactgcatgccaaaaaggcctgcttttaaaggttcagctcctataaatctctcggatcgtctgcatcaagttcttcggtgggctcttggatctgttgagatctttttcagt

SEQ ID NO: 269023 - DNA, 416 bp, Glycine max
  unsure (1)..(416): unsure at all n locations
gaggggagagattgccttcttcttttattctttaatctctcccctcttgccttcttcttttattcttttccaaccagtgaattaatcttattatcgtttctcctggtgttaaaaagtttctaaaattttctctacttgatattcacacatcaacatacctgaaagctccaagatcgctgtaatcaacagatccagagagaaaggttgagctatagcctaaagggagagacacataaatagtttctactttctattcatagatagatggctggcccaattatgagacctcagattgtgctatttggctcctccataattcanatgagcttcgacaatggtggttggggtgctattctagctaacttgtacgctaggagggcggacatcatcttaagaggatactctggttggaattc

SEQ ID NO: 269024 - DNA, 424 bp, Glycine max
gaaaaagagagctgagaagccagaagttcgagatgcagctagggaagctgctcttcgtgaaattaaggagaggatcaagaaaacaaaggatgagaagaaggctaagaaagcagaagttgcttccaagtcgcaaaaagcaggagggaaaggcaatgtttctaagggtgctatgcccaaaggtcccaaacttggcggtggaggcgggaaacgctgagcttttagttttgttcctaattttggctacaatttaaatagttgttttgacactgctgtactgatatttcatttggaagattaatcttttattttactgctttactaaacctgtgtttggatattcagaaggtacttggttattgaatggatttcgcaatctgtgcctagtttttattctttttacgccaatcatccctgacgttattcc

SEQ ID NO: 269025 - DNA, 414 bp, Glycine max
ccaccgtgcaccacgtggctcacgagtctcaccaccacaccccccattccgctttctcctcccacaacaacgcaccccccaccactgttcatcacgtgagccaccaggttaacaccggtggtctctcgaccaaacccactgtcagggttttcaccaaagctaatcccaatttctctctcaccattcgtcgcggccaagtcattctcgctccctccgatcccaccaatgagtaccagcattggtataaggatgagaagtacagcacgagggtgaaggatgaagaggggtgccctgctttctctttgatcaacaaggccactggtgaggccttgaagcactccatcggtgctactcatccagttcggctgataccttacaagccagactatcttgatgagtctattctttggactg

SEQ ID NO: 269026 - DNA, 401 bp, Glycine max
gctgaatcgaatctccgaagatggccgcgagcgatcgcacagtgttgcaattctcttcatcatcttcttcttcgcagagcttgtccgcgaaggtccaccctctggtcatcttcaacatctgcgattgctacgttcgacgccctgaccaagccgatcgcgtcatcggaaccctactcggctccgtccttcccgatggaaccgtcgatatccgcaattcctatgctgttcctcacaacgaatctatcgaacaggttgcgttggatatagagtaccaccacaatatgttaatatcccaccaaaaagtgaatccaaaggaaatcatagtaggatggtattcaaccggtcttggagtaacaagtggtagtgcattaattcacgagttttattctcgagaagtcccc

SEQ ID NO: 269027 - DNA, 469 bp, Glycine max
gagataactagaaacagtgtgatgaaaatgaaggtccttgttttcttcgttgctacaattttggtagcatggcaatgccatgcgtacgatatgttccctctccgaatgaacactggctatggtgcccgtactccggaggtgaaatgcgcaagttggaggcttgctgtggaagcacacaacatctttggctttgagaccattcctgaagagtgcgttgaagcaacaaaggaatacatccatggcgaacaatatagatcagactccaaaacagttaaccaacaagcttacttttatgccagagacctcgaagtccatcccaaggacacatttgtgttcagtatagatggcaccgtactctctaatattccatactacaaaaaacatggatatggggtggagaaatttaactcgaccttgtatgatgaatgggttaacaagggcaatgcaccggcactgcccgagactctta

SEQ ID NO: 269028 - DNA, 426 bp, Glycine max
gcagggatggcctccactctctctatatcctcttcatccacccttgttgatgccaagcctccaactccaagacaatgcgtcacccttgccactcttccccctccaccttttcactctcagactcgtccttggaagaccactgctttctgtcgtaggcttgctcgcaattttatggcaatggccaccacaagagaggcagccgcagcagaagttgccgccacaactgacctctctattgccgagacgccagagattgtgaagactattcaagaagcttgggacaaagttgaagataaatatgcagtgagttcactggccgttgctggtgtggttgcattggtgggctcagctgggatgatctcagcaattgataggcttcctttaattcctgggcttcttgaggtcgtaggcattggctacactggg

SEQ ID NO: 269029 - DNA, 360 bp, Glycine max
cggacgcgtgggcggacgcgtgggaaaacttgctatagcagtaagctataactcatttgaggctctgtgagaattgagaaatggctaaagatgttgaggttcaagagcaaggaggagagtactctgccaaagactaccatgaccctcctccagcacctttgttcgacccagaggagctcacacagtggtccttctatagagccctcatcgctgagttcatagcaacccttctcttcctttatgtcactgtgctcaccattattggctacaaaaggcagactgatacaacggtaggtggcaccgactgtgatggggttggcattttgggcatcgcttgggcctttggtggcatgatcttca

SEQ ID NO: 269030 - DNA, 286 bp, Glycine max
atgctgtccacccgttcgcgaacagcgtgggcggacgcgtgggaaaactttctatagcattaagttataactcatttgaggctctgtgagaattgagaaatggctaaagatgttgaggttcaagagcatggatgagagtactctgccaaagactaccatgacccttcttcagcacctttgtttaatccagaagagctcacacaggggtccttctatatagccctcatcgctgagttcatagcaacccttgtctttctttatgtcactgttgctaccattattggct

SEQ ID NO: 269031 - DNA, 472 bp, Glycine max
  unsure (1)..(472): unsure at all n locations
gtgtgatgaaaatgaaggtccttgttttcttcgttgctacaattttggtagcatggcaatgccatgcgtacgatatgttccctctccgaatgaacactggctatggtgcccgtactccggaggtgaaatgcgcaagttggaggcttgctgtggaagcacacaacatctttggctttgagaccattcctgaagagtgcgttgaagcaacaaaggaatacatccatggcgaacaatatagatcagactccaaaacagttaaccaacaagcttacttttatgccagagacctcgaagtccatcccaaggacacatttgtgttcagtatagatggcaccgtactctctaatattccatactacaaaaaacatggatatggggtggagaaatntaactcgacctttgatgatgaatgggttaacaagggcaatgcaccggcacttgccgagactcttaagaattacaacaagctggt

SEQ ID NO: 269032 - DNA, 422 bp, Glycine max
tcgcccacgcgtccgcccacgcgtccggttgattagggtttcttcgggtgctaatgctcttgttttctcacagtcacacagcaatggaagcaatcacagagggagtgaacaacatcaacatctccgattcttacaagaagaatcgcattcaggtctccaacaccaaaaagcccctcttcttctacgtcaatctcgccaagaggtatatgcaacagcataatgaagttgagctctcagcactaggaatggctattgctacggtggttactgttgctgaaatcttgaaaaacaatgagcttgctgttgaaaagaaaatcacaacatcaacagttgacatcaaagatgattctagaggcagacctgtccaaaaggccaagattgaaatattactggggaagactgaaaaatttgatgagttgatg

SEQ ID NO: 269033 - DNA, 365 bp, Glycine max
gttatgagaagctgaaccttcctctgcacaatctccttctaaaagcttctcatccatggcgaaaacgctcatttcgtctcaatcgttcatcggcacaccgctcccctcactccctcgccaccacctcccccaccgcaccaggctcgtcgccaccaaagtcctcgtcagcctccacgaaattcccccaatccactccataagccgcaacattgacttcgccggaatcgtgactagagccgaaggccttctctacacgctcgcccatgctgcggttgcagcggaccctgcggttgctgcggactctgcggcttccaccaccggtgcttgcgaacagaaaagcggaggctggttcggcttcatcttcg

SEQ ID NO: 269034 - DNA, 449 bp, Glycine max
tatagcccaagccctatacaaccaaaccctaacacacacccatttgattcagtttccatggctagcctcaaggttgcatttttggctgcagtgctctgcatggttgtggtgagtgcacccatggcacatgcagctatcacgtgcgggcaggtgacgagtagcctggccaattgcatcggttacctccagaagggaggaacgccgtcgtcgggatgctgcaacggagtgaagagcctcaatgccgccgccaagaccaccggcgaccgccagacggcgtgcaactgcctcaagtcggccgccagccaaatctccggcttcaacgccaacaacgccgtctcgctccccggcaaatgcggagtctccatcccctacaagatcagcaccttcaccaactgcgctaccatcaaggtttgaagagaaagtcatgggcgcacgaaaccggaaactac

SEQ ID NO: 269035 - DNA, 384 bp, Glycine max
tcgtccacgcgttcgcccacgcgtccgaatcgatcattacttcacttcactaatacatcatggcagacgagacccataacaagtatgagagctctgaggttgaggtccaggatcgtggtgtttttgactttctcggttagaaaaaggatgaagaagacaagcctcatcctcaggaggaggtcatcgccaccgagtttcaaaaagtcactgtctcagaccaaggagagaacaagcacagcctcttataaaagcttcaccgatctgacagcagctctagctcttcaagtgaggaggtaggagaagatggtgagaaaatgaataagaagaagaatgaaaagaaagggcttgaagagaagatcgaggagaaaatagagggtgatcatt

SEQ ID NO: 269036 - DNA, 433 bp, Glycine max
gtgaaaccatctccaatgccagacagctggaagctgagggagatatttgccactggtattgtgctaggaagttacatggcactaatgacagtagtatttttctggatcatgaaggataccgacttcttctcggacaagttcggtgtgaggtctataaggaacagccccggagaaatgatggcagccctgtacctacaagtcagtatcataagtcaagcactaatttttgtcacaaggtcccgcagctggtcctatgttgaaagacctggtcttcttctactgagtgcttttatgattgcacaactggtggcaacttttctggcagtatatgctaactggggcttcgcaagaattcagggaatgggatggggttgggctggtgtaatctggctctacagtttagtgacatatatccctcttgatatactcaaat

SEQ ID NO: 269037 - DNA, 355 bp, Glycine max
  unsure (1)..(355): unsure at all n locations
gccaagtgaaagtgagaaaaaataaaaatcaaagagcataatgtcagggatcattcacaagattggggagacccttcatgtgggagggcacaagaaggaggaggagcataagggtgagcaccatgctggagaatacaaaggggagcaccatggtgaacacagtagtgagtacaaaggagagcatcatggtgaacacaaagctggagagtaccatggtgagcacaagccagagcacaaagaggggttcctagacaaagtcaaggacaagatccatggtgagggcggcgccgccgagggcgagaagaagaagaatgagaagaagaagaatgagcatggncatgagcatggncatgac

SEQ ID NO: 269038 - DNA, 476 bp, Glycine max
gctgaacgcagaaaggggaaaaaggggattagggtttaggaagcagcgacaacaatggatttcacagcggagaagaaggaatcagagagcaacaccgaaaatgctcatccaacaactttagattcttcttctcaattggcatcggcacttgattccagcaacaaagaaatcgaagaacgacaagctcgtgaactcaaagccggtcttcaccccctcaagcacaagtttgtcttctggtacacgcgccgaacacctggagttcgaaatcaaacatcatacgaggacaacataaagaaaattgttgaatttagtacggttgaaggattttgggtctgctactgccatcttgctcgtcccgcttctttacctagtccaacagatttgcaccttttcaaggaaggaatccgtcctctatgggaggactctgctaactgcaatggtggtaaatggattatacgattcaaaaagggtgtctc

SEQ ID NO: 269039 - DNA, 463 bp, Glycine max
catttctttttttctcgtccatcccgtaaccatgtctcagactgttgtcctcaaagttggtatgtcatgtgaaggatgtgttggagcagtgaagagagttttaggaaaattggatggtgtggaatcatatgacattgatttgaaggaacagaaggtggtagtgaagggaaatgtccagccagacacagttcttgcgaccgtttccaaaactgggaagaagactaccttctgggaaggtgaagcagcagcatccgaaactagcacagcaactgcctagaacatttcgctctattctgttcagaagaagtagctgcgtaaatcaaatactattttatggacttgaaataacgatgggacttgttatctggtgtattttagtgtgtcacaacaaagattgcttgatatgactgctttcaacatatgtgctactgtattaatgtgcttttattgagagtttaacttc

SEQ ID NO: 269040 - DNA, 479 bp, Glycine max
  unsure (1)..(479): unsure at all n locations
aagaagagaaggggaaaaggaaaaaaaggcaaaatgggtaaggatctgagcgatgagcaagtgtcttcaatgaaggaagctttctctttattcgacacagacggtgacggtcggatcgcgccgtcggagctggggatcctgatgaggtctctgggagggaacccgactcaggcccaactcaaagccatcgtggccgaagagaacctcacggctcccttcgacttcccccgattcctcgatcttatggccaaacacatgaaacccgaacccttcgatcgccaactccgcgacgccttcaaggtcctcgacaaggactccaccggcttcgtcgccgtctccgagctccgncacatcctcaccaacatcggcgagaagctcgagccctccgagttcgacgagtggatccgtgaagtcgacgtcggttccgacggcaagatccgctacgaggatttcatctccagaatggtcgccaagtaacg

SEQ ID NO: 269041 - DNA, 428 bp, Glycine max
tcgcgccgtcctcaccatggcccttgccgtgttcggaaacagcgcccctaagaagtacgatgaggtcgacgccgtcccctcaccgtgcgcgccgacgctgcaagttcgagcgcaagaagccccacgtgaacatcggcaccatcggccacgtggaccacggcaagaccaccctgaccgccaccgccgagtacgagaccgagaaccgtcactacgcccacgtaggactgtcctggccacgcggactacgtcaagaacatgatcaccggcgccgtccatatggacggcgccatccttgtcgtatacagagccgactgtcccatgccccaaaccaaagaacacattctcttagccaagcgagttggtgtccccaacatggtcgtctttctcaacaagcattaccaagtttacgacgaatagctttttctact

SEQ ID NO: 269042 - DNA, 466 bp, Glycine max
cccacgcgtccgcccacgcgtccgcaaactgttgctgtgggagtcatcaagaacgttgagaagaaggatcctaccggagccaaggtgaccaaggctgcccagaagaagaagtgaatcgtgcgggctggttcatcaggggatgttggttacaataaatgttggtttcttttctgtactcttgtgtcttcttttctaggtagcttgtttttcggacaaagtttgaagtctccaccatcatctcgcaactgttgttcccagaactgggttcttgatcgacggtggcaaaattgcttttatttatctgtgttttaatgtgttgtgtttgtcggaacccctgattacatttttgttaagcgcagcgagtttcaagactttgctgcgttgtgttgctttggtttattaaatgtcaactttctatttgtagtgttcaatttttggcttggcttgctctgtctttaaaaagaaa

SEQ ID NO: 269043 - DNA, 472 bp, Glycine max
cccacgcgtccgaacaaatcaaagccatggccacctccaacttctctattgttctctccgtctccctagccttctttttggtgctacttaccaagtcacactcgaccgataccgtttctttcaccttcaacaagttcaacccagtccaaccaaacattatgctccaaaaagatgctagtatttcatcctctggggtgttacaactcaccaaagttggcagcaacggcgtgcccacctcgggatctctcggtcgtgccctttacgctgccccaatccagatttgggacagcgaaaccggcaaggtagccagctgggctacatcctttaaattcaacattttcgcacccaacaaatcaaactcagctgacgggcttgccttcttcttggcacccgtcgggtctcagccccaatccgacgatggatttcttggtcttttcaacagtcccttaaaggacaagtctctccaaaccgt

SEQ ID NO: 269044 - DNA, 406 bp, Glycine max
  unsure (1)..(406): unsure at all n locations
gggtttttgagtgcggtgcggcgatcctagcactctcttctgcagctttcgccgacagcttcattcaccatggctgagcaaaccgagaaggcttttttgaaacaaccaaaagtgtttttcagctcgaagaaaactgggaagggaaagagacccggaaagggtgggaaccgcttttggaaatccattgggcttggatttaagactcccagggaagccatcgaaggaacctacattgacaagaagtgccccttcactggcaatgtttccatccgtggccgtatcttggctggaacatgtcacagtgctaagatgaacaggactattattgttaggaggaattatctncattttatcaagaagtaccagaggtacgagaaaaaggcactccaacattcctgctcatata

SEQ ID NO: 269045 - DNA, 388 bp, Glycine max
cccacgcgtacggtggtttttttatctgtaggacgatagttttgaaaagacagattgcctatcttcgctttaatctcaggcgaaatacgatcggggggtgccaattcaaaaccttccggtaaaataagaacagcccccacattcaaagctccctttttaccattagcaagaacttgcttcacttgcatatcataaggaattcgtacaactgcttcaaatacagtatcaggaagtaccgcttgtggaacctcaatatccacgggcttattagctaaatggcaattggcacagacaatacgaccgggtggcttctcgggggattttcatacccttgctgggcaaaaatgggtttgccgttggaaaggggggctggaataataagtttttt

SEQ ID NO: 269046 - DNA, 476 bp, Glycine max
tctatgtgtccgtcgagtccttcgtctcacattcaaaggaggatctctcttgcgtgttctatacgtttgcggtatgtcctccaaccgaattctgaatgagctgacggattccgacaaagatcctccaacatcttgcagtgccaagcctggtgctgctgaagatatgtgccataggcaagctacaattatgggtcctgcagacagtccctatgcacgaggtgtattcctagcgaccattcattttcctccagagtatccctttaaggcacccaaggttgcatgcacgacaaatgttgtccacccaaatatagatagcaatggaagcatttgccttgatatattgaaggagcagtggagccctgctataaccatttccaaggtgttgcatctaattaggtccctattgacggatccaaatcctgatgatcctttggtccctgacattgcacacatgtacacgacagatctgaacaagt

SEQ ID NO: 269047 - DNA, 453 bp, Glycine max
cccacgcgttcggtttcactttctttgcatagggcaacctcctttctctgtgactctgagtatcgtatcgtgttattattatttctaattctctcttatcacgtccattgaatatgtctatgtcgttggatcttgctcccaagggtggcttcagttttgatctatgccgaagaaacgcaatgcttcaaaacaagggcctcaaagccccaacctttctcaaaactggcaccactattgtcggcttagttttccaggatggtgtcattcttggtgctgatactagggcaactgaaggacctatagtggctgataaaaactgtgagaaaattcattatatggcacccaacatatattgctgtggagcatgcacagctgctgatacacaggctgtaacagacatggttagctcacagctgcaattacatcgctaccatactggtccagaatcaagag

SEQ ID NO: 269048 - DNA, 342 bp, Glycine max
cccacgcgtccgcccacgcgtccgcggacgcgtgggcgctttttgagccggaagggttcggcaccaccgggaacaagacgatgcagatgatggagatcgccggcttcttcggacacgtcggcagcaagacctcttgtggttatggagtggccactggaggacctttggcctggggtctttgttacaatcatgaaatgagtcctatgcagtcatactgtgatgactacttcaaactcacatacccctgtactcctggtgctgactactatggacgtggagccattcccattttttggaactacaactatggtgctgtcggagaagctctgaagattgacctac

SEQ ID NO: 269049 - DNA, 441 bp, Glycine max
acgcactcatataatactctgtatcatttcatttcgataatcatccatagctactgaagaaaatggcaaccatctctgctgctatcacaaccccatcgatctcccgcgcaactcttgtgcaaaagcgggtctcatctcccgttcttggtttgccagcaatgggtaaggtgggaagagtgagttgctccatggaggaaaaaccttattctgtgaaggaaagcagctctagcatgttggggatgggggcatctctgatggcagctgccagcgctgcagccatgtcaggcccagccatggccttggtagatgagagactgagcactgaaggaaccggacttccctatggcctcagcaacaatcttcttgcgtggatccttttcggcgtctttggtcttatctggactctctatattgtctacacttccactctcgaagaggatg

SEQ ID NO: 269050 - DNA, 476 bp, Glycine max
gatgacaggtgggatgtttggaaggaaggggcaaaagataaaggggacagtggtgttgatgccaaagaatgtgttggacttcaacgccataacctccgtcggaaaaggcagtgctaaggacaccgccaccgatttcttgggcaaaggcttggacgcattaggtcatgcagttgatgctctcactgccttcgctggccatagcatctccttgcagcttatcagtgctactcagactgatggtagtggaaaaggaaaagttggaaacgaagcctatttggaaaaacatcttccgaccttgccaacgttgggagcaaggcaggaagcattcgatattaactttgaatgggatgctagttttggaattccaggagcattttacatcaaaaactttatgactgatgagtttttcctcgtcagtgttaaactcgaggacattccaaaccatggaaccattaaacttcgtttgtactcatggg

SEQ ID NO: 269051 - DNA, 420 bp, Glycine max
  unsure (1)..(420): unsure at all n locations
ctctgccactgccatcagcattctcaacacctcctccctcactcactcatcaatggcatcaacaatatcagcaatggccatgatcaacgccaaatgcgtcaacccaaagttccccaaccccaccaagctcgtaccatcaaaaccttcccttcaggtcaacncttccaaagggcctaatagcctcacccgaaaacaccaaactttccactgcgacagcaatcgcaggagcaatattcacaaccctcggaacctgcgacgccgctttcgccgttcaacaaatagccgacatagcagaaggcgacaaccgcggtctggcactgttgctgcccataattcctgcaatagggtgggttctgttcaacattctgcagccggcgctgaaccaactgaaccgcatgcgcagcaccaaaagcgtgatca

SEQ ID NO: 269052 - DNA, 350 bp, Glycine max
acgcatggctctaccagactcttctacccggcgcaacttcctgaacccctccttcatctactcctcttactgcaaaacgctccctatcgaccacatgctcaacaccgccttcgctgccgacgacgacggtcccttcccgtcggcggccaatcttgacgccgcatcgcatggactcatgattccctctcccagcgagtcactcaagatcgaattatactctcacggcttatacgccgcctgcaccggcggtggaatcctcagctgaggcctcactcacatgaccgtcactcctcttgacctagacaagtgtaacatgcagattgaccctgctaagtgcaagagcatctcgt

SEQ ID NO: 269053 - DNA, 240 bp, Glycine max
  unsure (1)..(240): unsure at all n locations
cccacgcgtccgctcctcataagattaatacaacctcaaaaagagttctttcaaaatgcaaacagccttaaccttcgctgcccccaacgttgtgccattggcacccacaaagagtgtctcccatattaccatctttcccaccaaattgaaagccccgcgcttctcacctcgntactctccgattagggttgcaaccgtggagcccgacacttcaactgtcgactacaactttgcggtctt

SEQ ID NO: 269054 - DNA, 380 bp, Glycine max
acgcgtacgcgtaatgctgccagggccaactagcggccctttcatgtacgatcaaaaactgctatacaacgacatcgagagggattcaaaggcttttcttgacatggttgacgtgaaagacacatccacgatagagctaatggaagaccctattagtcaagagaagatgttgatatagagaatatagaatgctaagatggataaagctgcctcgaccatctcagagctcaccttggaaatagatagacttgcagggagggtatcagtctttgagtcaattattagcaaatgtgggaaagttcttgaaacagatgctcataatctgattgagttattgatgaatcaggagctcataatggatagcctgatggctcatgggg

SEQ ID NO: 269055 - DNA, 456 bp, Glycine max
cccacgcgtccggcacaacgaaccactctgaagccgctcacgttatccacaacactctcaaccctgcttaaaccctaaccaatccaaccatggcttcttcttccaccttcactgcaatgtccgcctgcaagctctcctcctccgccgccatctcctccttcccctcccgccgccgctccaacgccgtcgttctgtcgaggcgcagccgcgccgccagggtctccgccatggccaaggagttgcacttcaacaaagacggcaccgcaattaagaagctccagagcggtgtgaacaagctcgcggatctggttggggtcacgcttggtcccaagggaagaaatgttgttctcgagagcaagtatggctcgccgaaaatcgttaacgacggtgtcactgtcgctaaagaggttgaattggaggatccccgtgagaatattggtgccaagttggtgagac

SEQ ID NO: 269056 - DNA, 478 bp, Glycine max
cccacgcgtccgcccacgcgtccgttctcatttcaatttgcatttgcatttcatttggcgttttgttgctttctggaagcttcacttcggcatccatggcgtcgtttgaagaagctcctcccggaaactccaagaacggcgagaagatcttcaagaccaagtgcgctcagtgccacaccgtggacaaaggtgccggtcacaaacaaggacccaatctgaatggtttgtttggaaggcaatctggcacaactcctggatattcctattctactgctaacaaaaacatggctgtgatttgggaggaaaagaccttgtatgattacttgctcaaccccaaaaagtatattccagggacaaagatggtgtttcccggtcttaagaaacctcaggaacgtgcagatcttattgcatatcttaaagaatccactgcataatgattaaattttcatacatgcagttatgcactttactttcaaag

SEQ ID NO: 269057 - DNA, 418 bp, Glycine max
  unsure (1)..(418): unsure at all n locations
caacaaccacatgccatggcaacagcgtcaatgtgtatgagcttcaacctggcaacagcattcaagggtctctctttatcttcttcttcatcgttcttcggtggaagtagtggttctctccgcgcgggtcctgcctcggtggtgtcgctgccccggcgctgcccgctgaccatagagaacgcgcacaagaagggggcggtcagcaccaagaacggccgcgactcgcatggcaagcgcctcggagtcaagatttacggcgaccaggtcgccaagcccggctccatcatcgttcgccagcgctgaaccaagtntcatgcaggaaagaatgtggggcttggcaaagactataccattttctccttgattgatggagttgtaacatttgagaaatatggacctgacaggaataaggtgagtg

SEQ ID NO: 269058 - DNA, 473 bp, Glycine max
atcagagtgcccttctgaatgcacaagaagatgtagccagacacagtaccacaagccgtgcatgttgttctgccaaaaatgctgcaaagcgtgcctttgtgttcctcctggctactatggcaacaagtctgcgtgcccctgctacaacaactggaagaacaagcgtggaggacccaaatgcccttgaaaattgaaattataaacatgatttcacctacaattttatattactcaaagtggaactataaactatatatggccattgctatatgtttaggtatcacctactacaatagggtataccatcttgttctctatcatgaaattaattcaattattaatttaatgaaaaaacctatatgttattccctttcctaaacaaatatgagaggggtgttctccttattagtcaatcatctttgtcattgttctttttggagtattatatatagtgaatttggagtattatatat

SEQ ID NO: 269059 - DNA, 365 bp, Glycine max
accacgcgttcgttcactcgtccgagatactaataccacactttactgagataaatacgacaccactgacatacggcactaacgaatcagtccgatatggcgtgcacgaagcacaccgctcgaaagacgaacgtcggcacggaggcacgtcagcagctcgctaccaaggccggtcgaatgaacaagccggagaccttcggactgaagaccgcggagctgttgaagctgagaacgcgccagatgagggacatgctaatgatccagaagatcacagagcatatgatcgtgagacatacattgcagaagctcatgacagatatgcggcaccagagcaagactgatttgcgtctccagaacactgctga

SEQ ID NO: 269060 - DNA, 414 bp, Glycine max
  unsure (1)..(414): unsure at all n locations
acgctatcatgtgcctatgctggaactggataggtgcttacggttcaaaatctgacgggtccttgaccacagcaggttgatgcaggtgcaactcacgagtgtcctgctgcgcttggaatagctatggtcgctatggctgaagaactaggactcgacatggcaattcaatcattagaacatcttctacaatatggagagcataatattcgccgagcagttgctttggcacttggtctactctgtatatcaaatacaaaggtcaatgctatggataccttaagcagacttagccatgatactgattcagaagtagctatggcagctgttatctacttgagtctgataggtgctggaacgaacaatgctcgaattgctggcatgcttngcaatctttctagttattactacaaggat

SEQ ID NO: 269061 - DNA, 288 bp, Glycine max
agcgaagacatgtaattggagaaaatgatgagtttatagggaagaaggctgtctatgctttgagtgagggtctaggtgtgatagcatgtattggggaactgttacaagaaagagaagctgggaaaactttcgatgtttgttttcagcaattgaaggcttttgcagatgtagtgccaagttgggataatatagttattgcatatgagcctgtatgggcaattggaactggcaaagtggccacacccgagcaagcccaggaagtccatgcagctgttcgtgactggctta

SEQ ID NO: 269062 - DNA, 301 bp, Glycine max
gcaggtcgagcaggcgtacgcttcaaaaccgtactcagtcaatatgtctatgtttacggtactagatttgaccgtaacatgacacaagaaggtaatggcaacaccaacttctgcgtgagtgttaacaacaacggctacattagcgctaatgacccgttgaactgtggcgcggcagcggatgcgatagccggtagccacctcgacaaggtcaagcgcatggtgtaggagtacctgaggccgttcgtgaagctcggccgctagaccctgacgatctctcatatggcgacgatcgcggtgcacg

SEQ ID NO: 269063 - DNA, 240 bp, Glycine max
tggaaaactgttcatttgcaaggctcaagctggagacaagaggtggttcaagggagcaagaagatttgtggagagtgcagcaagttctttcagtgttgcttaaaaatcttcaataatagctggttatatatatctgctatgtgtaaatctaccttaagtgctatctatgtttgaagttgtctaacctcccttttgtccacgagtttcataattttaagggacttggttggattaagtatc

SEQ ID NO: 269064 - DNA, 409 bp, Glycine max
cgttcaagccgagcttgtgaatggacgttgggccatgttgggtgttgcaggaatgctacttcctgaggttttcaccaagattggaatcatcaatgcccctcaatggtatgatgctgggaaatcggagtactttgcttcatcgtcgaccctctttgtgatcgagttcatcttgttccactacgtcgagatccggagatggcaggacatcaagaaccctggctctgtcaaccaagaccccatcttcaagcaatacagcttgccccaacatgagtgtggataccctggtagtgtgtttaaccccttgaactttgcacctactttggaggccaaggagaaagaacttgccaatgggaagatggctatgttggcattctttggattcatagttcaacacaacgtgacaagcaaa

SEQ ID NO: 269065 - DNA, 467 bp, Glycine max
gtcgttatgttgtccaacaacttgctaaaatgggatctcaagtcctagttcctttccgaggctctgaagataatccccgtcatctcaaattgatgggggatttgggacagattgtacccatgaaatacaatccaagggatgaaagttcagtaaaagctgtgatggctaaggccaatgttgttatcaaccttattggaagggattatgagacaagaaactacagctttgaagaagtgcactatcacatggctgagcaactagcaaagatttccaaagagcatggtggtatcctgagatttattcaagtttcttgtttaggtgcatctccttcatctccatctaggatgctcagaactaaatcagctgctgaggaaatgattttaagggaactacctgaagccacaatcttgaaacctgctgtaatgattggtacagaggatcggattttgaatccatgggctcatttt

SEQ ID NO: 269066 - DNA, 477 bp, Glycine max
  unsure (1)..(477): unsure at all n locations
atgatgtgggaacacagtacagatctggaatatactactacacgccggaacaagagaaggcggccaaggagtcgttggaacaacagcagaagcagttgaacaggaagattgtcactgagatccttcctgccaaaaagttctacagggcagaggagtaccatcaacagtaccttgagaagggtggccgatttggtttcaagcaatctgcttctaaaggctgcaatgatccaatccggtgctacggttaattgtcataagtgaattgccatcaaagatcaatgtgaccggttctttagacgttgaaattccatagttttgttagtaagtatttgttaatatatcaacaaagcttgtgcacattgtatttgaggttgaagatggacatagccatatattcagntggagagttgtatattgtctttgatatataatatgactttgcttttgaaaaaaatatattattttttaatcttttat

SEQ ID NO: 269067 - DNA, 457 bp, Glycine max
  unsure (1)..(457): unsure at all n locations
ctttttctcaacaaaaaggggttcaattctagctagttctattacgtcgtccgcgaccatgaacatggcgatcgcgcttctgttcatggttttcgcagtttcatcagctttagacatgtcaataatatcacacgacaacgctcatgcggatagggccacgaggcgcaccgacgaggaggtgatgtcaatgttcgaggagtggctggtgaaacacgacaaggtgtacaacgcgctcggtgagaaggagaagaggtttcaaatcttcaagcacaatctgcgcattatcgatgaacgaaactctctgaaccgaacctacaagttgggactcaacgtgttcgctgatctcaccaatgcggagtacagagccatgtacctgcgaaccttggacgagggtccgaggttgggcttggatacgccgncaagaaaccactacgtgccacgtgttggagataacata
